United States Patent Application Publication US 2011/0014706 A2 - sequence listing, part 57

SEQ ID NO: 180440 - DNA, 3189 bp, Arabidopsis thaliana landsberg
atgacagctggtagctttgtcatgttaatcacctttgtatttgccggttttgccatcccatatagtaagatttctttttgctcttctcttttgagttctgttccaaaagctccactaaaatatgacagcggtttggtgcagccgatatgccggggtggttgaagtgggggttttgggtaaaccctataagttatgctgagattggactctctgtaaacgagtttcttgctccacggtggcagaaagtgactctctcttcccttgcttgtttctcttaatcatccaatatctcttcattctccaaaactgacttaataggtttttgggttatgtttgtagatgcaacccacaaatgtcaccttgggacgcaccatacttgaaagcagaggactaaactatgatgattacatgtactgggtctcactatctgccttgttgggtcttactattatcttcaacaccattttcactctagctctgagtttcttgaaatgtaagttaaaatctcccccggtgttggtgctgtacaggaggctcaaaactgaagagcttctttaatacttgacagctcccacgtcatctcgtccaatgatttctcaagataagctctctgagctgcaaggaacaaaagattcatcagtcaagaagaacaagccactagattcctcaataaagacaaacgaggatccaggtgaaatatattgtctttctttctattcacacaaattctttcttctccatttccctcaacctaataatgtctttgcggatcaacagggaaaatgatcttaccttttaagccactgaccataacatttcaagacttgaactattacgtcgatgttcctgtggtaaaagcttctgttcgttcttggttaacaaaaaaccattttaactgcattaaccatcaaagtgtgtaatctcattctcaggagatgaaaggtcaagggtacaatgagaagaagttgcagcttctctcagagatcaccggagcttttaggcctggtgttctaacagcgttgatgggaatcagtggagccggaaaaaccactttactcgacgttctagccggaagaaaaacaagcggatacatagaaggcgagatcagaattagtggtttccttaaagtccaagaaacattcgcaagagtctcaggctactgtgaacaaacggatatacactcaccaagcatcacagtcgaagaatccctaatttactccgcttggctccgtctagttccagaaatcaatcctcaaaccaaaatcgtaagccctaattctacagagcatcaaaactgtgacctagaaatcgaaataaagaaatcacttgtgaaaattcgtgcagagatttgtgaagcaagttctggagaccatcgagcttgaggagatcaaagatgcgttggtgggagtggcgggagtgagcggattatcgacggagcagaggaagcggttaacagtagcggtggagttggtggcgaatccgtcgattatattcatggacgagccaacgactgggttggacgcaagagcagccgccattgtaatgagagctgtgaagaatgttgctgagactggacgaaccattgtctgcactattcatcagcctagcatccacatctttgaggccttcgacgaggttcgaatttcgaaattttacaatttctataacgaaacatttataaatatatactagtcatatcataatgttttctgtttcagttggttcttctgaagagaggtggtcgcatgatttatagcggaccacttggacaacattcatcttgtgtcattgagtattttcaggttagctttctgcacaagtaataaaaagtaattagggtttgattgttttataagtaacctatttattttgttggtggtgaataacagaatattcctggagttgctaagatcagagacaagtacaatccagcaacatggatgctagaggtgacttcagagtctgtagagactgaactcgacatggatttcgcaaaaatctacaacgaatcggatctttacaagtgagtagagtataactcatttatggctaggtttgtgttagctttatgaacgtgactaatgagctcatgtgttgttgtttcttcaggaacaactccgagcttgttaaagagctgagcaaaccggatcacgggtcaagcgatttgcatttcaaaagaacttttgcgcagaattggtgggaacagtttaaatcttgtctatggaagatgagtttgtcttactggagaagcccttcttacaacttgatgcgtatcggtcacactttcatctcttctttcatctttggtctactcttctggaatcaagggaaaaagatgtaagttaccttaaagtccatccaaatcatttcgagtttcattgtactttcttagtaatccacttcttttcgcagagatacgcaacagaatttgttcacagttctcggggcgatttatggtcttgttctcttcgtggggataaacaactgcacttcagctttacagtattttgagacagagcgtaatgttatgtaccgcgaaagatttgcaggaatgtactctgcgtttgcctatgcattggctcaagttgtgactgagataccttacatattcatccaaagtgcagagtttgtgatcgtaatatatcctatgattggtttctacgcgtctttctctaaagtgttttggagtctctatgcaatgttctgcaacttactctgcttcaactacctcgcaatgttcctcatctccatcactccaaacttcatggtcgcagctattctccagtctcttttcttcacgacattcaacattttcgccggattcttgatcccaaaacccgtaagatcttttgaacaagtcatcatcatcatctttaacttattacatactttataatgttttcttgatgtccaaaaatgcagcaaatcccaaagtggtgggtctggttttactatataaccccaacctcatggacgctcaacctttttttctcgtctcaatatggcgatattcatcaaaagatcaatgcatttggagaaaccaagacggttgccagtttcttagaggactatttcggattccatcatgatcgtttgatgattacagccattattctcattgcatttccaattgcattggctactatgtatgctttctttgttgccaaactcaactttcaaaaacgatga

SEQ ID NO: 180441 - DNA, 105 bp, Arabidopsis thaliana landsberg
tgtaaaggtactttgaaatatgaatttcctcgatgtcgaaagttatgtttgatcgttgaatttgatgcgaaaaagacgaggaagaatgatttgagggataagtaa

SEQ ID NO: 180442 - DNA, 321 bp, Arabidopsis thaliana landsberg
atgagtgagattaaagaactcgtgcgtattgatgaaagcgttacacgtaaatctacatctaacacaatggagatctaacgcgtagaaacaaggtcattgtagtatcaagcactcctcatccgttccacacccctcaccttcttttgaacaacatcgttggctttgatgtatgcaacatatatacttctctatgcagagctccaatatcccaacttatgcaacattatgtcctacaatatcgcttccgaagccaaacgagttcatgggccattgtacatctattttcacatcacattaatcccgcaaatcgagactccatga

SEQ ID NO: 180443 - DNA, 87 bp, Arabidopsis thaliana landsberg
gataaatcgctgtcagtctttgagctactcatgggtgtggatcagcgagtgccgatccgaacccaagaaaaacgccaagatctctag

SEQ ID NO: 180444 - DNA, 344 bp, Arabidopsis thaliana landsberg
gtgggcggggtgcgcatcctcgactccgtggtcgactcggtcgtccgtcccgcggtccagcaggccgtccagcaggcacagaagtcggtgcccatgcagcgccagatccaggcgctgcacctctaccagcgcggcaagcggctggtggtcggcgccgacgagccacgcttcaccgagcagccgctcccggacgtggccgacctcgacctcaccgagatcgacacgagcaacccgttcctgtggcggcaggggcgctgggagtcctacttccgccggctgcgcgacgaggcaccggtccactttcgcgccgagagccccttcgggccgttctggtcggtgacgcg

SEQ ID NO: 180445 - DNA, 194 bp, Arabidopsis thaliana landsberg
atggtgattgtgaagaaagtcctaaaccaatcatctgaagatggtgatcagtagctaaagaatgatgatgaagcttatcatggaaaacagcagaaccaccagattcaatagagcttgctctcatggaagaagaagaagatggtgaagaagaagaagatactttccaccagcttcctgagttgatgaaatcatga

SEQ ID NO: 180446 - DNA, 371 bp, Arabidopsis thaliana landsberg
atgcctctgttaaaggaccgtgatggagtgttatttcagccgaacgcatatttaggtgacgaggtaatccatgcttagttgtcatatctggcgacgttgctatgtataagtttttgtactcatcctggtatttctaaccacaacttacacacttgcaggttatagactgttacatcaatttgataaaagctcaaaagcatctaaagtgtcgatctggaggtcgcgttcacatagaaaatgctttccagttcaatttcctgaagcgagatggtgatgttgaaattaaaacagaggagctatatccaattaaagacatatcacacatatgtagcgctgaacgaagggtgttactttacctagaccatgacatg

SEQ ID NO: 180447 - DNA, 64 bp, Arabidopsis thaliana landsberg
atgaacgttaagcagattgatgaaacgttgattgcggaaaacgttgccgtttcaaaatccaatg

SEQ ID NO: 180448 - DNA, 158 bp, Arabidopsis thaliana landsberg
ccaagaacttttgccctctcatatatccattggacagcggcccgtggcaaatagttcaggatgtacccttgatctccctacactctcttcaggtcaagccatccccaaaacccccacactttttctcaaagacagttatccagtgccaacccctcatg

SEQ ID NO: 180449 - DNA, 376 bp, Arabidopsis thaliana landsberg
atcaatatgcacttgagactgaggctaggatatctccacttatcaatgagaagaagagactgttcaatgacttactgacgaccaaaggtgcacatcttccatttccgacgtcattctctatccttacttctattgatattgatcacaccaggtttagattgttctatatgaccctgaatgtatagtttattgtttaatctttcagggaatgtaaaggtattttgtcgagcaagacccttatttgaagacgagggtccctctatcattgaatttcctgataactgcactatacgcgtaaacactagtgatgatactctgtccaatcccaagaaggaatttgaatttgatagagtttatgggcctcaagttggacaag

SEQ ID NO: 180450 - DNA, 120 bp, Arabidopsis thaliana landsberg
atgcaccttttgctatttgaatttggtaagaagatcgttcgtacacaggccaaagggcctggagagcgggaattccttgtcgattcaaaagatatttacaatgcacttaaacataatact

SEQ ID NO: 180451 - DNA, 231 bp, Arabidopsis thaliana landsberg
atctttcccgaagaagaaaacgaagaagagacgaagagagaaatgaggccgatgcagctggatatgttatcggagatggatgatgcaggttcttcgatggccatggacgttgatgacctcgaagccatggagatactcaacgaaggaggacttgtctcagataacaagctcgccgacgccgatttcttcaacaaattcgatgatgatttcgacgacaccgatatcaactaa

SEQ ID NO: 180452 - DNA, 416 bp, Arabidopsis thaliana landsberg
gcccttgcaagggcgacgttaccatccaggtggatggcaatctcctggcgaccacggacctaagccagtacaaggaccatggtaattggatcgagattctacgcgtggataacctggtcatcaccggcaagggaaaccttgacgggcagggcccagccgtgtggagcaagaactcctgcaccaagaagtacgactgcaagatccttcccaactcgctggtgatggacttcgtgaacaacggggaggtgtccggggtcacgctgctcaactccaagttcttgcacatgaacatgtaccggtgcaaggacatgctaatcaaggacgtgaccgtgacggcgcccggagacagccccaacacggatggcatccacatgggcgactcatccgggatcacgatcaccaacaccgtcattggc

SEQ ID NO: 180453 - DNA, 1024 bp, Arabidopsis thaliana landsberg
gagatacactaaattttatggtacttcgccaagagcagcgttggaccttgtgcatgatgcactgacaagtatgtatttgtggtgctgatgttcatgtgtcatatgcttcacttaagttgccaccctgtatggatgtatacctgataatgttgttaactgaaattgttccatgttacacatacacacaatttgtcttccgttttacgtggaatagtgcttatgcattattgaccagcatcggttttcaacttcagattataagaggtgggaggaagatattgaagcatggcagaatcccattctcagagatgaaaggctccctgagtggtaattgctttggaacctaatagatctttgaatactttgctctctcaccgttctgccctgaactattttgtatttttgtaggtacaagttcactctgttcaatgagctttactttttggttgccggtggtacagtttggataggtacacatctatacgcttcttcaaagtcaaactcttgattgtaaaattgtgttcttcgcttttaacaaaattttgttgtttcattattttggtaccttgaaattattgtatcaccttatcaacggtttttggttgcagactcttcttcactcaatgctaatgggaatagtcagcatcaacaatcgggattaggaaattcagatggtaaggtcggtggacttgacattaatgatcaacggaatgaccttggtaatggcaacagcgttggagtaaaaagcaatgatgaagtatcagccattcataaccggaatggtttatttgtcgatactccccatgtagatgatggcgatgatgttggtcggtttctgtatttggaaggtgtggagtatgtgatgtggtgcacatatgatgtacacttttacgcatcatatgcgctccttatgctattcccaaagatcgaactaaacatccagcgggattttgcgaaagccgtgttgtctgaagatggtaggaaggttaagttcctggcagaaggaaatgtgggaattcgcaag

SEQ ID NO: 180454 - DNA, 564 bp, Arabidopsis thaliana landsberg
atgatagatcgaaagaaaaactctcttattacttatattatatacacattttcggagttcgtcatcaaagctttcgggatcaatgtaagaaatattttcttttcttttggttttcaccactaacaatatcaagaaaacatctacttttttcttttttcaaaggtcgcagtagcgtttcagcgtaaaatcatgttgaacacaacgatgtgcatttcaaaccttcccggtccgactgaggaagttagtttccatggccatccgatcgcttactttgctccaagcatctatggactaccacaagtatacttattttgttgttgattacaacttgctaacaataagcttttagattttgtttcggccttttcattctaacatcattttttcttgatttggtaggcattgacaatacattatctgagttatgcaaacaagatgataatttccgtcgctgttgatccaatgattattgacgctcacaagctatgtgatgaactagaggaatctctcaagaatatgaaacttgctctcttaaagaaaggattaccaaatcatgtcaattaa

SEQ ID NO: 180455 - DNA, 637 bp, Arabidopsis thaliana landsberg
gcacatgaaagaaaagttgagaatctgagaggttttatggtgaatttggcgaattcaagaggcttttcccttcctgagactaaactcttccaacagaaattcttggatctgtgtttatcccgtactcctgatcatcccacttattccgctgtatgtatgaaattataacatctattatgtgcatatacacacatacatatctctgctgtgttcttatgactgtatacatttgtttcagatgatatttattgctatcatggatttgaataaagaaggtggcgcaagtgaagatgctatatctgagtttataaagtcgaaatacaagaacttgccatttgctcacacgaatttgcttagtcatcatttagctaagcttgtggagaaaagagagatactttgtgactgcaacaacgactgttactctctcccgggtgagaagaagactgttgcttccactgatgttcagagaaagagcgatctgataacagtgagaacaaatgatcagcgtgcggcggatgaggttatgacttgccaaaacaaggaagaaagtgttgaaattttgaagtctggggatcctaaggttgttttgttggaagaacagagtttgactaaatcccgaaccggctccagtcgttga

SEQ ID NO: 180456 - DNA, 683 bp, Arabidopsis thaliana landsberg
acgtggcttgtggtttggtactatcttcatgttcactgtcatgagcctatagctcattgcgatcttaagccaagcaacatacttctcgacgatgatctaactgcccatgttagcgacttcggtctcgctcgtcttctcctcaaattcgaccaggagtctttcttcaaccaactaagctcagctggtgttagaggaaccattgggtatgccgcaccaggtaaaactattacacatatggaacgtttaaatgaagaatatttatgtgttccttttttcattacaatcttgttgtcgtttttgtgtgtgtgaattatggtgcagaatatggaatgggaggacaaccgtcaatacacggtgatgtatatagctttggggttctcgttttggaaatgttcactggaaaaagaccaaccaatgagttatttggaggaaactttaccctgaacagctacaccaaggcggccttgccagaaagagttttggacattgcagacaaatcgattcttcatagtggtctcagagttggtttccctgtacttgagtgcttgaaagggattttggatgtgggacttagatgttgtgaagaatctccgctgaaccggttggcaacgagtgaagcagccaaggagttaatctcaatcagagagagattctttaaaacccggagaacagccagacgttga

SEQ ID NO: 180457 - DNA, 726 bp, Arabidopsis thaliana landsberg
aacattttggtaaaattcaaaagaaaagatttgttccctctggtgaaaaaagcggcaaggtgttataggctgaatgattttactaacgcgttcaacgagattgaagagcttgatcctctactacatgcataccttcaaagagcgggtgttgaaatgtgggcgcgtgctcatttccccggtgatagatacaatttaatgactacgaatatagcggaatcaatgaacagagcactgtcacaagccagaaatcttcccatagttcgactgttagaagcgataagacaaatgatgactatatggtttgctgaacagagagatgatgcgagcaaacagcatactcagctcacacgtggtgttgaaaaactcttacaggtaactgagctgtaactagtgcataactcagtcgtcgaataacgataaccccgtcataacgagaataactcagccataacgagaataactcagccataacgagaataactcagccataaagggaataactcagccataacttttttgttttgtttcttgtctcttctctctaatagacccgcgtcaactcgtcaagacttctggatgtacaaacgattgatgcttcccgcgttcaagtaacttatggagcatctttgcatgttgtaaatgtggatgaaaaacaatgcacatgccgtcttttcgacaaagagaaattaccatgcgtccatgcaatcgcagctgcagagcatatgg

SEQ ID NO: 180458 - DNA, 281 bp, Arabidopsis thaliana landsberg
gtggcgcgacgtaaagtctcatgcatttaaccatgtaaatcatcgtacgtacgttgacctcaaggtaccttttagtagtaaatgccatgtatgaaatcagaatttttactgagaataaaaaaataaaattatatgtgtataaccaaaaacaggataaatggaaaacgttggttcactcggcaaagatatcagcaaggcaaaggagaggcgaacctgtgcctcaagaccttcttgatagggttttagctgctcatgctttctggtctgaccggaccggatga

SEQ ID NO: 180459 - DNA, 81 bp, Arabidopsis thaliana landsberg
atgagagagacatcgaaggaagaagaagtttttggtggagaagaagagcggtttccacgtcttgcctcctcaaaagtataa

SEQ ID NO: 180460 - DNA, 518 bp, Arabidopsis thaliana landsberg
agatgtctacttcgatgttcggagtcaaggttttgactaccgtgaagtcttcggaggttttaacgatctcgatttagctccgtcgtatgaagaactgtttttgcagcagaagtctactacggtggttggtgatggtgattcctccgacgatgcttggtactgattaaaatcgaaactttatgattcaatttgtggaaaagagccttcttttttaagaattgagctttattttgtttgtaggactcctgaggaagtagagtcatgctcaggtggtacagaacattctggcaaaagtccttgcttttctaatggtagagactcatatgattccattgatggaagtacagagttcaacatttcttataacaaagctagtcagataagcggcggtgagacaaatatgtcctcaagtggtgtgatacgtgtagctgatcttggtgctattcctggttacactgtcgcagttgatggaacaacaaagcttaacaaggtgactgggccatcttctgttggtagag

SEQ ID NO: 180461 - DNA, 143 bp, Arabidopsis thaliana landsberg
tcacggcaacgcggttccgtgaaggaaacggccaagatgcgcagacttgtatttgttgggagtggggaccatttcttttgcacatggttcgtgtaacggctaatgttaaaatgagctttttcaaatacgtcgacgtttgttga

SEQ ID NO: 180462 - DNA, 210 bp, Arabidopsis thaliana landsberg
agaaggcactgccggtcgacccctgtgctggcctataacaagaaagaggttgcctcaaggcaaggaggatcgacatacgggtcaacagacggagacgagcccacaaggacgaacaggaggaggaggagctccgacgagtacctggaggccgaaaacacaaccaaggagattgggatattttttttcctattagataaatttgatatataa

SEQ ID NO: 180463 - DNA, 222 bp, Arabidopsis thaliana landsberg
ctgttctacgacccggtcaagggcatgttccggcccgagcgctacatcaagggcgaatgccccccctgccatgccaaggaccagtacggcgactcctgcgagaactgcggcgccgtctacgcccccacggacctcatcgaaccctacttgaccctgaccaacgccacgcccgtgctgaagtcgaacgagcatttattatttaaactgaccgacccgcgctga

SEQ ID NO: 180464 - DNA, 447 bp, Arabidopsis thaliana landsberg
atgcatgctgatctctcctctgccggcgccaacaggtaccaggaactgtccgataccgttatcaacagcctgccgggtatcttttacctgttcaataccgagggaaaatatatccgctggaacaaaaattttgaaacagtatcaggatacagcggtgaagaactggcgcataagcatccactggatttctttgatgcagaagagaaaaaggtgatagcagaccgtatcagcgaagtatttaccactggcaggtcagaggtagaagccaccttcattacccgcgatggaaggcgggtgccctattatttcaacggtattgcaatagagtttgaaaaccagttatgcctgataggcatgggaatcgacattacacagcgcgttaccgcagaggaagcattgaaggaaaagaacaccgaactgaaacggctctcagcctatcttcagaag

SEQ ID NO: 180465 - DNA, 352 bp, Arabidopsis thaliana landsberg
tggaaggaccggttgaccagtgctcttaaagagatagaaggtggaggtcaggcagccaaagcgaaagatctcttttacaagactaacggaagcattcaggacaaagacagtgtagaagataccaaggtaatttgttcctcgtttgtttatcgatgtgtgtgcatgtgtctctccggttttcttggtttatgtatattgaatacagatttaaaagccaactattaattacaggtatcagtggaagagaatcctctctgtgcaagttctgatgttgcagaaagtaacttaagtaggaaaagatctggatcagaatacaatattgatctaaatggagatgcttccgatggaaaac

SEQ ID NO: 180466 - DNA, 305 bp, Arabidopsis thaliana landsberg
taacttcaaactaaagggtattgagatctgcccagattgcaaccctttaaacagagcaacatctagacaagtaagtgctcagtttcttctaatgagatcattctcctttgggagtaagtgtgttaatcttggtttttctgtgacttcagctattgaattgggcacttgagccagcagaggacgaggtgttggagaggctgtttgagttaggatacgcagatgcagctacatgggctgagatgaatccagttgagggattggtctatgacgatactcctacagctcaagagattcctactagctaa

SEQ ID NO: 180467 - DNA, 78 bp, Arabidopsis thaliana landsberg
atgctacatgggtcaccatgccgagaagctgtgggagaatttcgagttgtgtctgagcatatcggtactagagatttg

SEQ ID NO: 180468 - DNA, 135 bp, Arabidopsis thaliana landsberg
atgcatcccgtaagtttgtacgggtttcagatctaggccggtgtcttcatccgtttcatcaaggggctccaagggtttttcttggccagccagaggattcagtggtcattggctttaattattcccgagcggatg

SEQ ID NO: 180469 - DNA, 99 bp, Arabidopsis thaliana landsberg
tataccaaaagaagtcaaaagaaaacgaaatttactccatcactcgatgatttcacgcgtgctactactttgatagttggtcactacaataagcaatga

SEQ ID NO: 180470 - DNA, 1152 bp, Arabidopsis thaliana landsberg
tgtattgtggaggaagttcaggggccaacaccagcacgctcccgtaaaggtcgatttatttcagggtatgtaatttgatagaacctggaattttctgattaaacaagctgcaatattcattatcttattagctaggaaaatacactgaaactttttttttcttgcattcgtctgtctgacatgtactgtatataggcatgcacatccaggaagtccttatgtatatgggcttgtcggtgttgaccatgatcttgactttcctgatcctatgcctgttgttggtaagtatttcttatggtattttgttagtcagtgatatattattttgcgctacaacctattaaaaatttatatataagtattacatgacttgattttttctgtaagtacagggatatctcgttcagcaagggggtattgtatgatatctattttcgagactatgaaagcatattcgctagatgatggtctaacagaagaagccttagttaccaagctccgcactcgtcgctgtcatcatcttttcttacatgcatcgttgaggcacaatgcatcaggttttgaatactatctttcattctacattgtcttagcatctctgaactgtttaaaatagtgccaataatagaatgtagacgggtgccattttatcctcacatgaacataagtattctcaggtggtagcatatgatctagcaaatactttagagagtctgagacagttacaagagaaatacgattcatgttttgtgtcaacttaattgacttttgagctttgtggtcttttctgatacaattcttgttaattttttattatgcagggacgtgccgctggggagagtttggggaagggggtctactctggggagaatgcagtagcaggaattttgaatggtttgaaggagatactctttccgagctcttatcaagggtcagaacgacggactttggctgctgactaaatatgcaattgtgacatttcagttttgtgaaaaacaactactttctattgttccccctcaggtcaaagatgtttatggtcttgatgatgaagtttcctttagaaatgtcaatgtaccttcaaaaaatcggccacgtccgttgcatcttggaacggctacacaaattggttggcatagttcttcatgctga

SEQ ID NO: 180471 - DNA, 273 bp, Arabidopsis thaliana landsberg
gttgagaagatagtatcaaacacagaagagaagacaacaaccgagacgcctaagaaaaccgttcatggagatgattcagccactgtgattgaagttgaaatcaaaggagaagaagtaccaaaggtagataatgaaactgaaaaaaccgagatagctccggttaaagaggggaaaccagttgaaattacagcagttgtgggggagaaagatgctaaaccggccgtagaatctccggctaaggaggagaagcctgttgacggcaaggcagtgtaa

SEQ ID NO: 180472 - DNA, 47 bp, Arabidopsis thaliana landsberg
atgctaaacaacaacaccaaagctaaaacaaaacttgatattgaaga

SEQ ID NO: 180473 - DNA, 311 bp, Arabidopsis thaliana landsberg
atgtcccttgttaaagcatatgcatcatgcggacagtttgaaaaggcaaattatgtaagcatgcgtattatatgttctttcaaaagttctcgaatgattatattcatgatttagtgtaagagctcaagcttctttgttactttaggtgctcatggacctggaagttccggctaaggatcacaatgagctgaaaagtgtacttatatctgctctggcatcaaatggaaatataacagaggctttaagtatttatgaagaaattgaagaaactccgctgccccgtagagccaaaagctatcttatctcttata

SEQ ID NO: 180474 - DNA, 99 bp, Arabidopsis thaliana landsberg
atggcggtgggtcacggcggtggcgataaagatcgatactacgtcgtttacgacaaatcgggttcgttgacaactattccagagtcaacggagaaagaa

SEQ ID NO: 180475 - DNA, 270 bp, Arabidopsis thaliana landsberg
atgggaggaggagagaagaggaaatctagtttcaaaaacctagctaatgcaaagaagaggagaacaggacctcacttacctagctcaatactcaagaccattgcgaatgagaaacgtcctttgaactctgacgaaggagacgatgagatcgattctgcttacggtgatttttacgagtacgaagaaggtgtgcctgaagaggaatctaggaaaaacaaccgctacgaacgcgtcgttaactacgaattcgagcttgcagaggattgcgag

SEQ ID NO: 180476 - DNA, 752 bp, Arabidopsis thaliana landsberg
atccgtatgaagaagagttgccttctggaacttttacattgaggcaaatcaaattcgctacggatgacttcaatccaactaacaagattggagaaggtggtttcggtgctgtctttaaggtaaagattacgagatgaaataattctttatatacgaagaagttaaagttgtaatgcagttcatgctgacataaaatatcatttgtagggtgtgttagcagatggaagagttgtagcagttaagcaactctcatctaaatcgagacaagggaaccgagaatttctaaacgagataggcgcaatttcttgtcttcaacatccaaatctcgtcaagcttcatggtttctgcgtcgagcgggctcagctattactggtgtacgaatacatggaaaataacagtttatctagcgcattattcagtgagttttttttcttcttccccaccttttgctaatgaaggctttttgatgcttcggctctaagtaaaatgtgtttttgttgcaatgtttaggtccaaagcataaacagataccaatggactggcctactaggtttaagatttgctgcgggatcgcaaagggtcttgcgtttctccatgaggaatcaccgttgaagtttgtacatagagacatcaaggccacaaatattttattggacaaggatttaactcccaagatatctgatttcggattggctaggcttgacgaagaggagaaaacacacatcagcaccaaagttgctgggactatgtga

SEQ ID NO: 180477 - DNA, 112 bp, Arabidopsis thaliana landsberg
atgctactattatcgttctcccgctagtttcaaaaatttgtcaccatttcgaaatctctcagaaagcgagagctcgcgtaaagatttttctccgatcttcaaattcgtgtga

SEQ ID NO: 180478 - DNA, 56 bp, Arabidopsis thaliana landsberg
ataaagtaaatcgtcgctatctagagctacaagaaactcaagaattatggccatga

SEQ ID NO: 180479 - DNA, 119 bp, Arabidopsis thaliana landsberg
ctacgtccttatcgatcccaagtgataatgcaagtaatgaaatggaaaggcgtccaccccggaagcgaaagtttcaggaacttccagctgattgtaaggttccagaaaaagacaaacag

SEQ ID NO: 180480 - DNA, 70 bp, Arabidopsis thaliana landsberg
atggtaagcgccgccgtggcgcgccttgtcctgcgacagcgtctggtagattttccggatgaccggctcg

SEQ ID NO: 180481 - DNA, 650 bp, Arabidopsis thaliana landsberg
atgggagaacagctaaatggtttaagtgttaacgagctaaacagtcttgagaatcaaattgagataagtttgcgtggaattcgtatgagaaaggtacataaatacatatactctaccttctattatatgctttggagtgtattactcaaaagattgactatagaacacaacggaaatcaatagaacgattgcttttccggattcacaggaacaactgttgactcaagaaatccaagaactaagccaaaaggtcactatgatgagatatatatatacacacactgacacacacaaatatcccctaccaaaagttacaattctaattttggaatttttgttgttcgtggtgcagaggaatcttattcatcaggaagacctcgatttttctaggaaagtacaacggattcatctagaaaatgtggagctctacaagaaggtaacatatcatgttttacaaaaactccattttctttggagtaagagcttcgaagtgatatggcttcgactttcaggcttatatggcaaacacaaacgggtttacacaccgtgaagtagctgttgcggatgatgaatcacacactcagattcggctgcaactaagccagcctgaacattccgattatgacactccaccaagagcaaacgaataa

SEQ ID NO: 180482 - DNA, 292 bp, Arabidopsis thaliana landsberg
atgccatccacgccgacgtctgcgagcacggcttcgacgcttatgcggggcacgttcacccagtcctacgggtcggccggcctggactcggcgctgctgctgatcccgcgggtcggcttcctgccgtgggacgacccgcgggtggccgggaccgtcgacgcggtgcagcgtgagctgtccagtgacggatttctcaagcgctacgcgactgctgagggcgccgtggacggcctgcccggcaccgagggcgcgtttctggtgtgcaccttctggctggccgatgcgctgcacg

SEQ ID NO: 180483 - DNA, 306 bp, Arabidopsis thaliana landsberg
ccggctagctcgggcagtttgaacttctggatcttgccggaggcggtcttcggcagctcgatagaaacggatcgcgcgcgggatcttgtaggcggtcagcgattcgcggcagtgcgcgatcagcgcctaggccgtgacctcgacgccgggacgcaactcgacgaacgcgcacggtgcctcgccccactttggatcgggcatcgcgaccacggcgacggcggcgacggccgggtgccggtacagggcgtcctcgacttcgatgctggagatgttctcgccgccggagatgatgatgtccttgctgcg

SEQ ID NO: 180484 - DNA, 1735 bp, Arabidopsis thaliana landsberg
cagcagctggaataaattctcgcctcaacattgatgctctgcaaaatcgtgttggacctgagaccgagaatgtctttgacgacagcttctgggagaatttgacagttgtggtgaacgctttggacaatgtcactgcaaggctttatgttgattcaaggtgtgtgtatttccagaagcctctcctcgagtcaggaaccctaggtgcaaagtgcaacacacagatggttatccctcacctcactgagaactatggtgcctcgagagacccaccagagaaacaggctccaatgtgcaccgtgcactcatttcctcacaacattgatcattgcttaacatgggctcgctctgaatttgagggtttgcttgagaaaacaccagctgaagttaatgcatacctctcagatcctgttgaatacatgaaagcgatgagaactgctggtgatgcccaagcaagggatactttgggacgtgttgttgagtgcctcgagaaagaaaagtgcaattcattccaggattgcataacctgggctcgtctgaggtactctctgttggcccacacccttcattgagactatatgtaaaatgattttcttctctttacataattgcttgcttacaggtttgaggactacttcgccaaccgtgtgaagcagttatgttacacatttcctgaggatgctgctactagtacaggagctccgttctggtctgccccaaagagatttcctcgcccactccaattctcctcaaccgacctgagccatatcaactttgtcatggctgcatctatcttgcgagcagagacattcggaatccctactcctgagtgggctaaaacccgagcaggactagccgaggctgtggaaagagtaattgtccccgactttgagccgaagaaagatgcaactattgtgacagatgagaaggctacaactttgtctacagcttcagtcgatgatgcagcagtaatcgatgaactaaacgcaaaactagtgcggtgcaggatgagcttgcagccagagttcaggatgaaggcaatccagtttgaaaaggtgaatcataaatgtatccaagtatctttcagattctgtatttgaattataagagcaacaaactaacattattttgctgttcttaggacgatgataccaactaccacatggatatgatcgctgggctagccaacatgagagcaaggaactacagtgttcccgaggtggacaagcttaaagccaagttcatagccggaagaatcatacccgcgattgcgacatcaactgcaatggcaacaggttttgattgccttgagatgtacaaggtcttagacgggtcacacaaagtagaagactacagaaacacatttgctaacttagcacttccgctcttctccatggctgagccggttccacctaaagtggtgaagcaccaagaccaaagctggactgtttgggaccggtgggtgatgaggggaaacccgaccctaagggagttgctagactggctaaaagagaaagggctaaacgcatacagcatatcttgcggaagcagtttactgtacaacagtatgttctcaaggcataaagagaggatgaacagaagagtggtggatcttgcaagagacgtggctggggttgaattgcctgcttatagacgtcacgtggatgttgtagtcgcttgtgaagatgataatgatgctgacgttgatatccctctcgtatcagtctacttcgcctga

SEQ ID NO: 180485 - DNA, 337 bp, Arabidopsis thaliana landsberg
actcatggccttgctgagtacatagctcaggtgagaaacttttccctgaaaacttctccattttatttgttcattctacaaattgaatgttatatcagaaataatttcttgcaactttttctatttcaggaggagatggatcggagaaatgggtattggtggtcattagatagcaagtttatcgcctatgcagaagttgactcctcacagattcctttgttcagaataatgcatcagggaaaacgttcggttggttcagaggcgcaagaagatcatgcttatccttttgcaggagctctcaattctacacttcgtctcggggtagtttcttcagctg

SEQ ID NO: 180486 - DNA, 116 bp, Arabidopsis thaliana landsberg
gctcatgctagtgggcctgtggttcaagctcgaacctttactgccataactggtgttaatgctggtattgcatgtgttatgaaacgtgttataggcaacgagcatttagaatctgc

SEQ ID NO: 180487 - DNA, 800 bp, Arabidopsis thaliana landsberg
atggggaatcctcttgtcgatgactacaatgacaacaaaggaatgcgtgactactggtggaatcacgggcttatatcggacgaaagctacaatgacctgaccaaatggtgtctcaacgactccatcctatttccaaaactaaactgcaacgctgctctgaaccaagccttgtctgagtttggtgacattgacccttacaacatcaatagccctgcatgcaccacgcatgcatcatcaaatgagtggatgcaagcatggcggtatagagggaacgatgagtgtgttgtgggatacacacgcaagtatatgaacgatcccaatgtgcacaaatccttccatgcccgtctcaacggcagtactccttggacaccttgcagtcgtgtgataagaaagaattggaaagactcacctaagtccatgcttcctatcatcaagaatcttcttcaagctcatctccgcatttggatcttcaggtataatcactaaatatatgtgtgtttttgtatgttaaacttcataagcttcctactcaaaatcaattggcagactcgtatattttacatcttactttagatgtgaggtttgtaatagaaatatttgtgttgaattatttgtatagtggggactcggacgcggtgttgcctctaagcgggacgaggcattcgattaatgcaatgaaattgaagagtagcaaaaggtggtatccatggtaccattcacacggcctagtaggaggttggagtcaggtttatgaggatggcttgctaacgtacacgacggttagagcagcagggcatgag

SEQ ID NO: 180488 - DNA, 139 bp, Arabidopsis thaliana landsberg
atgctcgcgttctgcttcgcgcatcacgcgtcgctcacgtatgtcgcgcgttgtccgcgcctaccgcctgtactgttcgcgtacgctgtcaccgcccattccacgcgtgtcacgtgttgtgctctattctacgagtatc

SEQ ID NO: 180489 - DNA, 291 bp, Arabidopsis thaliana landsberg
atggctaccacaaatgtcctcgccacgagccacgccttcaaattgaatggtgtcagctacttctcctctttttcccgcaaacctaaccactacatgcctcgtcgtcgtttatcacatactactcgtagagtccaaacttcgtgtttttatggtgagacgtcttttgaagctgtaacgtcgttagttacgcctaagacagaaacaagtcgtaacagtgacggaattggaatcgtccgtttcttagaagggaaaagctatcttgttactggtgcaacagggtttctgccaaag

SEQ ID NO: 180490 - DNA, 13 bp, Arabidopsis thaliana landsberg
atgggctccgacg

SEQ ID NO: 180491 - DNA, 120 bp, Arabidopsis thaliana landsberg
ttctgtgagcgtctccctagccccaatggcgagtcaactgttgattgtcatcagatctcaaagatgccaaatcttgcattcaccattgcaaacaagactttcaccttaacaccagagcag

SEQ ID NO: 180492 - DNA, 46 bp, Arabidopsis thaliana landsberg
atgagcaccattgttgatatctattacccctgtggagcaaatggtg

SEQ ID NO: 180493 - DNA, 743 bp, Arabidopsis thaliana landsberg
attctgattcttgtagttcctctgggagtgaaacagattctattaaagcttcaaaacccacaagtagagaggtatatctaacagtggaataacttatgttatggagtctctgtgtttggatgttgctctaatttctgcaagatttttcatttactcaccaatatttccatggactatttgcaatcataaaagtgaaattactacagaaaaataagtatagtctcctctttaatttaggaaaaaaagcaaccaggagttggtatagacaaaaaagaggatgatagcaacagtgagaagatagttgtaaatggttagtctctttataattgatgtatgcaagttggagtgctcggatatagaagtcttcccgacactcattctttgttctctgtagattctttgaatgaattggatcaacttgagcatactgttggggaaaagtcaaccaccatggatgcagtagttctcgttccagatggtaagaaatgaaagttaaggaaggttggagatggtaatagatgtttattttcagatcatgagtttacctgtcatgctttggtattatagaggagactgctccacctgagaggcaaatttccccagattccccagataagcgttaccgcgcggctttcttgaagaatcgttttgctgataccattatgaaagctcgagagaaggcttttaccaaggttgaatttttaagtgtccgatctactgtgttgacgaaaaagctcgcctga

SEQ ID NO: 180494 - DNA, 349 bp, Arabidopsis thaliana landsberg
atggaagatacttatgctgctgctgatccagtaccggctttagctgggcgtagcgaagttgatgacggaaactactttgcaactacggttagcagcagtaaggtcaaaaggagggtctgttatgagtgtggagaaaagggtcatctttctacagcctgtcccataaagcttcaaaaggctgatgatcaggcaaactcaaagctgggtcaagagactgttgatggtagaccggctatgcaaagctatggtcttccaaagaatagtggtgattcttactacatgaatgagacatacgcttctacaaatgaaacttataatggaggatactcagcatctgctgttggcactg

SEQ ID NO: 180495 - DNA, 3126 bp, Arabidopsis thaliana landsberg
atgattcggcgactatggggcgacaatggtgtaagttattgggcttttaatcgtcgaagcccaaacccaattgatttagtgactattatgcgactaatatacgactactccagtgttgaaaaccctaattcgatacatttccccttcgttccaaacacttagccacttcttcgattcttctcttcttctctcttcttcttcttcctcgatcttcttcgatcttcttcttcttcttcttcttcttaaccctaaatcgattctcttcttcttcttcttcttcttcttcttcttcttaaccctaaatcgatccgtctttcaccaacaaaccctaatacatcgatccatctcgattctctcttcttcgattctctcttcttcgccaaactctcccttgcctcttcgatccatctcgattctctcatctccaagaggatgcctaacgccggtcgtggaggatctcgaaagaggaagaccacaccaaacgtgactcaaagagccggaggttcaacgcctgctggaagaccctcttcgctaccgcagcagtacgatttcaccccggcggcggcgacggttcaagtttctgcatcgattccgcctcaaggagccggcgccggcgcctcatcctctgccccccactaccgtaactacccaccaccgcagcaactcttccaacactccaccaatcaaccacagcgtgtagatccgttgccaccacaagagactgctcagcaagaccctcctctttcgccggatccagaaactgcatctcacagtcatccctcgtctcaaggcaacaacttccaagagggcattcctgcagtgttgccggagctccaagaagactccgtggttgctctgaatgacattctctctgtgcctggcagagaagcgtggtgttgtgtgttgtctcccattccccggccaaaaaccgaatggtaagttcactttaaattccctgttttcttgttctgtatactctgttgtgaatcaaaccgaaaatgtgaaccttgtaggctgttgtgttgtgaaacattgttggctcttgtgttgctagtgttttcgggttaggcatttagtcaagtttagttctagactcattagtttatgtagtaatgcctgttttattgttgtttgatgctctgttgtgaattggtcaaacatagatgagtgttgtgttgtgattacattagttcttggtcattagtttagttcagttctaaactcgtgttatgttgttctatattacacaaatgatgatgctttgattgtgaatgatgctatattgttgagacagtactattgtggaacatagtttatagtcgtgtgtgacttgtatttcttttgggaacataactttgttcacttttgtaacatgtttacttctttctttgttggatttggaatcaaaccaaaaatgtgaaccttgttggctgttgtgttgtgaaacattgttggctcttgtgttgctagtgttttcgggttaggcatttagtcaagtttagttctagactcattagtttatgtagtaatgcctgttttattgttgtttgatgctctgttgttaatcggtcaaacatagttgagtgttgtgttgtgattacattagttcttagtcattagtttagttcagttctaaactcgtgttatgttgttttatattacacaaatgatgatgctttgattgtgaatgatgctatattgttgagacagtactattgtggaacatggtttatagtcgtgtgtgacttgtatttcttttgggaaaataactttgttcacttttgtaacatgtttacttctttctttgttgcatgtggttggaggtttactcgagacagaggatctcgcttggttaggaagatcactagaattttcttacaaaaattcgatgctcccttctataactggtcatgtgtgccagttgataaaagagaaagattatttttagagtttgcggtaagcttcctctatatctgctcttgttcaagttaagtttatgtagtttcactaacttcttccttttttttgtagaaaactcaccactgggatcccttactaacagggacagtccagtattacttcaatgagatcgtcaagaggcgcttgaaggacatggttagcaccgcaaggacaactcgagagcagcctccatggattggagaaacgctgtggggaacaatgtgtgcttactgggacacagaagcagcacagaaaaggagtcggacctattccaaagctcgtctctctgaccgtaacggtatcggtcctcacgtccactactctgggccaaaatcttttcaagaaatccaagatgaattggtaagtgtttctgcagattctcataagttagagttttctgttttctgttttcaatccaatatagtctgttttcttgtgagtatgttgagttcttatgtctagtgactactgttgatattgatttgtgtttgcaggaagagaagttgggaagaccggtccatcttggtgaggtgttcatcgaaacacacactaagtcggatggctcatttgttgatcagaagtcggagaagattgctcaagcttatcagcagaatgtgagagataggctgtcagcactagaggcgtctgcttctgctgtctctgatggctcttcacgacctccggagctcacactagatgattatacagccatctttctcgaggtaagatgttttagtataattatgagtcttagagtccaattaatattctgtcactaatgagcttcttctctatttcttgcagtccacagaaaaggattcaagaggcaatccttatggactaggatgtctaaaagacactctaggcagcgccaaccgccatcactccggttcctcatcatcctttcaagccctagaagaacggctgcaggaagctcaaaggaaaatagaagagcaggctgcatataatgagaagagagatgctgagattgctgcccgagaagctgagtcatcccgagtcacagctgagcaaaaggacaagctcgagcaattgtctttagtcgagaagtatctccgccaaaccgatccgcagttcttggacttcatggcaagtcactctaccacaaccacagaacgtctaccaagtcctccacctaatgatccttag

SEQ ID NO: 180496 - DNA, 386 bp, Arabidopsis thaliana landsberg
gtgaagatgtgaagctacttgtgaatatcattggtacaatcggagtcaccaatggtcgcccatatcaatacaaggttgaagcttggacaaatgaaaacgagaaacatgaaacaaaggttgtagcaaccgaaggagatcctgagtttgatgaagaactacaactttttcaagatcaaaattttcccgtagaatctttatatgtagatgttttcaaaacgaattcaactggtacctatttcgttgggaggggagtcacattgttgccaacggttaaaggggttgatttttaccgtgaagttaacctctctggtcctgaggaaaccggatttcttcaattgtcacttactctcatggaatttgagatacttggttatgttccttcatga

SEQ ID NO: 180497 - DNA, 474 bp, Arabidopsis thaliana landsberg
  unsure (1)..(474): unsure at all n locations
atgaagggcgccgnnnnnnnnnnnnnnnnnnnnnnnnnnnnnnnnnnnnnnnagcctcagggcaatcccgacaaaccgctgccgacgtatgtgctggccagcggcatgcccggaccgcgcggtgtggatacgctgccgccgccgggggtgtttccactgtatccggtggccgaactcggaccggcggttgccggcattggtcatctgaacgtcgatatcgatgtcgacngcgcattgnnnnnnnnnnnnnnnnnnnnnnnnnnnnnnnnnnnnnnnnnnnnnnngttgtcggtggtggtcgcagcgcgcagccttaatctcggcatcgccgatatcaagccggcctggggtgaggcgttgcacatcggcaagctgcgggtgcgcacggatgccgaactgcgcatgcatacgtttttttatgccgaccgcgacggtcgcccggcgtttccgtggattccttttttgacgtgctga

SEQ ID NO: 180498 - DNA, 4876 bp, Arabidopsis thaliana landsberg
aaaatcgagttcggaggctcctcttcgtcgtcgtgttcttcttctttggtcgacgttcatcttcttcgtcggccaccatcgatttcctcatgccgccgacttgaaatccggcgtaaaagccacgaattaggtcagtttcttctcatatttcctttgacattggtgcattgtgattttagattgggattttgaattctatataattcccagctcgattcaatttgatagtttgatgattggtttgcaaagtaaagagtaatcgattagaggttgccgaaacgttatttgaggtgatgagcaaaggaatgtaggttgaatgtgagttgaatttgaattccgagatttcatattaaagatttggggggtttgtgtttgcaaagtttagattaaccaattagtttaacgaataggtatgtattaacattaaaaatcaattgaaaggtaacgaattaggttcagtagaatcgagtgcgacaagagattgatttcaacgtatgataagagtacatgtggtataactattaaaatgtttgattggagttgaactggttgtattttcaggagcgatgaagaagaagatccacactaaggtacattttaactttggaggatactattctgaagtgaatgagtggattggtaaaaattcactatatgctatatcgtttaagacgagtagtttggagaagataacatattcgatgttagttgacaagatcatgaagaaggttgcgattgatgaagcttctgtgaagttgaaactgagttacaatctgtctaaagttaggagagagacatatattgtagatgatgaggatgtctttatatttttaacagaatctgatgaagagagtcggattcctgttttgcatgtggagaaattaaatggtataggagttgagaggagagaggaaatttctgtaccggagcgtcgaagttcagttggtgtaaatgtaagagaagatgatgttttaaatgaagtatgtgagatggtgcatgatggatatgataatgatgtgaatgattgtgagaatgtagtaggtacggagatcgtggctgtcgaaaggccgatggaaaggccggtgaattctgttgaggaagaagatgaggatgataggattgattatgatgatattcacgatattccacgaagtgtagaagttactccgcaggttatagaatgggatgatggtacgggtattgaaattggtcaagaattttgttcaagggaggctgtgtgggaattggttaacagagctgcaaagaaagaagtttttggagtctatactattaagtcagacccgttgagacttatgctacgatgccgccaagcttctaaagggtgtacttggtatctaagagttgcgagaactaagaaatctcatttttggagtgttagagtgcatagaaagatgcatacatgctctcggagtgttgagactacaagcaacagtatacagcgaggcacaccaagattaatagcatcggttttgcattgtgactatcccggaaatttagagaccccaactccaaaaaatattatgtcgattgtaagaggaagacttggggtgcattgttcatactccactgccttaagaggcaaaatgctacatgttagtgatgtgcgagggactccggaaagaagctacacgatgttattttcttatctttacatgttagagaaggtaaatccagggacagtaacttatgtggagttggaaggagagaaaaagttcaagtacctcttcattgcattaggcgcttgcattgaaggttttagggcaatgcggaaagtgatagttgtggatgcaactcatcttaaaactgtgtatggtgggatgttggttattgcaacagcacaagatcctaatcatcatcattatccacttgcgtttggaatcattgatagcgagaaggatgtaagttggatttggttcttagaaaagctgaaaactgtatattcggatgttcccggattggtctttattagtgataggcatcaaagcataaagaaggctgtcaagacggtgtacccgaatgcgcttcatgcagcttgtatatggcatttgtgtcaaaacatgagagatcgtgtgacaattgacaaggatggagctgctgacaagttcagggattgtgctcatgcatatactgagagtgagttcgagaaagagtttggtcattttacaagtttatggcctaaagctgctgactttcttgtgaaagtagggtttgagaaatggtcgaggtgccattttaaaggagacaagtataacattgacactagtaattctgcggagtcaattaatggtgtgtttaaaaaagcgagaagatatcacttgttaccaatgattgatgtgatgatttctaagttttctaattggttcaacgagcataggcaagattcaggttcttgtccaatcacagcacaagttgtgcctactgtggagaacatattgcacattagatgtccagttgcagccaaattaactgtgtttgagcttaacagttacaaccaagaatacaacgtgattgatctcaactcggtaagttttcttgtggatttgaaaatgaaaagttgttcatgcaaatgttttgatatagacaagatcccgtgtgtccatgctatggccgcagcaaggcacctcgcccgcaaggaagggagaaatgcgaatacaaccatctacggactctgctctgtgtattacttgatagagagttgggcattggcctattaccggacgttgtatgtagtcccacatgagtcggtttgggttcttcctgcccatattaaagagttagttgcattttcgccggaatacacaccaaaaggaccaggacgaaatcaagagaagcggattccatccgctggtgaagcgcgaaagaagagaaaatcgcaacctggaataaacttggaggcttggctgcagcctgaggaagattaagtctgatgcagaaagggttcaaccggaagaacctggccaactggagaaagggtcaaccaacacaactaagttcaattatttgtattatattatttgtaagtgtgatgtactatgttttatgttttcgtatttgtattgaattctttgcaagtttattgaattatttgcaagtttaatgtatttttttaagttcaattgagacaactgatatatgtatatgtattttagtattaacaaaatgataaaataattctcaatatttaaacattgaataaatcaacatctaaacattgaataaatccaaaatatgatattacaacattgttattactaaacttgatcataaactggtttcctaataaatcacctatgtataacaaggaacatatagttcatgattgtccaatgtacatacgttatgtatgaaaacagatatgtacttaatatgattctatcaaaacttattaaaatccattcatatgttaaaacttatgggaccaactaaaaaaatgagttggtttttcagattcaacttcaaaaacacaaaatttagaatagttcaactgtttgtgattccggccaactgtacatatacatacaactatgtgtattctgaatattctaataaataattttttttaaaaatagaccccacgaagtcgcgttcacactacgattattgcgttcacactacaaagtttctacctatttattctcactctctcttctatttcacttctctcgttcttctctcttcttcacttctctcctcagatcgtcctcaaagctcctcagctcgtcttcaagctcttcccatcacagcgaccatctcctcgcctagctgtcgacaaccaaggtattacatgcactggagttcttcctctctctcgttcttctctcttcttcttacgggtttttagccgccgtaattagtagatctagggtttcttacgggtttctagccgccgtaattagtagatctagggtttatagcgttcatgattcatatctctttctttctctgttctgtagatgccctatagttactctcaaccatccacgtccgaagctagttggaatagtggagaggcgaatgccgatgcaaattggggggttccagaaaaatgtttttgtggtaagcctgtaaaacttgaagtgtgcaaaactggttacaggcaaggcgacagagtctacaaatgcccaatgcttaaagtaagttattgtgttttcatttcattggaacaacaaagtacaagtgaattatatttatgaagtcttctctctttcgcaggctgaagagtacgagtcccgaaaccaccttattcagtggtgggatcaggcggtaactgaggaacttgagaaggtaaatcacaaacttgattccgcactaagacatggacaactagcatgcaatcatgctttggagtccatccgggaaactattcatctcatgcaaggcgaaattgaaacccttaaagaaaggttactcgccaaagaagtcgagattgataggcttagggcattactttctacatggtgattatgatgtgttttatgttattgaggatggtgtatgacatttgaacctaaatatgttatgtttctggattttatgtaatatttgaacctaattagacatgtatttacctattttaagttatgtgtattgaccggccaactgggacaacttagctactcttgtattttaagttatgtgtattgaccgaccaactgggacaacttatctactcttgtattttaagttatgtgtattgaccggccaactgggtcaacttagctactcttgtattttaagttgtgtattgaccggccaactgggacaacttagctactcttgtgttttaagttatgtgtacgaaaatgttgatgcacgaatcacacaagtacgaaaaatgggatcaagccacacgtag

SEQ ID NO: 180499 - DNA, 1637 bp, Arabidopsis thaliana landsberg
cccctgataaaagaaaaccgaagtctgtgccggaatccgttgatggtaatgttgtttccatcgaggagcttcgcacttcaagcagaaagcgtaaaccaaaggtttggtttacaagacagtttttctctttaagttctttgttatcgtgtcattcttctgtgtatcacatagctatatgcaaattacattcagtttcaggtgctagatgttgtagctccaaaagagtctacacaggacaaatctctatatactaaggtatttttttaaacctatagatatgcaaaacccgcttctctcctatttaatcgtactctgtgatctgcggttactccttgtaattttagaatccttgacaaattcttttgatcaaagaagcttatgctttagtagtttttgtttgtgctttctctaatgatttttgtttattgcattgcaggaatcggctgaagttgatagtttgaagactctggtcaaaagcagacgttctagtcaaggtccagcaaaacagctgaaaactgcaaagaccacggtagaatcttcttcagctagtgataagaaaataactggaccggatgcagtagtgccagctacacaagtttcagcttcgggtccagagactttgccacagaaaccaccaaacaggcgtaagataagtttgaagaaaagtttacaagaaagagctaaatctttagaaaccactcatgacaaaccacgtagtttcaaaaaactttcagaacatgaattactacaggtgagtctctaacttcatttttcttatacaaatccaataaatctggtctctaatttgcttattccatttacaggagaagttgtcaaattgtctgtcatgcccattggtacgtcgatggtgcatatatgaatggttctacagtgctattgactatccctggtttgcaaagatggagttcactgattatctaaatcatgtggggcttggtcacgctccaagacttactcgtgttgaatggagtgtcattaaaaggtttgttaaagtttctgtgtatgtatgtcgatggaattataaagatacaaaaggttactcattctgtaattttttcagttctctcggtagacctcggagattgtctcagagattcctacaggatgagcgggataaactccaagaatatcgtgagtctgtgagaaagcattatacagagctgcgtggatgtgctacgggagtgcttcatacagatttggcccgtcctttatcagtcgggaatagagtgattgccatccatcctaaaacacgggagattcgtgatggcaagattcttactgtggatcataacaagtgcaacgttctctttgatgaattgggtgtcgagttagttatggtaaatcacaaactataccaattccgttgatagtttgtccattttttgtatatctcagatgatctaataaatccttttttctgacaggacattgactgcatgcctttaaatccattggaatacatgccagagggtctaaggaggcaaattgataagtgcttggctatatgcaaagaagcaaggcttaacagacacccaagctctgatgcatctgttctgttctctccttctgtgcttgaaaatgtcaacttttccatgaatcctcctcctgcgaaacag

SEQ ID NO: 180500 - DNA, 926 bp, Arabidopsis thaliana landsberg
aatttgaataccaccaaagaaaaagaagaacctggaaatgtttcttctataactcggttcttcgctatgtctggaggaaagccgcgatcaacgcggtattcgcagttgtaaacgctagcacagcttacatcggaccatatctcatcaatgactttgtagagtttctaagtgagaaacaatcccagagcttaaactaacaagttaagaatgctctgtatattattgcgtgttctcaaggtatcgatacaaccctatatatatattctatacaagtcggtctaagatcattcatctatagaaagatagatacgagagaatatcttctacttattctccaagtaagtctaatggatatcttctacttattctccaagtaagtctaattgcaagagtagtccttcatatcttcgtaatatcgtaatataaaccatggttaccttcttgcactcgggtttctaactgcgaaaatcgttgagacagttactcaaagacaatggatctttggagctcgtcagctaggactacgtcttcgagcagctttgatatcgcatatataccagaaaggtttacttttattaagtcaatctcggcaaagccacacgagcggagagatcatcaactacatgagcgtagatgttcagagaatcactgacttcatttggtatgtaaacagcatatggatgttacctatacagattttctcagcgatttatatcttgcaaaaacatctgggacttggagctttagctgcattggtcacaactttaatggtgatggcttgcaactacccattgacaaagcttcagagaaactaccaatcagatatcatgaatgccaaagatgatagaatgaaagcaacttcagagattcttaaaaacatgaagattctgaagcttcaagcatgggataaccagtttctcaacaag

SEQ ID NO: 180501 - DNA, 399 bp, Arabidopsis thaliana landsberg
cttacttcccaatccgagatatcctagaggcagagaaagagggcaaccgagtttctgtaagtgataaaccgttttttaggaaatgtcaatgttcccttcatccacctgatttttaagtaatgacatctttgagttacctacatttcacaggttcctagaccattgacacaactggacttggagaaggttcttgctacctcaaagaagacacaagttgctgcaagcgagtacactggtttaagctctcaatcttctgtctggggaagtccaagcaatgccgatgaggtccaagcagctataaacggcatctccaagctttttgtctcgcagcttagaaacattcagccagattctcaggattcatatcaacaacatccttcagaaggagattcggaatag

SEQ ID NO: 180502 - DNA, 30 bp, Arabidopsis thaliana landsberg
acctttcgttatctctatgtggtcacttaa

SEQ ID NO: 180503 - DNA, 104 bp, Arabidopsis thaliana landsberg
gcctgggcattcgggtattcgggtcagattcggattgggtttttcgagttcagatatttcggatttggaaatctaagatccgttcggatattttaagactttga

SEQ ID NO: 180504 - DNA, 181 bp, Arabidopsis thaliana landsberg
atgaagatgagaagacattttggagcaaaaaataaggaaaaggaaggtaaagacgatttcactttcagattcaaataagagtgtcgatcggtttcggtccagagatgtccatgaagctttcaagttacagatgtggaaatttgccccaaaagacttccctatttgcattattagttcctaa

SEQ ID NO: 180505 - DNA, 76 bp, Arabidopsis thaliana landsberg
atataaagccaacaatctagaaaaggaaatccaaaaaatcgacatgtctcgtgtaaggaccatcgttattcgataa

SEQ ID NO: 180506 - DNA, 665 bp, Arabidopsis thaliana landsberg
gggctgctcatatactaagacaccagaacaagccaagtgctcaactaccgctgacttctggctcttcctctctgtgggatgatgaagaaacacgtgatgccttctctttccaaaaaaatcgtttcgcaaattccaccgagctggctagtgttgcttctcctaaaggtgttggcagagtaaatggagagccttcacagttggtggaggtaactatatcagcctcaaattccacttccctcaattgtttacaaaactaaaccatctgattcaatactttctcttaggcttcatccggcgatgagggatcttataaccctcatgacgatggagatccaatggaagagggtccagcagaccctcatacgatggattctccagggaagaccccttgtggacttgcggatgtatactgggtaaatttagaaatctcatatatttccccaatgtaaaaaagtcatatatattcaacaacaacacatgtttcctctttgcagcccgactcgttaggaccactggatttagacattagatcgtcaaagtatacagatgatttgatccttagtgagagcctcgggggattgagccgtctgatagcaaccagccttgatgcgtttcagaactgctcgctctttgggttcgacaataagaaggacaagtctaacatg

SEQ ID NO: 180507 - DNA, 183 bp, Arabidopsis thaliana landsberg
agagaaatatcgacctttcatgaaaaggaaactgagcgtatcgatatgataagacatttggatgaaacagttacggagttgagtgcaacagcagaggaaatgcgtgaagaaaatttgtttcttatgcaaaatctctccaagttacaagagagttacactggtagtaccgatgatcttgattac

SEQ ID NO: 180508 - DNA, 76 bp, Arabidopsis thaliana landsberg
atacattcagagcaccgagcagaaaccacacggggttagtatccacagggaccagcgcaacgccatgaccaaatga

SEQ ID NO: 180509 - DNA, 515 bp, Arabidopsis thaliana landsberg
ggtttaaggtattggatgtgtcggatcaagacaatgttaaagaaataattctaaagatgaagaatcctgtagaggtttcgtttagggatctacctaaagagagggatgaggaaatgctgtctagggtaagatgcgtgagtttcaaggcacagaccaaagatgaggaagcgactcatataagccgaatggttatcccgggtgtgtgttacggttcgagccatggggattattcggtgatcgagcctttggagaacgataagaagaatgttgagtcgtggtccacctggtggtggttgtggatcgtgggatttgtattaggattcggtttattagggtttttgtgtacaatggggataagggtttcaagagcgaagaagattcaagtgatgatggagagagacgctaatgatggtgaagtgtttgagagcagatggtttggtggaagtaaaatgccatctgcagctgtaaccagaactttaccagagctcgaatccgggttcgaaagggtctcttag

SEQ ID NO: 180510 - DNA, 415 bp, Arabidopsis thaliana landsberg
gcgtgttaaacggaatcgagggtgcgggcggggtgacgtattacgagggggccggatttccgtgaaggcagcccgagggggtcctgagatatcgagcgagcgcgtcaacggccatcggatgaccggggaatttcccgaggccagcaccggccaggggacttcaccaccccaaaacagggcgaccgccaaccgggagaccacccggtatctcgcggcggccacacaggtagacacgaagtacgcggcgaatgtggcggatagagtcttcggcgaaccgctgaaagcgctcgctcccgggtacgggatcgatgtggcggtcgtcgccaagtgggcgctcaaggccctgcgcacacgggccgcacgcgatctttttctcgcggccgtccttatcctccaagtgctcttcgtcgcctag

SEQ ID NO: 180511 - DNA, 449 bp, Arabidopsis thaliana landsberg
aaccatagtgttgtcgttgtgtcattatccgaatttaagtggagacattggtaagttatttataaactaattacaatctatttttctaattatttcaaataacatatttaagctctgtagcttccactagacggtgaagatttgaagtgagagctctctttgcattgctcacccaccaatggatctacctacccttcttcttcttctcctccttttaaaccctaaaagtttctctttccttcaacaacgccacaatcatggctgtgttcttatctcctaaaaccatcactcttctcttcttctccctctccctagcactctactgcagcatcgacccttgccaccactgcgccatcggcgcgatcgccaagttcgcggctcagcgagatatcagtccacggtccgacgaagtgccatgggagggagattcacgacctgcacgccacaag

SEQ ID NO: 180512 - DNA, 254 bp, Arabidopsis thaliana landsberg
ggagtgaatcagaagatgatgagtttgacgacgataactacactattgctacgtttcaagctgggaaagaaatcgttgtatatgaagacagcggggatgatgattttgttgagccccctaaaaagaaagtcatgttaaaagaaagtaatgttgggtctatgacagactttttggagacatttcaaaaaggtataagcattgatcaagtgtatgggtacgacaacatagagccaatgttcggagatgatcgatga

SEQ ID NO: 180513 - DNA, 1504 bp, Arabidopsis thaliana landsberg
atggattcaggtattgttaatttcaaatctaaggacttcactgctgctgtgaaggacctatctatatgtctgaagcaagagaaagataacaagtctgcatacacttatttggtaagactattctctattgttattcgttattcttggtttccaaagtaaccatggacgcaaatgttttcgtagtaaaactttgttgatctctccagggactagcatttgcttctcttggtgaatacaaaaaagctgaagaggcgcatttaaagtccatccaattggatagtaattatcttgaagcatggcttcatctcgcccaggtaacacacaaataataaaataaatagtatgagattatgctttgtctattgaattttcaactattaagctgaactgtgatgaaaataggattataaccattgcttttttttttttcttttttttttggtgttttcatgcatgtaatagtgaataaacattagttttatgtaaagctagtgagacttcaaaatgaagaaagcttaaattatgacttttgaaggctaattaagatttttctgaaggaccaactttacttgattatttggtttcttatatctttaattttgattgttcatcctagtctattgcttaaatcagttacctatgatacactcatcctttttattcactgtactcgatggttatttcctggcatttcctggcagttctatcaagagttggccgaccactgcaaggctttggaatgcattgagcaggttctacaagtcgacaacaggtagctcttatttgggatgcaataccacgtgttgcactatatttctgcttttccatcgtactcatggcaattttcctgtcttgaccagggtttggaaggcctatcacttgcgtggattagtgttccatggattaggcgaacacaggtatgttctgttagggtaaattaggattgttggaaactgaattttgtttaaaggggaaaatttgtctatgttgatgtgcatgttaccttaaatgttcatgagggatccaaggatatctcaatgtctactttaaaatgtgatatccgataagattacttcccctgactcttggtgataaagatctgcgtttgagcaaaaggatgttttaaaaggaagcttttcttttggtggtcatacaccttggtatttatgtacaaggctggtctttaaagcagtgatattactcacctgtagttgtttttggtgatcttatttctcaggaaggctatccaagaattatctattggcttgagcattgagaacacaatagagtgcttgtacctacgaggttcctgctatcacgcagtaggagagtatagagatgcggtgaatatttgtatgttaactttatggttacatagttttaaagaagactctcttattacttgccttgaatatgctcacaggtgaaggactatgatgcaacagttgacgtggaacttgatgcagtgaagaaatttgttcttcaatgcttggcgttttatcag

SEQ ID NO: 180514 - DNA, 628 bp, Arabidopsis thaliana landsberg
atgcaattgaatggaatagaaaaattgagaagcaacgggaaaaggatccatcgagaattgattttctggatgagaaagattgcagagcattgaacattaatggggtaggaacgtttcttttcttactaaaaaggagtttgcagttataattcaagatatgactgtctttaagtgttaactcactttcctagtcttttttttctcgtatgtgccttcatctgcatatgcgtccatacaaatgtacattaaatatctttcacaccgatgcttcccaaactgtttccatgaatatgccataggaatcatcagttagtgattcagtgcgagctggagaaactcccccgcagcaaattgttgctgttgttcgacctgctagcttcgcatcttcaaaagtgttgaaaaagttggatcagaaacatatcttgaagatggatggaaacatgctcatggaagtagaatttcaagacacaaacataaattcaagggatacgaacaccaaacttttgtattcacataactgtttacctacatcttgtagcgggttccatggtctctacatctttccacttgtcgaagttcccgaacatgttcaagaaaaacaggcatttacaacttatgtttctctatt

SEQ ID NO: 180515 - DNA, 608 bp, Arabidopsis thaliana landsberg
atggacgtcggaggagaagacataagcgatctccaggtagaccaaatcgttgaagaatattctatggacgatctcattagagaccgattcagactctccgcgatctctatcgccgaagccgagggttagactctctccctccctctcttcccatttcaatcgattctcaaaatttctggtataatcaacgggtttatgaatacattcgatgaagcttcgtctgtatttcgatttgattttggaatttgtgttgatttgattaaggatattgaatcgttgattcaattgtccttcgtatttggcttccgattagtttcttctggtgaacgatgaaattagcttaaatgttttcattgagattcttggagctcgaattagatttggggattttcaatttctagaattgatgaatcaacatagtaacgaagctgcttgaagtgttagttctacagtgttgaaatttagattcttcctggaattaagtaatagatggagaagagttggattttgattgatttgagtttttgtttgagcagcgaagaaaaatggaatggaaataggtggacctgttgtggcatgtgtggcagatttagccttcaaatatgcag

SEQ ID NO: 180516 - DNA, 415 bp, Arabidopsis thaliana landsberg
gtatataatggcggtgacagtctccgactcaactggtgaaacttggttatctgcattcaatgatgaagcagagaagattatcggctgcacagctgatgatctcaatgatctaaaatcagaggtaagaaaactcaaaacatatatatcaactggaacacagtccttattctccatgttctgatttaagatacgatgttatgttggttttctccaggaaggtgaagtgaatgagtttcagacaaaactgaaagaagctacttggtcatctcatctcttccggattagtgtttctcagcaagagtataacagtgagaagagacagaggataactgtaagaggtgtttctccaattgactttgctgctgaaacaagattattgctccaagacatttccaagaacaagacatctcagtaa

SEQ ID NO: 180517 - DNA, 302 bp, Arabidopsis thaliana landsberg
aaagattgtgtaatattttccacatcgcggaatcaatgtcgtttagtgaaggctttcagagttcgtcattacgatccgccggctggcggagaagtaatctcattataatgtgctcaagttgagatcgcccgcccggatgaaccggttcggacgggcttcgtccttcgtcctcgcgatgacgggtcactaactgaacgacattgatcgcggaatgatcaataatcaaggaacgtggtgaaccgaaagcctgttttatttttccgaactatttcctttcaggtattgttcttcgagaaatttaa

SEQ ID NO: 180518 - DNA, 167 bp, Arabidopsis thaliana landsberg
atgcttcctttgctagacgacatctgcaatacgaggtaacctatcccccacatagtcatctagaagacgaacatccggaatctaatgttgcattctgcgactcaaatctactctctaaaatcattgaaaacccaagtgaccacgagcatcgcataaccatgctttga

SEQ ID NO: 180519 - DNA, 170 bp, Arabidopsis thaliana landsberg
ttcttgaaggacaatctcaagaagaaggtcaaaagagtttgccatcgattgttactgatttggagaagcaaactgtaacacccaaattttggattgaaacgcgaggcccaaaccgagcctattatggagttaaacccgaaccaaaccctactattcccacgagtgtataa

SEQ ID NO: 180520 - DNA, 58 bp, Arabidopsis thaliana landsberg
atgacgtcgactgaatcattttatacgattatagtcatgattaaactagactcagttg

SEQ ID NO: 180521 - DNA, 280 bp, Arabidopsis thaliana landsberg
cctagagcagcaagtcaaggagcttaagcaagagaaggaatctttccaggagtgtctcgacatagcagaaggcgaggaggccaacacccgtgaggcctatcgaaccttaaagatggactatgacaagaagctgaggaagctcgctcccaagaagaaaatccagaagaggacctgttgggaacatgcttcatcgccgaaggtcctgcaggaagaaacaccttcggcaaatctgtttatacgtgataccgaagctaccgctcatgaagcttcgatactataa

SEQ ID NO: 180522 - DNA, 253 bp, Arabidopsis thaliana landsberg
atggccacgaataaaatcaaattcgtggtgacggatggtgtcaatggatggctggccaggtgctgtgcttcgccgaaagggtggagtgggtgagaaataagcggctgggtgttggttggggtcgccggccattgggatgcgcagaatggtcatgggtcaaacgaatccattgtcgggccgatcggccgtggcggtgcaacttcacttatccattcacgtgttggccatcattggccgagtcttggctggctaa

SEQ ID NO: 180523 - DNA, 315 bp, Arabidopsis thaliana landsberg
atggaggttgctacgagcagcaccgaaatcacgatccaaacggatcgggatccgtcgtcgaacaacaacggatcttgcgctgttgcttcctctaccgcttccgccgtcttcagaaagatcgagtttcaccctgcaaggaaacccttcaacggtttctctaatgggcgttccgattttaagatcgagactttgaatccttgctcctctaaccagcgactgttatctgcaccgtccgctaagaaacccgacagctccgatttgttggaacatgggttcgaacccgatcttacttttagcattaccttccgcaaaatc

SEQ ID NO: 180524 - DNA, 820 bp, Arabidopsis thaliana landsberg
agcaggaaaaagggctaagaatgtgaaagactttgttgcatcatctggaagttcatcaccagtgagggagaggggaggcttgagcctctctgcggtgaaatcactggttcttggtgaaaaagaggataagcttggttttgattcaggagatgaggataaacttgtgtctctgataaatgccttgtttaatgttggtaggtttgccttagacgaagaaatttttctccatcaacctgtattccagttatagctatttatcttcccacaactttggcatatttttttttacagatagtggctttctcagcagaaagattgtctctgatttggagtctccgaccaacagatcatcttttgcaaaagatcttcatgctgctccccctagtagttttgttgttaagctagctgaagtaattggaagttttacaacacccaggagaatggctttgttctggtgcagggtggttgaagaagtaagttttgtgttgcaaatttcggatttaaaatctccttcttcacttttttagtgtaattaactcgtgaattatgattagtggatagttcaactctgttggtgaatgtcatttgagaagttactacaacaaaatgtgaaatattgaagcccttttcataatatcactcaaataatctgcatgtgcagttgaggagattttggagcgaagagaaacacataccatggatacctctggacaataatccagatttgaaaagttgcctactgcaccaatggttacaggttataaactgttgtcttgccaggaaagcccgcaacgtagctgcttccgaagcattagatgcg

SEQ ID NO: 180525 - DNA, 273 bp, Arabidopsis thaliana landsberg
aaatgccctcgggtttctatttcttctccacgagtacccctggccacggcgcgctccccgcccatcaccgacgaggtctgtaccggccatggccagcgacgactgcccggattaaccatcggggaggcttcactgacctaggacgacctcggaacacgcattaatttgacaagagcaccctgcgaatggcctgtccacgtccacggcgagaaccgcggcgtcgatcccatgttcccaattatacaggcccggattgggcaaacggatgctacg

SEQ ID NO: 180526 - DNA, 111 bp, Arabidopsis thaliana landsberg
gtcaaatctaattggatcaaggtacttcacataaaaccagagacactgaaacttatagaggagaaagtggggaaaagccttgaagatatgggcacagggaaaaattcctga

SEQ ID NO: 180527 - DNA, 265 bp, Arabidopsis thaliana landsberg
atggtgcgggcggtcggacttgaaccgacacaggccttgcggcccaacggattttcgtaccccttcggctttcgccgccgcgccgtagggcgttagtggtctgaactatcccttcaccgtggcgtcgccgctttaggtgctgcccgtctagtctctacaccttcccgtctccgggcttggctcgggattgccagtaaaggtttccccgaatttgggcagttctactccgtcgatttctcgtcgggcactcaatcgtttaagtccg

SEQ ID NO: 180528 - DNA, 830 bp, Arabidopsis thaliana landsberg
aaccattaacttcattgcacgagggagacaatgttttatctgattcagtgcatgatggagactttgcagtttcaggagattctgataagattgttgatgatctgtcatggcgtgagttaaaaacacataaggtctgccgcacttgatttatgttaattttatagattggtagatattagtcaataatttattttaacttctctataccccacatgatgagatatccagggagaccaacaaggattcagttgattccccacaaaactatctggtaattgttaattaagttctttcacatattgtttccaaaacattgattatatattctcatattttacttttttcagaatgaaactccatcaatgtttatacccaagtttatatctgctaatagcacagaggtccctacctctcatcaacccatctatgacactgagtcgaaaactagagacgaggtagattttttgaatatctgttactagccaaaaatatttaactattatatacctaactacattttcaaattactatagcatatgccttctcctcaacctcctgctgtttacgataccgcaacaaaaccatcttctattgatgtatccgaggtttttctccctaaaggattttactattactttaagtttcttataatggatgttactcatacgctaatgttatacctcttctatcttaacaaggagattaagattcaagacttgtccttagcagaaaatgttgacacattggttcattcagtgtgcaagaatataagtgcttcaattgctgctctgagtgaagtaggaaaagagagtcttgctatgatagaatga

SEQ ID NO: 180529 - DNA, 189 bp, Arabidopsis thaliana landsberg
atggtgcggccatggcgtcggaccatcatcgtgtgcgtgcggccccggtaggcacaggttccagcgcttgctgcgcggtcagcagcgtgggcacatgggcgtgtatcgcggcggcgcgcggctaccacggctgcacggtgcgggctcaaacccaacgcagcgttccgcccatggagtaaatcgaaaaag

SEQ ID NO: 180530 - DNA, 411 bp, Arabidopsis thaliana landsberg
atgcggcgacgtaaaaggcaacaaccatcacaaggtaataatgctgaacttgaaaaatatttatctactaattttgagtttagtgatgcagatgcatcatgtaataactttcaaatcattcattggtggaagagtcaccaatctcaatatccaattttagccatgatcgcaaaagacgttctttcttcacccgtttctacattttccgtcgagcgagcttttagcatgggaggttaaatactagatgaaactcgatcaagaatgagtccagattctcttgaagctcaagcatgtcttgacgattggaccagagccggatatagacaacaagaattcattcgagagaatgaagaagaattagaagatattgatagtgatgtattatcaacaatatcagaagatagtgattaa

SEQ ID NO: 180531 - DNA, 2283 bp, Arabidopsis thaliana landsberg
atgtggatcttgtggagaagaagtgagctctcacgtgggaaagcggaggaggtggtgatcttgtcaccggaaaatggacagaaagggggagactggagaaggtcaccggaacttcaccggagaaccaccgcagccacagtgagtcaccagatcttagccactgtcaccggagcagtcgtagccaatcttcgaggcggttaagggtaaggaaaccctagacttattctgtaacttgcgcaggaattttctgttttggttataggatatgttgcttgtgctgcaagtcatccaaatcctagatctaatctctgttttgcctttgattgttgaactattatacctaacaaccatgggcttgaaccaccgcagatctttactgtagagccgtccacttcgccgtttgagccgccaagcaaaccgccgagtgatcggtcatgatctgtactgttcttgtttattcctacgtaatcatttcttaagaactgaattatctgatccaaccagtggagataatgtcgacgaagagcagtagtattcatggaagaaatgaagtgaagatggaaggggaaaagcgtaaagacgttgagtcggaatcaactcatgttactctgaatgtgaagggtcaagtaagatttgattgttgaaactatacaatttctatattagcatgcatgacttaatataacatgcgtggatttatgtagaatgacgaaggggttaaagtcttccgggtgagaaggaaggctaagcttcttaaattgatggaattatacgccaaaatgagaggcgtagagtggaacacatttcgctttctatctgatgatggctcaagaattcgagagtatcatacagctgatgaggtatgtattatcattcaagcttaaagattcttataatatattaagataaatcattcataaatgatctttttttcactgtgttttctcagctggagctgaaagatggagatcaaatcgatgcattgttgcctcaacaaagtggtttttggtccttctacagtatttagagtttgagtgtttctggtgtgaatgtaatgttggaattggtcaaagttgaagtcgtttccgagtatttcgtatcacgtttagctgaataagttacatggccgagtattatgcttgtgctgatttgtacgagttattgttttcgatctgattcctgtaaacaagtctcctctatataaaggagttttgattttctctttaatctaataagaaaagctttgattgaataatctctgttttatccacttttaggatgtaataatacgcagatttagatttctaaaacggttcattgttacatgcaagaaaggaacacaaagatatgttgcttctgttacaagttttgaatagaatcaaatagttgcaaactttgaggaaagggaatcaacaaaaggaattttttttcctttaatacttaaatcgaatttatattcaatgatgaaacatcctatacaaatacagtaccattgataccattcttgcatcggcttcaatcatcaatacagagttcaacaactctctgagatttttagtaatatgtcggacgaaaccggtaacagtaataatccttctctgtttcaatatcaaaccatatcatagttctagtgttttgagggtcaaaccatatcatagttctggtgttttgagggatcatttctgttatctaaagctgttcttgatggttttttggtgaaacagaaaatgctgcaattgaggttaatcatggattgcttaaggagcttgaagatatgggattctctatggctcgagcagcatgggctctgcatcactctggtatgtatcaaccacttcaacatattccaagaatcatttcatggatcagtatcatccatattttgtctctctcttcatcttcaggtaactctagccttgaagcagctgtgaattggatcatagatcatgagaacgattcgcagtttgagaaaatgcctttgggatgttttattcatcttcatttctttttcatatatttcatagaaaacttttgatcaaaggtggtcttgcaggtggagtttaacattgagattgagtctccaaatccatctgatgatactgcagaaacttctcatgcaagaggaaaagaactattgtaagtaagtctccatttaaacatatatgcatattttttaaacttgactcttttttaggacaaatgacttcattgttaattctcagggaacaagctcgttaactaagagaagaacaagaaactatacgcgaaagagaaagagagaag

SEQ ID NO: 180532 - DNA, 131 bp, Arabidopsis thaliana landsberg
atgggctactcactactagtgttggtagtacacattctacagaaagatggagtaaaggtaaatagaatcgatcagcaaatatgaaatgaaacctttcgctattttgaccttttcagttttttgacatctag

SEQ ID NO: 180533 - DNA, 400 bp, Arabidopsis thaliana landsberg
ctacgtgggcagccacctgcgcgaatacggtggggacgccgactggttcaacgaatccttcgtgcacctgcacgtgccggaaggcgcgacgccgaaggacggccccagcgccggcgtcaccatggccacggcgctgatttcgctggccaccggcaagcagttgccacgcaagctggcgatgaccggcgagctgaccctgaccggtcaggtgctggcggtgggcggcattcgcgagaagatcatcgccgcccgccgggtcggcatccgcgagatcatcatgccagccgcctgcgagcgggattacaacgaactgcccgaccatctcagaaaaggcatgaccgtccacttcgccagtcattaccgggacgtgcagcgcgccatctggggaaaacaggcataa

SEQ ID NO: 180534 - DNA, 40 bp, Arabidopsis thaliana landsberg
ccaccggaaagctttccgagttctgctccgaacagaacag

SEQ ID NO: 180535 - DNA, 1954 bp, Arabidopsis thaliana landsberg
atgttgaaggcgattcacttgaggatcctaacataattcatatccatagtcttgaggagctgccaatgactatttgctgcataaacaaaaaggtatgtcatgactgcagttctggcttatactagaatacgctcatagttgagaaataagctggtctgtttgaagaaagtactaattgtaggccagaactaaacagtgtaaaaatgtagttcgagatgcttgatattacaccttcattaccattttttggtttgtatatcttgccgattagtattttgaccacccttttgatatcgcctcccaaaacaggcaatgggtgatggtgctgcaatagttgcttacatcatgaagccatctcgggtagaggactttgccaaggttagatccttatttgcaatctgactctgaagtattatatatatggtgatcattgcttagtttttggctctctgtgtgctggtcgtatatatgctttaccctctaggtcattactgattcatgaaagtaatatggatatatatgtaatgttccccgatgttaaattttctgattttcttagaggggtgctttacccatgtatcctacttcatgtgggttgatatttctgcccctcatgtttgagttccctcttgcatctcaactcaaacacgctgatatcattttccacaaagcaactgatgaaatcttgtccattgaactgaactgctccgactcaaaatcatctgttgcagttacattctctaccggcatggagaaactgaaaaagtaagcttctcaattctttgttttcaatctagcactcagttatatctgcaagtggcgtatagataccatcatacacaaatatgagaaaccttgttaaaaattctccattcaggtttgcataatgatataaggtatttgcaggtatatggaagatcaaaatgcttgtgccatagtcgaccctattcgaaatatatatccagtcgtagaccgactcaagatgcaacatattcttcttggattagagggccttggtgcagcaggacgaaagataagaggtgcctgctttctcaaggtcgtaaaagtcctctcattttgatcaactcgtcaatcttctttatgcttataatcttacatagttatctcttgagacctttagtctggcctcttaacttctccagtttcgcattgatgcttttcttttttactttagcaaattaatatcagagttccttatctacagattgacagctatgatgaaccagatctggctcagaacttgtcaagagctggactctctcttccatgtattgaaaaccaaaggttgcctgtggtgttgctgatgctcacagcatggtgaatatctaatactttccatctagatttgatatctcgcaatatatgttgctcttttcacagcagaacaaaaaaattcctcgttttcatgtgtttctcacaggccattgtcttctgagtcgagtattttaagaatctgaacactcctgttcctgccattatccaagtaagtcataatgtaatatggatacccaaatctagggctcctaaatcaagatgtcaagcatagaaaaacttctcaacccatgttttgcaggagtatgtggaccattcatctaggatttttaagttttacgtcttgggggaaacgatctttcacgcggtcaagaaatcgatccctagttcttctagtctgaggaaatcagcggaggaaaatggtctcaaaccaattctctttgacaggcaagatttcataacagttccatgaacacatagccttcagttactaaaaagattgtaactttggtagttccattacctccacagcttaaaatcgttacctgttgattccgcaaaccagaacccggtaagcgagattgatctagagctagttacagaagcagctacctggctaagaaagaagcttgatctcacaatcttcggctttgacctaatt

SEQ ID NO: 180536 - DNA, 1211 bp, Arabidopsis thaliana landsberg
tctcatgtggatagtaatgcggatattactctttcgtgtgcaccagttagtgaaaggttagtattcttgaatctcgtttacgtcttttctatgagaaatctcagttcttaaaactagtttttgtggattctttagccgtgcatcaaattttggtctagtaaagattgatcgaggtgggcgtgtaatccatttctccgagaaaccaacaggagtcgacctgaaatcaatggtatagttttctatgattcttaaaacaaatcaactcccaaaacttaaaaacttttctgtttgtttatttacagcaaacagacacaacaatgcttggactgtctcatcaagaagcaacagattctccatacattgcatcaatgggagtttattgtttcaaaaccgaagctttgctgaaccttctaacaagacagtatccgagttccaatgactttggatctgaagttattcctgcagccataagagatcacgatgttcaagtaagattctataaaactcacgtcttgtctttcttttacccgttgaacacaacgaatgatctaacagtttcgtattgtttttggctagggatacatattcagagattactgggaggatattggaactataaagacattttatgaggctaatttagctcttgttgaggaggtacatcaactccaccttattatgacatcttggatacatttctcaaccttttgttcttgatctggttctgcagcgaccaaagtttgaattctatgatccagaaactccgttctacacttctcctcggttcctcccaccaacaaaagctgagaaatgtcgggtatgcatcaaaactatccttttctttatggttgtttctttgattccaaatgctaattaagtatggttctgttttgatgattttgttagatggtagattcaataatctcacatggatgtttcctgcgagaatgcagcgtccaacgttcaatcattggtgaacgatcacgtctagactacggggttgagcttcaggtgaatctcttaactttgatctaaaacaatcgaaattattttacgtatgttgcgatcaaactgagcttggttttctttctttcttttccaaaggatacattgatgttaggtgcagattactaccaaactgagtctgagattgcatctctattagcagaaggaaaggttccaattggtattggtaaagacacaaaaatcag

SEQ ID NO: 180537 - DNA, 287 bp, Arabidopsis thaliana landsberg
atgaaccctaggacgagcgccagtgctaggacacccccgcagctagtgcctgtagcattccttcgctgctctgagtccgcaggtacacgctggcccatagttgacctcctctgcccacagccctggacgagatcgcgccacgctttctcgaatgcgttcgatggtttgttcgtcaagctcattcgccttctgtgtacgggacttggccattactgcccttcacgatgtgccaggcgaaccaggccgcaaagctcatccaacccgctgtgaatgcggcggcccctacg

SEQ ID NO: 180538 - DNA, 1262 bp, Arabidopsis thaliana landsberg
atgcatgattctaccgccactgcacttggatatggtatatacaagacagatttggtagctaactcgagccctacttacattgtgtttatcgatatcggtcactgtgatacacaagtgtgtgtggcatcgtttgagtctggaagcatgagagtccgttctcatgcttttgatagaaacttgggcgggagagattttgatgaggttctcttcaaccactttgcccttgaatttaaggagaaatacaacatagatgtatatacaaataccaaggcgtgtgttaggttaagggcatcatgtgagaaagttaaaaaggtcttgagtgcaaatgctgaggcacagctgaatattgaatgtctgatggaggagaaggacgtgaggagcttcatcaagagagaagagtttgagcagttgtcagcaggcttgttggagagattaattgtaccgtgtcaaaaggctttggctgactctggtctaagtttggatcaaatccactctgtggagctagttggttcagggtcccgcattccagctatatctaagatgctaagctcgttgtttaagagggagctaggcaggactgtgaatgcaagtgagtgcgtagctcgaggatgtgcgcttcaatgtgcaatgctcagtccagtttttcgagttagagattatgaggtacgctcttctctatatgtgaaaatactcttgcttacttctcatttctttttgagtatcgtgtgtattaaatacatgatggcatttatacatttacggatttattttctataaatggtgatgtgtcttttgttaatgcttccctatttccaggttcaagattcttaccctttcgcaatcggcttttcatctgataaaggtcccataaacacaccatcgaatgaattgctctttccgaaaggccagatcttcccaagtgtaaaggttcttactctacatagggaaaacactttccagttggaagccttttatgcaaaccataatgaactatcaccagatataccaacacagataagcagttttatggtatgatatctttcaggcttcccttattcagatatatattcagtctttagagttctgattacgcactggatggttatgccactattgggcactgcatattttatggaaagttaattttgctgtgtatgttttgttagattgggccttttcatatatcgcacggagaagcggcacgtgtcaaagtaagagttcagctaaatctccacgggattgtcacgattgattcagctacg

SEQ ID NO: 180539 - DNA, 1265 bp, Arabidopsis thaliana landsberg
atgcagtttgttggacgactcctcttggacttccagttgtacagccttatcgaaagcctggtagacatttggtaatgctcttaacttctttgataaatgacggagcaaaaatgatcagctgaaagaaatgaatagcgactctcttgaatattactgaatatcactgaatttgagaggcatcaattttggcaggttaagactacccttcaggtgttgactctaagccgtgagactgataaggtaacccaaccaaatttcattcaccatataacttttctccatattttccattaattggaaaatatgactagacattcttatttggagaaagactagggttcagcctacatcttattttagtgtagcatttgggtagatttgatgagttttaagcagaaaagtctcatctttctgcaccacattctgtattcttgcttcaggtcatggcgaggaggcagatgactgcttttgcaccaaattttatacattctcttgatgggtctcacatgatgatgacagcagttgcctgcaacagggcgggcttgagtttcgcaggtcagctttagcatttccatatgcatctaactgatcttgattttttcattctagattcttactcttcatacccaattaaaatttgtaggggtgcatgattcgttctggacgcatgcctgtgatgttgatataatgaacacagtactcagagaaaagtttgtcgagctctacgaaaagccaatcttagaaaacgtaaaagaatctacttattacatctttcaaggggaatacaattaccaacattacactttctttctttgttttattataactaaactcatgatggagggtttatctgtgtgttgatagttgttggagagtttccagaagtccttcccagacataagttttccgccattaccagaacgaggcgactttgatctgaggaaggtcctagagtcgacatacttcttcaactgagctgcagcacattcaggttacttacatactggaagctccactactccacatctaacattcaggacagagtaagtttgattcttcaggccaatacatcagccacgttgatcaaagtggaaaagattcttaataaggaatgttgatggttaacctcaactccgaggtgggcttcgggttacttgtaaatatacacagaaagagtgtttcaaagcttggcaggagggaaggtgttggatcggattgttggatccgattatcgaaccagtgactgtggcactccggattactag

SEQ ID NO: 180540 - DNA, 84 bp, Arabidopsis thaliana landsberg
atgttagttgtggaattaatctttgaatccgaacagaataaaacaattatgtcctccaaaaaattgaaaaattcgggacgaaag

SEQ ID NO: 180541 - DNA, 1610 bp, Arabidopsis thaliana landsberg
tattctacccgactgcaaaactgagtattacaacactgccaaggtatatcaactttgagaaaaaaacttatcaaacacattaccttgttgatatgttaagggtgatggtatcactgaaattgacctctgtgttacaaggtacaggtccgtacatcaagcatacacatgaagatggttcctacaaacacaccattctcttggggttcatacaacgaagagattccttctgcaaatgacaatggtaccttttcacaagatgggcttgtggaacagataagtatcaccagagacaagacagactatttctggtatctgacagagtgagtaatactagaaaattcttgacaacattttggttactatctatcttcctgtctcaaagggagaactcacggttggttttgtctgtggatataaatcagtattacaatcagtcctgatgaaaagttcctaactggtgcagcaccctcttcttactattgggtcagctgggcatgctcttcatgtattcgttaatggccagctcgcaggtagcattaagataggccatactcatcctcatggtagatcgcctttgtcatctgttacacatttctgtgtttcaggcagtgcatatggatcgctggagaagccaaagctagcatttagtcagaagatcaaattacatgcaggggtcaacaaacttgctctattgagtactgcagcgggtctgccggttagttctcctcagtttatctctgcgcttttttctcatacactgattacgttctaagcttcctggtccttcattgctcacagaacgttggcgtgcattatgagacttggaatactggagttcttggcccagtgacactgaatggagttaactccggaacatgggacatgactaaatggaaatggtcttacaaggtcctcctgaaattcaagagaaacgagtttgacttaccaacaatcattaacaatgaaataaacatttgttcatttgtgttcaagcagattggtactaagggtgaagctctgagcgttcataccttagccgggagttcaacggtagaatggaaagaaggatcattagtggctaaaaagcagcccttgacctggtacaaggtaagagaaacagagtaatcaatgaatcatgaccaccaacaaagttagatcaatataatgaaaaccgaaatccacagggcagaattttcaccatctctttttgcagtctacttttgactcaccaacaggcaatgaaccattggctttagacatgaacacaatggggaaaggtcaaatgtggataaatgggcagaacatcggacgccactggccagcatatacagctcgtgggaaatgcgaacgctgcagctatgccgggactttcacagagaagaaatgtttgagtaactgtggagaagcttcacaaagatggtgagtaaaactgcctaaattcttcttcttcttgagtccaaatttgaatcaaaggtttgaactttatcttcgtttacaggtaccatgtgcctcgttcatggctgaagccaactaataaccttgtcattgtacttgaagaatggggtggtgaacccaatgggatctctcttgtaaaaagaacagccaaataa

SEQ ID NO: 180542 - DNA, 363 bp, Arabidopsis thaliana landsberg
gtaagacaagaagtggaatatggaattagtaaacgatttcgattatctcggtcatcgtctttccgtatcgaagctccggaggcgactactccgacactgaagctaattttccgtaagaacttaatgacaccaatatttacagggagtaaaatcagtgacgtggacaacaatccacttgagattatccttgttgatgactcaaacaagccggtgaatctcacccgtccaatcaaactagacatcgttgctcttcacggagattttccttcgggtgataaatggactagtgatgagtttgagagtaacatcatcaaccaaacccatgggaaacggccgttacttgcagataaaaaaagtgtgacg

SEQ ID NO: 180543 - DNA, 1186 bp, Arabidopsis thaliana landsberg
atgaagtatgtgaagccattgagcttattgggtaatgcgctgaagaccaaagtgtcagtccctggtcggtttctgggtttagatgttggtgataagtatgttggattagctatctcagatccttcaaatatggttgcttctccattgaggtacctttgattcagtgtctacatactacaacatttgtttaacagtaattttcaaaaatgcaaatcctctctgatcaattttgtcaccatcatcgctattgaaaacctgttacttctgttgcagtgttttgctcagaaagaaatcaaacattgacctgatgggtacagatttccagaacctggttagtgctataagtttgatcgttcctttactttttagctctagatataaaggagaccttaaccaaatacacagattttagttcttgttaagaaatggagaaactatcatttcttagtgttttttaaaacaaagaaaaaaggttgctagtgtagattagtgtttactaagataaggaatgaagaaactatcgtttgttttggtaatgaagaagaaagtttgttagtgtagtagattagtgtctactttcaccctcggctttttgtgattactgccttactggtgattaaaggatcaaggtttattcatttagtgtttactgttaagtccttgacgtagtagagatctatcaacaagtagacttatgaactctgtttgattacatcaatcatttgccttttgttgtcttatgcaggtcaaagcattttctgtgtcgggattagtcgttggttatccatttggcaaactgaacaatgtagaggatgtaagttttttttgttgtttcgactgaattgtgaagtacttttcctctacattagcacatataaccgaaaaggatttttaaacttggaacaggttgtcactgtgaatcttttcattgaggaacttcgtaagaccgaaaaactcaaggatgtgaaatacacatattgggacgagcgattatcatcaaaggtatatatttttcagatttaaagatcttgtaagtcacagtaaagataggtgttaagtttaatatcccttgaatctcatgtaatactgtcaacagaccgttgaactgatgttgaagcccttgaatttgcatcctgttcaagagaagacaatgttggacaagttagccgcagtagtaatacttcag

SEQ ID NO: 180544 - DNA, 111 bp, Arabidopsis thaliana landsberg
ctattccattttgatcggtggttggtaacagcccgactggtgaaacttgaaagacatcctccagccaacgcagaacctttcattggtgttattgtaaatattgaaaaataa

SEQ ID NO: 180545 - DNA, 139 bp, Arabidopsis thaliana landsberg
tgatctgaccgccgccgccaagtacatcgttcattccatcagacggctgagaaaaatggataatcagaacgaaatttcactaatcgaaaccgaaatcagacgagtgatgagttctggccggcaaaacgaacctggttag

SEQ ID NO: 180546 - DNA, 42 bp, Arabidopsis thaliana landsberg
gatgtgaagtatcaaacagaggatgctgtggaaccggattag

SEQ ID NO: 180547 - DNA, 452 bp, Arabidopsis thaliana landsberg
atgactcctactgggcagacatttcctgatggaaccaaacttgaggtacagattaggcattgatattgattgcattgttgttgtttcgattatagacccatatattttgtttttccattgttgtagataatgacttgcagaccaagatcagatctttatgttaacctcccagctctcaggaaactagataacatgcttcttgtaagaacaagtgatctcttttcgtcttcccagtttctctataggtattttaagcagcaaaggtctcattcttattcatcttccatctttgcaggagatattagatagttttgaggagacagagttttggtatgttgaccaaggaatcatggcacacgaatcagcagcggacggatcatcttctttccgaaaatcttttcagagacaagaagccaaatggtggcttcctgttccacgggtttcaaaaggag

SEQ ID NO: 180548 - DNA, 220 bp, Arabidopsis thaliana landsberg
atggcttccaaccgttgtgctgtctgcaaaattttgaatgaaacttgtgctccaatgtgcatttatgcaccacattttccatcaaacgatgcaagtttcaaagttattattcagatttttggagccgtgaatgtttgcaatatccttgataatcttgaatttccagaacaacgagagattgctgccaactgtttacgttatgctgctgaggctcgtatac

SEQ ID NO: 180549 - DNA, 107 bp, Arabidopsis thaliana landsberg
atgtatcaaaactacagaaaagtgtccaaacgggtatgtacttctccaagcaccaggaaagggtttatccaagcaccgggaaaggttaatggtcaagatgaagatca

SEQ ID NO: 180550 - DNA, 297 bp, Arabidopsis thaliana landsberg
gttgaagcggaaaaaccaaacccgactatcttcttaaaagcttgtgagttattagaagtgaatcccgaggatgcggttcatgtaggagatgaccgtaggaatgatgtatggggagctagagacgcaggctgtgacgcttggctctggggaagtgaagttacgtcatttaaacaggtaaacgaatctctctggttttgctcaaatctctcaagaatttaaaaatcattggtttacttgaaatgaatgtgcttttgttttgttctgcaggttgctcaacggataggagtgaaggtctga

SEQ ID NO: 180551 - DNA, 121 bp, Arabidopsis thaliana landsberg
gatatgctgtgtgtacaatgatcctcatgaattggaaaactgggacaatggatcatacccgtatgatactatgaccaaactgattctgatgacatatgaacgggaattatcttttatgtag

SEQ ID NO: 180552 - DNA, 70 bp, Arabidopsis thaliana landsberg
atgacacagtcaagcacgtcgaagatcgtagaactctccacgtggccgaactcacaggcgatagtgccgt

SEQ ID NO: 180553 - DNA, 1244 bp, Arabidopsis thaliana landsberg
aggtctttgtgcgagtaaaagtcggtaatcagatgttaaggactaaatttccccagagaagcaataatccaaaatggggtgatgagttcacgtttgtagtcgcggagccgtttgaggataacttggttctctccgtggaagatcacactgctcctaacagagatgagccagtaggaaaagctgtgattttgatgaatgacatagagaaacgtatagatgataaaccttttcatgaccggtgggttcatcttgaagactccatctcagacgctatggatgttgataaagccaagaaagtgaaattcgctactaggctccgatataaggcggttctcgatggaggctaccacgtttttgatgagtccatgtataacagcagtgatctcagaccttcgtcaagaaagctctggaaatcagcaattggagtcttggagctcgggatacttaacgcaaatgtgtttcattcgatgaaaactcgggaagggaaaggtacttcggacacgtacgttgttgccaaatacggtcacaaatgggttcgatcacgaactgtgatcaacagcatgaatccaaagtacaatgagcaatacacatgggaggtttttgatcctgcaacggttttaaccatctgcgtcttagacaacgctcatttcgcagcaggagatggcggaaacaagagagatcagccgattgggaaagtccgcattagactctcgactcttcagacgggccgtgtgtacacgcacgcttaccctttacttgttctacaacctactggtcttaagaaaagaggagagcttcacttagcggtgagattcacctgcacatcggtctccagtatgctgatgaaatacacaaaacctctcctgcctaaaatgcattacatactacccttatccacaaaccaacaggaagctcttaagatgcaggctatcaacataattattgttcgtttaggccggtccgagccaccgctgagacgggaagtggttgactatttgacagattggaaaagtcagctgttcagcatgaggagaagcaaagccaacttcaataggttcacgacagtgttctccggtgcgctgtctgtttggaaatggatggaacaagtgtgcacatggaagactcccgtgacgacggctctggtgcacgtgctctacactatgcttgtgacgttcccggagatgattttgccgactgtgtttctgtatatggctgtgattgggatagtggaattacaggtttaa

SEQ ID NO: 180554 - DNA, 1195 bp, Arabidopsis thaliana landsberg
aagaacaatcacaccgggaggaggagaacttcctcttggaccgtcatatgcgccatgttcggtggagtcgtcgacggcgcacagcgattctttcttcttgactgaaaaatcatggctttccaatctcactcgactagaaaaaatagtgagtcttctctcccaatatatcggtttattgagatccgctcttaagatcgcccagtcaagatctcttctctcgtatcttgtgacgcctccatctccgatcatacgcctcaagcaatgacaagtcaggatcgtgagcagccgcttagtccgtcttaacagcgccaaccataaggcaaaacactaattgtcaagatgggcctcttctttgtgataggccttccttgttttggcccactaagctatctcctacggcctaaaagtatttgtacgtttatcatctttgtaactactggacccaggtatgtcccaattatatttttgttaagccctaatatattgatgtctttttcccctattgagaatggtagaagacgccaccctcacatcggatcaaaaccaatagttaggattgacaaataccatcctttaatcttgatggaatataagtttagtgttttagagctcgccactgaacccttttatccctataataaacctttgcaaccatactcttcaatagagagaactattattagaactcgacctcttttcgtagaaaccgtgttggttcctaatcttctttttagacgttacgtgcatagagtcgatatcacccaaggtcaaagaatttatattaacgtcactagccctttatatcaacgtcactatctttgttgtatccaaccataaggctgatgtttacttaatctttgtacttgctatgacttgaatgattgaaatatgatttgtccaaaaaagaaaaatgtctcgacaggcaagttatgtttttagtatcgacatgtgaacttatgttacaaaaccatagttatactctatgtgttcgatcaagtttgatgttttagattttgcacataatttaagattcaaaagtttttttatttatttaattaaaatatatgaatattgaaatccaaggtaacatgttcgttacttacacatgcaacaaaagtgagagttagaccatctccaatgtaagaccatctcaaatgcatatttctatttttttcttctattttagagaaaatag

SEQ ID NO: 180555 - DNA, 336 bp, Arabidopsis thaliana landsberg
atgtttacttcctatacgccttattacaagctcaacttcggcaactggatgattgatggaaaaaactggacctatacttccaaagtaactgagttcagcccattcggccaggagctcgagaaccaggatgcgctcgggcggtattcggccgcaacattcgggtacaggcaaacctttgccaccagtgtggccgccaatgcacgttaccgcgatatcggctttgacaattttgaagattatggatttagtccctgtgccgacaaccatttcaaatttaccgactatgcaggaaacgtttcttctgcacagtcacattcgggattgaactccatcaag

SEQ ID NO: 180556 - DNA, 178 bp, Arabidopsis thaliana landsberg
agtgaggctgagatttgtcgtcatcgtcttcaatatcttcggatggtttaggatcgtggatttcgtcttcgataactgtttccgttccataaggatccatgacgggaaaatcgaaaccctaaaaccttcggagaacgacgaagaagaagatgatgaagaagaagcggcagccgcctaa

SEQ ID NO: 180557 - DNA, 40 bp, Arabidopsis thaliana landsberg
atgggatattccaagaagtcgcacgatcgaatgaaagctg

SEQ ID NO: 180558 - DNA, 518 bp, Arabidopsis thaliana landsberg
atgaccatcgcccaggccggttccggcttttgcgcctccggcgaggccgtgcgcagcatctacggcgccctgtacggcgtgcaggccgacgggtccgtcgacaacaagaaggccctgctgcccaccccgatgaagggcctgccgaagatccagaccgacggcaccatccccgcccccaagatcaagggcgaccccgccaaggaccaggagaaggtcgccaaggaggtcgcccagcagggcaccaccaccgccccggacggcgaccaggacaccccggcgaccaccaacaacacgggggcgggcaaccgcgacacccgaaggcgcccgcgcaggcgcccgcagcgcggaggaaggcggaggacgaccgcatgaccggcgcgaacaacttctccgtctccgggtacggacccgagcgggccggctggacccggctgctcgcccgcgactcggtcacccgccgcctggactggccgatactgctgtcggcgctcgccctcttcgggatcggctcccttctg

SEQ ID NO: 180559 - DNA, 365 bp, Arabidopsis thaliana landsberg
atggaaacagaaagtgttcaaaaaaccattattgataaagaaggatttccaaaatacagaaggagaagaacaaataactttgttgagaagaaagactttaaatgcgataacagatatgtcattccttataatagatccttatcactgagatacatagctcacatcaacataaaatggtgtaaccaatcaggttctgtgaaatacatattcaagtatattcataaaggaccatatcgtgttactgttgtcgttgaatcgtctttaaattcgaaaagtacaggaaagggtaaacagaaggacaatgctgatcgagatggatcagagacaaagaagaagaatgaagtcgaagactatttcaattgcag

SEQ ID NO: 180560 - DNA, 310 bp, Arabidopsis thaliana landsberg
gtttgggagagatgatgcctgaacagctttgggaaacgacaatgaatccagaaacaaggatactaaagcaacttgttgtcgatgatatagcggaagcaaacatgacattctcatctcttatgggtgctcgggtaagccctcaaatttccgactccattgatttttttgggggtaaaaaacaggcttattcacaagcttaactgcagtttgattgatctaatactgtgtttcttaatctcaggtcgatgtccggaaagaactcatcaaaaatgctgcaactaggatcaacctgcagcgtctagacatataa

SEQ ID NO: 180561 - DNA, 149 bp, Arabidopsis thaliana landsberg
atggaccatcacctcggcgctatcactattggcgtcaactacaacgtgttggcgccaattagtttagcgtgtacatataagagtcgacgtctacgtggatctgacgtggcagcacctcggtcgcgtggatcatcggcgccgacctccat

SEQ ID NO: 180562 - DNA, 121 bp, Arabidopsis thaliana landsberg
atggtacaggaagtggtgtatgaagaagatgaggaaataaagaaactgagagaagagtggggagaagaagtgaagaatgcagttaagacagcactggaggagcttaatgagtttaatccta

SEQ ID NO: 180563 - DNA, 541 bp, Arabidopsis thaliana landsberg
aaaatggatatgggaccatgcccaaaggtgcactctttgcatcttcggaatgagtatcctttgtttacagtaagtttagtatttaccttatacggttaccatgaaggccgcctacttccatggcctctttcaattgaatttgacatttgaacatacttactaattgggttgatatctgttttttgctcatgtttttgctcttcttcctggtttttgcttgagataatacgttaaatgaatggatagtgcatataagactagcctatgcagattagttacaaaaaaaagttggtgtcattgttatgtttagtttaattctacagtggcatgttgttctctttccactcctgtgttgctttaactcgcccttagataccgagaagcaagggcaaaaggtgttgataactacgacagggaattggaagatgccatagacaggcttatcgttgagtgtgataggaagattggtagggcccttaagcgtcttcaagaagaggacgccaaagctgccattgccatttctgtctctgaagtcactcag

SEQ ID NO: 180564 - DNA, 153 bp, Arabidopsis thaliana landsberg
attttggtttgtttggttacacaagaaacaacttacagtcatagcccatcttctctttgcaatagtatcattggaatggtgcagaacttcgtcggcaagaaaaatgtcaattttcttgtagtagcaagcggtatatttggcacaagatattcg

SEQ ID NO: 180565 - DNA, 76 bp, Arabidopsis thaliana landsberg
atgaccgatgaaacggaggaagatgacacgacgcagcagcgatcatcacgaaacgacggcgtttcaaagaataagg

SEQ ID NO: 180566 - DNA, 2030 bp, Arabidopsis thaliana landsberg
atgaatctttgtcagatctatcattcagagggaatgctggaggacttcgccaatacagcactggaggtggtacttaagtgggtttggcggcggacggtaatatccctatatctaactggattggaatgcgtttctcatattataaacatgcaaacaaaattgtgaacactgaacataaataattactgcttctgaagagaagctacttggatccacctgaacatctagcattttgttagggtttttaccatttgactacaacagaatgtctttcttttttataactattttgtatgctggccttactctgtatttacactcggcctgatgtacaacttaggtcaaggggaaaagaaaacgactggttctttcagagcatcaaagaaacaaaaaacgccgacgtcctagagatgctcaagcttcccagtaagtataacatatatcctccataatcgttaagcattgtcattcttgtctgcatattattattaacttttgttccggaacatgttgaacaaggttgagagggggaccaaaaaagtggcgcaaaatcagggcaacgttaaatgaaacaagaagaattagagaacgagctgctattaaagctcataacgaagatgtctgcagtgaatctgaggtatttatcaatttgaacacagtttcacctatccctggtacctgataaaaacttgtacctgaagacttttgtgtttcaacctacccaaattgggttacatattgtgggtgcagcctggactgttttttgttggtttgtataccattattgccgactctttcctctttggtttaattacttgcttttgccttttatattgactgggttatcctttgacgttgctactcaggaagaagttatcaaggatgaagagtatcaccgtctctttgtggatgtaattgactgttcccgtttactattatgtagtagattgtatattgttacgtttatagacctttttttgtttgcttatgaccgtgtgacatcattaatgccatcttgctttatgtttgtcatgactcctaaagttgcttgtcttgtagttgtgcaaggcattggcatccctacagagatattgggaagctctggagatagttaatttggctcggagattggatgctaaaatgctgcctgttgagacaaaaaaggagcttcagtcacttggagctagtgattacctaacccaaccttgattagtcattgtctttaactactgggtttatacctgtggttaacaacgctttcttctttttacagaaatatcttgcgatactatggatccaaagcagtggtttgactgtgtaagatctgtcattcagcaacatccatatcgtttgaatgcctggaactgctattacagtgtcatttcgaggtagagagcggcatttcacttggaaagtattgtaagcatgttttgtttacgaattgacattatgaatatcatattattatgtacagactagggaaaagagcatcgactgaagctaagttcatgcatcacttaaggagcaagtaccgagattgcgtaccccccattcttattgctggtcatcacttcaccgtgacaagccgacatcaagatgctgcaagagaataccttgaagcatataaattaatgcctgagagtcctttaattaacctgtgtgtgggtacgtatatattctcatattgttaactttcactttctcaagttttcaaaatcagttaaactaaaatgtcacctcttctttctttctattcaggagctgcgttaatcaacttagccctcggttttcgactcaaaaaccgacacgagtgtcttgctcaaggctttgcatttctgtacaacaatctcagaatttgcagtaacagtcaggaggcgttatacaacgttgctcgagcgtatcagcatgtaggactagtgactcttgcagcttcatactccgagaaggtgttagcgatttacgaaaaagaaaacacgatgccgaaacttcctaacgaggatccgattgttcggaagagcggaagcctgtga

SEQ ID NO: 180567 - DNA, 123 bp, Arabidopsis thaliana landsberg
gaaatcagaagaaccaagaatcagaacctgaaggaatgcgatgaaagcaagagcggcatcgataaaagccaaacagagattgacggcgatgaagctaggagcatagcatttatccttggttga

SEQ ID NO: 180568 - DNA, 2641 bp, Arabidopsis thaliana landsberg
caaatctccggtggtggcttctcgatccgccaacttctcttctccgggggtggctcctctctccggtggtcgctgctcgactaggcgatatctcttctccgctggtggcgttgctgtttcttctctctcaaacgagggatacttcttctccggtggtgactgcgctgtgggtttcggatgcacagacggcagtgaggagttcgcctcttctccggtttcacctgcggcggtgaacagcggtgggcgttcgtgtccgatggtttagggttcttcccattcaccgccgaaaactgttgggttctttttgtaattggattcgatataggtaaattcggagtcaatcagatgtgaaatcagctttacattcatcctcttcttagattaaagatgatgaaatcgactctcgactaatgaaaattggttttgggttgttgtagatctacatgttcttcttctccggccacacaaacggcggcgaattgtgtttctctcaatcaggtctgacggtttctctcctctggtggtggtagtttctcttctctacattcgttataggtaaacacatttagaatcctgtttttgataaattccctttccgattgaagtttacgaataggactttcgagtaatgaatttttcctcagttgcagatcttttttctaatcgccggcgtcactggtcacaagttcggttagggtatcgacaattttaactcaatactttaagaaaaatcctctcatttgcatttcagttgcaatggaaatcagagtgtgatttatttgtattgttgcagattgtttttctcatttgcatcggtggattcagagttaattacacaagtctctagtaagtgtttgagcctatatcgtctgtattttgttttaagaaaaactcccgccttcgtatgatttttcttttgaatttctgagttgttttgacagatttattcaatttttaatagattggtgacagatttgttatgattttagtttgccaatctcacaaggcatctaagattctaagttatttgcttatgcaaccttgttttttctgtgattaggaatggcgtcttctagtcatacccgcagttatccgcttcgcttgtatgaagaaggaaaatcaccgttgcaaaaaaggagtatggcccacagctgctatgtttctcaaattgggaagatcaaagacggattaggtgcagatgtgtgggatgagttgaagaaaactacacttggtctttttataaagtttactgaaagtggctttatatgggctgcccagacagttcatttcttcctcacgaatcagttgcgagtcgacaacatacatgagatgtggtgtttgattgatcgcaggccaataagattttctctctacgagtttgagaacataacgggcctcaattgcgatatgtttgacgagtctgacactggtgaaactgattacaaagatttctggaatgaaatgggggtatcaacgtctgttggcccattgtttacagagttggaacgtgtctttgagattagcaagacatggagtttggagaagaggatgatggttggtagattatgtttactatctgtgggagtacatgggattcatcacggttctagagtcccgttgtcgagtgctaaaagagtgcttgatcctgttgcttttgagaagtatccttggggtcgagtggcttttgactctctattaaggtctgtgaagattgtcaagtatgacggagattcttatgtgattcacggttgtgttcagaccttgctcgtgtggatatatgagagtgtgcctggaattggagaagcttgtgggtttagaaaaacaaatctgacgggtgttccgctacttgattggagatcttctagaaaacgttttaacttcaccgctttcattgaaaaggagaaagctgcccacggacaggtatgtaaggttttatagatcaattctgctacttgtctttaaaaaaaactgaaactgattaatcttgtcattatatgtatgtaggtgcgtgtgaggcatatgatccctgtatctgaagaaaacatgtatcctcaatggagtgactcagctgagaatcatgatacgacgcttgacaacttgcttaaagacatcatccacaaccgtttacaatctcatgcgtggacacatgtggcagcacggcgtaagaggaaacaaaatcaggaatcatcaaacgaggatggtgagagtaaagtgattgaatcaacgcctgcagatgatgtatctcataagaagcaaagaacagggaaagctcatataaaggtcctgcttttaccatttctgagttttccatatacataggtctatatgttgacagtgaattacctaacattgctatatgcttcattataggttgatgaagaggagaagacaagcttgctggatatttggaatatgttggagaaaatgaatgtcacatattagtgacatggacaagaatgcaagcagcagattggatgggttggagaagaaagttacttgcttagaagcgagtgtaaaaacaaggtttgaagctgtggagactgatataagagttcttaaagagtctcagccccctgtagtatccaatgaagctgccacatcaaacaacaatgatgaatatgaggcaaatagtaaccaatgt

SEQ ID NO: 180569 - DNA, 668 bp, Arabidopsis thaliana landsberg
atgctgatggtgaccggcgggctcagattgtcattcacaatttgtaagggcaccgcgcatccctgccgcgctgtggccggaaccaggaagttgaattgatcgaccccaacaaggcctggcgctcgtccaacccaaaaagaagatccttcattacctccggcggcgaaatcaaacagcggggacgagccgccagacgatgtcgcgagcggactggtgggcgtaaacgccccgtccggcggcgcattataaacgaaaccgtttccagttccatagattgagataaaactaccgggtgcggcgctgttggcgggtgaattggcagatacgctgccatcggcggcaacgttgagtaccgctccccgcccgcagccggtggagtcccgtgtcaagatgccgggggcctccgccgtccccaatggatagggggcgctctgcccggccgcggtggttactacaaccccggcggcgttgctcgccccaggagtagcatcggtcccggaaggaacctggaaattaatctggttgggggagacaaaaaggagaggggccgcgacgccattcacgctgacggacgttccgagaagctgccgcggaagtaccggcgccgccgagagcgtacccgtcgccaggttcacgccgaaaatggaagcgagagagccgtccgctag

SEQ ID NO: 180570 - DNA, 173 bp, Arabidopsis thaliana landsberg
aaactgaccagaatcgttgccgtgtagaagaatcgcagaatatttcctcctcctctcagtctctgcggcatcgtttcgttaaggttcacagacggaggagaacatcaatagaagaacaaaaatcttcgaactatcgtcgattaaaagcaaatcgaagattagataaacaataa

SEQ ID NO: 180571 - DNA, 840 bp, Arabidopsis thaliana landsberg
atgttgaaccagagagagattctagaaaaagcggtggaagagatcgatatggttgtcggaaaagaaagacttgttcaagaatccgacgtaccaaatctaaactacgtcaaagcttgttgcagagagaccctgagacttcaccctaccaatcctttccttgtccctcacatggcacgtcatgacacaactctcgctggctatttcatcccaaaaggtatctcatttttccccaaaatttatgcatttaggcgtatttgactccaactccttaaatgtagaatcaggaattctaactatatttatttttgcttgatttgagcaatattttcatattagaatatttgttcctttgatttattattttggactgaaaagtgaaaataagtagattgtgacatacgaatctttcaaattattattttatttgtttattaactttaatatattgattgtttgatgtggatcacaggcagtcatattctagtgagtcgtccgggtgttggtcgaaaccctaagacatgggatgagccactcatctacaggcctgagcgccatataaccggcaacgaagtggtgttgactgaaccagacttacgacttgtttcatttggaactggtagacgcggctgcgttggagctaagcttggaacgtccatgattgttacgttgttgggtaggcttctccaagggttcgactggaccattcctcctggtacgacggacagagtcgagctagtcgagtcaaaagaaaatctgttcatggctaatcctttgatggcttgtgtgaagcccagattagatccaaacatgtacccgaaactctggaccggtccagcttga

SEQ ID NO: 180572 - DNA, 244 bp, Arabidopsis thaliana landsberg
cggattagatgttgagggtaaagcggagaagctagagttcttgatgttcgatcttgatcgggttttgaaaccccgtggattgttctggttggataacttctattgtgctaatgatgagaagaagaaagaacttacacgtatgattgagaggtttgggtataagaagcttaaatgggttattggagagaaggctgatgcacaagtttatctctcagctgttctgcaaaagccagtgagagcttga

SEQ ID NO: 180573 - DNA, 52 bp, Arabidopsis thaliana landsberg
atgaagtgtcagcagcgactgacacaggacccagggattaagtccctaggag

SEQ ID NO: 180574 - DNA, 46 bp, Arabidopsis thaliana landsberg
atgaacggcgagatgatgataacaatctatgaagaaagaagttgcg

SEQ ID NO: 180575 - DNA, 2860 bp, Arabidopsis thaliana landsberg
  unsure (1)..(2860): unsure at all n locations
atgtattctcttgaacaaaacccagttcacaaggatgactatgacctggaagctttggaaccatcccctgtccaagaagagtacgctccagtcatctttgctcaggacactgtttctcacgttgtttctctcgatatgctgtctgggaaagtaagcttctttactggttctaattttactgtttttatgtaatttactatcatggtctacactcactaccgggcgaatcctgccgacatggctagttcatatttcaatctcggcttaccgattaagttgttttgatcattttatttaaagtttagagcactgttttaactgatacttattctcactcaattcctcttgatagnnnnnnnnnnnnnnnnnnttgcgggccaggagttcaggtaaaggggttttgacagctcctttcccattgataaagacaaatagacttggggtgatcctgacatttgcagtgtacaagagagatctcccctccaatgcaacgccaaaagagagaattgaggctactaacgggtgtgtagcataggcgtctaaataaataataacgcataagttttacaacattatttttgctcattcatctcttttgatgcccctgaaggtatctcgggggagtgtttgacattgagtccctggtagaaaacttgcttcaacagctggctagcaagcaaacgattcttgtcaatgtgtacgatatcaccaatcactctcaaccgattagcatgtatggtacaaatgtgtcggctgatgggttggaacgtgttagtccactaatctttggcgatccattgagaaagcatgagatgcgttgcaggtacttgcagttggcacatacatatgtctgtaatttcttcttgtttgcaagaatccaggtgctaacattttgttgtgagcttcttcctctttgtagatttaaacagaaaccaccatggccagtgctatcaatggtgacatcattcggtatccttgtgattgcgttacttgttgcacatataatccacgcaaccgttagtcgaatacacaaagttgaagaagaatgtgataaaatgaagcagctcaagaaaaaggctgaagcagcagatgttgcaaagtcacaggtaaatacatcatcttcagttgataaatttccacagcatataaacctttctatgacagagagaagagttgtaatctaacttttttttatgcagttccttgccactgtttcacatgaaatcagaactccaatgaatggtgttctaggtgagtatcgaaatggccactatgttgcctccttctctcacctatgcccatgaatattttctgaagaacaaacttaaccaaatattctcatgttgactttgatctggggtgtaggaatgttgcatatgcttatggacacagagttagatgttacgcaacaggattatgttaggaccgcacaggcaagtggaaaagctttagtctcgctaataaatgaggttttggaccaagcaaagattgaatctggaaagcttgaacttgaggaggtgcggtttgatttgagaggaatattagatgatgtcctgtcactcttctctagcaagtcccaacaaaagggggtggaggtaacttactatatgatctgcaaagcaagggttgtaactgatagcaagtctttcttactgattttttgagtgttgctgatgaacgcagttggcagtatacatatctgatcgtgttccagatatgttaattggtgatcctgggaggtttcgacaaatactcacaaatcttatgggtaattccattaaggtaaacttttttattatgtttttttctgaccattccttgcatccgagttgatcaacggagctgatcatttatatatattctggcagttcactgagaaaggacacatctttgtaactgttcatttggtggatgagctatttgaatctatcgatggagagacagcatcatctccggaaagtacactgagtgggcttccagttgcagaccggcagaggagctgggaaaactttaaagctttcagctccaacgggcatcggagctttgaaccatctccccctgatataaacctaatcgtctcagttgaggatactggcgtagggatccctgtagaagcgcagtcccgtatttttacgcctttcatgcaagtcggaccatccatatccaggacgcatggaggcacaggaattggacttagcataagcaaatgtctagttggactgatgaagggagaaattggattctcgagtactcccaaggttgggtccacattcacatttactgctgtattttccaatgggatgcaaccagctgaaagaaagaatgacaacaaccagcccatattctcggaattccggggcatgaaagctgtggttgtggaccataggcctgcaagggcaaaagtctcgtggtaccattttcagcgtcttggaattcgagtcgaagtagttccacgtgttgaacaggctctacattatctgaagattggtactaccactgtgaatatgatactcatagagcaagaaatatggaatagggaagcagatgatttcattaaaaagctacagaaagaccctcttttcctttctcctaagttgattttgttagcaaactcagtagaatcgtcaatatcagaggctttatgcaccggtatagatcctccaatagtgatagtgaaaccattgagggcgagtatgctagcagcaactttgcagaggggattgggtattggaatcagagaaccacctcaacacaagggacctcctgatttgattctaaagaattttctccttggtagaaaaatcactatcgtggatgatgacaactgttacctcacagtggcagcgggagctctgaaaaa

SEQ ID NO: 180576 - DNA, 398 bp, Arabidopsis thaliana landsberg
gttcatacttcgtctcaaggagccagaatcttaccttcaactctcgcccctaaaccgaacactggtctgttgatttttccagtaccattcatctatgtattttttgcttactctttgtttttttgggttgttcacgtttactgtattaattgtgagtgctagtctctgttccaatagatgctggctctaagccacaagagcaaaaggtctctgtcaaaattttgcttcattctagtggagttcttgctgcaaagttcccatataaccaggtaagataacagaagtcacaagtctttgtggggaaatacttggtagttaagtctttggcacttctttttccaggtggtggtggatgctgtgcgtaaaatccctaaggccatttggaatgctaaacaaag

SEQ ID NO: 180577 - DNA, 283 bp, Arabidopsis thaliana landsberg
atcatacagagaacaacaaagaaagaaaccaaataagaagaaaaaggagaagaacattcaaatggcaccaagaagttctttgatccgcttcgccttcatctgcattgtcttggccgtgatggtcatgactgctgagtcgcacaacggaacccaccaccatggcccggctatggctccaatgccacccatggctaaggctccgtctccaagtgccgccactttctccgcctaccctcagctcatcgccaccgcattggtcgctgctatgtctttcgtcttctga

SEQ ID NO: 180578 - DNA, 87 bp, Arabidopsis thaliana landsberg
aaaataatggtgaatgtggttgtcttcatggttattgtcattggaggatctgtcttcgatggcctaacccttgcaaaaacaaaataa

SEQ ID NO: 180579 - DNA, 297 bp, Arabidopsis thaliana landsberg
atgcaagcacgaatcttgcgaactacgcaagtacggactaagctacgcatatacgtagtcaagcggaaggcggatctcgagcccgcgtcaccggagcgcaacgtagcatcccgtaagcgtcaccggcatatcgaccgggtgacggtggtcctggaaccggcggcccggtcccgggtcggcgtcacactgagcgatgtcacggagagtgatcggacgccccgacatcagactccagcccaggcacatcgtcaacgggctgaagacgaaacgcggttacccccacgagcagggccaacg

SEQ ID NO: 180580 - DNA, 258 bp, Arabidopsis thaliana landsberg
atggctgatgtgtccaacgaagtggtggatcggagcttggttactattgagctttatttcagtgactcggaggacgacgtagatcagaataaagacacagaaagagaggatagtggcttgacgatctgcagtattgattgaagctgaggaattctctgtgatctgcagcaaaccgatggctccgccattgataacagcgataagcttgtgtaccgcggaggaatgatcagtgttttcatcgccggagttagaaattag

SEQ ID NO: 180581 - DNA, 454 bp, Arabidopsis thaliana landsberg
atgaaaattacacacagagtggaaaaaaagaagaaacttttagcttacggaagtcggaacggggacgtttgggaggaagaacgtgagggttcgacgaaattggaagctgatactgtctctgctggttccagtactcatccgccattgacggcgacggaaacaacaaatcgagagatcacaattcgaaaattagtaaataaaaattcctaatttacagaataaggcattcgattgcagttctacttggtcccaatcgaacaaaaaaattctacccagcaacttgctcgttcctctgtcagatcaaaattctaattcgctcaatttcaatttcatcgagttttctgactcattctctttcgacaacggagtgaatgatcgaattctgagtgacccgacccgttttgtttataaacccggtatttcttctggcgccaatttaacaagtaacgactaa

SEQ ID NO: 180582 - DNA, 561 bp, Arabidopsis thaliana landsberg
aggaaatatgttgtctgccaagtaaagtataagggtgaagctgcagaaatttcatatgagccaagtccctctttggtatccgattcgcataccgtcatagcgattaacggagaaccggaacctgaggtgagtccagtttctgagatgtttcattatgattcattactatcaacctgtgtctttacttgttgttgtctctttttacagcttcaggttgagcagccaggtaaagaaaatctcttgggtatgtctgtagatgatttgatagaaccaatgaaccaacaagaggagccacaaggtcctcacttagctccgaatgatgatgagtttatacgtggattgaggcatgttgatcgagagccggttgaatatttgtttgccaatgaagaaaacatggatggtttgtctattatgaatgacttgacaatcccaatgatcgcccaacaagaggatctcattctctctgagtgggagggatttatcgcagccacctttttcagcgacaacaacaataacaataaccttaacgtgcatcaactaacgtctttcttaccgggatga

SEQ ID NO: 180583 - DNA, 1544 bp, Arabidopsis thaliana landsberg
ttcttttgcctagtgataacagctctgatcacagtgagtcagatatgcaaaaatcagttcctaggacaccaaattcagaaaacaaagaagacgggtcttcgcctaagtcacgtgaaagttggcacggaaaatctggtaaaagtggagaatctcttagcagtcagcgtttggcagcaaagctccgtgacttccataagtttgcaaaggtttgtcgcttcgagcttggatcactatgttctaatttgtaaagtaggttcagattttttattaaaaaaaaggttgtcttcttggatggaagtagttctcagccattttctctttcttcactctcaatattttcatggttcgtccaggttgatgctgagtctaataaagaactagaccagtggaatgaaacactgcggaatgaagtgatgaaactctgccaagagaacggtttcaacactggtttttttgagggcagtgataataacagttgcacagatgcttacgagctaaaggtatcatgaagttttattatttccttttatcctgaatgtgatcttcattatataatatagtttttggcaactgaactcaaacattgtctctctcttgtttgcattctccttgataacaggttagacttgagcatattcttgagaggatatcattgatttgcaaagctgctaatacagagaaaccgtcaatgatacaagaaaatctttttattgggggaggattggctgcaaggtcgatttacactcttcagcatttaggtataactcatgttctatgtttgtgcgctaatgaaattgggcaatcggatactcaatacccggatctcttcgagtaccaaaacttctcagtaagtgaacctgtcttatatgtctcttaaaaagaattggttaaaaaaaatgcatctataaagatgatcgttttcttcttgtgtcttccctttgaccagataaccgatgatgaagactcaaatatcgagagcatctttcaagaagctctcgatttcatcaagcatggcgaagaaactggtggcaagattttagttcattgcttcgaaggtcggagtagaagcgcaacagtagtgcttgcttacctaatgctccaaaagtaagttgttggggacaaataaaatttgttggaaattttcaatacttgttctcatttgtttactggtgggaacaataaataggaagctcacacttttagaagcatggagcaaactgaggaaagttcatagacgagctcaaccgaatgatggatttgcgcggatcttaataaacctcgacaagaaatgtcacgggaaagtgtcaatggagtggagacagaggaaaccgacaatgaaagtgtgtccggtttgtggaaagaacgcaggtctaagcagcagttctttgaagcttcatctccagaaatctcacaggaaactgtcttcgggaagtgttgacagtgcaatgaacatggagattcaaaaggctttggaggctcttaaactcagcactggccgtggctcaagtgctagttccaattctttccaatctcatcctggttag

SEQ ID NO: 180584 - DNA, 133 bp, Arabidopsis thaliana landsberg
atggttaaccacccaccgccagttcagaaagttaagggaccaccggtaaagaagcaagctactccaacaaatgtttatgccttagatgtagaacctaccaaaccttcaggacccgcaaaaggtcccataacag

SEQ ID NO: 180585 - DNA, 1692 bp, Arabidopsis thaliana landsberg
atgccgttgacgaggtaccaatctcgtaacgagtatggattagcagatccggatctgtatcaagctgctgataaagatgaccctgaagctctgcttgaaggagtcgctatggctggtctcgttggcattttgcgtcaactcggtgatctcgctgagtaagtttctctccaatcgaaatttctctaattgatctctaagcgcatcgaattcgaagttttggaatccgttgttgtaaagcgacaattttgatgaatctggatttggttgtggaagtggaaaaagttttgattttttgatggaattgactttaaattcatgtaatttgtgatgaaggtttgctgctgagatgtttcatgacttgcacgaagaagtaatggctactgcttctagaagccatggtttaatggctcgtgtgcaacagttggaagcagagtttccttctatagagaaggcattactgtgtcaaaccgatcattcgccgtttttctctaacaaaggttagattgctatgaacattcatgatctggtcagctactatgatgttggattatttcaacatgattctgtgactctatttcaggtgtggaatggcatccgaatctacaattggaacagagtgtggttacaagtggtgacttacctcgttgtgtgatggataaattatgagaaatgtcgaggtcctccaaggctatttcttctggacaagtatgatttagccttgtttgataggacttcttctttagtcgtttgttagagaaggatatatgtaacatcttctgatggttttgattaggtttgatatttccggagctggggcttgtttgaaacgctacaccgatccatcgtttgttaggcttgaaacgtcttcatatgaagaatcatgggatgatattcagagagagaaaaaatcacagaaagcaaaggtactagcttcttagttcaggttgtagcttatgggttgcagtgtgatccttcttggttatattttggtttccattacatggtagattttctgaatagtagattttcttatgctcatggtgttttgaatgtgtaatcttaccttccattttgtgattctcatagttttccttctattctcttgtagaggagagcatctcagtggaggaatggagggacacctgaaaatgcattatcatcacatgccaagtgagtattatctattttatgtcttgtgtgtttgtcatttctgttatgatatatatgtagttcctatattggtatctgactgtgactaaaaatggctggtttcaattattcaactggcacagattgcatgaattgtttttggaggagcatttagaggctcatcattcagatccagcgcgcgttgtgaagttgaaaaccagaaagctagatgggtgttcccttatttcaaaatcaggggaaagctacatggagaaatttgtgcagacacgtgtagatagtaagataagttatgaaataattacccaaaaccccggattgttgacatggaatatggatagtgctagagatgtagtaaccgatatacctgaaatcagtatggtgggtgctatggataagtctcatggaggaagcagagcagaggtttcattcccaagtgagcaggaaaatgtggcaaatgttaacatgaatgggggttttattgaaaaagatatacagacagtgcctgaatctacatacaatgag

SEQ ID NO: 180586 - DNA, 672 bp, Arabidopsis thaliana landsberg
atgattcttgagaaaatcaatcggatcacaggactaggatacacacataagcagctcgaaaaccacttcacacgtaccaggacatcttggaagcactggtgtgaaactattgcctctcccataatgaagtgggatgccaatactcgcaagtttggtgcaaccgaagaggactgggataaatacttgatggtaaagaaaaactttatttagatttcttagatatcaatttgtaattatattattatttttttgtcgatttatagataaataaaagagctcgagtcttcaaaaggagacatattcctcatgctgataaactggcaaccatcttcaaaggacgtatcgaacctggaaaaaccaaaacccgccgttatcgcaagagagtgatcgatcatcattcagaatcaccacagctacatgatcatcaaccagctccatcatcagtagtagtcaacacaaacgagccagtcaaaggaagtgacgatagagcggaggatggcaatgtggagtctactccgctgattaggtcagactcagaggatgttgttgaaactgtaactcccgagatgatggagaagattccagtgaatacatcggttaagaagaaggagaagtttacctttgaggaatgcgtggagtgtttggatgccatagaagaggttgagaaaggcg

SEQ ID NO: 180587 - DNA, 1587 bp, Arabidopsis thaliana landsberg
agaggtcttatggctcttgccgatgtcgagggtgctcgaatacatctcaaacaattgacaattgctcatcaaattactagttgggaatcatttcaggagatccttgttgggcactatacccgccaaattcttcatgagatttacaaggtaagaactggtaaaatgtcactttttcacttagtgttttcatttcctagagcactcatactattccctatatacctgctggacgtatttctgcaatgtactataacacaggttttcggctctgctggtgttattggaaatcccatggggtttgcgaggaatgttgcatttggaattaaagatttcctgtcagctcccagcaggagtatctcaaaggttatgattaaaatctctttttgttgcttaacattttcatgtaatgtctggtttaggcacttttaacttatatgctaacctagattacttgaacagagcccagcaggaattattcaaggaatggctcacggaaccacaagtctcttcagtagcactatttatgctttaagtgatgctgccactcaatttagtaaagctgcacacaaggtacgatgcatctgtttgcttaaaaatctatggtgtagacgccaccttcaagaaatatttacagaattaccaattcgttgcagggtattgttgcatttacattcaatgaccatgatgttgcaaggatggagaagcagcaattgggtgaaggatcgcgtagcaaaggagttataggtgaagtgtttgaggtatgttatttgcactttctttggaagtatgtcttatatactgatttgatgttcacttagtcttgaaagttacttgaagtcagtgacttctgtcaaattcttctgaacttgcataaagaatttaagcatgccagctgacacgatgttcatcacagggactcactggtctccttcaatcaccaataagaggagctgagaaacatggtcttccaggcgtcatctcaggtatttaagcgagaaccaccgctcaagtcatctatagacattcaagacatttgatgttcgtgtacacgctgtcctattgtttctggctttctaattttatgcatgttaactgggtgcctatatatatggttcaggagtggccatggggattactggacttgtggccagaccaaccgctagtatccttgaggtaactggaaaaaccgcacagagtataagaaaccgaagcaggattcataacataagatcccaaaggcataggcttcgtcttccgaggcctctgagtagagaacaacctctcaggccttactcatgggaagaagcggtcgggacagcagtacttatggaggttggagattccctgaagttcaagggcgagaagctggtgaagtgcaaagccctgaaacaagaaggagctttcgttgtaatcacagggagactggtattggttctaagcagcctgagcttggtagatttcagaaaacagggatttctcggagttccaatagatttggtatggaatatcgaaagagaaatcggtttggagagtgtaatacatacagattgcagcggtggagtagtccgcatcataggaagcaattag

SEQ ID NO: 180588 - DNA, 250 bp, Arabidopsis thaliana landsberg
ccgccgcacctacccctgccctaagccgcgccgccacctgcccaaccgccggttcgccgccccctgccccgccggttcggccgccccgccctcgccagctcggcgccccatcgccgctcggccgccccacgcgccgctccctgcccgccggttcggccgccccctgccccgccggttcggccgccccctgccccgccggttcggccgccccgccctcgccagctcggccgcccctgcgcgccccgcctag

SEQ ID NO: 180589 - DNA, 832 bp, Arabidopsis thaliana landsberg
attgacccgtcagagaaattggatccagaggttgaagacatcctttctgatattgctgaagattttgtggagtcagtaagtagcccacaccacattggttaagagtcaaacatttctgtcctgtgatgagttttttttttctaactcctgctcgttgtgtttcctttaacccagatcacaacttttggctgttctttagccaagcatagaaagtcagatattctagaggctaaggacatcttgctccatgttggttcgttctgatcaatattatctacctgcccgttttctttcaatttctcattccaattacaatgagtaatttctttttggtatcttctccttaaatgtagaaagaaactggaatattaggcctcctggttttagcagtgatgagttcaagacatttcggaagccagtaagaattagagatctgcattttatcaattcgtcttatttacaaaatagttcctaacatctttggttgtttccttggataatgttttgcagttgacaacagatattcacaaagagcgacttgcggctgtaagttttaacacatgattttaaacatcctaatagtatagattatggttctgagtagaagagaaacttatatattgaagattttcttgttgattttgtatatacattgtggattttgaagataaagaagtcggtcacggcaacagaagcagcaaacgccaggaatcagtttgggcatgggactgctaatgcaagaggcggtcaggcaaagacaccttctatcccatgggctctacaactttcaatcactgatgtattagatcaaccctccaatcgtgtttggtag

SEQ ID NO: 180590 - DNA, 209 bp, Arabidopsis thaliana landsberg
tactaaaccaaaaaaagcggtttctttacgagagaatgtatttgaaacaagatacggagaaaatacggaccagactaaaaataacaaaggataaaaccaaaatcaagaagaaacttaaaagacaaaaccttctgaacgcaagagagagggccaagttgcgaagacagtatgggacccaaataccgactaagcggaaatctaacttttaa

SEQ ID NO: 180591 - DNA, 114 bp, Arabidopsis thaliana landsberg
atgcatgatgatggggctggtcaactagtcaccgtaattggggcttcagaacgaaccagacatagtcggaagttgagaaaatactattccaataaatccggcataaaacccggg

SEQ ID NO: 180592 - DNA, 251 bp, Arabidopsis thaliana landsberg
  unsure (1)..(251): unsure at all n locations
aaaaagatatcgcggaatatgccatacagctctccaggcaaaaccaggcatccggtaagnnnnnnnnnnnnnnnnnnnntgtaggatattacctggtagataaaggcgtgaaggaagtggagctgtatgcatctatgaaactgggtttctgggagcatatcaaaagagggttcaataaaattccattgctgggatatacaggaagcatcttcctggtgaccctgctgttcagctggccgctctggagccag

SEQ ID NO: 180593 - DNA, 247 bp, Arabidopsis thaliana landsberg
atgtacgcagcctccgcgggctgggccgacctcttcggcggaagcgtcctcctgctgttgatcgtcgcgctcgcggcggtgttccgctaccgcgcggacctctggcagcgccaacagcgcgagatccgcaaccaggagagggtggcgctgtcacgcgagctgtacgacaccgggtcccaccatgtatggcccataacggtgcaagcgcatgccggccacccaggacaacaatatacaaccggtaaag

SEQ ID NO: 180594 - DNA, 508 bp, Arabidopsis thaliana landsberg
aactcgctccttccactatccctcgtggtaccactccatcgcaatcgctcttcctgatggtaaagttctcgtcggtggaagtaacaccaacaacggataccaattcaacgtcgagtacccaaccgagctccgcattgagaaattctcaccaccttaccttgatccagctcttgccaatatgagaccaagaatcgtaaacaccgcaacaccaaaacagattaagtacggacaaatgtttgacgtaaagatcgagcttaagcaacaaaacgtagcaaaggagaatgtaatggtgacaatgttggcaccatcatttactacacatagtgtatcaatgaacatgaggttgcttatgttgggtattaacaatgtgaagaatgttggtggcgataatcatcaaatccaagccgttgctcctcctagtggaaaacttgctcctcctggttattatcttctctttgccgtctacaatggtgtccctagcgttggagaatggattcagattgtctaa

SEQ ID NO: 180595 - DNA, 121 bp, Arabidopsis thaliana landsberg
atgggcaagaacaacaagcgcaagcgtgagccaactcctccatcggaggattttggtgactcggagtactcagaggagttctcctctgagtctgaggggtctccggctcccatccccctgc

SEQ ID NO: 180596 - DNA, 202 bp, Arabidopsis thaliana landsberg
atgagcgacggctcggagtatccattacgcctattcggctatagcgcgctatacaaatacgaggtgaaacttatcagattatttctgataagaaatttttatcttcagaaacccggttatacttttaacaccggtatcccagctcgttcctaaacgctggccgagaaatgaatacgatcggatcgcaaccgagatattataa

SEQ ID NO: 180597 - DNA, 375 bp, Arabidopsis thaliana landsberg
aatcatatttctatatcatcgagtaatctaacattaggaatcttctattcgcagttggacgacaacactcagtttctattaaagcgattgctcgattttgcttcccacgaacactttgttacacaatcaaacgtaagtaaccgtcaatattctatcgagtaaatactctgttttcacatgtttcatgtttctgaattttggttactataattttaaattttgttacagttacttgcaacacaattacgtgtgtttcctaaaacggttttacacggtgcaaagccgtcgaacgtggcggattcttctgagacgacgccacctgcaatgttgtctcagatccctcgccctcatattacgcgagttagtaaaccataa

SEQ ID NO: 180598 - DNA, 67 bp, Arabidopsis thaliana landsberg
atgggctactgcccttttgcccatcctatttggaccgagcttgttatcatcaacttcgacccaatgg

SEQ ID NO: 180599 - DNA, 1616 bp, Arabidopsis thaliana landsberg
atccgctagggtcacgagagcagcggcttcaggaacgtttgtctggatcggagggattggttcccctctacatcaactgtgttaccggggatttgattattgaccaccgtgaattggctggttggttctgtgttccgggagtaagagaaatctctcccctccttctagcgccaaattgtgagagtcgaaacttgcacaatagaatttattttaagggtttcttcaaagaacgaatctttgtgagattctcaaagaacaacagaattctcaattaccactgacggtgttctttattgtattaatgagaaagtatcgatttgatcgtacaaatgttctagagtatgaaaataagtgtttttgcctttaaaatcagagcgtttttgatagcctgaagttgagagcgtttttgtttgtgtccttttgtttttccttcgaggtgctttttatagagctcgaaaatatcgcctctcgcgatattctcggaagatttccctttatctttaagttgttgaagtagattgtccttatcttccgaagattctgggaatttccgtattcggtgatatctttgaagattatctcttccgaggtttttggaaatgatgggtttgaacttataccggctaagtccttttttgaaggtttcttcgtccaacccgaggtttttccgagccgtaatttagctggtctcgggtcgtgctcgggatgcttggaccgcggtttttgaggatacgttcccgaggcgtcttggagcccgcctcaggacgaattgccaggttttatgtccgagttgtttcaaggtcgggtcgggggaccatttcacgagaatgctctgaagcgttctcgatatcgcctcggtgtggattcttgatgcaatctccgaggtgttttgtggcccagtttgggataactcctcgatgtctcccgaggcgttgaaacatggttggctctttatcctaggtggaatccgaccccaacatgaagccatattgttccacttacatgcaatacaaacagacgtcaactcaaccttgtgtcagaaaacgtaatgagtactttatagacgtacacggcgcgattatgagaggtacacagcagtttgcttaatttaaaagttactaatatgatgcactaaatatacatcaacgtcacccacccacttacattgatggttattctccccttttaaactcatgtcaaacacacttagttgaatacacgaattcgtcttaaacctcttcatttgaaaaactatgcctttgctacctccgctaacccctccaaccgagttgtacctaggaatccaattgccaaaccccataagcatacttgtcaactacctccccgtcagccagactcccatagagacgctaaggaacttagtctacagttgtgacatcaacacccttgcaatcgatgaattcatgacgtggccgtcgttactccaaccggagtctaccttccggccatactttgagctgcttgtagaacgtggatccatcccggcggtttaccttgaaggtgttcgccaagcgagcaacttcgtgacagtagctcagggcttttcagtcatgacaacggtcgcttttcagtcttcgtgtacgtacactatatag

SEQ ID NO: 180600 - DNA, 150 bp, Arabidopsis thaliana landsberg
gttttttcatgatcaaaattgtaaacggcggtgccgtcatgaccacaagccgacaaattcgggcctatttacctcccgcaccttctattggcacagccgtggaagctggcttgtcggcaccttgtgccgcgctcggcgaatgtgctcagc

SEQ ID NO: 180601 - DNA, 64 bp, Arabidopsis thaliana landsberg
atgtataaagaacttaaacaaaagcaatttggagccaaagagaattataaagctacacgagtac

SEQ ID NO: 180602 - DNA, 379 bp, Arabidopsis thaliana landsberg
tcggcattctctctccccgtaatccggattccatcaagtttactcatcgttttgctggtccatatggatttggtgaaaattgagggaattgagaataaaattcatatggatttggtgagcctagagtaggagatctaccaaaatctcgatccactagatcgcaatcttaagctcatctttgacaagattttcttatcacactacttcctcccagaactatattctgctacagcttacagattccgacttaactatcatccaagccgattatcaaaaacaaacgatgaagacaacaatcaatatagaaattaaaatgcgaatgggttttgtgaaccttgtcagtgagaaaaattcaaaactatgggtgtcacgcaactaa

SEQ ID NO: 180603 - DNA, 326 bp, Arabidopsis thaliana landsberg
attttggaatcccatgccgaggtgcaagcaaaaatcacaatctatgtgcctcacaatattcttcccctcgatcctgatagtaaaaatcacgctatgatgagagatcctaaggttacatagattaatgtcgtggtttttctgttaaactgccactttgattaaattaaacaaaaaaaaagcatcaatatttgcatttatgtactctgcagattgtagctgtattaaaggcaattcgttacacaagtgtcttaacatggcagataggtctcaagatcaatgacgatgaagacgtgctagactggctaaaaactatgtttcgctttcag

SEQ ID NO: 180604 - DNA, 459 bp, Arabidopsis thaliana landsberg
atgagtttctaaacaagtgccttccgattaatccgtcttcgaatgatctatttgaagttgcaaaagatggtgttttgctttggtaagcttctcccctcagattattgaattgtttttactttgatgatagagattctgaatttgtttctggtgtgatgtagtaagcttataaatgtggcggttcctggaacaatcgacgaacgagcgattaatactaagagtatgcttaatccatgggagagaaatgaaaatcatacgctttgtcttaactctgccaaggctattgggtgtactgtggttaatataggaacgcaagatatcattgaaggaagggtatgtgaatcaagtgactttgtcatcagtaatcttgaaattttggtgatggttatgactaacatttctctgtttctctaattgcagcgtcatcttgtgctcggtgtgatctctcatatcattaag

SEQ ID NO: 180605 - DNA, 22 bp, Arabidopsis thaliana landsberg
atggtctactacggaccaccag

SEQ ID NO: 180606 - DNA, 138 bp, Arabidopsis thaliana landsberg
gcaaaacaaacagaggaatcaaatgttgataatactagtaatgcagcatctgaagccaaatctccatcaaaagaaagcgttaatctatcaaaagaaaacaaatccgaagatcttttagatccggagacaagacgctag

SEQ ID NO: 180607 - DNA, 1731 bp, Arabidopsis thaliana landsberg
atggttttacagacagatgagagaggtgttcatacccggatccctgtcatggttaatattgcatcattttccttgagcttgactaagagtgggaagtctctgcataagtctgccttttctcttgatcaaacaaattccgttaacagaaactccttgcttatggatgaagactcggatgatgatgatgaatttcagattgctgaatcagaacaagaggtttgaatatcaaacattttgattttaaaatcttaagcagcatctggaattaaatcgttattcttgtgtactatttcagcctgaaacaagtaaaccagagaccgatgtcaagagaccaggtgtgcaccctatcagtaagtgtgaaaatgctatttgagccaattaggatatctaatagcaatgatttttggtgcgatttgaaactacagaagaagaacctgctcacaacattgatctgtcatgcttctcgggtaacctaaagcgcaatgaaaacgaaaacgcccgtaactgctggaggatttctgacggtaacaacttcaaagttcggggcaagaatttcggtcaagagaaaagaaaggttggtgaagttttcatcttattaatatagaatggttaggttcttacagccaactaacttttgtttctgtccatttaacactatacgaaagatacctgctggcaagcatcttatggatctcgttgctgttgactggttcaaagacagtaaaagaatagatcatgttgctagacgcaaaggctgtgcagcacaagtaagatacacaagcaccttaattttagttacctaatggagagaatattccactcaatattcttcccatgctattccttagcttgtggatgaatctaaatcacttagaaagattattgagtcttttgatacacatgttcaggttgctgcagaaaaaggtttattctcaatggtggtaaatgttcaagtaagctttgcccatcaactgttattaagattcctaacattgagtacaaaccacacagtcatatttatataggtttaaaactggtgtttatataggttccaggatcaacacactacagtatggtgttttatttcgtgatgaaagaactagtacctgggtccctcttgcaacggtttgtggatggtgatgatgaattccgaaatagtaggctaaagcttataccattagttcctaaggtatgtttatctctttgtgattactactacaagtatctggagattctataggaagtggatttcacgtagaactaaactctatgccagggctcatggatagtacggcaaagcgtgggaagcaccccttgtctccttgggaaagcagtggactgcaactacatccgtggcccgacatacttagaagtgagcagacccatagatctagtttatgagtgcctctagaagcaaaataactcaaaatactttatcttgttgatgtagattgacgtagatattggttcatcaaccgttgcaaatggagtgctcggccttgtcattggcgtaatcacgtctctggttgtggaaatggctttccttgtacaggtaatttatcaataaactgacccataacatttggatttgctcaggtaactgaggctgttgttaatgcatacaattcatgtttggttttacaggcaaatacagcggaagaacagccagaaaggctaaaaggtgcagttcgggtttcgcatattgagctctcttcggctatagttccataa

SEQ ID NO: 180608 - DNA, 147 bp, Arabidopsis thaliana landsberg
atgcggcagtggccgatgctgttacttgcggcggcaatgctgttgctggccgttctttttgccaacgcgcccgccatggcccaggagcggcgctggtctttacgcgacttgttctttccgcgccgcgaagaacgcgtccagccaccg

SEQ ID NO: 180609 - DNA, 1138 bp, Arabidopsis thaliana landsberg
gatggtacaatagaatgtagacgggaagcgataacattgattccaattgagactcctggtgatcatgaatttgtctctgagcagtatgtggtagagaagacctctgatgatggtgataatacaactgaacctagacgtactggcgttgtgaaaaatgtcaatgcaaaagatcgtactgcttctgtgaggtggctaaatccacttcgaagggcagaagaaccccgtgagtttgaaaaggaagaaattgtcagtgtgtatgagctagagggccatccagattatgactactgttatggggatgttgttgttcgcttatcacctattgccgttgcgttaccagcatcttctcctggaaactctttagaggaggcaacacagcaagacaatggataccaagattcagaatcccatcaagaagctaaaatccttgtggataaggaagaaaacgagcctagtacggacctttcaaagctctcatgggttggaaatattactggcctcaaggatggtgatattgaagtaacatgggccgatggaacaatatcaacggtacgtcaacctcaactagtctttttcacttacaatcccttgtctgatctcattattattgcaacatctacggaaattttcagtgttttaatagtgttttttcgggatgctcaatgtatgtcccagacctatttggagttaggtttgtttatgttcttgctgctctgctttttattttatagatcagggagttaggggagaggccaaactataaatgttgtcccctcctagatggtttggcctaaaagaccgttgtttcataagttggaggagattttaatacctatcttaagaaataacttggagagcagttgttttttcattttaatgacctgagagatatatgcaatttggttcgttatgagactgtctatgcaagaaacagttagaaatctcttgaatctgatggcactttacctgtgaacaaggcttgttattcattaattttaatttataattgtctcttcctcctaggttggccctcatgcagtttatgtagttggacgcgatgatgatgatgaatcagttgctggagaaagtgaaacaagtgatgctgctagttgggaaactttaaacgatgatgataggg

SEQ ID NO: 180610 - DNA, 176 bp, Arabidopsis thaliana landsberg
ctcaacatcttcggtacaattcggttcggttagggaatttggatttaggatttggctttatggtgaaggagagaagttggagaaagaaagacaagtcaaaggcaatgcaacatacatatgttaaaaaaattgagagtgtagatgaaaaggagctgtttggtggttacaagacataa

SEQ ID NO: 180611 - DNA, 101 bp, Arabidopsis thaliana landsberg
gaaactcaactggctaaacgatttcgtaagagaagtttagccaatgaagatttcttagaaagaatgtttactggatcccatattggagttcaagatggatg

SEQ ID NO: 180612 - DNA, 377 bp, Arabidopsis thaliana landsberg
gacataagagtcgtcattgataacgctcgatgcaactctcgttaccaaaccgattcatcaggtactttcatgtccacaattcaataactttcattgtttttacctcaaaagttttcgtttttgtttatagtatttttctttgaggtttcagttcatggaagtgatacaacaggcacagagtcgatttcgggtatcttaggtgagtcgttagtgtttcttgattatgtcccttttatggtgtctttttaacacattttttgagaataatttctgtcggaatttggaacagtaaacggtaaagtgaatagtccgatgcctggtggtggagctcggagcttcacgttcaaggagttagctgcagttacaagaaacttccg

SEQ ID NO: 180613 - DNA, 456 bp, Arabidopsis thaliana landsberg
atgaagacgtaccggagccgacccaagacgcaccggaacagaccaagacaacaaccgagacgtcaaggaaaaggaagcagagcagtcgaaaaagaggtgacagggggctgaacaagtttcccgacagaacatacaaaatctcagacgtgagcccgaaaggtcagcccctagctccagaagaggcactacctaagttccggaatgcacttgggtttttagttagagataatcttgacataacaatacgacagtggagagatgtgtcagatgatgtcaagaatcaaatatggaataagctattaatgaggttcgttctgcctcggggttcagaagaactcgtgaaggaatacacgatgaagcagcttgcaatcaatttccgaaactggaggtctgagatgaacacaaagtttgcaaagaaaggtctggacccgaccaaaaaatataaaatctcagcag

SEQ ID NO: 180614 - DNA, 429 bp, Arabidopsis thaliana landsberg
cacgatgaagtagccggtgccgatcagggcgatgacgagcgcgccgagcgcgccgatcaggaccagcttcacggcagtcgccgtcgcacgtgtcggtccatctggacgatcccatcctcgttcgaccggcgatccgcagacagccccttgtcagttgtcagcaagcagcgtatggcgacacccgcccgaacagcggcattggcacgcggtgggcgcttacgcgatcgatgcttggtaacttcccggcgaagtgctcagcaaccgccggaaatggcgatggaagtgcgcctggtcgtagaagccggtcgccacggcgaccgcggcaggcggctcaccgtcgagcagcctgcgcctagcgaggtcgagccgtcgcccggtcacgtaacgatgcggaggtatggcgaacgccctggtgaacgcccggatcag

SEQ ID NO: 180615 - DNA, 3364 bp, Arabidopsis thaliana landsberg
  unsure (1)..(3364): unsure at all n locations
atggctccgacgaagaaacctcagaagaagaaacaaagcaaaaacgaaatagcttcttcttcaataccttattcaggccataagaaaccatctaaagccccaaagcttttaatttcgccggaaaacgaagaccgtttacgacggctcttgctcaactttcgccggacgccttctccggtcacggcgacgctatctgttactcagaagagaaagaaactcaataatctctacgagaatctctcttgcgaagggtttttagatgatcagattgaactcgctctctcctctcttagggtaactgtcacatttgtccttacatttctcagtttttatttctgagacgatttcgtaaatacaaagtggttgttcttgtttgaaggatggagcaacgcttgagactgctcttgattggctttgcttgaacttgccgagccatgaattgccagtgaacttttctaacggggcttctcgagttcctaccacaggtaatgttgatgtaatacnnnnnnnnnnnnnnnnnntggtttcgcgtattgatgcttgtccctattgatgttttcaggacgttctgtggcggtgatatcgaaatcaaagaaagattggaatgtgtctgttgaatctactgaatcttcagttcaactaaagaaggaagagcctgaacctgaagttttagttcgcgtgaagagtaagcgagatgaagaagaagaagatagtcttagttcttgtcaatcatctcaagctgattggatccgtcagtatatgaaaagactagaagaggtacttaacatatagaatgcttcaaccatttttccaaaagcctaatactttgatctaaaggcgggaaataacaacggattttctctttgaaataaaatttcaggaggaattggaatcttccgacgatgagagagataaggtaacacaactctttaccagggtacctagtagatgcggttatatcttcaaagttcttgtatgttatagaagggatgatggcaaaactttgaatatcttgaagatttttgaatttggagcataatttgtttttgtgctgaaaaaagtatcacatgggtgaaggtgtgaagcttaatgattaatgatccactgttttggcattagagacttcacttgagttttggagataaaatattaatttacttgtctccctctgtagtgacatatatttgttaggacacgtcacaatattgtttcttactcgattaggtatctggtccaaggtctttcgaagtgattgccaaagaatattgtttagaaagatataatgctataaaagcaaagaggaagggtgataaaagtggacagagccaagcaggcctagccatttgcaagctcaaggaagagatgaatgctcttggttaagtttaaccctttttttataatcactttatcaatcatgacttggtgtagtatgtcatgagatatatgtttttgttttccagggccgtcagaagcaatattggaatctgagtttcagcgtgatcgtcaagattgtgaaggcgctagagaaaaagaagtagcctcctctgtgcttgatgacgttcatgagtcagtaaatgctgatgctttcttttttcagctttttgatgacttgaccttggatacaaatcctgttgggagctgtaaatctgaggaacaagaatcagttgtctcgaatgatagtttagatgacttggaccttggcgatttgttcgacgaagatgttccgccttatgtaccttctccccatgaactcctggaattacagaagaaggacattatggagaggtatgcaatgagaaacatcttacgaaactaaacggtatctggaagaaggtaactcttcacctaacaagatcctaacaatgtttaatagccatagaatttcatctcgagttacattttgtaagtttgatttttttctctgcgctgcactcttctcctcttggtttgttttagtcactttgtcacatatagttgcttcttttgtaaaattatctctttaacatgtataagttttgcagggtagaagcgcaaaagatcctgaaggcattgctccatcagctgtgtcaaagatcagggtggatagcaccaaagttcaataaagaaaccggtgaaggaagaaatttctcatatactgtaagtattctgcgcaaagccagtgggaggggtaaaaacagacaagccggtggtctggtaactctccaacttcctcctaaagatgagaattttgaatccatcgaggtactcctttgatccatgttttaacatttgatattcttttgcgaaaatgtatctggttagggtctcgtgactaaatgtagttaggaatatatcttctcccaagaaagttccagtttaattccttgattgcaaggttctgaggaaaatgaagtaggacagctagtttgaagctttagtgcactattgtttggttaacaacgttgctcaatgttttggaaatgatttatgttgaccacatattcagtgcactaaaaccttctgctcttgtgtgtgacaggatgcacaaaacaaagttgcagcatttgctcttcataagcttttttctgatttacctgtccactttgcaattacggagccttatgcttctctagttttgatctggaaacaaggtgatctcatttattttgtctcagtacctggtttattaccccccccttctatttatgttgatattggcatgtcctatttgaaacaatttctcactagtccaggaattttgggactagaaatcaactgtggtaactctacaacatttatttttgcatgagagttttggtatttatttgttgaaaacattttgactgttaagaagagcatcagtattaattgaaagtttaccacataggaagagaaataaaggtttagcgtatcgcaaatgtggccattttcttaagtatcatatataggttctcgtttggcaatatatgaatcactctaatatagttgctttgagcttttacagaggaattgttgtgtactaccatacaaagcacagaagaagaccgaagagctaattttgttgataagttgcttgaggaggacagttttagtttgaccgcttcgtcgagtagctttgagaattcgcttccgttggtagactcctatgtcaaagacaaagatgacttgggtgttgtcaaatctaacaacagagctaaaagtatgtttggtttatttagttacttaaataatataactctgaattttagtgccaaaaaattcattagcaggttatatgatccattaatcctctgttttctgtgttacaggagactcttatatagaagctgagtgtttatctctccaacgaaaacaagaaaacaaaaagagaacgcaaaagtacaag

SEQ ID NO: 180616 - DNA, 96 bp, Arabidopsis thaliana landsberg
atgctcgcgctgtgcacgatcgggctgctgaatctgtacagtgcgacgcgcggcctcaggcatcacgtcaagtacgacacgcacgtgaactggatg

SEQ ID NO: 180617 - DNA, 890 bp, Arabidopsis thaliana landsberg
atggagcaagcaaacgaaaaggaagaagaagagcgacacgaagaagcggcgggagagaaggaaagttttgaagagagtaaagagaaagcggcggagatgagtcgtaaggagaagcgaaaagcgatgaagaaattgaagaggaagcaagtgaggaaggagattgcggcgaaggagagggaggaagcgaaggctaagttaaacgatccggcggaacaggagagattgaaggcgattgaggaagaggatgcgcggaggagagaaaaggagttgaaggactttgaggagagtgaaagagcttggagagaagctatggagatcaagaggaagaaagaggaggaagaggaagcgaagcgggaagaggaagagaggcgttggaaggatctagaagagttgagaaagcttgaggtagtgtgctttgttgattgttgtcaatttcttattcatatcgtgttaatgctatatcgagctcacttttgtgcttctcttggtaggctagtgggaatgatgagtgtggtgaggatgaggatggtgaatatgaatatatcgaagaaggacctccagaaattatattccagggaaatgagatcattctcaaaaagaacaaagtgagagttccaaagaaatcggttgttcaggtcgatggacacgaggtaattgaccatcatctaggtgaacataccatcttcagtgttttgatttttgtgtagagttccaatgcggagtttgttttgcagatttctgacaggcctacttcaaatcctctacctccgggaagtgaagcttcagccaattatcagaatgttagttctgcgcaacagatattggagagtgttgcacaagaagtacccaactttggaactgagcaggtgcttgttgtatcccttgattga

SEQ ID NO: 180618 - DNA, 3316 bp, Arabidopsis thaliana landsberg
  unsure (1)..(3316): unsure at all n locations
atgaagtaagttcaatgcacaggttgttagttctctgttgcataaccgattgtttctctgaagtaagaccgcaccctgctttgaatttgtaacttgactatactgctttgatgttatttcctatctataagaacctgaactgaatttgcaattatcatgtatatgcattgtttgtgaactcatggctaccatatacatacttggattatcttattcacttcaccaccctctgttaatccaagtagatgtctctcatttttagtacagtttcccatacccttagcctagccttatttcaagccaaagatcatttgtgtgtgattgtgaggtctttttcgattgagcttggtataacgtgttaggtatgagccgacaagagcagtctttcatgtagacctagcccatgctttatgggttagctaggactaggtggagacttgtatttgggattgggattgtgtatggaatgaatgagaaagaaaatgagaatgaaaagaaaagaaaaaaaaaagagtaagagtttagagttctgaagcgggggatacaaaagtgttagtctagtaaagttttggaattcaaagaagtttggcaaagtaaatcaaagaaaagggtaaaacgccctatgtgctaagattagaagaaaagccttaagtttgtcaaagtatanaaccaaacccgctagactcttaaattgtttcaagagaacgccgtagaacataaaccaaaaagagagaaagaatgataaaaagggtagagttaggacatctatgggaatgggatcagcttctgagctatcatactgtatcattgggtagatgggagtctgttcttgtatgtgtctgttggcttttacctttaccattctactgaagctcaatcttttctctaagggtcccctgttactcgaccaaaccattagagggaccatttttgtctcttggcctaagcccaaaaccaagtgagttcataaccattgcattgtttgatccactatccgtgcttaatgaatgttaaagggaattggttgatgtgaatgcttgaatagattaaggcaagccgttaggttgcattgtgacgagtatggctaacatatttaagtaagggtctatcatcttgcaacctagaattagctacctgggcattgagcttacccgttttagaggcatgcttttgtttttgaatccccaccttccaacctctccttcaacttaagattttttgtttgcttgtgggcaagcaagagataagtttgggggagttgataacactgtattttagtcattttaggtgtatgtttatcatcatttagctttgcatttgctcattgtatcatatcattttgcaccattttagcttgttttgcatacttaggcatctaggatcatcttgcattcgcattacatgttttagtttgttttcaggtgcaaaaggagtttaaaaggactctactcgattcattcactcgatccaggcagctacaaaagaggcatcattctactcgacctctttactcgatccaggatgctacaaaggaggctgcagtttactcgcccctcctacttgatccactactcgatccatttactcgacaaagggtgaccatctctacaagacttgttgagctatcaaagcgacttcagatcctcctcattccccactcaaccagacatctgagcatacggataggagaggatgaagcatctactcgaccaattgatcactcggagcatagacacaaaggcgcagactttgcagcaccctctttactcaatccccaaggttgagtatttgcccaaaccgtctcaagtctcttgtcttctagtgaatctagggtttccaacattttactataaatagatcactttggggtttgtccaaaagatctatgctttatctttcagtttttctttgtgtttatgaatcttaaaactttaattactcttaatctattttgtttttgcatttgattgtttaagtagagttgttaagcttgtttagatctacattttggtatgattttagtaatttctgggtttgtgttcttgagaatgttgcatgagtagtgattagggttcttgaggatggattagattagggtaatctctaggttagttaggtggttagtgtttaggtttatacccttctggattcgcttggcccctatacggttttcgttggctaatgtggagattcgatcatagacgtccagcgtccaaaagacgttcaaatggatgtctgacctacgaattccagagatttgtagactcgaccaagggattggcttgtctgcctattggctttggtagattatttcttaaaccctgctctgctatgtttcatcaacgagagttgagattaggaagtggtggagttatgggggtctctgtcacgagagtggattgacccggtttttgaatctatcgtcatgggtatctacctttagcctattagccatcagatgaaccctagagttgcccttatcaatgaatccatcattaaaacttctattagatttatttgtatcccctcttgattgcacttttatttacctgttatttgtatcctctatttgcatcccctgttgattgcattttagttcttaattttgtcacctgttggttctactcgacccaatgatcgagtagggctgttaagttctcatctttacttgtttgaatcctgacctaggattgttactagaaacccaccatctctataatctggcttgacttagttgtttttgttcacatcttgattgctagcaatacagtggactggattgacacccttggggttgagcaggagagaacaagctagtttcaagatcgatcatagtgaatcgagccaagaggaggaagtgatccaagaagaagagaccttcagctctccagctggaaatactcgatcccgaaggtcgagtaagtcctctgcaagggaattcttgaggaacaaggcagatatcactcgagggaagaagcccgtggggaggaggttggagctggtagatgaagactccgaggaagaaatggcttcgccagaggaagatgatcaaacagagaaaggaggcgatgatgatttggaatcagagaagtgtgcaactcgaaacgagtactacaagctgctgaagcgcaatgagtttttaggaactcgataccctcatcccgagaccatggagagactcggcatctatgatgatgtagactatatgtttaagcagtgcagcctgaatattcacatgtttcggccaatggaggagtatgagaaagagaccatccagtttctttcatctgtggaattgttcttatatggagagtaa

SEQ ID NO: 180619 - DNA, 368 bp, Arabidopsis thaliana landsberg
atgggttatggagagagtgatttggaagatgaagactattacaccgatgatgaaaacgactatgaagatgatgctgatgatgaagatgaagaagaagaagaagaagagaatgagcaggacgtggctcctcttttgaatccagtggagaatcttgctcagtggaaagcggttaaagcaaggccagtgaaagttaaacgggtaatgaaagagaatgttgaagaggatatggatgatcaagcaaaaccactactgaaggagataatcgttaatactagcctttccaattggttggcctcaccaaagagtcttcatgcgaatggttcatcgaagagatccccaattgtggatatcaccaacatggagaacag

SEQ ID NO: 180620 - DNA, 162 bp, Arabidopsis thaliana landsberg
gctgctgaagtgaagaaaaacatagagactgtgatgggagctagtgaacatccttctgcacaacaaatacttattcataaaggggaaaagcttagagatgaaacaacaatggaggccaacaaagtttttgagaaaagtgttattgccattattatcaccaag

SEQ ID NO: 180621 - DNA, 48 bp, Arabidopsis thaliana landsberg
atggagaacaaagaaaggcactgtaacagatttgaagttccgggtcaa

SEQ ID NO: 180622 - DNA, 196 bp, Arabidopsis thaliana landsberg
atgctcagttcctcctctgtccgatttgatacggaccttaaaggcgagtctgcggcgacaaagatttatttgggcctttatgcttttatgcatttgggcctttatgtgtttaagccgtttgggcctcacaggttagttctttgtttccttttttttttttccctgcagttctttgttgggatttgttttcgtgtaa

SEQ ID NO: 180623 - DNA, 207 bp, Arabidopsis thaliana landsberg
tctagaggcatatctccgggattggacttgctgatcgagagtgtgaatatgattaacaagattgatcccatgcttgacctgtcggggaacaaattaaccctacgtcaatatattcgtcaaaaacaactttacgtattaaattctgataggcaattccgatattcagtagcaatgtcgtacacgacttatgataatttaatacattga

SEQ ID NO: 180624 - DNA, 1277 bp, Arabidopsis thaliana landsberg
acattgcattaccggatccaacaacaggaggcgtgtggaagtcaagtcggagtgcttatgattgacaggtttgtctttgaattctgctagtttctgattcagttagatctacggatgctaagattccttccaggaccattccagaactgtttattctctaaatgctgaaactagtccatcataggttagataagggttacatgagtggcgctactattgatgccatatggctagatgacctagtccaatgtaactttcgcagatgcattgtagggttttatgcacactactatctagcaagctgacaggaagaatttgagctaactattttgcaatcttttccccagcattggtgcttttcactggactgatcgtctatcatcatcattggcattggagacacataacaggtaagatatctacataaagactcaggaaacccaaaaatactgacatggtgtatgtaaagagacagcttctctgtttctatacaaataaaggttgctttagttggattctgtgtctttagcttacttaattcaacatgttagagagtttgaggaactttgagtttgatcctttttatgtgagacttatattcatgatatataggaagagtttgtcccttacgaatgtggtggagacgatagtgcaagagttgaagaagctcctgctggtacattcgctggtagtacttgccactaagggtacaatttacgaagaaaagtacccagcaaatgagaataatcggttagttggttaatcacatgctctgtatacggcttcttttttgttgctatagtcgcttcatctcaaacttcccaaaaatttcaggaaggtctcctcaaacgaccatttttcagggaatgttgcaagtaaagctcagcaacctccatttcgtgaattcatgccttcttcttggcaggtcaaattctgatgtgaacccttagagcctcttcttgaaatgctttgtagatctcttttgatacaatcatttcaggatttacaaaattttattgattatttcaaaggatgattctttctcactacccttattgcaggcatttgtaacacataagatcatcatacgaaaatcaggttagaatattttctctgtttttcgctttctctctactttacaacaaaaaagtttactttttatcatccctgcagctgattatcagtctttacaaacgggacaacaaaatttgttggcatattcacttgaatggttacaaccgcaacttagtagaatagaccgcttcatagtagacgac

SEQ ID NO: 180625 - DNA, 176 bp, Arabidopsis thaliana landsberg
attaaagattgtgaaatcgactctcgacaaatgaaaaattggttttgggttgttgtagatctacatgttcttcttctccggccacacaaacggcggcgaattgtgtttctctcaatcaggtctgacggtttctctcctctggtggtggcagtttctcttctctacattcgttatag

SEQ ID NO: 180626 - DNA, 802 bp, Arabidopsis thaliana landsberg
  unsure (1)..(802): unsure at all n locations
caccaagctcctttagcaaagcaacaacagccacagggtcggtagctcctaaaagtcctccaagcaacaatgatgttttccagtcccagttatatggaaaagtaagctacaagagcataactcgaaaaaattgttaagttaattgaagctcacttaatcacagtcgaaaatgttgaagctagttaaagtacctttataagagctccgagacaaaaggtggaaatcagaactccaggtccagcaagcagaaccatttgtcccatacatctctaccaatgatgtaaaacaatcaataccaggaaccaacacagccaaggaagtagctcaatcaggaaannnnnnnnnnnnnnnnnnngcacatccatggagaatgagctctcgaaaagaagaacagggagaaaaacagccaaaagtaggtcagggttgataccattccctgtaaagttgccattttttagagctcgtaatctaacagtatggagaagagaaaatacagtagcttacagatacgaattccatggnnnnnnnnnnnnnnnnnnnnnntagttccatattctacagaagcaaaaaaatccaaaatttaactactttctaaaatcttccacgaaattgaaactgagctataaagcttaatgagcaaacaaataagacctagggatccgagaaaaatgccgatgacgagaagaacgacggtgtacggaactctagtgccgttaaacaaatatctacaagcggtgccgagaaccagcgaagttcccgcgaaaataacagcatcaacaggactcgaatcgttctcagctga

SEQ ID NO: 180627 - DNA, 126 bp, Arabidopsis thaliana landsberg
caaatccttagaattgattttcacaccgctataaacccccagatgaaagatgaaatagagcgccaaagaacggcgacggcgaagtcggatctgatcggaaacgagagtcggaacttctggaaatga

SEQ ID NO: 180628 - DNA, 410 bp, Arabidopsis thaliana landsberg
gtggttcataccgaactatccaaacaccactcgctggctcacccgcgacgaacaagagtacgctgaatggcgactcgctcaggacgcggctggtgaaattgatgatcgatatgcagtatcacccatggaagcagtgaagatggccttctccgactatcggctatatctgttcatgctgctgaaccacctcgtcttactagctcagtcgttcacgtatgtcaattcgtctgcatggatcatttcacaaggcaagccactgacagagaataatagatatttcttcccaaccattgtccagtccctgggatacggtaagacgactacgctctttctcacagttcccgtgtggttcgcaacattcctcgccgttctctgcatctccttccactcatcccggaaaaacgagcgaa

SEQ ID NO: 180629 - DNA, 187 bp, Arabidopsis thaliana landsberg
atgtcatcagtaggaacatcaaaggggattctagaaatcgccaaattcggtgtatacgtcgcagtaccaatcgtcctaatctatacattcgccaacaacagcaccaacatcaagaaattcatgggcaatcattcatacgttgtttatcctaaagaagctcctcgtcctccttcacctgaagagctac

SEQ ID NO: 180630 - DNA, 342 bp, Arabidopsis thaliana landsberg
atgtccatgactttcaagatgttagctcagcacccaacttgtcgtgacactctccttcaaggtaacaatcaactgaatatcagaatattctcttcctatcagcaaaaatcatatactcaactctcagttttttcttgattcatatcagaacatgctcaaataaaagcaaacaaaggggaaggagaatatcttacagtggaagatgtgaaaaagatgaagtatagttggcaagttgttcgtgaaacaatgcgattatcccctccaatcttcggttctttcagaaaagcagtggctgatattgactatggaggatacacaatccccaaaggctggaaggtttaa

SEQ ID NO: 180631 - DNA, 330 bp, Arabidopsis thaliana landsberg
  unsure (1)..(330): unsure at all n locations
atgccgcaacaagtacgatcactcgtgagtcgccccgacccctctgtttctctcccttggacctgttgcctcggtgcaaaaannnnnnnnnnnnnnnnnnnttgatatatcgcttcttgaaggccttaatgaatcttgagattgctgacgattgagtttnnnnnnnnnnnnnnnnnnnnnnnnnnnnnnnnnnnatttgccgcgtacaacttccgcgagtatgcgaagcgacggacgaaggatgcgttccgagagcacaaggacgagcaggatccccgaaaggtgcaagagctggtccaacatggtttgaaggagcttcagggcatgaag

SEQ ID NO: 180632 - DNA, 512 bp, Arabidopsis thaliana landsberg
gctgaaacagagatctcactaatgagacaggagaaacttcggttgcagtcgcaagtgagttgttgtctcctctcttatgcctaatttgctacgacatcccttttaagcgacaacctttctcaatacacacatgcaaagcgaaaacctcctctattattcagagttgtggctgcggtatgatttttttttttgcaatttgtttgtctagcttgagagtgcattgaagatggcagaatctgcccggggttcacttactgctgagcgcgccagtacgagagcctcattattgaccgacgatggaatcaaatctcttcagcttcaggtaaagttgggtgattcgatatctgataacatatgaactaatgatctaattagtctttgtattagttgggttgaaacaattttcatttgctgactttaaattctccttgcaggttagtgagatgaacttgctccgtgaaagcaacatgcaactcagggaggaaaacaaacacaattttgagaagtgtcag

SEQ ID NO: 180633 - DNA, 201 bp, Arabidopsis thaliana landsberg
atggtgagaatccagaggagtatgaggatttggtcggaaacgcaaaggagcagaatatactcgatcacgtcattcaacagactgtccactcgaccgagctactcgatcacaaccttccctctgaggcgatctgacatccgacgactggtccgaactcaaggcaccaaaggtggacctgaaaccgctgccaaaagggttaag

SEQ ID NO: 180634 - DNA, 1507 bp, Arabidopsis thaliana landsberg
atgacgcttctaaaggtaataaccgatgtctctaagatatgggtgtgatagcaattaattgttgactatatttgttaatactatgagttattgcctctttctcgattcgggttctatagttaatagtatgagactgttaggttgagattgaagttatgattatctttgaaatttctattgtttagcaactcgcaagattttgtagtccgatcgactagtccgagactgaaattgacaccttaccttatccggacccacgtttcctgataaagaagatcttgattaatctgacagcttgtaaatttacatagtatattgtttgtatgggaaaaggtattccggtttttcttgcatttttataatttatggtaataattttacgaaatggctaatgcgtggcatgatgatgctaatgtgtggcgtggtgatgatgtgaatccgtaagctttttcgtgtattttttatcaaggaaatggataatgcgcagtatggcattaagtattataaatatatacattggtataaacttttgttgagtatcagtttacgtgtattgagttaatattatgcataacattttgacatttcatgtctgaaaaagggattttgacatgacaatataagtagtctactaaaactagcattttaacatcaagtaatttgtttctgttatttattatgttgttaatctactattttcttatgtgttttttcttattggtctcaatgacagggcttactacagtacttcaaccttgtggaaggttgcatcacgatgattcatgcataccaaaagcagaataacttcacatacgactggatagtccggacccgagttgatggttactgggctgacccgctcgacccggaatacttcataccgggtcaatacctagttccacctggatcttcttatggtggtctcaacgaccgttttggcgtcggagatctcaacacctcgacggtagctctctctcgcctctccctcattcccgacctcgattcagccgggttaactcatctgaactccgagtccgctttcaaggctcagctcacaacccaacgtgttccttacgtcaccaaacctctccctttctgcatcatgactgatcggacctacgatttccctccatatagatacggagttccagtggcggcactatcgagccgtggaccgttaaacggtgccaagtgccgtccttgcacggtcgcatgcaacggctcttgcgtggcagaagtgatgggaaagctgaataaagagtggagctggacagagtgggaaaacgagacggtggagctgtgcgacgcacatggagaatgggagaaaggttgggagaagatttttgacgaaaccgctggagaaaaactcgcacttgcgaggaaacgagtcggtggtttggattcgaggagatgtgtggaagagtttgaaaatatgagaggaatggccgttaaatgggaagctcccgcctccgaacagatttgtactttgggcttacggcccaattag

SEQ ID NO: 180635 - DNA, 132 bp, Arabidopsis thaliana landsberg
attcctggattggatcgggtggtaaatactcatctggattcactggagcatgtggatgcagtccggtcacggaataactcggccagcaatagagtggtgattgtcgaaggacgcatctcggcgagttatgct

SEQ ID NO: 180636 - DNA, 2403 bp, Arabidopsis thaliana landsberg
atgctgacagaaaattatcagaacaaacagtctgagattatggagaagcttgccaagggatgtgttcggaagttgggaactgagactatgtttgaggtgttgactaaaatggggaaagaagcgggtgagaaagaatacaatgcaatgactaaactttgcatacaacgtgcgaggagaagcaatgatgcagaatatgctcttgatcaaattgggaaggctattgaacatctcaaagaaatgagacagcttggattctctattggagaaggagcttatggccctttttttaagtacttagttgatatggaaatggtagcggagttccaaattctcaaggattttattaaggaggcatgtcctgagtcttgtgggagacttgtctactatgaaatgcttctttggatccaagtcaacgacgaagagaagatccacaaactttgcaataaagttgatgatagtgggctaagtttatcaatcctacaaggtatgccacagtacatgtatattatgttattttggaattctggtttttcatttgttctactctcaaagtaaccttttggtccttgaaaacagaatattatttggttgcactgtgcgagaaagacagtaaggaaaattttcagaagctgttagaaattgtcgacataacaacagtatcttcaccagacgcattgaagagcatatttggataccttggaaaatcgctgttggagtctgttgcaatgaagctactttgggaactaagagactgtcgtaaaggtgagatatcaatcaatcgaaataatctggtgctgttttaccaatcaatcgaaataatctggtgctgttttaccaatcaatcgaaataatctggtgctgttttaccgtattggtattatgaatttctaaggtggatgcatatctcaatatatagttggagtgaccagttcatatttgatgcaaactaaaaatgttcgttgatgactcattttattaggattgtaacattgtttcttgctatgtccagatggagtggagacagtttcaaatctcatattcagctatgcaacctgcatcccaaattcaacggtgaggactttctatatatattgcttgcaaaattattgatgcggttgttaactctggtttttccttgttttgtttttagaatatttgcatcaaattttaacattagcatggtgatttttgttcattgacaatgtttcttgcacccaactctcgtcctagatcttttttggtattgaagtagatataactagagtgtgttaaatcgctttgatcccaagcgttctgtgagaaagtaacgtgacaccttccctccattaagaccgtctagctgaataatatctctcttcttaacttttggtatttaatttctttagtgtcgaccacatttacattggcaattgtttctttctccccgagaatgagaaatgatatatccatgagttttaaaatgttgacatgatgtttaatatacaatcctataggtcttgagattgtgaggtcccaacttgcttttcatgttgggtataccacaaaaacttggtccatgtccttgaaccaaccaaatatttgttctgaatcgtatgccatttttttaatgtacaaattatagtgagtagctaattaatttattcttattattgctcggaaatggtagcagactctatttacagaaaatgagattgaaatcactctcatcttttaagtagcgctaagctgtttaagcttctttttaagatagcctataacccctaaccgtccatgttcttacatattttggtgactaaaggtagaggatgccattttcaagtttaacaagttgcatgaagaactagatatcgtgccttcatctacatcttatgagaatcttgtcagttatctttgtggctcaaatgaggtatttgtacgcttctgtcattttcaactttcatttccaatactcttctggctccatagctgactaatgataattcctctgtgttgtaggtggtcactgctcttgatatagttgaaaatatgtgtgaagcaggtctggtaatatcagcaaacatcctgcactcattgttacaggccattgagcagattcttgagtttaatttggtacggcctccttttgctcgaagcatgttccttggatttcgtcccaatctttttgttgactgactttatcagttctaaatacaataacacagctaattttaggctggtcattgatatgctcttgattgatcattgacattgtctttctcatactcatgttaaacagagttgcgtttgatcatacattttctgtttcaggtgcaaagaatctattcaataatgagcaacaagagtgtgaagccaaatagtgagactttcaggaaatctataaatttgtgcataagaatcaaagat

SEQ ID NO: 180637 - DNA, 155 bp, Arabidopsis thaliana landsberg
ggaatcgaatacgagttttgttcttctgtaccatgacattgctgggaacggagcttgaaggagaaattcgtgagaagaaacggaagattggcgaagaagttttcggatcgaagctttggcgaattttcgagaaagaagaagaagacgtcgtttaa

SEQ ID NO: 180638 - DNA, 415 bp, Arabidopsis thaliana landsberg
  unsure (1)..(415): unsure at all n locations
aggaaagacgagaaaggaaagcaacaccgccgtaaacagtatgagtatgagctcacccagcacctctactacaacaatcgtagaaaagcggtgcagagggtgatcaactcgaaagacggcgcangaaaatctgaagtaccgattagtgaggcagaggactactacaaaaagctccttgagacaccgaacgaccgacaactggaacactatccacagagtcctcaaagctccaacatcacaatcacagtcgaggacactgaaaaggccatcaaggcgatcagcatcgatacgtcgcctggccctgaccgtgtctacagtcgtacgatcaaagaaacgggtcaggcggcaaccattacagccatcatcaacatcatgctcgccactagtatagttcccgaggaaatgaccaaagggc

SEQ ID NO: 180639 - DNA, 570 bp, Arabidopsis thaliana landsberg
atgacgaatgggcaagtagagcgtgccaacggcatgattctacaagggctcaagcctcggatctacaacgacctcaacaagttcggcaagcggtggatgaaggaactcccctcggtggtctggagtctaaggacaacaccgagtcgagccacgggcttcacgccgttctttctagtctatggggccgaggtcatcttgcccacagacttagaatacggttccccgaggacgagggcctacaccgaccaaagcaaccaagctagtcgagaacactcgctggaccagctggaagaggctcgggacatggccttgctacactcggcacggtaccagcagtccatgcgacgctaccacgcccgaggggtctggtcccgagacctccaggtgggcgacctggtgcttcggctgcgacaagacgcccgagggcggcacaaggtcacgcctccctaggaagggtcgttcgtcatcgccaaagttctgaagcccggaacatacaagctggccaacagccaaggcgaggtctacagcaacgcttggaacatccaacagctacgtcgcttctacccttaa

SEQ ID NO: 180640 - DNA, 1440 bp, Arabidopsis thaliana landsberg
taaaatcagatccgacggtttatatgcgtttatcgcatcaagaacagtaccggtgtatcgcagccgttgatttagagaggtgtgggtggggtctacgctatagttggtcgtagtttaaatattattattcgtattatctttctctttctgtctgtccatgcacttcatttttgcttatttgacttggctacttcaaatattgaatattgtgtgcattaaatatttgttttatttcaactagatatttgacaatttataaacaacaacattgtatcttctacaattttgatgttcgaattggtggaaaaatagttataaaggtgatgtttatcatatcctccttctattttggattagttgtttttaaaggttttttcacataaattaaaaataaaaattgtgttactcctaattaatatgttattttatttgataatattaaataatcatctaaaacaattaaaaaaattaaaaaatctatcaaaaagatgcattgaaaatataaaacgacaactaatttgaaacaaatttaacttcccaaaacaatacttattttaaaacgaagagagtatgagttcaacaaacattttgcttcaaaattggagtaatgagagataaatataagaaaaattactaaatttgttgtaaatcaaaccatatttatttaaaatttgtgagtaaccagaataaatttcatagaattgccatagctaaataattttaaactgtacgtttcaccgtcgtgagaattaatctcatgaaaataataatattcgacatagttcatattaaaatttacatcttcgagtgttcatcttttatattgaactcccaaaaaatatatttttgttatatttagatgaagataaaatctatttcacttctaaactggagtctgtttcaagattcatctactataaaatctaatataagtgtcttttaatttggcttgtctaattagtctaacacttgacagaatttttaaatatacatctagtatttatatcagtatttatctaatttattgttgtgacttaattgaaagacactattctgcatatagtatgtatctagtttattgtagtggataaaattttgattctatatgcatgcataaatatacatatttaggtatattctgtatgcatatttaggtgtataaacatgtaaatgagatataatcattttaactatttcaggcacaaaatatagaacaaaaaatgttgtttacgtctagttttttcatgtaccacatgatatgtgtttacttaaaacatagttatatttttttgtaaaaaatcaacccttagttacttcttcgccaacagaaattatgatcatactattaattatattaaaaatctggatagatatcgaaaattaccaagaatggatatcgtgaatgataaagccactttcaaacaaagaaaaattaaataa

SEQ ID NO: 180641 - DNA, 234 bp, Arabidopsis thaliana landsberg
tgttaggatagcgattggacgcttatgtgctttctttaacaaactgtgtcagcgagttattgacacagagaccgtttctacaatggacaatgaaattgtggaaactatttgcatgtttgagaggttctttcctccaagtttcttcgatataatggtgcatttgacagtccacttaggcagggaagctcggttatgtggaccagttcatttctgttggatgtacccatttgagag

SEQ ID NO: 180642 - DNA, 1319 bp, Arabidopsis thaliana landsberg
atgaggacgcgccggcaaacatatccgccgatcgctgaatccctcacggcgaggtccattgttcaggcgcttccggcgtcagccacaatatcgtgagcctttttgcttttgttctattttcaattgaaattccaggatttaggatattctctgaattagggttttgtgtaagagcaacacgaacgaatgatttcacttattaaagtttgtagatgaatgaggtgtttctctttatattaccctcacgtcttcttcttctaatgatcagaggaaatggtggaccaaagaagaagaagaactgtgttaatagaggattgtgggataaacagattccgacggatctgctgcaagagatactgtctcgcctcggattaaaagccaacatacatgcttctctcgtctgcaagacatggcttaaagaagctgtttctgtcaggaagtttcagagtcgtccttggcttttttatccacagagtcagagaggaggaccaaaggaaggagactacgttctcttacacccaccacggtctcaaacacatcacctcaaaaataaagagttaacgggctacagaaataaactagcttgtgctaaggatggttggttgcttgtggtaaaagataaccccgatgtggtcttctttcttaacccgtttaccggggaacgcatctgcttaccccaggtgccacaaaattccacacgcgattgcttaactttctcagccgctcccacatcaactagttgttgcgtcatatccttcacccctcaaagttttctttacgcagttgttaaagttgatacttggcgccctggtgaatccgtatggaccactcatcactttgatcaaaagcgttacggtgaggtaatcaatagatgtatcttctccaatggtatgttctattgtctcagtaccagtggccgcctctcggttttcgacccgtctagagaaacctggaatgttcttccagtgaaaccatgtcgggcctttcgtcgtaaaattatgcttgtgaggcaagtattcatgacagagcatgaaggagacatctttgttgtgactacacgccgcgtaaacaacagaaaactgttggcctttaaactaaaccttcaaggcaatgtgtgggaagagatgaaagtacctaatggcttgacagtattttcaagtgacgctacctctttaacaagagctggtcttccagaggaggagaggaacattctatattcatcggatatcgatgattttgtgaaaagctctcatccaactttctattattatgactgcagcgcttggctccagccacctcatgacaattttaatttttga

SEQ ID NO: 180643 - DNA, 978 bp, Arabidopsis thaliana landsberg
tttgtcgatgatgcggataactctatcttcggaggaatctatgagtacaaaccgccgcaacagctctctcaaaccgtcaaatcaatggaatttagtccacgttttgtgattgctttcagaggaacggttacaaaagtggactccatttcccgtgacatcgagcatgacatccatgttattagaaacgggcttcacacgacaacacggtttgagatagctatccaagcagtgagaaacattgttgcttcggttggtggttctagtgtttggcttgctggtcattctcttggtgcatctatggcattacttaccgggaaaaccatcgctagaaccgggttttttcctgagtgtttcgcattcaatccgccgtttttgtctgcccctatcgaaaaaattaaggataagaggattaaacatgggatacgcattgcaggtaagtaacttatatcttcccttcagtttcattctttatattactgatcaaattaggctttaaagtgtgacataaccagagatataaactttaacattacttctgttttgactttgatcctagatgttatctaaaatgtaggcagtgtgatcacagctggacttgctctagccaaaaaagccacccaacaatacagccaaaacaaccgtgcattacccgcacctcctgatccatttgaagccttatccgactggtttccgcggctgtatgtcaaccctggtgaccacttgtgctcagagtatgttggttactttgagcaccgaaacaagatggaagaaatcgggatcgggtttgtagagcgggcagcgacgcagcactcgttggacggtatgctgttagaaagacaagagccggtacatctgattccatcttcggttttgacggtgaacttaagctcctcaagagatttcaaacaagctcatgggattcatcagtggtggagggaagataacaagtttgagactaaagtttaccagtacaggtaa

SEQ ID NO: 180644 - DNA, 691 bp, Arabidopsis thaliana landsberg
atggaagtacagatcgactgggcgaaaacagaagcttcaagaaacgctgacgctggagttggagaattcttgatgaagttggtatccaatgaaagagagagattaactaggatatggggtttcgctactggtgctgatgaagaagatgtatcattatcagaatatcctaatcgactacttgccatcaccaatacctgtgatgatgatgatgataaagagaaatggtcgtttagtggatttgcttgtgctatttgcttagattcttttgtgagaagaaagcttttggaaattcatgtggaggagcgacatcacgtgcagtttgcggaaaagtgtatgcttcttcagtgtattccttgtggcagccattttggagataaagaacagttgctggtacatgtgcaagctgtgcatccttctgagtgcaaatcgctaaccgttgcttctgaatgcaatttgactaatggtgagttttctcagaaacctgaagcaggcagttcacaaattgttgtgagccaaaacaacgagaatacaagcggcgtacataaatttgtttgcaagttctgtgggctgaaattcaatttattacctgaccttggccgtcaccatcaagctgaacacatgggaccgagtctagttggctctcgtggtccgaagaaaggaataaggtttaatacatataggatgaaatctg

SEQ ID NO: 180645 - DNA, 480 bp, Arabidopsis thaliana landsberg
gttttatcagcttggattgtggactaattcctaaggacacaacctataccgagcagataacgaacataacatacatatcagacgcggattacatcgatagtggattaaccgaaaggatcagtgattcatacaagtcacagcttcagcaacagacttggaccttaagaagcttccctgaaggtcaaagaaattgttacaacttcaatctcaaagcgaatctcaaatatctgattagaggaacgtttgtgtatgggaattatgatggtttgaatcaaatgcctaagtttgatcttcatattggtcctaataaatggacttctgttatattggaaggagtagcaaatgctaccatcttcgagataattcatgtcttaacacaagaccgtctccaagtttgtcttgtcaaaacaggacaaacgacaccgtttatatcgtcgttggaacttcgtccgttgaacaatgatacttacgtcactcaag

SEQ ID NO: 180646 - DNA, 511 bp, Arabidopsis thaliana landsberg
tggcaactacaccatcagctacgtcgacggctcgctcgacgtgggcaaggcggcgctgacgataaccgcgaacgacgccagcaagacctacgatggccagacctacaccggcggcaacggggtgagctacagcggcttcgtcaatggcgagtcgaccggtgtcctgggcggcagcctggcctacggcggcacgtcgcagggcgcggtgaatgccggcagctacgacatcacggcgagcggcctgaccagcggcaactacgccatcagctacgtcgacggttcgctcgacgtaggcaagaaggtgctgagcctgagcggcacgcgcgtgtacgacggcacggccaatgcgggcgccagcgacctgacgaccatcagcggtctggtgggcagcgaaacggtggtgctgaccggcacaggcacggtgggcgacaagaacgtcggcaacggcaagacgttgacgggcctgggcgacctgacactggccgacggcagcaacggcggcttgctgtag

SEQ ID NO: 180647 - DNA, 154 bp, Arabidopsis thaliana landsberg
acccaaaaagtatttgttatatggatacaaggttgaagagagtattccaacgatcatggattatccggaaccaggtccagacccgaaacacgatccaacgaaacccggttatggatttcctcccccacccgccaccgccaccgatgatgaatga

SEQ ID NO: 180648 - DNA, 40 bp, Arabidopsis thaliana landsberg
atgggcgaagaagatctctctgagatcaaagatttcacca

SEQ ID NO: 180649 - DNA, 482 bp, Arabidopsis thaliana landsberg
atgcatctgtatcacaccccgttgaaccaggtggctggaaccaggtaagttttatccaaaacaaaggtcatttaactttttggttaaacggcactaaaactgttgatgtacaaattggcagccctgagtgggaaaaagcatttaacgaaagtaagttcagcaaaggccgtggttttgccgacttcatgaaagttcaaaaaggccatatcgctatccaaaagcaccccggtgcaagcggttggaaaaacatgaagatccgcgagatcaaagactaataaaaaccttgcttaaaacaaaaacccgctaagtccgtcgcttagcgggttttttgtttataatcacaattaaattattcagatttgcaaacatgagcgcagcacaacaaggcaaacttttaattattgacgacgaggagcgcctgcgccaattattagcccgcattctgcaactggaaggatatactgttatacaggcggcaaccg

SEQ ID NO: 180650 - DNA, 893 bp, Arabidopsis thaliana landsberg
aatcaaaagctcaggatcatgcaaggagtccaggtacagaaaattatactgagaagcgatcaaggcgtaagagggatgatcatggtactggagacaagcatcacgataacagtgatgacgttggtgacagggttctcacttctggagatgactacattaaagatggaaagcataagggggagaaaagcagagataaatatcgggaagacaaagaagaagacatcaaacagaaaggtgacaagcagagagatgaccgacctactaaagaacatctgaggtctgatgaaaagctcactcgagatgagagtaaaaagaaatctaaatttcaggataatgaccatggtcatgagcctgacagtgaacttgatggatatcatgaacgtgaacgcaatcgggactatgatagagaaagtgaccgaaatgaacgggaccgcgaaagaactagggatcgtgatcgtgattatgagcgagatagggaccgtgatcgagatagggatcgggaacgtgatcgcgatcgacgggattatgagcatgatcgttaccatgaccgggattgggaccgtgataggagtagagatcgtgaccgggatcatgagagggacaggactcatgacagagaaaaagatcgtagtcgtgactattatcatgatgggaaacggagtaaaagcgaccgtgaaagggataatgatcgtgatgtgtcgcgtctagatgatcaaagtggtcggtataaggataggagggacggtaggaggtctccagattatcaggattatcaggacgtaatcacgggctcaaggagtagcagagtagagcctgatggtgatatgacaagaccagagcgtcaactttccagttcagtggttcaagaagaaaatgggtatgatttttcttaa

SEQ ID NO: 180651 - DNA, 310 bp, Arabidopsis thaliana landsberg
agaatttagtgttattctagagccaagaagagaagaaacacgtattttaggagttacgaaagttttaagagtttcagagcaaaaagtatcaaaagatcatcaattccaatacttcagaagtttagcatccggccgaggtcttctcgatcaaaacaacaagatatctcggtatgtaagaaagctagaagagtcaagattaacatcaaagtctaatcgaagcaatagaagatatgacccgaagagtggacatatcccacaaatcggccgtttggaaaataataatccaaaaagcatccgcccagagacttga

SEQ ID NO: 180652 - DNA, 1367 bp, Arabidopsis thaliana landsberg
atggctggcgacggagcagatcaaagtcgacgctttttcgtggcggttcacgtcggggccggatatcatgcggcggctaacgagaaagctcttagatctgtcatgagacgcgcttgcctagctgcgtcgaccattcttcgtcaggtgcttatttgagtttcagtttcttctcatagcccaaatcgtttagaatctccaaattgcataccttgaggtttatctgttgaatttaggattctggtgaatgcatagatgctgtttcagctgccattcaagtcctcgaggtacttgttgggtctttgtcactgattaaagaagacatgttataactctgtagattttcttcagtttcctaatgattcctatgtgaatctttgttgaattaggatgacccgagcacaaatgctggtagaggctctaatctgacagaagatggtcatgtggaatgtgatgctagtcttatggatggagattcagggatgtttggtggtgttggagcagttccaggtactcataaaagctctcatattaaccttgttcttatacttgtggaatggctgaagattttgtacgatgaactgtatgtagatcaggtgtcagaaatgctatcaaaattgctgctttgttggtgaaagagcagattactggctcaactctcttaggccgtatacctcctatgtaacgaatcactcttctttgttctgatatcaacccaaatttgaatcttgttttgtcgctagcgttgggttgaactttctgatttgcctccccaggttgttggttggtgagggagctcgacgttggggtaaatccaaaagtgttcttatacctggaactgtcacagaagctgatcaggtttgagatttccactttatctttgctttactgtcaatcacctgcttgttttattccttgagaatgatttaagttatttttgaacagtggctggttacagagagagcaagaaatcagtggagaaggttcaaggccatgctttctgaggtaggggcaaagagtattctctctgctgaagaacatcccagaggaaccgagaataatgaaacatgtgaggaaaacgtatcatcctgtgcagctgcagatgaggataagatcatggacactgttggcgtaatctgtgttgacaatgaaggacacattgcgtgtgggtcctcaagtggcggtattgcaatgaaggtaatatatcaacaaattcttagttgttcttttgagctgaaagtaaaactgatcttctctttctgatcatgtatttcagattagcggccgtgtaggtttggcggcaacatatggttctggttgctgggcatcctctaaaggaccatttggagctccatttctagttggatgtt

SEQ ID NO: 180653 - DNA, 151 bp, Arabidopsis thaliana landsberg
atgttggctgtacgtcaaatcttctcttctgtcgccaaaggatgagcaagatgttggctgggtcagggttggcaaggcgtatgctcgggtggagtcagccaacgttcctgcgactggtggctttctgatcctccaccggatgttgctctga

SEQ ID NO: 180654 - DNA, 450 bp, Arabidopsis thaliana landsberg
ccatcggatgttgcagatttgaagcaagctcttcttagtcggtcgtctcctagtcgtgctcaatggcatgcacgccttagtcatccatctcctcaagtggtgcagtcgattttgcgtatgaataatatatcgtgtcctccaaagtccaatgtgcaagtatgcaatgcatgtcaattagccaagagtcatcagttgccctatgttagctcgagtcatcgtgttttgtccccccccctttggaactcatccactcaaatgtctagggtcctgcccctcaatctgttggtggttttaaatattacattagttttaccgatgattttagtaaatttacctgggtttacttgatgcatgatcgttctgaagcctcacgtttatttcgccagttccatacacacattgaacgcctcttaggcacaaaaatcaaaactattcaatccgactggggag

SEQ ID NO: 180655 - DNA, 308 bp, Arabidopsis thaliana landsberg
ggtgcattgccgagtgcctgaagcactcagcaaaccctaaaaaacactcgacaaaggttttaccgagtgtcgcactcgtcaaagagggctcggcgaacagtacatcgacaaaggcttctttgccgagtactttttctcggacactcgacacagactttgtcgagtgccaggcggtacttggcaaagaaaagtctccgtcacgacgccggggtgacggagacgacacctttgccgagtgtctgccggccagcactcggcaaagaatctgtcagcagggtccctttgtcgggttctttgccgagtgctag

SEQ ID NO: 180656 - DNA, 312 bp, Arabidopsis thaliana landsberg
  unsure (1)..(312): unsure at all n locations
gacctgggcacgggcaagcagcagtcggtgcagatcaccggcgggtcggcgctcggcaaggacgacatcgagaagatggtccacgacgccgagcagtacgccgaggaggaccgccgccgccgcgaggaggccgaagtccnnnnnnnnnnnnnnnnnnnnnnnnnnnnnnnnnnnnnnttcctgtccgagaacgacgacaaggtgccggcggacatcaagtccgaggtccagaccgcgatcgctgacctgaagaaggcgatcgagggcaacgacatcgacgccatccggacggccagcgagcacgccgcgcag

SEQ ID NO: 180657 - DNA, 291 bp, Arabidopsis thaliana landsberg
atgggtgtctgtttctccgccattagagtcactggtgctagcagcagtagacgaagcagtcagaccaaatccaaggctgctcctactcccatcgataccaaggcctctaccaaacgccgaaccggctccatcccctgcggcaagcgtaccgattttggctactccaaagacttccacgatcactacaccatcggcaagttgctcggccatggtcaattcggctacacctacgtcgccatccacagacccaatggagatcgcgtcgccgtcaaaagactcgataagtctaag

SEQ ID NO: 180658 - DNA, 919 bp, Arabidopsis thaliana landsberg
atgagacgggagcagtatgagaagatagtcaagtcaacgaacctttcgctggattatggactgaatgaagcattacttcatcatgatcctcagaagctgaaaccaccaaagtccaaagaaaaaaagtttgttatggcaaagtaagataaagcaaactaatttgaagtgaaataaaaagaaaaggaaactgatgccaggaaccttcttgctcatcaggaactggaattgattcttgcacttcatctttcaagtctgtaagtaaagataaaatacatggttattctctttgtcaaatgatttggctttgtgtatgtattgtaataggtaccttccggtgctttatccaaattctcaacttcatgtgagttatgaacttctggaatgacaacaccattgttttcatctgcatatattaacaccaaaatttggtaccatagaaataagaaggaaacaaaaatacagttaaagctagttgtctctattacctgccgaatcaagctgtaatgcgcggatctcagcctcaagatctgcacggcgtaaaaatgtataggaaataagaattatcacctccaacaaaaaacgtacagacatttagcaaagaattccacaaaatacccaatccctcgctaactgagagttaaattcactcgaattccaaagagaaatagctaggtcagttctacgcaagccaattaaaaccaaccaatcagctaaaccctaatccgatttctaatccaaaagccgataaccctccttccgatttaagattaactaccagagcaacaaatcaatcagcttcataatcgaagttaacacagtaaaacgcaaaaattcaacaaaaattgaagaaaagatccgatcgaccaacaaaagtagtaagcgcataatcgagaaatcgagagagaaagaagacacatag

SEQ ID NO: 180659 - DNA, 118 bp, Arabidopsis thaliana landsberg
aaccactacaaggttctgaaattaacaaagaacatgcgactcctatcaggcggtttaagtagcgaggaagccaaagagatacaacagttttctgattggttattgggctgtggtgatg

SEQ ID NO: 180660 - DNA, 48 bp, Arabidopsis thaliana landsberg
atgaagggtgaggaagaagaagatagaaggaaaaaagaagagagaacg

SEQ ID NO: 180661 - DNA, 439 bp, Arabidopsis thaliana landsberg
atggttttactattaccaacatagaccggaccaaatattatttgcaggtaggtaataaaccaatattaagagaaacaataaattaattgttatatactttaacagtgacatctagatttttaaaccaaattttgaaaaagaaaaaaaaacgagtttacaaaatattctcattggggcaatcatcagcttttgtcaaactcgatttaggagactatttgtttgcattagagagatttaaagtttaaactattaggtacatataaaacacgaataggtcaatttgtgtatccaagaagtgtcgtgtgtgtctcggagagattttcgaagtttttggtttttgtaggattgtcgaataaggacacgcaaaaaaactttgggaggacgaaagccgaagggctcgagcggtcaatgtcatttggtcaaccacatgttacgttag

SEQ ID NO: 180662 - DNA, 66 bp, Arabidopsis thaliana landsberg
ccttgccgtgcttgcacagttgatggtcgtgaaatcgatttggtacccagcaaagttaatcgctaa

SEQ ID NO: 180663 - DNA, 720 bp, Arabidopsis thaliana landsberg
atgaaggtgccatggccattgacggaaagagagatgattctgcactatttctcttttgaatactttaaagatggcttagtcgtcatccttctgaacacggtaaagcaaaatcaattcatcttatgatccttggtataataatttgacattattcgtgataatttttgtttgcaacttttagatctctgatttagatagcattggagtttcctctaaggacatcatcatacctgaatcaccggatgcagtgaggatggatctcgtaggcggatttgttttacaaaaggttactccacagaggagttacttcaggttagtgatcattgtagtattgcaacatgttagttgtctttggttatgaagcttaaaatacagctcttgtcaaattttgtagaacgataggggatatggatataaagctggacttgatgccaccatctcttatgaattttatatctaggcagctgatcggcaacggtttcagactatataaaaaggtcagacaatctggttttatgattttgtttgttttaatgtcaggtaggtacttgagtgataatatgtttccgtatttgaatgtaacagtcagttgcttccgtagctaaatttgatgaagattacagtagagctttaactgatcctttgtatactaagatacgtcgagctctatattcaactgatgaagcagtcgaggaaaaaccaaagttggaaaccaatgaa

SEQ ID NO: 180664 - DNA, 309 bp, Arabidopsis thaliana landsberg
ttggttcaggcaacaattgtggtagaagatatgattaagacagagtacttgaaaaatgaatggtggtactggtcttctctttcagcggctgctaaaatctcaactctctcagcgttatccgtccgtatcttctccctcgacgctgctatcatttatgataaacccataactccatcaaatcctatcgatgaaacaaagccgatcatcagcttaccggaccaaaagtcacagccggtttcggattctcaagaaagaagcagcagagttagaagatctggcaagaaaaggaaagaacccgagggatcctag

SEQ ID NO: 180665 - DNA, 976 bp, Arabidopsis thaliana landsberg
atggatgagttggttcttgacgtggatgttgaggaagcaacaggtagtgagttgttggtgaaatctgagccggaggctgatttaaatgcggtgaagtctagtaccgatttagtcacggttaccggacctattggtaaaaatggcgaaggcgagtcgtcaccttctgagcctaaatggctgcaacaagatgaaccaatagctttgtgggtgaaggtaataataatacgcgttttttatctccaaattcggaatctttaaattcgatttttgtatggttaatgtttggtgtcttgctgtggtgttgtagtggagaggtaaatggcaagctggaataagatgtgcgaaagcggactggccattgacgactttaagaggcaaaccaactcatgataggaagaagtattgtgtgattttttttccgcatacgaaaaattactcgtgggcggatatgcagcttgttcgatccatcaatgagtttcctgatcctattgcttataagtctcacaagattggacttaagttagttaaagatttaactgctgctagacgctatattatgcggaagcttacagttgggatgttcaatatagttgaccagttcccttcagaggtataagctcagtatttgatataccgaaggatttggattgcatttggttttaacgctttttaatgttgcaggttgtttctgaagcagctagggatattataatctggaaagaatttgcaatggaagctactagaagcacaagttatcatgatcttgggataatgcttgtgaagcttcatagcgtaagctactctctttgctgttaaagttttagagtatttttggtttgattcggctttgtgtaatgttgttcagatgattttgcaacgatacatggatccaatctggcttgagaactcgtttcctttgtgggtacaaaaatgtaacaatacagtgaatgcagagagtattgaattgctgaatgag

SEQ ID NO: 180666 - DNA, 151 bp, Arabidopsis thaliana landsberg
ctttccaaatccgattttaaggttcacggaccctatacagtgtacagcttacgacacgatcgtgacggaggacgttgacgccgttatcacccattgggaacgtcagttggcgactactataatctgtgtgacatacggtacacctgcatga

SEQ ID NO: 180667 - DNA, 883 bp, Arabidopsis thaliana landsberg
atgagaaaagaactgaaaaagcttctgaaactggtgacgagaataactacattagcactttgggtggtttctgcagatgctttgtctttgcctaagaatatggatgacataatagatgatgatagtttcttttcaaatgttcaagatgattctgccgctgttctctcagaggaacacacgagtacatatccaaaacatgtccatgaaacagtacaatcagaacaggttgttatggttggttgctggctcgctatgaaagaggtattgattctgtcatcttgctgataattgtccttactttagcatcacttgttttgcgttttcatttttcttaatacttgtctcaagtagctgctctttttcatccctcaaatgcagaatacggcatttctaaattttttgagaaacttcatttagaagctgttttctttcttcaggtgagtcttcttttgggaaccattataagaaagattccattgcctaccagcagccttagacctttagaaaatggtgatacagcttcttcagtccccaatgatttagtgataggaaattctgaatcactgcttgacctgaagcaacttgaaaagattggagaccacttcttggaagtacttttaaaaatgaagcacaatggtgcaatagataagacaagagctggatttacagctttgtgccaccgtttactatgttcgaacgatccgaggtacgcttttaactataagcttcttgtgtgtccttgtaacttgtttttctattcactgacatattgtgtttgttttttcttttcatagacttactaagttgacagaatcctggatggagcaactaatggaaagaactgtggcaaaaggacagacagtggacgatgtgttaagacgaa

SEQ ID NO: 180668 - DNA, 99 bp, Arabidopsis thaliana landsberg
atggataataccgaaaacgacggcataatcgctgttgaggacatcaccgcaagtgccaccaccaatagggcaaaacgcatcggagccagtgaccttgag

SEQ ID NO: 180669 - DNA, 897 bp, Arabidopsis thaliana landsberg
atggatctatcaaaggccttgataggttcaacatcggaaaagatgtacctctgccaggtaccaaactttgggtttgaaataattaagttgagatcgggcgggtgacttgcacgagaagagagtctcggtgtagtgtctccgtctgagtcgattaaggaccttgtcgatgtaggcttgatgatcaaggaccctttaactggtcacatgcctcgtcatgggtaagccttgcctcgggcagactaaggccagaataagataacacgaaatgggcgtggagcggtggcgagagtagcatgtaccctccgtggcaagaggctggacggtggtgtatctgtgctctcggtttgcgtgaacctgatctggtcttaagaaccccggtggcgggttgacatatgcaagggttaagtgctacatatgtcgtgtgattggagatcctcagctgagtataatcgattcggatcgccgtaccttcgcggttatgaagacttggtcactgccctacacgtagcattccactaaagatgatgggtttttgttaagaaattggctagtgcaggaccagtgattgaactagggtagaaagaactctagttacaggtaactctacttaacttgacaaataaaattggatttttaaggactcactttagtaagctacttctgcaaaagtataagttgattattgctaaagcctctccttgactcctatttatccagcatacccttgagagtcttttccttagtcgggtaagacttgctgagtaatgccatactcagggtttatcccttcgttgtttttaggtgaggaagcgacaattttttgttgcttctgtaccaaggtggtaccaaataaggaaaaacaagagtgaagatgcgggaggacatggtcctccataa

SEQ ID NO: 180670 - DNA, 53 bp, Arabidopsis thaliana landsberg
atgaaaccagagagaaagcgcgcggatatttttggtcaagaatttggggaaag

SEQ ID NO: 180671 - DNA, 231 bp, Arabidopsis thaliana landsberg
aagctgaaatcacgtatgacgatggcccgcccgccggctccccgacatccccatggtcgttgttctttcacgtggatcacctgggccagctacgttcctggtgccactcgctacgttccttgcgccgctcgcggatccgcggcgtcctcgcgaggccgctgagagcaccgattgtgagtgactattttaggtatatcggtatctctaggtattgatcgtgaagggcaatag

SEQ ID NO: 180672 - DNA, 523 bp, Arabidopsis thaliana landsberg
atgctaacctatgagaagatgttgggtgaggctgagacgatttgtgacagagaagacactagaaagaatgttaatcagcggagcacatatgagtctgcacttcgaatgaaatgtgaggatcttgtaggtaagcaagatgatgatacaaaatgtttcttgagtgttgtaagagatgtttttgaaagacaaagctctccgagctttgaagtattcgaagataagaagtgtatatccgaactctcttctactgtcccaaatgatgatgtgaaaaaaagtctgttaacgctaaggaaatcactgaaagagaaggtattcttcttcctcttctttcttgttattcatatgaacaagatttgatctgtgatggctgatatgaggtgtttctttttcgcagttccctttgattgattcaaagattttgcagaacaaatctacgtacgaaaagctaatagatgtattcccgaagctatcagcagttgagtatcgcttggtggtccttccattcgtgaagaagttcttacag

SEQ ID NO: 180673 - DNA, 154 bp, Arabidopsis thaliana landsberg
acacaacccacccattgtctatccatctgtttctccttttacccttcttcacacgcagctaaagaagaaatttgtggaatcatcgcttattcgtttcaaaagtcattcatttttggtgtctctgcttcagaagatacttgacgatctctcctac

SEQ ID NO: 180674 - DNA, 410 bp, Arabidopsis thaliana landsberg
atgcgtaacaataatcgggaattcgtgttccacaagaccattacggtcgttaatcccttccgtccgctggaaaatatcgtaagctctcaaacatccgcataccaggtcaatttttttccggaaggcggaaagctgataacagggatcagaactaaaattgcattttcagtaaaggataataacggaaaaggcatcgattgtaagatcgccattgttaacgaaagcaacgatacgcttgccagtagccgcacgacaaaatttggtttaggttacttcttttacacagcttcggcgaaatcaccccgggttgtagttatcgatcagaacaaaagggcttcaatacatcagctccccgaggcgttaccggaaggcgttagcatccgggtctatgatgatgaaaagcaaatccg

SEQ ID NO: 180675 - DNA, 187 bp, Arabidopsis thaliana landsberg
aagaaaaagctcacagattttcacggcaactgaggaaataagagccaatggaggagatgagaaagtgaagagagcagaggagaagaatggtcagttatgtagagaagaagaagagtggaggcttggactgacacgagtgacacgtggcgttgttatagttgttgagtggcgattttcaatcacatga

SEQ ID NO: 180676 - DNA, 104 bp, Arabidopsis thaliana landsberg
atggatttcacctgctttagcccagtgccgcccttgctcaaccataagagaagcaaaagatcaaatgcaaaactccgcgacgtaataatgctaacaaaagaaag

SEQ ID NO: 180677 - DNA, 97 bp, Arabidopsis thaliana landsberg
ggtggttttgttgctttcgtttttggctgttttgtcaatattatcacggacatgtattccttggttgctgaagctaatggtcagcttatcgtcacag

SEQ ID NO: 180678 - DNA, 140 bp, Arabidopsis thaliana landsberg
atggatgcagcgctgctcatgcgagcgacgattagcaggtatgcgccatatacctccggcatgccatgccatcggagaatgcaaccctgattgaccatacaactgtctaattcccctgtaggtgtgacgcgaacagttga

SEQ ID NO: 180679 - DNA, 211 bp, Arabidopsis thaliana landsberg
ccggaaagtcgatatcaacctgaaaggggtgcccataaaagaagtattggatgatgtattcaaaggtcagccgctgacgtataacatttttaacaacactattatcgtaagacggaaaataagctctgatattaaacagcaggaggtaccactaccgcctcccctacatatttcaggtaccgtcacggattctactaccggcaacccgctg

SEQ ID NO: 180680 - DNA, 180 bp, Arabidopsis thaliana landsberg
aaatttctgaagatgaagcagaagacaaactgcaagctgcaattcaggataaattttctgtatttggagaggtgtgttttaattggtgaaataagaagccatttcagttcatcaaaagagctttttgggagtacctgagttcatttgggcactgttatactccagtacgaacaaaagtag

SEQ ID NO: 180681 - DNA, 608 bp, Arabidopsis thaliana landsberg
ggaaaggagttcgactgtgcgaacaaataaagcaaggttaagtttgattgtgcgaacattcaaatacaggaaacaaaactacacttatttaagcagtaagcaaagaagacggagtcttaacacgcgcacacttcgaattaagaaactcttctcgatttgcaaaacacttggagtccttaaccagcgaggtcaaggatcggcatcatacagtccggtatgcgagcgaactcggagattccaagctcgatccaatctccgaggtgggagttcagggtgtgaagttcccttgatatcgcggtgaccctgcgtaacattcggttaatctttttgcagattttcctcctctccaaagtacgcttctggtgctgaacagcaagagttttgatgaatgtcatcgcgatttcttgatctctatccgaaagtcccttgatcagtgcacatggagctcagatttgggacctgaagaagccacgaggtggagaaggccctcttctcggcacgtttgggatgtcttcgttcatcatcccgaccctggaaaagtctggcatagattccgaacatcgaaggttaaactccatagctgcaaaaagaaaagaaagtttagataa

SEQ ID NO: 180682 - DNA, 856 bp, Arabidopsis thaliana landsberg
atggtcagaaatgtgagagattgccagattctgaagcttccacgaacaggtgagtatgcttaaagaggcaaaaatttagaatcttttttgtcatcagaagaaactgagtaatgggttttattaatgtttagtctcattgaagagtaatgaagctacgcttagaaacaaaatctggaactgggtttttgcttggagtttgtggtagtttgatttaattcatgcctttgtgtctttgaactgtgagtggctttacctgtgtacaaagctaccaactttaagtttcatagattaacttactgatttagttctcatgttaatttgggtgatgcattgttcttttttttactttttgatttgtgataattttctcatgtgtagagatattggacaaaaggtagtgcattggtattctttgcgagctttaattactaatctaaagcaaaagattgaggaaaacgtaattttgatggacaaaagttctggtgaattctcggttttgccaaaatcgccaatggtgtcctgaccagatgtggctgttacgaaagtggtgaccttgaagaacgttgcagaaagcgaaaactgtatcccttcgagtgtaaaagaagaaattggatctgaagatgcatctcaaagtgttgctgcggataacaagaactgtatcacttcgagtataaaagaagaattttttctctcggaaatgggatctcaagatgcatcacaaagtgttgctgtagaaaacaagaactgtatctcttctagtataaaagaagaatcttcagtctctgaaatgggatctcaagatgcatctcaaagtgttgcaggaattgaggcttgtgggaagagagaaagcataact

SEQ ID NO: 180683 - DNA, 36 bp, Arabidopsis thaliana landsberg
atggaggctctaaacgttcccatggcagacactcct

SEQ ID NO: 180684 - DNA, 540 bp, Arabidopsis thaliana landsberg
atgattttagaaactttgccagattttgtttccaagagtttggagacaaggtcagtatgtggacaaccttcaacgagccatatgtttatagtgtttcgggttatgatgcgggcaataaggcaattggtcgatgttcaaaatgggtaaacagtttgtgtatagctggtgattcgggcacagaaccttatttagtctctcacaaccttcttcttgctcacgctgctgccgttgaagagttcaggaaatgtgacaaggtaaataggaataactatgttatcctaaaatatatataattactttcaatttcaagagtttttaacacaacacaaaaagaaaatgatttggttcgtgtcattttatctattagaaaggatttataagcaaaaaagtaacattttgacttatgatatttttgaaacagatttcacaagatgctaagataggcatagtgttgtccccttattggtttgagccttttgacattgattccgaatctgataaagaagcagttgaacgagcactcgttttcaatattggttg

SEQ ID NO: 180685 - DNA, 6 bp, Arabidopsis thaliana landsberg
atgaag

SEQ ID NO: 180686 - DNA, 109 bp, Arabidopsis thaliana landsberg
gcttcttacgcctcctggaacacctcttggaaacgactctcattcatctttggcagctccaaagattgcatcttccgctagagccagttctgcttcaaaggcttcaagg

SEQ ID NO: 180687 - DNA, 58 bp, Arabidopsis thaliana landsberg
taatggcaaagaagaagaagtcgtcattttaaagaaatatcaccggacgatgtattga

SEQ ID NO: 180688 - DNA, 756 bp, Arabidopsis thaliana landsberg
atgtcatcctgtgaagctgagtttatggcttgtacatatgcggcaaaacaagccatttggcttcaggacttgttaagtgaaatcacaggaaactcaagtgagaaagtcaccatattcattgacaacaaatcagcaatagccctcacaaagaatccagtgtttcatggcagaagtaaacatatcaatagacgttaccactttataagggaatgcgtctagaatgatcaaatagaggttacacatgttcccggtgaagaacagaaggctgatattctaaccaaagctcttgaaaggattaagttcaaagagatgcgagatctcatcggtgtaagagatatggagaaagaagattttgagcttaaaggagagattgttggagtaagctcaaagacttgaagaagaagaaagtctaaaccaagactaaaccgaattatggctaaaccgagatatggtttaatgtgaagataagattagtgagatttaggagatatctaaatcatgtaatcctattaggtttaggattagaaatcttcttatataaggacatgttggtttgtaacatagttcttaagaggtttataagatattgagagtttaggttttgaggaattttcctagactaataaaagacagtaattcttttgatcttgtgttcttaatctcttcattcagatctataaagactactacccggaactttttaagaacgacattgctcaaccaggaatgttgaatgcggagacgaattctccttaa

SEQ ID NO: 180689 - DNA, 411 bp, Arabidopsis thaliana landsberg
atgagggagcccgtgacgatgagaaggctggatgaagaggcgttggacaccatcagccaggacctctctgctgttgtgcggagcgcggcgtggggcgaagtcgaatgggtcgaagtgtgcagatttctgacgcgcgcgtttcccggcagttactctgcaatcctcaaccagagtctggacaggcccgaattcggattcagcgcctatgacggtattgaagacacccacatccgttcgttcttcgactattacgccttcctgaacccctgggagaacttctggaagaatgcgcgaaacggggccatcatcgtcgccgagcgcgaccagccggcatcgatcttcaggaactcggaattctacgtcgactggatgcagcgggtcggccgatacgatgccgctgtcgggaagaag

SEQ ID NO: 180690 - DNA, 939 bp, Arabidopsis thaliana landsberg
atggtgagattaaaatagactaatattacccttcatcacctacttgtgtccagagagagagaaaaaaaaagaacttgtggtgatgatactatcatctatttgagagctaaagaatttttccttaagctttttttttttggttcagaatcttttcatcatttatgtgtctgtgtaccaataaacatagaccaaacaaacaaaacctcttaataactgaaaaacagagcaaaacttttgtttttctgtcagttaacttacttcttctgtgtgtttgaaacccaaagtcaattcttttttttcttcctgaaattctctctacttgctcaaggaatcttgataaagtaagtaacttttttctctttcaagatagtaactatttctgggttttttttggatacttgttgtgttatggagcatcagaagatttttttgttctttggaaactgatgtcatgaagcgcatcatattcttaattttataattccattatctttttttttcttcttttcttgtgtgtggcatttattgtctgctggaatttttttgtatgaattgtctttgaagggctcaataattggccctcttggagtttccatgtccattggggaatattgtacttgagaagctgatgttagtacttgatgaatccttctttcaagtcaactctctctagcttttatatactctctctatatatgatctcacatctcttaaaatctattatatacatgttgaaacacacttttgatcttccagttgacaaagactgagttttttttggctcttatcttgtttcttgtttggttcttgatcatgtttctgcaacctttgcagatcggttatgtagacaacgacgaaaggaaccttaagggacctcaagacgcttggtctgctgttcttgaatactacaacatcaaagacaagtctttgataatttga

SEQ ID NO: 180691 - DNA, 450 bp, Arabidopsis thaliana landsberg
gtgtggttgacagaactaagtattttgaatattgttatccgtggtgtggaaaaagtttgtgacaacaccggtgaagatcctacatgcagcaggtaactaactctcttttgggtttctacttgatccctccctactctggtaagaataaacccggtattgctaatagaaatataggatcattatttactacctcgttacacccgagccatctgactattggtcagggattgtcacaactcgtcttatatcatgtattgccactaggacaccggacatttttagaagtatccagtataatagtaagctcctgttgtttcagatcggtgatgggaaatagcatatctgaccatttaacgtactttgaagtggagttgatgggtgagacttggagacaatgcaacatagtgatgggccatgaaatggagagttacagtaggaaagattcaaagg

SEQ ID NO: 180692 - DNA, 348 bp, Arabidopsis thaliana landsberg
gttgatagcacagctacaacggtggagaagaaggttgagccagaagcaacgtttgagattctagtcaatcctgcgcgtgtagtcccttcacaggagaaatacatcaaattgatggaggatagccgatatgtaccgatgaagctagctccatcagggtttgtccttctcagagacttgcgtccgcatgagcctgaagttctgtctctgaccgatgcaccgacttcaacagcatcccctgcagtgggtgcagaagctgcaggacaagcccaacaagcagccaccacctctgctatggccatagatgacgagccacaacctccgcaggcctttgaatacgcttctccatga

SEQ ID NO: 180693 - DNA, 382 bp, Arabidopsis thaliana landsberg
atggtggttcttgagatgattgaagcaaggaatataaacaaggttaaaaatgctcgttccactaatagttcagtgtactttccagattggatctataaggatattgagcaaggagatattatgaggatattgggagatcagataactgaagaagaagagaaaattgcgaagaaaatggtattggttggtttgtggtgtattcagacgaatccatctgaccgtccaccaatgatcaaagtcattgaaatgttagaggggaatctagaggctctcgaagttccacctaaacctctcttgtatcttcctgcggcaacgattcctgaaacttttgaagatagtaatgagacttcaagcttctctaacccaactcagttcgaacgag

SEQ ID NO: 180694 - DNA, 425 bp, Arabidopsis thaliana landsberg
gcgaagacaagaacgccatccgcgccgccctcggtacgccgacgcccgaccggctgcgcatggtggcgcaggcgctcagaatgggcacctccgtcgaggacgtgcaccagatgtgccgcatcgatccctggttcctggagcgtatcgccgagatcgtccatatggaggcgcgcatccgcgagcacggcctgccggaggatggcgggaacctgcgcatgctgaaaggcatgggcttttccgacgccaggctcgcgtcattgacgaacagcgacgcggaagccgttcaaacgcaacgccaaaagctcggcgtccatcccgtctacaagcgcatcgatacctgtgcggccgaattcgcctcgccgaccgcccatatgtattcgacctacgagacaaagtttaacggtgctcccgccgacgaggcgcag

SEQ ID NO: 180695 - DNA, 360 bp, Arabidopsis thaliana landsberg
gtactcgagctttgccgcagccccttcgagaaggggtaggtgagatggcaggtgaggctcataaaacaggctgatcgcctgtggtacgacttggcgggtttgttcgttgccatactgttgagccagtctctcgaagacatctcggtgggacatacttttaatccagtcgagtcgcaattgctcgcaggccgccaaatcaagtttaagcccgttagcaatcagatgcgagaaggcctcttggcaggccttgggggccagtattccagaggtgtcgaccagagtgtcgtcaagatcaagggcaatggcttttatattcacattttaagtgtgccgctaaaaacacaatttgaccagaaataa

SEQ ID NO: 180696 - DNA, 167 bp, Arabidopsis thaliana landsberg
cggtctggcatcttgtctccgctggcgtttcgcccgggctctttgtccgagtgttcgtttgttcggttcctttcggctccccttgtcttgctgtccctgcctgggcttcgctacggtcctgttcccttgtctcgcgacggtctcggccccgctcccgttcccgggtg

SEQ ID NO: 180697 - DNA, 355 bp, Arabidopsis thaliana landsberg
aagggcgtatcttccatcatttcgtgtctgcagcagccgttccgcaaattcgcgtgagaccgactgcgtctcttgttatcgtcgggcaaatcaatcatacattcagcatgcttcgtttatcgaagagcgcaatgccaagttaggctgttgctctcacgcctggggggccagccgtcaagcgcgatcgggcgggaagagcaacgtgcaggatcctgaaactccggaaaagcagccgaagaagagcaaacatcttctgctgaagatcgattcctggatcgattcgacggtctggaatgccggcttccgctccgccgaaatctgggaagacatcaccatcgtcaaccgccgcttccgc

SEQ ID NO: 180698 - DNA, 71 bp, Arabidopsis thaliana landsberg
atcgtgctctcataaagcgcgagaaatttgtgtttgtgaatccttttgctaaaactgtatttcggtgttga

SEQ ID NO: 180699 - DNA, 1065 bp, Arabidopsis thaliana landsberg
atggagcagcagttgcaccttctgtcctccttgctgctgcatatgtcgcttgggacggcgataaatcgtggtttatggagaaagaaagacgatgaaaatggtcgagatacaagaaaaagcatcggtaaaaacatttcagaacaaagaagagatggtaatgttaaaaacatgggtaaggaggcttcttcaggaagagatgaaagaaccctctcaaaatctgtttcaatgggagctattcgaggaggaaaattagcactacagagattgcttgatttgcactcataccgcggtgacacttcttcccttgcgaatgctgaactcgaatttgaagcattgctttccaaggaaaagccggacttcgggttgcttcaggttgttcatatatagaaacttttttgctctttcggatcaaattgcatttagttaatttcttctccctcatgcagagagacattgtgaaaatggaaatgagtggaaaagaagcaaaaggagctgagctattgaaaaaggcattggagaaagcaagaaaagaagggaaaggtcatgaggcttatgagattgagatgttgcttgtggagatgttgatctacttggtttgctttctgaatttcctttctcatatatatgaatttttttcaccatctttataataaatttatttctttgtaatagggaaacatggaagaggcttcaaaatgtaagtgtttagaggatgaagtcataacagatgcaagacgtcctctatatcaggcaagtcatatacatagtaatccttaattccatttttttacttattgttgtgaccaatgtcgttttatctctcagactataatccattaccttcaaggtcatcctatgaagcaagtcgaggagacattcaacaggttcagagagattcaaattggtctacaatggcctggaagctcagaagaatgtgaaattgaccaagtcacatttgatgagttcaagaaagttatggaatctctcaagcatgaaatcgaagacgtcaacaaaagaaagttgaagttagtcaaagataaaactatgagagatagtcttcattaa

SEQ ID NO: 180700 - DNA, 61 bp, Arabidopsis thaliana landsberg
atggatgcggcgacggcgacggcgatggctccagcggaggcgactactagccggctagcac

SEQ ID NO: 180701 - DNA, 2188 bp, Arabidopsis thaliana landsberg
  unsure (1)..(2188): unsure at all n locations
atgaagattgggaacggttaaataaagtcatagggtacaaagaaggtgatgagcaatcaattatcaacaatgcaaaacctgatgctctccatactttcttggaggtacagatgaagcgtagtgcttcaaaactttatgatggggagaaggaatgnnnnnnnnnnnnnnnnnnnnnnngtcttaattgctccgttaagcttttcccagaaacgaagatagctgacattaaattagggagatatcgcttgtcatcaccaagtggtctgcttgctgaggtttgttacgtggattcgttttgttttgcttgctgtaaaacattatcagttgtatcttagactcttataaatgtctctcttcctgcagagtgcacctgcctctcactctgtacttgctgtcttctgctataagccctttgatgctaaagttgactggagtcttgttgcaaaagcttctccatgttatatgactgtacgtgacctctctctagggcaaatttgtataaagagntctgttatttatatatatgtggctgattgtgttgccatctgcagtatctaaaggattccattgatggaattgtcaacttcttcgaaagcagtactgctgtgagccagacaatagctttggagactgcagctgctgtacaggtgtgtcctttatgtgctatggtgtaaaacgttgggaaacacaagtgcatattagggttatatagcctgttaactacttttggtaatcatcatcatgatgaatttaggatcttagcaagcaatttttgtttgttgtcaatactgtacaagacacctgagtaattctgtggaactatagagtttttcatgcgactttttttatactggaaatcaaagcttatactgttgacatgatacttaatatctgtgatggaaatggcaaaactatttatagagcctgctgctccttgcacgtgagctacaatggtgcctggcagcttattaaaaaatgttggaattagatctctgaaccgtccttatattcaactgcccaaagagaaccactttaatcatattataaaccacatacttgttttctcagtcaactattgatgaagtcagacgcactgctcaagaaggaatgaatagagcattgaaagatcattcaaggtctgtttgtgctcccatatgctctctggtcaaatttatgtcatgtttattacagtaaatgacgttgtacaaaacaaccaggtttctgctcgactttagatattgcagcacccaaaatcacaattccaacagaatttcgtcctgataatcatcgttctacaaagcttcttctagacctgggtaatttggtcatccgttcccaggtaaagtataaaagtatctgttgtcttaacaatataatttctatattctaatgcagtatctcaaatttctatgtatttaaattttgcaggacgactataagcatgaactgacagaggaaatggatatgtatctgcagtttgatttagttttgagtgatgtgtccgctttacttgttgatggtgattattcctggaaacaattatcctcaaaaagagcttctagttctggtagggaaagcagtgtaactttcttgccagttattgataagtgtggggtactcttaaaacttcaacaggtaaaattctaaacatccggcaattaaatttttggtaaaaagaattatgtttcagactaaatatttgtagcaacattgttacttgttctgctgcatagattcgtcgaccaaacccagcgtccccatcaaccagacttgctgtgcggctaccctcattaagctttcacttctcaccggctcggtaccataggttgatgcaagttgcacagatatttcaaactaaggatgatgagagctctcagattctacgtccatgggaagaagctgattttgaggggtggttgtctattcttagctggaaggtcagttcctttctgcataccagaatcgatttcctggttgcaaactctttgtctacttggacactagttatttattccagtgtcaattctatgaatagggaagagaagcttcgtggcagcggcggtatttatgcttagttggtccatttatctacgtgctcgaaagtcctggctcaaaatcttataagaagtataccaggtctgatttcaactcttgcaatttggctatggtagtaggctctaaagattag

SEQ ID NO: 180702 - DNA, 203 bp, Arabidopsis thaliana landsberg
ttagattcatagaagaaaacacaaaacttgtagaaaaagaaaccgggaacaaatcaaacaacgatgtaacaacaacgaagaagaaagctcttcaagatatcattatcaacaatggagtaggattgatcaattcatgggttgattcaatgagagcttgttcccctactcatcttaaatctttgttgaaacaaagctcttggctc

SEQ ID NO: 180703 - DNA, 234 bp, Arabidopsis thaliana landsberg
cctcctcaaccagcaaatatggtgaaatacctcgatcgtgtaagtggtttagatttcatggttcatcttttgatcttttactgatttgcgtttcaggaaaatgagaatgagtcgatggaaaattttgggagcaatcggtttcttgacactgttgttgttcttggaatatactttgaactcttgagctacatatttgccaattcgacaactgattacattatgttacccacttga

SEQ ID NO: 180704 - DNA, 183 bp, Arabidopsis thaliana landsberg
aatagcgacccgtcagatccaaatacgcaaccatcggagcgggagaaaattaaggaaagagggacccgagaagagaagaatcgccttaccgaagctcaccaacttgccagaaagggactgtggtacctgaaaaaacggcgatgcacccgattccgcaagtctagaggatggtcccgccgatag

SEQ ID NO: 180705 - DNA, 130 bp, Arabidopsis thaliana landsberg
gagaaacagaacagaaggaagcgatatggaagatgaagacaacaccaaaaatcaaacatttcctgtggagagctctcacaaaaactttggcgacaggctctattcttacttcacgaagaataacaaatga

SEQ ID NO: 180706 - DNA, 4782 bp, Arabidopsis thaliana landsberg
  unsure (1)..(4782): unsure at all n locations
atggccattgatcctgtgagtccggctacagttttctgtgttaagcttaagcagcccaattccaatttgcttcataagatgagtgttcctgaattgtgccgtaacttcaggtttgactctctctcccatcggaaaatctttaaatttcatcaattcctgtaaagttttctccttttctttgtgttagtgctgttgcgtggtgtggcaaattgaatgctattgcttgtgcttccgagacctgtgccaggattccaaggtatggtttttggtacttttctatgtcttgaatgtatgggcagtgatgaatttctcaattttcatctttctctgttctcatctcttgcagctccaaggcaaatacacctttttggataccaatacatatcttgatacctgagcgccctactgagtgtgcggtgtttaatgttgtggcaggtattttgatatcagttaattatttatgaactcggttgatctagtgggtgataaacgattatgatgcaattttttatatgtagactctcctcgtgattctgtccaatttatcgaatggtctcccacttcttgtcctcgtgcgttactcattgctaattttcatggacgtataactatctggacgcagcctactcaggtttgtgctcctgatcactgggatttacctttatatttcttctttgtcttctgtgtcaagatgttttatgacaccctcagatgattttttttttgtggattggttttgcagggttcggctaatttagtgcacgacgctacctcctggcagtgtgagcatgaatggcgtcaggacattgctgttgttacaaagtggctgacaggggcttccccagtatgtaatcttatgttttgcttatttgccattctatcaaatgcacagcatatttgtcccttaatgagttcgttaaattagtaatggagggcttgcatgtgagagtgggcactgggattactaaatcgtgagtaattgaactggaaatgtctctacgttttggaggaaatgagatggagaaaacacaacgtcctggaaatcccaactctctgtttgcaaaattactagactcctaaaagatcttccaatttgcgtttcttagatgcatttctttaatgatcggcatgaacacataaggaaatgagtaacagatagataataatgccattgcaaagaacatgttctgaaggacttaatatcatgttgtttctggccacctagtttgctgctctagttttatcctaggaaatttatcctctatgttttctttttattgataatcagtataggtggttgtcctccaagccaagttctggtacaaatgcaaagtcaactttcgaggagaaatttctctcgcagagctctgaaagctcaggttttcttctgcgtgcctcttgtgactcattttttgatgatatattcagaattatgcacttaattttaattatgtcagttcctttgacatccaaatatatgtgacaagatcaatacaacatgttctgacgttagtgcattttcctccactttatgtgacggttctgattctctaccatttgttgcagctcggtggcccaactttctctgtgtatgctctgttttctcatccggctctgttcaaattcattggtcccagtggccttctaaccagggaagcactgcaccaaagtggtttagtacaaagaaaggtcttttaggtgcagggccaagtggaattatggctgctgatgctattataacagacagtggtgccatgcatgtagcaggagttccaattgtaaacccttcaacaattgtagtatgggaggtgacccctggccctggaaatggactccaggcgactccaaaaatctctacaggcagtcgtgtgccaccatcccttagttcttcttcttggacaggttttgctcctttagctgcgtacttgtttagctggcaagaatacttaatatccgagataaagcaagggaagaagccctcagatcaagattccagtgatgctatatcgctaagttgctcaccggtttccaatttttctgcttatgtaagtccagaggctgcagctcagtctgcagcaaccacaacatggggatctggtgttaccgctgttgcttttgatccaactcgtggtggttcagtgatagcagttgttatagttgaaggtattgttctcatccttctcggaacctcatactgtttccatgattgaataaacattttcaggtttacgtttagtttttggtcaatcatttagaaatgctcatatattgaagagctgccagatgagaaaatgctaattttgtttgagtgatgaagcgcaacagcttcaatctattgtttaaaataaatgctaattgtttgtgtctgcagggcagtacatgtctccgtatgatccagatgaaggtccttcaatcacaggctggagagtacagcgctgggaatcaagtgttcaacctgttgtactgcatcagatatttggaaacccaacttcaaattttggaggacaggtccccacgcaaactgtctgggtatccaaagtggatatgagcataccacctactaaagattttaagaatcatcaagtagctgcagcaggaccaagtgtggatgcaccaaaggagcctgattctggtgatgagaaggctaacaaggctgtatttgatccttaagatttgccaagtgatattcggacacttgcacggattgtctattctgctcatggtggtgaaattgcgattgcttttcttcgtggtggagttcatatcttttctggtccaactttttcacctgttgaaaactatcaaataaatgttggatctgcaattgctgcacccgcattttcaccaacaagctgttgttcggcttctgtatggcatgatgctgctaaggactgcgcaatgttgaaaatcatccgtgttcttcctcctgctcttccgcgtaaccaatcaaaggttgatcaatcaacatgggagcgggcgatcgctgagaggtatgtaatctctggtatatattttctagcttgtctgcttgcaaaggaacttatattgtgacttgagatatgaatctgcattctttcttaacagattctggtggagtcttttggtcggagttgattggtgggatgcagttggctgcacacagagtgctgcagaggatgggataggtatactttagtgctaagtttcttgatttaagtgttatttaatatctgcagttggatttttttgggtctttagttgtggaacaaccactggaattagttttgcttagaaatatgacagtctgtattttagtttgggaataagttctagtttttaaaggctgagtgtcattcaaagaaccttttctctgtttttctatttgcttttantactaaggtttgaatgatagaaactttgnatgatagtggttcaaatattatattgtattgtntgaataatatactgcttaangcattggatgatgtatttctttttatgattacagtttcattgaacagcgtgattgctgtcatggatgctgattttcactcccttccttcatacagcacagacaacaatatggccctgtatgtttttctcaacccgaatccaactcattttctttttcctttttaaatgtctgaactgtttgcgttgcggtaccgtttattatgtctttgcaaaatatttatatatatatatatatatatatatatttttttttttttctggttttataatgtaaagcttctctattccatgagcatgcagaacctattttgtgttgttcttttatcggactataagatagtgtagctttctctaatttaaaaaaagaaagaaaaaaggaacaaacttcatctgactttagattatttgagtagccaatatacaatgcatctgattgactgattctaagacgctgaacaaaatcttggcagtctattgcccccttgagattcttcgtgttttttttgctgttttcctttttggttggttgcgctttttggtaaagaacttgtatttttatggtttacagaacctagataagatcaaatgtcggttacttgaaggaaccaatgctcaagaggttcgtgccatggttttagatatgcaagcaaggttgttgttggacatgcttggaaaaggtattgaatcagctcttgtgaatccttcggcgttggtttttgagccatggcgagtagatggggagacaataacaggcatcaatccggaggcaatggctgttgatcctgctcttgtttccagtattcaggtatcttgatgccttcaaatctgaggataaagttgtaggttttcttttatgaaagatgaaaattcaggctcaaaccctgggaacggttcatgcagtgttttcatttaaagagtagttgctctttgctgatatatcttagtttttacttttaataatcagccaacacatgctgtattagatttggttatttagcacagcttaagacattttagatcatattgtgacattgcatattctatcatggatctcatatcattgtatatgaaacagaccatatcactatccttttacaagtttggtttcctgttgcagatttttctgtactctaattccttttccgcttcatttacaggcttatgtggatgctgttcttgatcttgcttctcatttcatcacacgtttaaggcgttatgcgagtttttgtcggactcttgcaagccatgctgcttctgctggaactggcagtaatcgcaacaatgttaccagtcccacacaaaatgcatcatctcctgccccacctcagg

SEQ ID NO: 180707 - DNA, 526 bp, Arabidopsis thaliana landsberg
gtcgccgtcaagcttctctccggagaatatggttttgtaataaacgatgacaaaacgatccagtaactgcgctatttgcgacaacactaatcgtccttgtatctgtactgcttgcgttaatcataggtttcaccacaaaatctctcataaagtttcgatttttttcgaaaccctcatagttttttcttccttctatagattgattgagtataacactttgttgaagtcactcaaaagtcgaagagattcattattatcaagattcaatgagctattggaatctaaggtttggttttaaagactcatcttttttttgttctgtgaagtatacagtttcatgtttcgttattagggtaaagctgatgatcagaagaattggagattgattcaaaacgagaagatttcgaagttgaagaagaagcttaagagtaataaggagttagttactcaagggaaggttaagattgagagagggtcttctgatcttaaagttaaatatggagatcttgattcagctcgttccact

SEQ ID NO: 180708 - DNA, 164 bp, Arabidopsis thaliana landsberg
atgccaacgatcataatatcagacttagaatcagaaacagaatgtgcttccgaggagagtatcgacaagatcaaaactgtgagtgtgtgttccttctctttctcttctttatgtaagaacatctccaatgcctaactctattttttcctttattttagagatga

SEQ ID NO: 180709 - DNA, 502 bp, Arabidopsis thaliana landsberg
atggaagatgctcattcagagactatggataaagtctcagaaaatgctccagccaatcaaaaggtacataaagatagtgtaaatgaaatcgatttattgaattcaatattgaagctgattcagatatatataaatggaatgcaggaaagtttaggcaaggtcatgattacaatggagaagtatgctgccctgaaaactgctgtcaaggattcccagaaggtgaaatctaggataatatgaaatttagtttcatgaatcttttgactgatttgtgtgtgttttggttcctgcagaggatagaaatgttggaaatatcactccatgagactaaaaaggtaaagagagacaagagaagctaaatggttacacagcatatgagttttacttgtctatgcttaagatccaatggtctttctcctattttcaggtcttgattggactcgcggagatcattgaggccattcaaccgaatcaacctataaccaaatgcaaaccggtttag

SEQ ID NO: 180710 - DNA, 106 bp, Arabidopsis thaliana landsberg
atgagcaagctcagattcttccaaagtctcctaatttcgactgtgatctgctttttcctcccgtcgatcaacgctagaggcggccactccgaccatatccacccag

SEQ ID NO: 180711 - DNA, 175 bp, Arabidopsis thaliana landsberg
atggtttctgttccagacgtcaatgatgggcaagttattgagatcacagtgcagtccttatccgaaaacgtggcaagtttgaaagagaaagtagcaaacaaactgaagttaaggggaaaagccgggattttaaaggacgatgacaagtcacttgcacattacaatgttcgagcag

SEQ ID NO: 180712 - DNA, 102 bp, Arabidopsis thaliana landsberg
tcaaatgatctgatcaaacgtctgtctcatcgaactcaaagtcgtttgtttctgacgctggatcggttgcgacaaagtatacaaaatttccttcgatatcag

SEQ ID NO: 180713 - DNA, 616 bp, Arabidopsis thaliana landsberg
caatttacaggaagaatttcactctcgttataacaactatattttggaagacctacgtgtctctgcatctgttaagaagcgagaaaataccggtcaccagtttagccaggcatgggctggcgcttgttctgttctgggatttgatataactatttctctgtcagaattgcaggtatcagtctttgtggtatataatatatttatcatgttttgaaattctcgttatatgtacacattcctatagttgttaatagtcatgattgctggcctgttatgtgtttttatgtcagatggtactttctatgctttcattatttgctgcgatacctggaggagatagcgcacatgcttcttttgaaaggccttcttcgttcaacagtgaatctgaaagaagttttgagtctgtagttcctgatggtaagtaggtatattaatattttagccattcttttgtgggttcttcttctaatgaaaaattgatatatgtgtaggagcgattgttgctattcaagatataaaccaacatatgttcgtcacagtggaagatggggggaacaaatgtgttgtgactggtacccttcattattctcttgtcggagaaagagctcttttcagg

SEQ ID NO: 180714 - DNA, 1105 bp, Arabidopsis thaliana landsberg
gatttgatcaatggaaaagatatttttgctccggtttttgatttccagcaaaagaagcgtgttgattccaagatggtgaagacatcctctggtgtggtaagtcataaatgtgattttggttttggttttggtatggctcctatggttttacgttttggtttgttgtaggttattgttgatgggacgtatgctctccatgcaagattgcgttccagactggatattcaggttgcagtggtaagattttctcctcctagagcagttattggtctagctaatgtacaaccatgatatcatttattctctctgtggttaggttgggggcgttcattttagccttctctctaaagtccgttatgatattggagattcgtgttcgcttgattaccttatcgacagcattttccctttgtttagaaagcatattgagccagatcttcatcatgcacaggttgaattgtcttctttttcctccatttaagtgttcagaagtttgacttctccgtttgttgggcgtgtgcagatcagaatcaacaatagttttgtttcatcatttcgggaagccatatacaaattgaaatgcaaaactgaggtctgtagtttcttccagttgttgtggtttcatgttgggacgtatgtttaccacttgactaagattcatgtaacagatagtaacttcctttcctcaagaaagcgacgtgcagaaggataagtaagaaggattcttctattatgtgtgaatagtttaagatttttagttggttttcataggtatactgacttggtgagttggttttcagttttattgagatgtacctcagaccaccttctgcaagcgaagaggcacggataaatgactggattaaagttcgtcaagctggtataaggtactatctgtcacttggagaccaaaggattgttgacaagcatttcattatccggcctaaagctgagtttgaggtgagttattacatgtaattgccgaagtttcagtatttctatggtgtttccttcttcctagttctgcaattttttatggaatgtgaagtatcgctacctctttattgttagcgcaaaagataatggtagtaatggggttatgtag

SEQ ID NO: 180715 - DNA, 3685 bp, Arabidopsis thaliana landsberg
  unsure (1)..(3685): unsure at all n locations
gagtacgacattttgaatgacaattccaagaatccaagggatcgagtggctcgtcagaaaaagaatctccgacgacgtctaggtcaatagcttgtctcgttttctattaatcaatttccatggggaaagtattatcagttgtccaatttcatgaaatgtgatatacgtaaccaggatagattataggtataaattttgagaaatcagtatatgcgtaaacccattcttctaagtctattacatcacgactattggttctctgattctctgtaaagttgactctgtatgctccaaatattaatgttttacttgattgatgcatctattgaacatacttctgaaaatctgtgaaacaggtttggacatgtgcgagcagttcatggatgtcaatgaaatgattagagatgaggatcttattgagcagaagtccaatgttcctgccaatggggttgggaacagattatacgcaaactgttctccacatcatatccagcaattcgtttcaagaatggttccccgcgtcaattctaggaggccaagcgcaagggaattgaatttactgaaacgaaaagcaaaaataagctctaaagatcaagctaaaggtagctgcgaagtagcagatgttgagatgtcatcgtctcatgttgcctcaacctcaaaaagaatattgtccgactcattggactcgagcaaggtatttggataatgtatactcataatgacggataaccaacttacataatatgagttgctgaacgttagtacaaccaacttgaagtctcattagttcattgatatgctattcgtggattcaactttgacttatgctgctttctcttaggtgtataatctcttacgattgtatagtccagacataggcacaaacttcacttgaaaatagaataacagttgtcatattttgttttagcaataaatctcaagctgcgtgaggaaatttccttattagaattctaggcacttcttgattttggcagaccatatttcatactgtcttttcacttctgtatatgctacttgaaacttcgtaggcggacattggtaatgaggatgatatcgagcctgatggggatggaaaatggcctttccatagttttgttgagcaacttattcttgacatgtttgaccctggtaaggttcatgtacttgtgccgtatacattttacttttttccacttattgagttctagtaaagttgactaataatctgataatgtgttcagcatgggagatccgccatggaagtgtaatggctctcagagaaatattaatgcttcatggtggttctgctggagtgtcaacagaagagtttagttcagataatgggtttgagttgaaagacgtcttgaataaagtaacacgagaaagagaaatcgacttgaatatgcaggtttcagaaaatgagctggagccacttcggaaaagacctaagattgaagatccatcaaaatcttttattgataacactgttttagaagttattgggggtgactatgatattaatgttaaagatgaagatgctgagtttttgctgccaccagtgaaggtcaatggtcaaactgactgtagttctacgaaactggaacctcaatcttctatggatgactcgacatctcactctgaaataaaccatatggcagaggttaacaatcattttgaagataagagttttattgaggagccagttatacctaagcaacaggaagaaaatctcgaagtgttggatttggtcaaacaagctaggcattcttggataaaaaattttgaatttctccaggattgcaccattcgcttcttatgtgtgctttcacttgaccggtaagactttggttctttatcctaggttttcttttccatttttagctgtttctgcttcatggtagcacgattgtttagaaaggttctgatactggctgagatttggttgatcctttcttagttaatgattagctttccctcgattgcagatttggggattatatttctgatcaggtagttgctcctgtgcgggaagcttgtgcccaagcacttggtgctactttcaaatacatgaatccctcgttgatttatgagacattaaatatcttgcttcagatgcaggtaatatatagagagagagattgacttttttaacctactcaaaactaagaaacttgttgcagtctctaataattataaactgttggtaatctttatcatttatatttgttcagcgccggcctgaatgggaaattcgtcatggaagtcttttaggcatcaagtacttggttgctgtgcgacaggtaatattccagcacataagagctgattaaacatgtttggaaaactgaaaaaggacactttcactgtcttgttttgccgttttcttatgtcttgagaacttatgcttttctatcatgatatgtagtagtttttgattttctgaggctctatttagcttatttgacttcttgatatgttcttggtttgtagagatgcatttccagtgttagcttttctttcttattctccccgttttttgcaggaaatgctccaagatttgcttggctatattcttccggcgtgtaaagcagggttggaggattctgacgatgatgtgcgagcagttgccgctgatgctcttataccggcagcagctgctattgtctctttgagaggacagacattactttccattgtcatgctactgtgggatatcttacttgagttggatgacttaagtccatcaacaagcaggtaaacaagtgtaaaattacatgctaaccttttcattatccaaaatccttcttttcttggtatttggagttttctgtacgagatcaattttgacctagtgaaatatttcttgcagtattatgaannnnnnnnnnnnnnnnnnnnntcaagatgacatgaccctagtgatgcatgaggaattatcactgggggaggaacaaaatattgaactcaatgaaatgggtcatatcgagagtattggagaaagaagagatgtaaaggaaatcccttatgcattatcaggtttggcccctaggttgtggccattcacgaggcatgacataacatcagttcgattttctgctattcgaactctggtaggtttctgttgtttattctacaaaagaatctctctcagtacttgcttcctatgtttgtagccgcttacatgtatcttgtgccttgagtttctatgccctcagaatttaacagatgcaaaccccgtttgtttacctcagaatacactttacttatgtttcttcatatgtttatagtgtgctttcctaaattttcccctggcaggaacgacttcttgaagctggatgcagaaaaaacatttctgggcagtctaaaagttctttttggccatcttctattttaggggacaccctgagaatcgtctttcaaaatcttttgcttgaatcaactgaggagattctggagtgttcggagagagtgtggagactattggttcaggtacttagtaataaaattttgcttttctttgaaacacctaaattatttctatgcctttttctccttcttctgcatccttagaaattaaaggatcttcgttcttggtttccagtttgcattcttacttgggcctagattatctctcatttctcttcttttttagtgcccagtggatgatctagaaggcacgggttaa

SEQ ID NO: 180716 - DNA, 186 bp, Arabidopsis thaliana landsberg
ggatggaaagagaggccggtttttgggaagatacggtacatgaactacgcgggttgcaaacggaaattcaatgtggatagttacatctcttatgtcaagagtttggtgtcagtaacaaagaagaagaggaaagctgaagaacagctcaccagagactctgttgatcccaagataactattgtttag

SEQ ID NO: 180717 - DNA, 79 bp, Arabidopsis thaliana landsberg
atgtttagaaaacaaatcgaaaaacatcgccgacctttattgatcgaggaagagaatcctggtgggattttagagggag

SEQ ID NO: 180718 - DNA, 104 bp, Arabidopsis thaliana landsberg
tatttaatccggccatctccttccgttatgacatcgttgaaagtgccaccactcgggatcatcggcaacacatgttcttggtgcggacaaatcacatccaacag

SEQ ID NO: 180719 - DNA, 46 bp, Arabidopsis thaliana landsberg
atgaccctgatgacgagcatagagcccagaaagctcgcccgctttc

SEQ ID NO: 180720 - DNA, 488 bp, Arabidopsis thaliana landsberg
atgcttgaagtggtgtccaaaattctgaaggaagtagacttcaatacggtaagatggtttgattttcccaagtccaactacaatgtaatggtttaaaaaacttgaatagatgttctcatacactttttttcttcttaataacaggcaacactatcagatattctgcagaagctaagtatgttattggattttgcttttattatctatttcgcaattcaaatgtacaaggagctttttggtaacatatgctgtttgtgataacgtcaggtgaccattttggtgtcgagctgtcgcatagaaaaccagaggtgaaggatgttatcacagaggccataaatgcaatgactgatgatgaagaagaagatgaagaggaagaagctgaggcaggaagtgacaaagaaaaggaagaagtaaaaggagaggaagaagaggaaaaagctgaggctgaaagtgacaaagagaaggaaaaagaagagccaaaggattga

SEQ ID NO: 180721 - DNA, 723 bp, Arabidopsis thaliana landsberg
acggcaagtgagagacagaaaacgaagtacctgagaaagctggagggcgatggagtcgacatcggaatcatgaaagctgtggagcaagaaccgggtatgaccggcgaccttggagggagtcatgaggtaaggaaatccgagatccgaaatgccagggacgacgggagaggggctcttccttctagggttttcggtggatccacgagagtagctatagttagggatttacgagaacgctctctcagagatccgagagagagatttgattgcaaagtttctttctgcgattttgcgttttttgcgttttgggggttgtgagttgtgattttggcccttctttccacacatataataactcaccgccgctgctaataataagcccattattttcgttattgggccttcccttacctgactctttttaaggcccacattattcgtggactcgtctcgtctggattttcaattgtctttgaatacattatatccaacaaaggaaaagaagcattctttaatttgtgttgggcactcctcaacaaaggataacactcaatcttctgttatgccctttcttcatcttcataattggcttcttttcatcttctcttctttcaaagtagagatcattggcttcttttcaaatatacgatcatcatcattttgattctgaaacccttttttaaccagtacatacatcgaatgctaaaaagatcatctcaggag

SEQ ID NO: 180722 - DNA, 763 bp, Arabidopsis thaliana landsberg
atgcccggatttagattccattctaccgaagaagaactcatagagttttaccttggccgaaaagtcgaaggcaaacgctttaatgtagaactcatcactttcctcgatctttatcgctatgatccttgggaacttcctggtaaatatacattcacataaacacacatatatatatactaatacacacataaatcatgtcaaactattaggaaagcttaatttctattcatatattaagatctttcttctctcttatcactttatctctctatttctgtttttaacctatatatgtacctacctccttatgaagatattactatgtcgatcgatcgttaacaattctcaatatctttaaacgcttctccctctttagtttctttcttaaattaacctaattaaacaacctacatatatatcataagatatacaaatatgtgtatgttttcataattagcttatgtatgtttaattatagatatatgtatatgcagctatggcggcgataggagagaaagagtggtacttctatgtgccaagagatcggaaatatagaaatggagatagaccgaaccgagtaacgacttcaggatattggaaagccaccggagctgataggatgatcagatcggagacttctcggcctatcggattaaagaaaaccctagttttctactctggtaaagcccctaaaggcactcgtactagttggatcatgaacgagtatcgtcttcctcaccatgaaaccgagaagtaccaaaag

SEQ ID NO: 180723 - DNA, 807 bp, Arabidopsis thaliana landsberg
atgggtggtcaaaccgcattgaacttcgcggttgctcttgctaagagtggtgttttggagaaatacggtgttgaattgataggagctaagcttggtgcgattaagaaagctgaagatcgtgagttgttcaaggatgcgatgaagaacattgggctaaagactccaccttcagggattgggaccactcttgatgagtgttttgacattgctgagaaaattggtgagttccctttgattatccgtcctgcgtttactttaggtggtactggtggtggaattgcgtataacaaagaggagtttgagtctatatgtaaatcgggtttggctgcgagtgcgacaagtcaagttcttgtggagaaatccttgttgggttggaaagaatatgagcttgaggtgatgagagacttagctgacaatgttgtcattatctgttccattgagaatattgatcctatgggtgtgcacactggtgattccatcactgtggcacctgcacagactctaacggatagagagtaccagcggcttagggattattccattgcgattatacgggagattggtgttgagtgtggtggatctaatgtgcagtttgctgtcaacccggttgatggtgaagttatgatcatagagatgaaccctagggtctcaagatcttctgctcttgcttccaaggctacagggtctcccattgctaaaatggctgccaagttgtctgttggctataccttggatcagattcctaatgatatcacgaggaaaacaccggctagcttcgagccctccatcgattatgtggtgactaag

SEQ ID NO: 180724 - DNA, 2275 bp, Arabidopsis thaliana landsberg
  unsure (1)..(2275): unsure at all n locations
atgagtcatgttattgatggtccagagaaaaacaaaactacgaaagcaaaaagttctgtgaaaggattaaataaggaagagctggaagacagactcttgcctcaccagaggttgctaaggagcagaactcagtccaaaacatcttcgcatgtctcaaaaggccatgattctgttgagtccaacaaggcagtgaatgctgaagaaaagccgtcagctcctgttgaggagaatgcgatagctctagagttcttggcctcacttgacaaggaaaaagtcacatttatgagtgatcagaatgcgctggaaaatctggaagtgcaggagatggatacagaggagccgtcaaaggaaaatgatgtctcaaaagacgtcaatctgacttccaacttaactgaaattcttagagcaaacgaagccctcgaggaaattgatgatgaagagaatagagaggagatggagctggaagaaatagatgatggatgcatgtatcaactcaatgacattgggtccaaaacttctacaggaggatggtttgtatcagagggcgaggcagttatacttgctcatgatgatggctcgtgttcctattacgatgtcgctaactctgaggtactatgcgtttcttcatttatgaaagtttttagtatcatgtttgatctaacttgaactatgctagtgtggaacattgattttaaaatctcatattgaccacaacatacacatatctcaaggtacgagaagatgtttagcatatcttattttgatgtagattggatttttcatcttatacttgcagaaatacttagtgactaaagctttattttgggctaatagtatgcacagtttatggttaatgaatgtaattctctgtcaatctgggtgcgtttgtatgaagtgactggagtttttggctttgttcactatgtatgcattattatcttttacatcaaagacttgaaattctttttcaggtgaaatctgtgtacagtcctccagatggtatctcaccaaacacttggagagattgctgggtagttcgtgcaccgggtgctgatggctgctcaggcagatatgtcgtagctgcttctgctgggaataccttagaatctggcttttgttcatgggatttctacacgaaagacattaaggcactccacatcgaggacggatcttcaagagtttcaagaacagctcttgctcctctacccaataacacatcacatggtaggaacactccggcttgtgcagtggtaccagaaactcaacaatggtggtacagaccgtgtggtcctcttatagcatcaactggtagttttcaaagtatagtaaaggtttttgacatacgagatggggaacaaatcatgaaatggggtgtgcagaatcctgtgtcagctttagattattcgagccctttacaatggaggaatcgaggaaaacttgtcatagccgaaactgaagcaatttctgtttgggatgtcaattcccttcaccctgaagcacagcacacgatttcnnnnnnnnnnnnnnnnnnnnnnnnnnnncatatcaacaacacagatgctgaagttgggggtggtgttcgtcaaaggtaaaaaaactttattttaccatttagcctcttactatctcctcgcttggcctcataaattgaatatgtggaagctaaacaatgtggatactttactctttctctctcattcacttataatgttctcttcacatggaatgcagagtaagttccttggatgctgaaggaaacgacggagtattctgcactagtgattcaatcaacatcttagattttcgtaacccatctggcattggtgctaaaatccccaaactcggtgttaatgctcaatgtgtatcatctcgaggagattcagtgtttctaggatgtaccaatcagaaatcaactgtcaagaaacaaatggcttcttcttctcaggtgcagcaattctccataaggaaacagcgtctcgtgagcacatacagtctgcctgactcaaactctcacccgcaccactctgcaataacccaagtctggggaaattcaaattttgtcatggctacttctggtatgggactatttgtgtttgatactgcaaaagaagagaccttgcaacaacagccattgacaagtgactatggaagcgttcaaacagtaagagagatcatcggtccaaacgatatgtattgcccgtcatttgactacacaggttgtcgtgtactcctcatctcaagagaccgcccggctttatggagatacctcttatag

SEQ ID NO: 180725 - DNA, 171 bp, Arabidopsis thaliana landsberg
accttgtactttgatgatgcagaggaggaagaagaagaaaaagatgatgatcctcttgatgcttttcctttgcctttgatcttcaacgaagctttagccgccattgaatctgatctcaaagctctctgtatctgtgcgtatctctgtgtcagagactcagagtcgatttag

SEQ ID NO: 180726 - DNA, 76 bp, Arabidopsis thaliana landsberg
atcaccagcgaccgagcgaaagaaacgacacttcttcgccgttttcgtccacatgcagttttggggatagcacgtt

SEQ ID NO: 180727 - DNA, 293 bp, Arabidopsis thaliana landsberg
atgcagttatcaaaccatgccggtggttatggcgttgatgatctcagccaaggtataacagtttgaatttgtaactttagcttaagtcattttggcagaaattttgctgatttggatattggttcacttataggttaattagttgaggtgtattatgtaataatttatttgtgtttctctcagagagtgcttgtgagcttgaaaggttcccggagagagagactcaagaactgttggctatcaacatctatgtaatgagcttttcagttgaagagcttaatcatctcatctaa

SEQ ID NO: 180728 - DNA, 322 bp, Arabidopsis thaliana landsberg
gaggacaaggatgaagaagatatcaacaaggaagcttatgagatatgtttaaatgagtggggtagacgaactgtggagatatttgttcttgaccatatctttaggtaataatgcataatttgtttctatatagtatgccattgtgttctaacttgatgtgcttatgtattgtacttcaatatctctgagcagcaaaattgaggttgcatacaaagaagctattgcgcttaaaaggcaggaagaacttatccgtgaagaagaggaaacttcaaaacggagcaaagtgctaaaaaagggttttgggaaatgtagactgaattag

SEQ ID NO: 180729 - DNA, 343 bp, Arabidopsis thaliana landsberg
cccaaccaataagcagcacgacaaggcacagctgcagagcaacgacgggaccaagactgtccccctcgaccaggccacgcccaggcagacagtcattatcagcgaagaccttgcttcgcatgaagaagagaagctcctctgctgcctgtccaagaacaaagatgtcttcgcctggtcggccctcgatctggtcgtggttagccgctcaataattgaacacagtctgggaatcgacccttcggtaaggccgaaaaagcagcggcttcgcaagatgtccgacgagaagacggaggccgccaagcgagaagtgcactgcctcctggaagccaaattcatcgagccg

SEQ ID NO: 180730 - DNA, 487 bp, Arabidopsis thaliana landsberg
ctagcaaacacatccctagaatatgatcctctctatgacgcagagaagggcttcaaagtgatgccttcatcgtttcatgacattagcgatgtcgaatttcaagacaactggggtcgtgtgtggtaaacaactgttctgacatctttatgatgcaaactatttccttcaaaatcttgtaattagtctgaacttcacttgcactgtttcttgtagggttgatcttggtacttccgatatcttcgcccttgatgtgcttctcaactgtttgacagttatgagttcagagtaagtaacacaagagaacttgtagttcccttttatcctctttgattgattgcttctttgttgcagaaaactttaatttttgtttatataaaatttcaggtacttgggcattcaacaagtagtatttggtggtaaacgaatgggagattgggaagagggaatgacaaatcctgattttgggtataagtacttcaagatctga

SEQ ID NO: 180731 - DNA, 313 bp, Arabidopsis thaliana landsberg
atgcactacttatcaggacaaccaaacattgtggaaatcaaaggagcttatgaagacagacaaagtgttcatcttgtaatggagctttgcgaaggcggtgagctttttgataagatcactaaacgaggacattactcagagaaagcagccgcggagatcattagaagtgtggttaaagttgtacagatttgtcatttcatgggtgtgattcatcgcgaccttaaacccgaaaacttcttgttgtccagtaaagatgaagcttcctcaatgctcaaggctactgattttggtgtttcagttttcatcgaagaag

SEQ ID NO: 180732 - DNA, 1675 bp, Arabidopsis thaliana landsberg
ggatcaatatgtggcttaccaaagaaggcgtgtgggtcaagttgatgatgatcgcgttaagtttgagattagcaccgtcttaactcgcaaggtatcactcatgttactttctttacatcaggaatcatgattagttttgtttgtgtagctaaggcctcttcgagcatatagattctgtttaacgttaggcttgttactaacaacggtttgataagtaattttggtttggaacaactgtaaccactattttagttagaatttcttattgttctcaatgtttatgttcttcttgtttgctgattctcagggaattgaaatgcaaatggcttcaggagttgacaaggtatttattgttgtcaagatttttgattatttctttttgaagttagaggcatttgactttccattgcctttattttttagtgtagccagaggaagtcaagtttgcagtacctcttgtgatggatatgaacataaacaaaatggtggttggctgcccttggaagcatcagcagaagatttatcttcaggttttatcttcgttcttataatttatccttttcttcactctgttaaaattgctggcgtcttcttgagaaacttgttgcggatgcaggtagtatacccgattcttcggaaatatgaagcagcaccgtcagcacctggtttgaaattagtatcatattatgatttaaaatcgctattctctgttgaggatgttaaactttctccatggatggacgggatgtaagttagttacagatgtacacacagttcactatacctgcaaaccatacatgtattaatcggtaatacttacatttctatttcaaaggtgcttggctgaatatcttccccatcttgaagaaacacttgagagacaggtcagttaaactaaatcttcttaatttcctgagtgcgagtgccttatttaccttaatttctagatccatgaagctgttgctgcaattgatttaaggaggagttttattgaggcattaagtcttaatctgggaagacctcttgaagccgatcctgtaagcatttcttcgcacgccttgacatatatttagaactatttccgagcttcttaactttcttatttgtttttcttgctagaccttttgccgtaaggctacattccttaatgcctctggacaatttactttcatggtaattattctatcactattcaagccttgtttaaaaagttctattcaatctttgccaaagtggattttcatacttgtcttctagagaaatctcaatttcacaaaaatatgtagcagtggattattgggtttttggctttgctgtaggttcatttcttcttttcaactcaatttccgaagcagcaaccaactctgatgctgcaaagttgtcaggtatcaaaactatttgtaaacgaactaagtagaaggcttcgactttctctttatttattttggtataaaaattgacaagctttttatatgcagcatttaaaccaatcgagtgtgccagtgaaatcgaatctcctcactgagttcccatggagtccaagatgggaagtgggacgcatggctgagcgactgtggttagtctctatggactctatcttagatgtcttatttaactaattctccttctgaacatttaaaattttacttttttgcagtggcttcctcaccgatga

SEQ ID NO: 180733 - DNA, 1513 bp, Arabidopsis thaliana landsberg
aagtctttcgagctggaattagcttgagccgttttggatatgtaatagcatgtactcgtacaataaggctaaggtacatgttcttgatgaagcatgttttctcatgttggtttaggtttctgatcagaagcagcttaaagagcatagtggtgttgcagtttagatcccagtatcagctgattaccaagttaagtttcctgaaagtggtgatctctactctatactagcagctgaagggattgagtttcttttgtcgcatagtggacaggtactgcttttgctctctcgttattatattgcactatattttggtataattgtctggtcttttatactctgtaagctcacttcaatcaggtgccgttggaatatattcatggtaagacgatttgtctcttcttctctgcaatctggtgcaggccctgcaaggacttcactccagagctgataaaactctacgaaaatcttcagaaccgaggagaagaactcgagatcatctttgtctcatttgatcatgatatgacttcattctatgaacatttctggtgcatgccatggcttgcagttcccttcaatttaagcctactcaacaaattaagggacaagtacggaatttctcgtatcccgtcactggttcctctatattcagatgaaatctcagtcgctgaagatgtaattggtctaattgaagactatggttctgaagcctttcctttcactaaaaagcgaaaagaagaactcaaagccatcgatgactccaaacgccttggaggacagttggagaaactccttactcacgagtcccgaaattacgttgttgccagaaatggaagcaaggtaaaaagaactcatttatagatttcatatatctggtctcatctaacgatcctataagattatgtctacgaacgttatgcaggtgctagtttctaaacttgtgggaaagaccatagggttgtactttggtgcacactggtgtccgcctttccgatctttcacttctcaactcgtagatgtgtacaatgagctagcgactacagataaaggctcctttgaagtcatcttaatttcaacagacagagactcaagagagtttaacatcaacatgaccaacatgccatggcttgcaataccttatgaggacagaacaagacaagatctttgtagaatcttcaacgtcaaactcatacctgcattggtcatcataggacccgaagagaaaacagtgaccacaaacgcgagagagatggtatcattgtatggatcaaggagttttccgttcacggaatcaaggattgttgagttaaaagcttgtttgaagaaggaaggtgattcacttccaaggaaagtgaaagataacaagcatgaacacgagctaaaactggatatggcgaaagcttatgtgtgtgatttctgtaagaagcaaggcaggttttgggcgttttcttgcaatgcttgtgattatgatcttcatcccccatgtgtcgaagaagaagaagcattattggtttag

SEQ ID NO: 180734 - DNA, 921 bp, Arabidopsis thaliana landsberg
ggagtttctgaaaccaaaaatctagatgcagctgataaaaatggttctttaacggcgaaggcagagagcattgcatctaaggatgaatcaaaagataattctcatgatgagaaggtgatactttatatctcattcttgttatgtcatgagtttatagtattgcgtatgtattttgtttactagggatcaacctagatgttgtattcattttttaacctatataaatattaaacggtttgctaattacttgtttatgaaaatgtaaacatgatatgacagaagctagatctgcctactagtatttcatattcagcagataaagattctaatgaagtggttactgagagaggcaggtaaattgatttttccatgtttgggagatttgtttctgttagatgttcttgtgttgattcttgaaattattggattgacactggtggtggtagttttcaaacgatttatgttgaaggatttggctcttcgttttctgaggatgatgatatcaagagtgcattaagtaaacatttcagtgtatgtggagagatcactagagtttttgttccaagaaacccttcaaccggtgctatcaaagggtttgtgattatttcctccttaatttttgtgactactactagagagaaaaggttaactgaagaagcaatgttttatttatcttcttacagatttgcttacattgatctaaaagaaggtgcaaagaaggcattggaacttagtggaagtaagatgacaggaaaggaacttgttgtaaagacggtgccgctaccgatgagagattccaaccctggctattctggtagatatcctggttttggcggccgttttcgcggacgttttggctttgttggtggcatatttggtggtggtcgttgtggaggttatggtcgctgtggccgctgttga

SEQ ID NO: 180735 - DNA, 707 bp, Arabidopsis thaliana landsberg
tgaaatttatggaaaagtggttgttgcaagcaaggttcctcttcctaactaccgaccagatttggatgataagcgaccacaacgggaggtaacattgtctcccttggtttaccaaaatcataatgcacagtttttatttgtagttttatgctgaaattgtaatgcatctcatcgtgcaggtggtgcttccgttgagtttgcaaagaagggtagagggactcctccaggaacatcttgatagacagcagctaagctcaggaaaggctaatgaatgcgtagctgattctcaacctcctaaacagactgaagaacttcccgatgaaaattctgattcgtttctcgatggttcttttatggagaaggtacttcagaggaggagtatgcggatgcgcaatatgcagagaacctggcaggtattactcaatcatctttaccccacgcctcttgtctttttatcaaaaactttctgctatagcagtagttatttggttgaataataggaatcccctgagggacggacgatgctggaattcaggaaaactttgccttcattcaaggacaaagaaagacttcttcaagctattgctcggaaccaggtgaattttagagcgggatatcttcgcaatgcagcaatgcatggaaattaattttttgatctcaactctcaaattctcaggtgatagttgtatctggggagactggatgtg

SEQ ID NO: 180736 - DNA, 299 bp, Arabidopsis thaliana landsberg
atgaacaatcgatccaagtgtaccaagaaccgcgaaagcaagcaatggactaacatcaagcgtatcgaagataggaggaatgatgtttctgaagagattcaagtaaggatcacagagatctctgatggcagacaaaggctgtctttcccaagggatattagggaaccaactcagcaaaaccctaaccatcaataccccactgtaaatgtctagccacttctttatccccaccgcaacaaccgtcagcggcgtgttcaagtatcccggaggacgatcccggagagacgcgaagaagacag

SEQ ID NO: 180737 - DNA, 324 bp, Arabidopsis thaliana landsberg
cttacgatttctatggaggtcatcatgatgcgtgtagtatcatttatttccccgataatggaaaagattacgagttaccgcgttttcggagaacaatcactacctcggaagggtctattgtgtatttcaacgagtttggtgggaacgcaaaccgcaaagtacgggtttggaggctggtcaagtacactgatggtcctgaggcgtggcagctcttttgggaagtcagcttggcgtctgtgaccaagctaggtatcgattacttcccggtggtgatgcatcctttgaagtctgagatcatctccttgtggagcagaaacaagaaag

SEQ ID NO: 180738 - DNA, 440 bp, Arabidopsis thaliana landsberg
  unsure (1)..(440): unsure at all n locations
ggctgggctggcgtgccgcctacgtggccacgctgcagcccggcgacgcatgccgcatgcgcttcgaatcgcgcgccagcattgccaaccgcagcggccgcgactggcgtggcgtgcagctcaccctgatcgccggcgaaccgcgcttcgccaaggcctccgcgccgnnnnnnnnnnnnnnnnnnnnnaaggcctccttcgcggccgccgcaccgatgccgcggcaggcgcaaatggacgactaccgcagcttcgccctgcccgccgccgtcgacctgcccgatggcagcgtcagccaggtgccgctgtacgccgaccgcacgatggcctgcgagcgcaccgcgctgtacgagaacggcggcacctggacgccaccgcaaccgataaagagaaccgcgactacaacaccggcagcaacgccgccatcaccgacacgctga

SEQ ID NO: 180739 - DNA, 442 bp, Arabidopsis thaliana landsberg
acgtcgcgtcgcccatatatatcagcggctcttaattcgcgttccaatgcagccaagactctcaacgaattgatcaagatccatggattagaatttgctttcaaaaaagacggagtgaaaagggacatggaaaggggatgcaaatcggcgttagctgacgagtacgtatccaacaacctacataatctgaggacacagtactgtgacaaaggtgataaatctattccgccaaaagcaccacgtggcagagattatcaagacgtcatggacgtccgatgacggcaaagcgcagacatatgacatcatcgaagtcatacattacccaacaaacgaacggttgatcgccgacatagatatgtacgacgggcttcaccaagtcatggaaattcctgaaaacctcgagaaggatgtgcctggtcgcgttcgtcggaaccggcgatga

SEQ ID NO: 180740 - DNA, 313 bp, Arabidopsis thaliana landsberg
ggcaggagagcaggttgtggggatagagcaagacccgtctaattttacacctgcgaatacgaggtttcagcgaggaagctctagcatccggagaaggttcagcaccaatgaatctatttcaacaccgttaccttccgttggcttctctcaagcagctactcctctcccggaagaagatgaagcgattgatggtgacatttaccttttagcaaagtcctattttgattgtcgagagtatagacgggcctcccatatgcttcgtgaccaagtgagcaagaaatcactgttcttgcgttactatgcgctttatctg

SEQ ID NO: 180741 - DNA, 297 bp, Arabidopsis thaliana landsberg
gaaagccattgtaaggttggtagacagaattggaagaggagctgagaaagataaccgaaaagtgtatgaaagaatcaatgagattcacaaaacccggtaagcaaaaaccaacatttcatagaactagacctatcaccataatgtactggctctaattgttgtggttataacacagacaaggatcaccgaggaggagaaaagggccagcttctggaacaaaaggtttggagagacatcgttctgaagaatccttctacgagaacccattaccagactgtctctgccagagagacccaa

SEQ ID NO: 180742 - DNA, 281 bp, Arabidopsis thaliana landsberg
atggagacggttcataactgcttcaatgatgctacgataaccggtgatgaaatcattgatatattggcgtttcttcaatcagacgagtcggacaatccaagcggtataaacgagttagtatcggtggatgataagaagagaagacggacgatatcaaaccgggaatcggccaagagatcgaggatgaaaaagaagacacgttttgaagagttaactgaagaggcgaaccggtttaacataagaaatcaagagctgaaaaaccggttagctaatgtctgcag

SEQ ID NO: 180743 - DNA, 320 bp, Arabidopsis thaliana landsberg
gaacctcgacaacctggatgtatccggcggatccgatgtatatatcgaaaatgacctgaaaataacctctctgaatatgcatctttccggcggctcagacctgcggggcaatatacacgggcagttgttgtcgctatcggccagcggtggttcggatgtatatctttccgggaaggtaaacaggatcagcatcagtgccagcggcggcagcgatgtgcacggatatgatatgattaccgactattgtactgtgaataccagcggcggcagtgatgtaaagatcactgccaacaaagagatcagcggcagtgccagtggag

SEQ ID NO: 180744 - DNA, 342 bp, Arabidopsis thaliana landsberg
gagcaggccggcttcctgacgccgcgcttccagcagaccgagcgccggggcctgtcgtgggagcagccctatctgttcgtgctgtcgccctattcggatctggtggtcagcccgcagatcaacacccgggtcaatccgttcatcaacctggagcatcgccggcgcttctggtcgggcgaggtcagcggccgctacggctatacctacgaacaggacttcaacagcgacggccagaccttcgggcccgagcgcagcaagggctacgtcctggcggaaggcttcttccagccgacccaggaatgggcctggggcttcaccgtccaggccgcccgcgaccgccgg

SEQ ID NO: 180745 - DNA, 842 bp, Arabidopsis thaliana landsberg
atgttttggaactacgctgaggggaaaataggctttcgcgaagcttcgagagttacgcgacatttctctgagttttctctacgcgacggcgattgcgacttgtctgattctcgtagatctgtgtctccggtaactttctctccattttttctatctctgttggattttttagcttgctacggattctgctcgtgatttggcctttctcagtgcgattagtgaaaagtgatgaacttttagttacattttagggttttaacttttttttcttggatgaatgatgctggatccttctttaggttagagtttttctttgtttaaagaagttatcaacgttggtttgctttagtttataaagcttctcgttcgacgatttttcctctgcaactagagatggtttatggttatgtcaaaacttgaaaccgtatttatgcttaactaacttaggtcctgttttggttttgcttattttctttctcaatgtgttcttctgcttgattgtgctggatttgtgaatgtctctacttaaaaccaggagttcatcgcagatggagtcatggttagaatcatttgcaatcacggatggcaaatgtcatcccgattgcttaaaagcaaacaatgagcaagaagattacggtaaattatcaaaacttgaatcttaaatttactttctttgcatcattataagaaactgtgatttggttttaactgttagctactctcgttttaatttaacaggttcaatctaaatccttctgaaagaatcatatgaattgacttacaacattttcatctctcttttttttcttgcagatgcatgtcaatctgcagctttggtagct

SEQ ID NO: 180746 - DNA, 352 bp, Arabidopsis thaliana landsberg
atggacttttgtgggtaagtctctgtgatttttgcaattcatagaaactaaattcacattcttttcagaggggtagcattttgatgattgattaacttacctctatatcgcagccgccacgatgggaatagcggtcggtttaccgtattacagcgcattgctgtcattttttgggggatttgtgttcgccccgaccacatactttgtaagcgcgaatactctactcttaaactgctcttgatatcatcaaacttcaatcaacatgttaataactctaacaaacataatgatatgttatctttcagatcccatgcatcatgtggctgatcctaaagaaaccaaagagatttag

SEQ ID NO: 180747 - DNA, 171 bp, Arabidopsis thaliana landsberg
ttcataatatatgaaagtactaggcgtttgggtacccattcgggtttggatcgggtatttcggattttggggttttcggatttagaggtagaacccattcgggtaattcttgatttcgggttcagatcggattcggatcagatatttcgggttcgaattcggattacttga

SEQ ID NO: 180748 - DNA, 751 bp, Arabidopsis thaliana landsberg
atgagagccaaagtatctgactttggactctcgagacagacagaggaagacttaactcatgtatccagtgtcgcaaaaggaactgttggataccttgatccagagtaagtctaacaacacaacctcacaaaagtatccctttttatgaactttgactgatagatgcattcttttgacaggtattatgctagtcagcagctgactgagaagagcgatgtctacagttttggcgttgttctttttgaattactctctggaaagaagccagtctcagcagaagattttggtcctgaactgaatatagttcactgggtaaacacctctaatcttctgtccattttcacctttgaccgtttaaagtactacatgaacaacatcaagattcacaaaccacatatcctctctatgcttttcttgttcaccaacaggcaagatcgctgatccgtaaaggagacgtgtgcgggatcatagatccatgtatagcaagcaacgtgaagatcgagtcagtctggagagttgcagaggtcgcaaaccaatgtgttgagcagcgtggacataacaggccaaggatgcaggaagtaatagtggcaatacaagacgcgatcaggatcgagagaggaaacgaaaatggactgaagtcatcgagttcaagcagctcaaaggcacaatcatctcgtaaaaccttgcttactagcttcctcgagctagagagccctgacatctcaagaaacagcctagctccagctgctag

SEQ ID NO: 180749 - DNA, 192 bp, Arabidopsis thaliana landsberg
atgcaaatgggtaagtagtcagttaaactaagggcttgattggttctccctctgcgtttgcgggtggtagcggttgttagcgattggcaccaatcatataaaccgctagatatcgctttggaccgctcgaaatcgccagatttcaaaagctccttcccgcaagcgtttgcggttgcgggcggtagcggttag

SEQ ID NO: 180750 - DNA, 350 bp, Arabidopsis thaliana landsberg
atgattgatatctgcgcaaacagtggatggctctcaagctcactgacgtgtatgcgccttttgcaaatggtcatgcaggtagtgtcctgaagattactactcttagcttgttcaaattatttcacttttgcaaattaagaggaacgctttacttaatccaattctctttttaattctagggcatgtggtctgatcaagattcgtcattatggatgatcccatgcatgaatgaccttcttctaggatctctgaccgcaagagggattcacacgctacatcagctattaaatcttccaagggaaactctacaaagtgtaaccgaaaacttccctgcatcaagattatctcag

SEQ ID NO: 180751 - DNA, 364 bp, Arabidopsis thaliana landsberg
atgtcaggagatgatgaagtagctaaacctttggtctcaaagagagaagtcgaccaccaagtgaaatcgctcctgaacgattttgaggtaaacagttcacttgtcatggccatttgtgcagacttcaaaaggcctcaaatgactctcattttccatgctggtacagggagatgctgatcaaaagaattgggttaatttccagcaacgcgtagacaaagcccctgaacaagttctgaggtgtgattcaaacgcttatgattttctgcatacttttgatcttgattctcccataacatcgatttgtgaaatacgtattgatacagatattcccggagctctggtgcttaacccctttggcccatag

SEQ ID NO: 180752 - DNA, 813 bp, Arabidopsis thaliana landsberg
atggatcctatggaactgcagaatcttatcaatgtgcagtcagagatgtacccattaggccctgctattgctctggcttatctgtccgtcttaaaggactgtgaggcccattgtctgcatgaagggtctgaagtgaagaggcttggaggccttcatgtgattgggacttcattgcatgagtctcggagaattgataaccaggtaagctattggttttacttctctgcctggatgctacattttttaatctaatgtgctagttttagatacttaagccaaccctttccccaaacctttaatttccagtacattatattgatttgcggacctttaaaattttggctactatctagaatggtagtatgatgaagagagaagaactacataaccattcatatttttccccgagggaaatatgctaatttgttctctcgaattatcaatattattaattttatcctgtttgatggaatcaaatgactagatagataattatctaagtttctgcctccatattatttcttatagcttcgtggcagagctggaaggcaaggagatcctggatccacgcggtttatgataaggtaatcaccacatctattattctcctgaaccagagaaactctctgtattagcgaagttacttacgtaaaagattctttactgctttgatatattaactttgcaccaatctgaatatgttagggaataatacctgcctttgctctgcgacatgatttctattactgttggtttgcttacagcttgcaagatgagatgtttcagaagtttaattttgatactgagtgggct

SEQ ID NO: 180753 - DNA, 879 bp, Arabidopsis thaliana landsberg
gtgaatacagaagtgcaatgtgagatgtttcaacaccaaatgtcattgccaccattgcgagtagaaaactcgcaggctcaaaccagcgatttctccaagagactacatcaaaacagtggtcaaagtgggttcgacgactttactttcgctgcaagtaactccaaccaattctacaacagcaacgttgatgatcatttgatacacattggaaatcttgacgagcaggtaattttatttcatagttaccaatttgatttcgtcatttatattttatatatgctcgaagaccaaatattaattgtctctataatctatatgatgttaacagagttatatagaagaacaagaattgattttgccaagtttccagagtaatgatcaagatcttgaattttatggtgggtatgatataaaactcattataattggaagtttggaaccatataaaatgttgattataatgatctaatcggaaataattgtatatttattacaggcggatctcggaccaatacaatagacaacatagagatcgacgattttttctcgtttgagaaccaagcacaagacaacgacaactcaaacgtaaccccaaactcggcaggattcgaaatgattggagaagagattatagtaaaccataaaatgctcattagtacacggcagacgacggagattttatactatcaagtggtaccgtcgcagatattgaaaattcacataaatccagttcatggaaatgaagagagaacaatgttaatggaagaagacagtgatgattcttggttccagaaggctgaaaatgttgcgaagatgaaactgaaacagattagtttagttgcaaaacgttattacaaatgtctcactattattttctga

SEQ ID NO: 180754 - DNA, 173 bp, Arabidopsis thaliana landsberg
atgcaagagaacacattacccacagaagagcctcaaactcagtatgaagaggaaatacacactgacgaagacactttagtccaagattggatgaatgactatcagagccaacaagaatccatccaatacaacttaaggaggctgcgtttaccccagagcaatcgatctgacaa

SEQ ID NO: 180755 - DNA, 149 bp, Arabidopsis thaliana landsberg
gatcgaagaacattcagatgcttattacaagatctttatgtcgtctctttaaattgagcttcgttcagttatatttcggtggtaaacaaggattcttcgtgcgatttttcggctatgttttccttaccagattcggtgttcgtcggtga

SEQ ID NO: 180756 - DNA, 507 bp, Arabidopsis thaliana landsberg
  unsure (1)..(507): unsure at all n locations
atcgcgcgctacgggttgaacgtcgacgacatcaacagcctcatcaatgccgcgatcggcggcgacgtggcgaccgaagtggtgcagggcgacaagcagttcgacatggtggtgcggctgcagcagcgcttccgcgacaaccccgaggaaatcggcgacattccggtggcgacgccgggcggccagcagattccgctgaaggaactggcgcatatttccatcgccaacggcgcgtccttcatctatcgcgaaaacggttcgcgctacatcggcgtgcagttctcggtgcaggggcgcgatcttgccggcgcggtggacgacgcgatcgcgcaggtggcgcgcgacgtgaagctgccgcagggttatcaccttgaatggggcggcgaatacaaggaatacaccgcctcgcgcgcacagatgcgcgtgatcctgccgctgacggtgctggtgatctttgccctgctgttcgtgctgtacggcaacttcaagtttccgctgatcacngtg

SEQ ID NO: 180757 - DNA, 442 bp, Arabidopsis thaliana landsberg
gtgcctgacagctttcagacaaggaccccgctctcaaaaaatgatatccccgtaaaacagcgtttattccgcgacagtttgctggtgaagctgatcgataaagcggtaaaacagaacccggatatgctcattgcatggcaacgggtagaggtcatgcgttcacaattcatgatgcgccagggggtcatgctgccgcaggcttatgcagatgctgctgtttcggcacagcgttacggggattatacgatggaaggcgtgggtaatttcgataccaatctttccggcaatatcaagcccaaccagaaaacgcctgtgccggtaacacccaattacttcctgggactgcgcagcagctgggagatagatatatggggcaagctgaagcagcagaaacaggccgcatacctgctagtgctggcaatccgaagagggtcgcaagctg

SEQ ID NO: 180758 - DNA, 608 bp, Arabidopsis thaliana landsberg
atggtgggtcgaccatgttttgaacgctggatcgatcatcatgtggtcggacgatcataatttcagagattgatcgaccatccttggaagcacgaacacatttagtcatgtgtttgaattttcttttatcttatttgtttccaactcccaaatgatacgaaatgtcacaaaaactcttaaaatcactacataatctaagacttcctaagacacaaatactcctatggacattaaaacaagattttatcaacagtgaagccatattatcatcactgtagttctgaaaatgccatattgcccaaagtcttttctagctagtatgccatagtggctaacatcttcttctttcttttcatctctctaaataagcaaaaaattgagaggctttctcttcctcttctattcctctccaacatagtattcattctctcctcatctcatttcttgtttcttttcagccggagcttgtgccgatggttctacgtcgatctcactctctcaacgacgaagaaaacatcccccaaagcctccttctatgtccaaatgtaaagcttgtccgcagcacacaaccttccaccgctgtaccaccaccgttcctacttttctga

SEQ ID NO: 180759 - DNA, 200 bp, Arabidopsis thaliana landsberg
ttttcctcgaccccgaagatcttcttctcggagaagtttgtgaagagccacggacacctcttattaagactcgaaagatacgagatcctcctcctcgagtatctcgtagatcatcacaagtatctagaccgatttatctccgccatagatttctcccacagtcaaggaaacagtcttcttcttctcgacgccaacgttag

SEQ ID NO: 180760 - DNA, 240 bp, Arabidopsis thaliana landsberg
atcatcaatgtagtcgaagggctccacgcgcagcgacaaaaacggaacaagaaagaagaaaaaatcaaaagattcaaaaacctttcttcatctttattaacatcaactattcagatttgtgtaagacaaaagaaagaagcgaagattacggggaccaacagtgacgtggacctctccccgtcggtgcccataccaccaactttactactccagtactggtcacttgcttgttcgaattaa

SEQ ID NO: 180761 - DNA, 295 bp, Arabidopsis thaliana landsberg
atgaaaagaacattggctggctgtgaaaaggattttcaagtacctgaaaggtacgtctgatgttggactcctatacagaggtgaggctccgagcctgattgtaggctattctaattcggattatgcaggagatatagacagcagaagatcaatgactggttatgtgtttgccttgggtaattctgtaattagctggaaagcaactctacagccaactgtgacgctgtcaaccacagaagcagagtatatggcttcaacagaagctgctaaagagggtatttggctgaaaggattg

SEQ ID NO: 180762 - DNA, 601 bp, Arabidopsis thaliana landsberg
tgattagtgatgctcaatgtgagcaaaggctttgggatatgaaacacaaaggcatgaaagacttttacatgtgtgagattcaaaaagacttcacgattgatgctaccttcaaagggaacgcctctcggtttctgaaccacagttgcaacccaaactgtgtattggaaaagtggtaaagcatacattatttcatataaatatgtcgatgatgctcgagtaagagagcatgagtcagtttgattattttgttctaacaggcaagttgaaggtgagacccgtgtgggtgtctttgcagctcgtcaaatagaagcaggagagccacttacatatgactacaggtcaagttcttgaccatttgtttcttttatgtgcttataattagcctaagtaatctgagattctgatatattagcttctctctttgtgtaatggcagatttgtgcagtttggtcctgaagtaaagtgcaattgtggttctgaaaactgtcaaggttatcttgggacaaagaggaaagaaccaaactgtttggttgtatcttggggagcaaaacgcagaagattgtttcaccgacctatagcccgtaaaccgcagcaagattag

SEQ ID NO: 180763 - DNA, 72 bp, Arabidopsis thaliana landsberg
gagaatcagcgatttgaatggacccgaatctccatttccacagttaaggaacataaaaaagatggagacatt

SEQ ID NO: 180764 - DNA, 176 bp, Arabidopsis thaliana landsberg
atggaggaaacaggtctaaagattgaaaagatgaagcttttgactgttacaaacaatgtcttcaaagaagcaccaacgccatcacactacgtctctgtttcgatacgtgcggtgttggtggatccaagtcaagaaccgaagaatatggaaccagagaagtgtgaaggatgggattg

SEQ ID NO: 180765 - DNA, 55 bp, Arabidopsis thaliana landsberg
atgaggtgcgacaaatgtcgttcagaagcactcaagatcggagccaaaaccactg

SEQ ID NO: 180766 - DNA, 309 bp, Arabidopsis thaliana landsberg
atgccgttcagcttgaggaatgcgggtgcaacgtaccagcgatgcatgaaccatgtgttcggcgaacacatcggccgaacggtcaaggcctacgtcgatgacatcgtagtcaagacgaggaaagcctccgacctcctttccgaccttgaagtgacattccgatgtctcaaggcgaaaggcgtgaagctcaatcccggaggcatgctcttagggttcatcgtctccgagcggggcatcgaggccaacccggagaagatcgcggccatcaccagcatggggcccatcaaggacttgaaaggcgtatatagg

SEQ ID NO: 180767 - DNA, 96 bp, Arabidopsis thaliana landsberg
atgaagagacgaacaaaacaaaacaaaacaaaaagagagtcgttggaatattcctactacattctggatgatacccgaattaaccgacccatgtat

SEQ ID NO: 180768 - DNA, 397 bp, Arabidopsis thaliana landsberg
atcgaaatcttcatccggggtgagtgggatcaacagacttgatacttcgtttgagccagacagtccatgtatgggtgcattatccaagaatgagttggagactgtttccattgcaagggatcggtcagtacttgctgagcagaggctagccaagggaaataataagtaaggagatactcaagctttcgttatagattttccttcagtttaataataaattgtttacgactgataaatgcataattgtgcatatccaggagaaacttactggatgatagtcccacaaacagctctactgcaatattgaaaggaaaagtttctagggctccaagaacagcagccattatgggcgttgaatcttcagccaaagttgattccccatccggtgtattacaag

SEQ ID NO: 180769 - DNA, 186 bp, Arabidopsis thaliana landsberg
gcgccggcgatcggcacgccgggcggctacgtgatccagacgttcaaggcgcacgggaaggtgcgctggatcgtggccggaaccacgccgcgaggcgtcctgtacggggcgttcgcgttgctcgaaatactgggtgatgacccgtcgatgcagcggttccgcgaggtttccgcgccgtcggcgccg

SEQ ID NO: 180770 - DNA, 54 bp, Arabidopsis thaliana landsberg
atgctcgcatcgattaaacgaaacagcgccctagacgacattctgcctctcacc

SEQ ID NO: 180771 - DNA, 117 bp, Arabidopsis thaliana landsberg
gtcccgaaccttcaaatctgccatctcttctggaatagtagtcacatcatcgtcaatcaacagcccattgctcaaccatttatctttccaaaacttgatggttctgccatcttctag

SEQ ID NO: 180772 - DNA, 360 bp, Arabidopsis thaliana landsberg
ggaaaccttaagttcgccttcgtcgccgtcgaatacttcaccaaatggatcaaggcaagggctgtctccacaataacatcaaagaccgcccaaaaattcttttggcaaaatgtcgtttgccgcttcggagtaccgtccgagctaacagtcgacaacggcaagcagtttgacagccaagacttcaaggatttttgcttctccatcggcaccaagcttgccttcgccttggtctatcacccgcagtccaatggagttgtggaacgggccaatggaaaaatcttcacagctgtcaaaaagatgctcctcgacgaaaaaagggcaagtgggccgatttgctacctgaggcagtctgggcactaa

SEQ ID NO: 180773 - DNA, 573 bp, Arabidopsis thaliana landsberg
agcttgagatgcagagaagtagatcagatgtttccagtgattgatccgaaagcgagaccaacaacaaaacccaagatcttcctcagtctcttgtggaaacagcttaatcatctagggtaagtgcttaatctcttcacagtacttaacacactagtagtcaattttcagattcttatgattatgattatgtttgcagaaatgcaggatttgatccagctgttattcggattgatccatatgggaatgttgtttacttccacgctgattcagcttctcctcttgcttggagttttgatcattggttcccttgctcaagtacacacacttctcccttgcttttagattttgagttgctttgttgtcttatttattgattacagctttttctgtatctaaattgttttttgtaggaggaggtttaacagtaccaagcaacctaaggatagtgcaatggcaagcacgcaagaacaagaaggacaagcttgagttcttagtaccatggtgggatcttcaagttggtatttctgtgaatcagttcttatcgattttcgctgcttctagttctgatttcag

SEQ ID NO: 180774 - DNA, 2484 bp, Arabidopsis thaliana landsberg
atggaggaagcttttgtcgatgaatcctctatgctattgaattccccttatcttaatggtattcacggagaccctgatgtacttcctcgcgttggagatcagtaccaggctgatctacctgtgctactcactgagtctgatcgtctaaagctcattacttgctttcattcagagcctcccctgcagaaactccttacttttggcttgcctatccctcttatgtggacaagaagtgagaaattcagaggtttccgtgaagccgatattgataaagccagtccaccagtcgatgatcaatccttgcagaatgctgcttgcatgaaaccgaggagtattgtgcttgcattgccttgccaaaaaaacgccaagttcaagtttgactggctcgataagaccctctatccattccctgggactttgggtcaaccttgggaagatgctgagcaagagaggtttcttcttggcctctactgtcttggcaaaaaccttgtcttggtgcagagatttgttgggagcaagcacatgggagatatgctctcttactattacggcagcttttacaggtctactgaataccggagatgggtagatggacgcaagtccagaagcagacggtctgttcaaggccagaaattattatcaggctggaggcaacaagagttgctctctcggatctcgtctcatgtatccgaggaatgcaagattacgttgcttaaggtacataatatgcttctcgttagttagtggttgcggtgtattctgaatcaaaatgcagattcttgagatttccatgtgttgtttttgtaggtatctaaagcatttagggaagataagattgcactggaggattacgtcttcactttaaagaatactgtaggcattgatatgcttacacaagttattggtataggtaaagggaaaagagatctgaccaactgcgcgttagagccaaccaagttgaatcatggagcctctggtaactctcaagtacgaatacgcaatgatcttccgattgcggatatagtcaaattcctaacaggagaatataggatgagcaaaacacggtccagtgacctcttctgggaagctgtttggccacgtttgctggcaagagggtggcactctgagcagccgaaagatggtccaaagaattctctggtttttctcgttccggaagccaataagttttccaggaggaagatgtcaaaggggaatcactactttgactctctaactgatgtcttgaacaaagttgctttagatcccactcttcttgagcttgatgaggatctagagaggaaggggagcaaagaagaggttatcaagaatgaccctcccacaaatttagaggagtttgatgattcttcaccaaacagcaagaagaagaaaaagtacctacagccacgcagcaaaacaagaaaaattcaggaggtcatgttgtttacaattatcgataccagtgagacgaatagtatagaaggatgtacattgaaagagctcagatctctgcctgttgggaccggcagttcaatagctaactcctcaagttacttgagtgaatctgaagataacatgtcagaagaatctgaaaacaaggcagagacgacagctaaatcaatggcttcgagagtgtgtggtgggggcagcattagttctggtaagagcagctctgtaaacatggacaatgccacgagtccaagcaccatttctctcaatgagagacagcagaagaaccggaaaggcgggagaccaagaaatccaaaattgttacctgtctgcaccaaaaggagtagtttggcagattgtaccttgcgagaagcaggttgttttggtgaaacccagtccaggaagaagaaaccattgaagaaagggaaacatatgagaccaaacccattaaaagctgatctaaatgtagtattgacgagagaggagcgcatcaacgaagataaaactctgaaactgtcctcaaccagttcctttgcaagagatagctcttgtcgaagaaacaaagaccgagaaatatcaccagaacgatctgaaagcagagaagattttgatttgaacgtttcacaaatctccctagaacgtgaagctgatggtactgatactgtcatggcagacgttgtacagaacagtgagagctcttgtgccgagcagtcctctgttcaagtggatgtggaaaagcagtgtaagcctcaggagttgcaagtaaccgcggatctccttcctgaacggaggcagagtacaaggacccgacccttgactacaaaggcactggaagcttttgcttttgggtaccttggtaactcgaataaggagagaaaggcttcagaggagtcgagaacaaagtctaataagaagagaaaggcttcagaggaatcaagaacaaagtctacaaagcgcatccatcgtcacttacctgtgtcctccaagttcagaaacggaactgtagaggatggttcaaacactgacgagactgaatag

SEQ ID NO: 180775 - DNA, 39 bp, Arabidopsis thaliana landsberg
atggcgactgtgtatgtagtcgtcaaatttagcgacaaa

SEQ ID NO: 180776 - DNA, 3918 bp, Arabidopsis thaliana landsberg
atggactcgtcgaagaaactcctgtttccagaccagattctgtcttctagaagaaacatattaaccagattcggtttaggaatcgctgcttctttccttctccttactcttctctcccttactagttcctccctcaatgtacccttcgtctctcctctgcttcaaggtctcaaaagctccaatctcaacccttcttcttctgtcaagcaagtgaacaagaagcctgaagtagtgaatctcaccgacaaggtcccagatgtgaaagttccaagctttgtggtggcagacgctggttcgaagaacacaactttgtctgaagaaagtaaagttccaagctttgattctggacaaagatctggagaaacagttaagaactcgagtctggctgaagagggtaatggttcagttgcagatgaccaaaatacccttgaagcaaatgcgacaacaagtgtgggaaacagctcgagcttggtgtctgatttgggaggaagatttgttgtacctgcaaacacaagcaaagagaatggctctgtgactgaagatcgaagcagaggttcgtatgaggattgtgatatctacgatggaagttgggttagagctgatgatgagacaatgccgtattacccacctggttcttgtccgtatatagacagagatttcaactgtcacgctaatggaagacctgatgatgcttatgttaaatggagatggcaaccaaatgggtgtgacattcccaggtatatgattcttaatgttcttgatgaaataacaagattttgatgaggttttagtgaactaagttttgagattagattgctagttattgttctgataagtagagcaatgtggtctctgtgttggaatgtgaaggttgaatggaactgattttctggagaagctaagagggaagaagctggttttcgtgggagattcgataaaccggaacatgtgggagtctcttatttgcatccttagacatagtctcaaggacaagaaacgagtgtatgagatctctgggagaagagagttcaagaagaaagggttttatgctttcagattcgaggtgagatatcgatttttcttgcggaatatgtagtaccatactaagagctgcaaacaatgtctgttcgcttgatgtgatttttggatcttgttcttgttcttgcaggactataattgcacggtggatttcgttggctcgcccttttttgtaagggaatcaagtttcaaaggtgtgaatgggactacattggagactttaaggttggatatgatggataagacgacatccatgtatcgagatgctgatatactgattttcaacactggccattggtggactcatgacaaaacaaagctagggtatgagtctgaaacagagaacataaacaagaagaccttgttgtgttttagttaacagtgattttgatgttcctttgcagagaaaactattaccaagaaggtaacgttgtgtacccgaggctcaaggttctcgaagcttataaacgagctctcattacttgggcgaaatgggtcgataagaacatcgaccgcagtcaaacccacatagtatttagaggatattccgttacacacttcaggtaattctcaatctaaaagtactttttgtttactgcaaaacgtgtttcttgaccgtagtgaaactggtgctctttgacagaggagggccatggaactcaggtggacaatgccacaaagaaacagaaccgattttcaacacgagttacttagcaaagtatccatcgaagatgaaagctctcgagtatattctccgtgatacaatgaaaactccggtgatatatatgaacataagtcgactaacagatttcagaaaagatggtcatccttcgatatacagaatggtttacaggacggaaaaagagaaaagagaggccgtgagtcaccaagattgtagccattggtgcttgccgggtgtaccggacacatggaaccagctcttgtacgtatcactgttaaaggccgggctagcgtctaagtggtagtcgaaagtcctctgtctttgtattcttgtttactgttgtaaagtaaaaaatgtaccaaatgaaatctcctttatagaaaaagagattgtatcatgtcacatcacatttatcactggttggttactacggtatatagaaatatttttgtatgaggcaataatttaatctgcctatactatagtatataaaaggaaatttattaagatagaatagatcggatctaaaatcttgagtttccttctttagttgactttcttgctctcccatggcgatgatgaaagagctccaacatggctcccacgaatgcgtgtgaaccacgcctgaaactataggtatcacaactacttagtctaatacatatatagtacttagtctagggtttacacaactactaatggcaattatatccttaatatatacaactccttatacaagtctcatgaacacacattgttttatgttgggtgctatacttctgaatatatagttggtttagaggaggatcgtcactgtgtaatatgcaagacatgtgcgggtaaacagttttatcagtgcgtggaatgtgactggaagattcatttcgaatgtatcgagatacctctcggtccgtggtaaagaagaatttctaggagatgatgattctttggagtattgtggggtttgcgagacaatggtacatgtaggacatcatgtttatttctgccaagaatgtgattatattggccacattgaatgcgttttacgctaggtacgtaatatgtctatgttgtcatataactctgtttattcttgatggatatgtttgtaaagaaataaaatgcagcaagcctgcctgttcgaagtcatcatttgtttgaagttatggtatctaattcatatatgatagcttgcaccatttgtgatgagaggttttgtgtggaaacgttttgacatgtaggagtgtggagagatatattatcctcattgtattgaacggttcagagagaaactcgttcatcccattcattctcacaaacttgaaatggagctgctgagggattttaagtgcattgcctgcaaactggatattaaatcatatggccatttttgcttcatttgtgaagtcggcttccatattaagtgcatcaaagatgttgatggactaggtaagaacagctttcacaagcatactctctataacttttggattgaggacttgaaggtactgactcatcaagcatgtagtgtgtgtggtagaccttgaggtgtgtcgctctatggttgtattgattgtaacttcagagcccatgtaaaatgccttgggtttccaggcattgtgaagtcccaactgcatcaacatactgtcctagaagaggaaaattatgatgcgggaaagtgtgcgctctgtaggtcaggatgcttgggtaagagatattcttgtaaacagtgcaaggaagtgtttcatgaggaatgcataatgtccaaggtaaaattcaatataccaatatatgttttagaacccaaactatatagtattttctatttcatgtttttatctagtttatgaaatttgtattttcatacaggatgcccgcgaagctgcaacagaagaagaacagcttattggagacatctattttatgtacattgagcgctttctcctaatgttcaaagaagaagaagaaaaggaagaaaaaaagaaaagcggcaaattcaagatgaggagattacagaattatgtaagtggtatatactttggttttgcctccccctctatgaactaagtacgccaacctcttttttctgtggttatgccttaaataatccctctcttattttctttatcgtgttcacagcgatggaaatgaagcacacggaaagtgatgaagaagccgacaattctgttactagctag

SEQ ID NO: 180777 - DNA, 96 bp, Arabidopsis thaliana landsberg
atgaaaataacgttcaaatatattcagttctcgacaatagtccgcggagaaagttaccaagctcggatttgccacggggtacgttttgtagtgatg

SEQ ID NO: 180778 - DNA, 1068 bp, Arabidopsis thaliana landsberg
atgaacatcctaattggtcaactgcagctacttactatcttgaagctgcaaaatcttggctctgatagtggaaatcctcataaccaggtaactaattcttcttccattactttcttttgtcatttgccgtttctgagtggttttcttacatttgtgtagctagctgtattggccacatatgttagtgatgagttattggctctgtatcactgcgtaagaagcttagctgtgaaagagccttttcctggtgcttcgaacaatcttcttttgttgtttgagaaggtgattgatccactgatacttctctgttatctgcaatgagattgtctttgccttacattgctcaaaatgcttgtttcaactactacagaacaggtcatctccattgcagtctctgtctactgatgcagagtttaactacttaaacccatcagagaaaaaagtttctgtgaaggaacgagatttgtcaaaagcaaaaggagaactagttgccggaattgatttatggcccctggttgttcgaacaactagcttctttttccttaaatccaggtcagtttggactatgagtaacatttgactgaagtacaacattatctcctcttttagctcaagctcttgatgagcctttctccaaaactgttcttctcttcacttctctctggtttgtttcagttttgatgagtttggtcgggcatttgcatcaactataagagaactggatgcagcgtttgcagcatatgatagaaatctagaagccatgttggagtcttatcaatttatggacacagcgagacaggggccttataaaatcctccaaattgttgcggtttttatcgacatcttccacaatttagcagaggttaatggatccgacatcgtgaaagaggaagttaagctaacaaatttagcattaactatggtgtttatcgtcatggggcgagttgttgagagatgtttgaagacaactcccttggattcttgccctctcttacctgctctacttgtatttctagactacttaccgtttctgcttgacaaggtagaagaagaagaagaagaatgcag

SEQ ID NO: 180779 - DNA, 640 bp, Arabidopsis thaliana landsberg
catcatctttgagcggttggcgaagaatggaaagacatacttgggacctaccactaggcatttaactgaatatggagaagccggactccgtacactcgcacttgcttacagaaagcttgatgaggatgaatatgcagcttggaactctgagtttcttaaggccaaaacttcaataggatctgatagagatgagctgcttgagacgggagcagatatgattgagaaagaacttatccttataggagctactgctgtggaggacaaactccagaaaggggtatgcattgttgcacagacacactaacgccatatttgtcttgcttatgtaaactgaattccttttctttttcatctgacttaggtgccccaatgcatagataaacttgctcaagctgggctcaagttatgggttttaactggggacaaaatggaaactgcaatcaacattgggttagaatctctgatttaccttgaacataaactagaaagtatatctgtaatctgcttttatccagtgatttttatgcacaaattcccttttatgaactgcagattcgcgtgtagtttactacgacaaggcatgagacagatctgcataacatcaatgaattcagaaggaggatcccaagattcaaaaagg

SEQ ID NO: 180780 - DNA, 476 bp, Arabidopsis thaliana landsberg
atggcgacggagcaacaagattcgcaactttgtttggcgacgattctggaggtatttcttttacaacgaaacattcaagttagcgttggtgtggattcttcgagcttgaaaaaaggcaatgaaacttgtacgttcctcaatattcctctgttctttctttttctatttgtcctttttggtccatttttgagattagggtttgtaattgataatcgaattagggaatataagatggattacataaaaaatttaggatgatccatcgcatttttttaatccatataccgcgtgagcttcttgcttcaccaatgattttctgaaattttgttgatacgatctttatatttgtttccctagatcatcatgaaacatatatcatatttttaagtgcttattttaatcatcacaattggtgtagttggaggaagggatttgccagtagatccttcagacttgagaaggtatgaagcagcaag

SEQ ID NO: 180781 - DNA, 68 bp, Arabidopsis thaliana landsberg
aatattcaggaattatcagatagcggaatttgtttgctgtgaaatatgtcgagtattttggcatcttg

SEQ ID NO: 180782 - DNA, 343 bp, Arabidopsis thaliana landsberg
atgaatccttatattgctggatttgttgagtcgatggcaaacacaaatacagagaagattactaaggagatactggaaggcctgtctgaagatactggtgacagtgatagctatgatgtggaaagtgggggcgaagattctgaggatcggccctggaggccaagtcattcaatttttggaaaatcgaccatcaaacaaagtcatcttgagaacatgagaggaaggtactttcgggatatgtctattgtaagagctggcgaagacaacaacatccctgcccctgaagaaaatgaagttgtgatttatcgaagcttcttcaaggctggacttcggttccctttga

SEQ ID NO: 180783 - DNA, 38 bp, Arabidopsis thaliana landsberg
atgcggaagatagaagaagaagaagaagaagatgaaag

SEQ ID NO: 180784 - DNA, 23 bp, Arabidopsis thaliana landsberg
atgcgaatgcgcgactcagtcaa

SEQ ID NO: 180785 - DNA, 1232 bp, Arabidopsis thaliana landsberg
atacatacaagaagagtcattttggcatgaaggatgaggtattgggttcagagaactcatctccatcacttaaaccaaatgagctaattgtggcagacattgaaaaagagtacagacaaattgttgagagtccacttattgaaattggggtaatgttaaaaacagttgttctgcttttatatatgaaacggaatatatcactaacttgtcgtgtaaatttaggtgctttatggcaatgatttagacactgcaacgtttggaagtggatttcccttatctgcaccatctgaatctagcaaatattcatcaggttggaatctgaacagtacggctaagcttcctggttctcttctatcattagaagactgcgaatcagtttgtgttcctcgtctaagtgtaggaatgtgcttgtcttcccagttctgggtaagttttaaggttgatgtcaagctatggtcgtcaatttctgaaagcataagtataactggtcaacgcagaaatagcatttgttttgcatactaccactagaataaattttgcagcattgtaagtttattaatctaatttgcttgtgtagtctcatatttgtctcttggaatatctgttactgaacagaaatctgagaaggagagactctactctctctgctatttgcatgtgggcgctcctagagtgtggtattccgtagcaggatgtcatcgatcaaagtttaaggctgccatgaaaagcttcatccttgagatgtcaggagaacagccaaagaagagtcataatcctgtaagtatttgaacacattaagcatcaatacaagttactcttttcaaaattccgaaagaaaatagacagaagagtgaccaacaacgattccacttgcgatttagttcttgttcagcatacacgaccatgacatgacatagagagatcacacagtatttggatttatctgttcaaagcaaatcctatcattactttgttaaatttttgtgagctattatatactagtattggttcatttacaagggaagcaattcatttggcaggtgatgatgatgtctccatatcaattgagcgtggagggtataccagtgacccgctgtgtccagcaccctggccagtatgttattatatttccagggtcgtattactctgcctttgactgtggcttcaactgtttggagaaagcaaactttgctccccttgattggttgccccatggggatattgctgttcag

SEQ ID NO: 180786 - DNA, 88 bp, Arabidopsis thaliana landsberg
atgtggtcgggggtggtgggcttggcccaggggagtggtgtacgggcgcggggcaccagcagcagcaaaggattcaaggatttgtctg

SEQ ID NO: 180787 - DNA, 474 bp, Arabidopsis thaliana landsberg
atgttaaaaacaataccagtgagtcaggtgagaatcggcatgtatatccatgagctgcaagggccatggatgagtcttcctttctggcgtacccggtttgtgctcaaagatgtggccgatatgcagaagctgaaagcctgccagtacagtaggtggtcatagaccttgcgcgtgggctggatgtctcgctggacctggctggttcaccgccgacagacaggcaaatgatcatgctgcagctgaatggccaggtggtcgaggctgtgcctgccaatccatcagccattaacaagacaccgctggataccgagcacagacagaccgccaggtattattcaggcttctcgcaaggaaatggcgtccatgttcagggatttgcgcatgggcaaagtgattgtcgcgccctccgtgctgccgctggtggagaacatgtctgcctgggtagagcgcaatacgcatgcgttgatcagcctg

SEQ ID NO: 180788 - DNA, 853 bp, Arabidopsis thaliana landsberg
atgatctacgggacacaaaatgttccggacggtgttaaggttgatgtgaagtttgtgttctgtaatttgactaaagaagaccagaaagtgcttgttgctttggagattatgcattatgatgacatcattatactcaactgcaatgagaatatgaacaaaggtaattggtttatcttggtttagaattccaattattcttcttttggtttggcatatatagacttgattattatttggcataatcatatagaaacttggtaaagaagtttttggtatataattgtaacattttcaactaattcgatttttgcaaatatctacaggcaagacttacacatacttctcaagcttaccagacatattcaatgagaccgatgcacaaaaaccaccgtaccattacgtaatgaaagccgacgacgacacatacataagactagaaagtctcgttgcatctttgagaccactccctcgagaagatctttactacggctatgtaattccatgtccaagcatggacccatttgttcattacatgtcaggaatgggttacttagtgtcatgggatattgcggtttggctcaaagactcggaaattcccaagaaacatctagaaggtcctgaagacaaagtgtttggcgattggattcgagaaggaagacgaggaaaaaaccggtttaacgctaagtggtccatgtataatttccctgagccaccgactagatgcacacatgagctttggccagacactattgccgttcatttgttaaagaaccaagagaagtggatacgtacattgaactatttcaatgttactagcaataacaagccttctaaactataccacataccgtag

SEQ ID NO: 180789 - DNA, 278 bp, Arabidopsis thaliana landsberg
atgtcgaaagagacgaagggtaataacaatacaagcagagtgatgagtggctatggcggtagcttggaagctaacaccttggctatgattgattccaccggagctaaagacagtcgcgacgctaacgaagatcgtacgtttcctcaattttcaatcttcgtctttgtttttgttaattgtattgatcctttgaatgaaaaaccttaggtttgcagtatctggaagctgttcgtgctgcttcacttgtacccgaaaatggaattcctccaaccaagtaa

SEQ ID NO: 180790 - DNA, 105 bp, Arabidopsis thaliana landsberg
caaatatccaaaacaaacctgagtgaagtaaatgagacaaacgagccacagaaacgcgacgccaaacgccgatcgcagctgcttcaaccaatgtatcatccttaa

SEQ ID NO: 180791 - DNA, 54 bp, Arabidopsis thaliana landsberg
atgggtttaaatgttcttatgaacggatattacaccgcgtatatgaatatagtg

SEQ ID NO: 180792 - DNA, 472 bp, Arabidopsis thaliana landsberg
gctgccactggaattaaagttggattcatcaaggaggcccctaaacttccaatttgtggtttcaatgtctatcacaaaaaccgtctcatccgggtacgttttgatgttgcagttatttatatgctcttaatctcaagaagcaactttcgtaagtttgttagtatattttcacttaagcttccatttgtatatggcttgattaagttgagatctctcttgcaccattacagccattctggaaggtcgttctggaagggtcaacgagaggcaatggtgttatgggtatagtgattcattctccttataatttctatatgtcaattgaatatgttttgtttgggctaaaaccctggaggggagactcattaccaaaatctgttccccaggagttcttgaggcaaacttcatagaaccagcccacgacaagcaagattttgagaggtcttctctatttctgcggctggaggcgagg

SEQ ID NO: 180793 - DNA, 61 bp, Arabidopsis thaliana landsberg
atggccaaggcaacttcttcacttgtcgtccccatcatctttcttgtgatatttgctgtag

SEQ ID NO: 180794 - DNA, 633 bp, Arabidopsis thaliana landsberg
atggctatattgttgaatatggaaaagatagggatgttgatcttggtaagtattgggagtggtctcttcttggtagtagttagatttggacttgtggaacacatctaaaaacttgcttcttgattttagggtttcatgtggatgactcagaagttagtttaaatgtctgcttgggtaaacaattctctggcggggagctgtattttcgaggggtgagatgtgataagcatgtgaattccgatagcactgaaaaggtacttgtgaaacccaaccatcaagcactcattgtctcaaccacaaaggtcttttatttataacttgttcttttgtaggaagtttatgattactctcatgtacctggtcacgccattcttcatcgtggacgtcatcgccatggtgctagagctacaacttctggacaccgagccaacttgattttgtggtgtagaaggtaaagatattttcatcagccaatgaaagtttcatgaaccatttcatgggatttcatattcgccctctctttctcattgtagctcaacttttcgagagatgaagaattatcagagagatttctcaggttggtgtggaggatgcaaacttgataaacagagaaggcagcgtgatgtggattaa

SEQ ID NO: 180795 - DNA, 473 bp, Arabidopsis thaliana landsberg
  unsure (1)..(473): unsure at all n locations
gtgactcatacacacgtcgctccacttttgactccatcttagcaggttgtataccagttttctttcatccgggatcagcttatgcgcaatacatttggcatttaccgaaagatattgcgaaatactctgtttttattccggagaaaaatgtgaaagaaggtaaagtgagtatagagaatgttttgagtagaataccgaggacaaaagttttcgctatgagagaacaagtgataagactgataccgaggttaatgtattttcacccgtcgagtaagagtgaagacacgggaagnnnnnnnnnnnnnnnnnnnnnnnnnnnngaaggagttttggaaagagtggaggggttaaggaagaggatagaggaaggcaaggaggagatttttgattttccggagcagtattcttggaaatataatgtgtttgggaatgttgagaggcatgagtgggatccttacttcgatcggccttaa

SEQ ID NO: 180796 - DNA, 1861 bp, Arabidopsis thaliana landsberg
atgcatcctcctgcacgaccttctgctaaagcggtatatacaatccaaacaattgtatgctctgttccatcggatttcatttttcagtgattgtaaatttgcaactctctccataaaacgtatagattggggacggatttgcagagcactactataacaacttgcaaaactccccggagattctccctggctactataaagatgtcagtaagattacacggcctggacttgatggaacgatgcgttcctctaccctaccggttagacaattttcttgactgagtcgttcattaagtaacattggtctgttactgattcctaatcttggagcaggatataatcgaggatcttgatatgctatctcctggtggttttgattcggttgaggtaaccagtgtcatgtcccaagactctcatgacaagggtattcgcgttgctgttgatggctacttcactttcaacgagaggcctgcaaggaacttcacacaaaacttcacttttgctccccaagaaaaaggcctctttgtttcgactgacatgttcaagtttgttggcatacccgaggctaatgcaaccattcctcctgctaataatggtgagtaatagtggagcctccatattttgctcgcaaggaaatgtgtcgttcactatcccatttgtttatttatacattgctctataactttctgtgtagccgcaatttgcgttaaaaatcttcctctaaatgcaaccattgccttggttgagaatgcattcaagcagtttggagaaatcagaagaggtggagttgaagttagaaacaaaagggtaaatgttaactaatctagatactaacaagcttcgttaacaaaaacactaaattgtgttcatgaaactggtagagcttttcttatggcttcgtggagtttaaggaagaaaatgccgcccagagagcaataaaggtaaacgctagcatttggtcggactgactacttgggggttcaatttcagaactgtctgattggttttgataatgttggcatgaatcttatgcaggcttctcctgtaacgattgatttgcgtagcgtttacgtggagaagaagcgacctgactatatacgtgagtttgtgggagtattagtaaataatagtctctgttaatttgtcaaagaattgtgctcaaggctccggttttgtttggttgagaatcaggatactgggatactccatccactggaccaggaatcatatacagaagcgagggaatgagcgtaacaaaagattatggtaataagggtggaaatgagaataatcaagagcctcgaggtaaaagaaatacttatgatttgtttttgtgagctgcagatagatgaatcactgtatttaacatttttgttgttgtttgtatcagcgttatatgctgcagttcacgttaaaaaccttcctccaaatgtaaccactgactgggtagagaacgcatttaagcagtttggaccaatcaaaagaggaggagttcaagtttctaaccgtggtgtggtaagtgtaattaagtaatctaataaaacaagcaatttttcttattaatggaaacactgatttgtgtacttgtatgaaactggtagggcaattggtttggtaatgtcaagtttgtgcatgcagctggtgccgagagagcagtaaatgtacgtgctttggacctggaccttatttatactcattgctctgtctcttaggtgggattcactttgatctcttgaagccccaagtgttattgataatgctgcctggcatgaatcttattcaggcgtctcctctgttgattggtcggcgaaaacttaaagtggagaagaagcttgatcagcgagtgcagaatcagacctga

SEQ ID NO: 180797 - DNA, 180 bp, Arabidopsis thaliana landsberg
ccgcaccatccggaccgagagaaccggctacgcgccgggcaccggccgagacacctggccgtggcaaacggcctggcgactcccgccgccagcgtgaccgccccggaccgtcggtccggggcgttccgcacgacggcggcggagcagccggccgacgatccgctcccgggcgacgaacgg

SEQ ID NO: 180798 - DNA, 670 bp, Arabidopsis thaliana landsberg
atggtgatggtggagaacaaattagttgggattctaacgtaagtgtcatatttggccctttgtcttctttttcgtttccatggttctgaaattttttctctacaatatcatgttttaatcttttctagtggaactttgatcttaaattgtgatttttgttagctcaaaggacatcttgatgcgggtgatatcccaaaaccttcctcaagagacaaccactgtggagaaggtaatgttttcgctatatatgtatatatgctgatgctcgttagttttgaatctggttgaaattattaatttcaactcttagatttatatgagtactcattttttgtctttgttgtttcttttcaattattctataggttatgacaccgaatccagaatctgcaacagttgatatggcaattgttgaggccttgcatatcatgcataatggcaaatttctgcatcttcctgtattagataaaggtaacaaaatgtctacaaaactgactttgagctataaagtatgaagcttgttatttcaacacttgtctaatgttgatgatttcatacagatggagatgttgtcgctgtcattgatgtgatccacataactcatgctgctgttactacggtacactttttttcttttattattctcttctagttgaagtcgaaaacatga

SEQ ID NO: 180799 - DNA, 939 bp, Arabidopsis thaliana landsberg
ttaaggaaccttcggccgctctgcaatgagccgaagccggacggaggggtgtcagcgtggacagaggcggagtcggctcgagaagaggcttcgtcggcccgggggcacgtggcttccctggccgaggagatgcagcagcggcagctggagcttggccaggtcaccagcgagcgggaccaatcccggagccaagctgccaaggcccttagggggtcagctggatgaggctacagagaggctagccgaggcgtccgctcgggccgggacccttatggagagcctggccgtggccgtcgggactgctcagtccgcccaagctgtggccgcacagcagcgtgcccaggtcgaaggtctgttttgtccgtgtcgtggctttgttttttgtcttcattcttctctttgtgtctgaagaacattgtccagctgtctgcagggttcgagacggctcttcacgagtccgtcaagaactacaaggcgcttgcccaggcggctgagcagaaggaggccgaccgcgtggccatgtccgaggccatctcggctttctactggacctttggccttgatgacgccccctcgggtagctcccgccagagtcgcctgcgggccttgggtggccatgtgcgcagcagactccgtggggcgctgcatcacggcgttaggcgggccttcgccgtgctcgcttcccactacgacgtggatctggagcgggtcagcgaggggtactgtctacccgacgaagatgaggctgccttagccgaggttcataggctcgacgcggctatcgtgggcccaagcgtggtgctggcgtcctccttcgaggtggagatccttcctatcgcgtcgccgtctagggtcgggccagatctcgccgagggtggagacgacactaagggtggagacgatgccgagggtgccgctcctcccccgggcgatgtctga

SEQ ID NO: 180800 - DNA, 324 bp, Arabidopsis thaliana landsberg
atgagggtaaggtcaaactttatggagccactaaaacgagtcaagtgtggtttggagccgcctaatggctaataatgcttctgatagggctcgatatcataagcgtcgtgagccgcatcaaaaaccacgcgttttagacgcaaacgtggtctgtttcgagtttttaaatagttttattctccttgacttacagaccaagcgttttttttttagtacagaaaatatgcgaagtatgcgtatgaaagaaatataagaaatgattattctaacacacttgacataaggagccagcagaagccagctaagacaatcttggcctctagg

SEQ ID NO: 180801 - DNA, 225 bp, Arabidopsis thaliana landsberg
atgttaggtttaaaaactgaagacctggcaaaggaaacagatgtagatcacgatacccatggattgatgtttggtttgaatagcgaagtcgacatagaaggaacagatgtggatcatagagtggagagtttctcttgccagctaggcggaaatagtttggacgctgaaacttcatctaatagtcaacgccagctaaactcacccttttcagattcttcatccagt

SEQ ID NO: 180802 - DNA, 1695 bp, Arabidopsis thaliana landsberg
atgataagcaataagagagaagcgctaggtctttgggggtttctccggatatcgtcgttcaaaataaaggtatagattccaattcaggtgattacatggttaggtttgtttacttccaaattcttagacatacgaaattcattcaagtccagctagccctaacggttagtagtcgaaagccggttaatctcactatacctggccactcagttgcccccacggctaggaggtgctaacatggtgatgacatacatatcaaagcattaagttcaagttcaattatagtccataagaccctataatcggcggttagcaaaggtaatcaaatcttactcattcgtgagttagttcaagcaattatacaagattctgccaagtataaagtacttaagatcatgtactaggtgacgttgcggacatacatgcattaagattaaactcaaatagaaagaattgtgtaaacgatcaaacaaaatcatagaaaccgccaacctaaatcagatctaacgtccccatgaattcccctttgaaaccccctcaaacccaactagagatctactcgctcatggcaaaggagctaatcaatagttcggttgagtaagccataataataacataataagacttaaaaaggctttagagatcacttcttttaatgtagaacacaagaggcaaagctccaccttaaagaatcttatacaaaacgaaagagaaagagaaagagatggtgatcttcgagctcaaggggtgtggcggcgagttggcaactctaggtgacggctagggttcgcttgtgatgaaggcacacctagggttagggcttaaaaactgtatttatacttgggggccaagaattaggtttaggggtaagaacgtcaatctgccggataagtcagtgatcgggccgagtagcgggcttaagggaaggagcctaatgacgcgtgtcagaaagagagaaggacttgggcgtaacctataagtcggtgataagcttctcggagctgcccgggttcaagtctccttagcttggccggatgctttttggatttattgtttccaaatggccgatttttgacatgtcttaactcttcaggtcatatcttctgaacgacttcatggattgcttcggttcgacatcgacgttaatcttgactcttctagctttccatgcataccgaaatatcttgttgccgtgatggggaagacctccgaaggatgctaaacttctgaactactggaattgatccccttttgatacttttagcttcaaaactcttaaaaaccttcttggcacctagaatacgtgtttctccttttcttggctctagaatggcaccaaattatctctgaaacataagaaaacaatagctaaaacaggctataaagccgtgttatcaatattttcttgcgttgtagctgaatgtgcgtcaaatggttatgaaggatgatgtaagcgagctgtttcatactaagccatatgaagtacaagatccaacacttgatcacttgatcgaagacatacatggggataagtttgttgaaggttattgggatgtgaagaggaatgagaagaagaagaaaaccgtaaaagataaagcagcgagtgtaacgccccctgaatcgctctatggccggacaagccaagggcaacctagaaatgctacattgatagctcacatagacaacccaacatag

SEQ ID NO: 180803 - DNA, 163 bp, Arabidopsis thaliana landsberg
gaaaatgcaagtatctggggcacgtgatttatcatcaaaaggacaagtgagttcacataccagtaatctgaaagttaagggagagcctgaagaccccctccaaccagaaattaaagctcgatgtgtttgtggaaactcgctagaaacagactcaatgatacag

SEQ ID NO: 180804 - DNA, 130 bp, Arabidopsis thaliana landsberg
tctaaacaaagaagaagaagaagaagaagaagaagaagaagaagaagaagaagaagaagaagaagaagaagaagaagaagaaatgaacaaaatctcccatcctctaattaatgaacaaaatctcaaataa

SEQ ID NO: 180805 - DNA, 1732 bp, Arabidopsis thaliana landsberg
atggagaatccacctacggaggagctgctgaagaagatacttgagctagaggagagtcaggagcatctcaagcaggagatgtctaggcttaaggtatctacggagcttagacagcgatcgcattcggtgtctcctcatcgtccggcgaggagaaacatcggagagggagctccgtcttggaggaaaagcggtgccgcctcgtttcgtaacgcgtcgccgttgcggaaggagagccgtatccagaattcgatgagattgaggtctgaagttggtggcgggggaccatctgctgggaaattcactgataaacagtatttgaatattttgcagtcgatggcacaagctgttcatgccttcgatcttaatatgcggattatcttttggttagtagttccatcttgtgaatgcagtttatgctagattctaattagggagtaagatgtgatgtcattgatttgcattctagttttgcattttttgaatttgttattccttcagattccaattcgattacttaattgtttcaggaatgctatggcggaaaaggtttatgggtactctgcagcagaagcacttggggagaaccctattaatgttattgcagatgatcgggacgctgcctttgcaatgaatattgctcgacgttgtgtccgtggagagagctggactggtgagtttcctgttaagagcaaatcaggggatagattttcagctgtcactacctgttcccctttctatgatgatgatggtgctcttatggggatcatttgtatcaccagtaacacggcaccgtatctgaacccaagaatctctttggctaaattgaaggcgcaagaagaaggtgaaacgagctctatccctgcaaggaatagttttgcctctaaacttggcttggattccagaggagctgttatatcgaaacttggccttgactctgatcagcctatacaagttgctatagcatcaaagatctcagatttggttagttcaattgtaggttgcatatcctcaccttttatcttactgttacacattgtgaccagtgttaaaattgcaggcatccaaggtcagcaacaaggtcaggtcgaaaatgcgagcaggtgataatagtgccacactctcggagggtggcagtggggatagtcatcagtctgatcataatgtcttcgatgctgctttctctgaccagagggaagatgcagcatcaagtggtgccagcacaccaagaggggattttatccagtctccttttggtgtattcacatgtaacgatgataagtcttcttcaaaagcctccggagaatccaatgatgaaaatgatagaaactctgttgtccctaagaaacttacctcaaagactgaagagtggatggtaaagaaaggactgtcatggccatggaaaggaaatgagcgggaaggtttggaaagaagaaatgctcattctgtgtggccttgggtgcataatgaacaacaaaaagaagaggctcatcatagtaattcctataacagtgttaagtctgaaagcctggcaagtgaaagtaataaacctgccaataatgagaatatgggttctgttaatgtgaatagcgcaagcagtgctagcagctgtggaagtaccagcagcagtgttatgaacaaggttgacatggatagcgactgcttagactatgaaatcttatgggaggatttgacaattggagaacaaatcgggcaaggtgatgtactcctttga

SEQ ID NO: 180806 - DNA, 2558 bp, Arabidopsis thaliana landsberg
atcagccggcctgaagattgggatcgtgcgccagacccaaagaagtactttgttcagttctttggaacagaggaaatgtaagctattctcttttattctttgattctggtaccttctcatccagaaaggtatatgaactttagtcagtatatcatgttgctaggaattaagtagtagacctcggttatcaggtgtttcaacatgttaccaagtgtttttctttttggctgacaatatctttggagttgattttgtcttttacaaactgatcattgacaaagttatcttcctttactgcagagcttttgttgcgccacctgatatccaagccttcactagtgaggcaaagagcaaactattagcaagatgtcaaggtaaaactgtcaagtactttgcacaagctgtagagcaaatctgcactgcatttgaagggttgcagaatcacaagtcaaatgctttgggcgatgaggattctctggatgctactgaacctggtttgacaaaggctgagatagtggatggaacagatcatattgtcattgagtctgagagaactgataactttaattttagggtggatccttgcttccccaaattagatgagaataatggtgaggagagaaaggctgagataaggaagctagattcatcttcatttctggaatcaaaggtcaaaaccacatcccctgttagcgagtcactggagcatagttcatttgaccctaaaataaagaaagaagattttgataaaggaactgacggtagtgcttgcaatgaacattttggtaatggccaaaagaagctggctaacggtaagagaattaagaaggaagcaggtggctctgatagaaaaggtgaagatacagttcatcgagacaaaagcaataactcacatgtgcctggtggtcgaactgccagtggtaactctgattccaaaaaatcgaaaggtctgttgacagagaaaaccagctccaaagtgtctgctgataagcatgaaaattcacctggcatcaaggttggggtttccggaaagaaaaggaggcttgaaagtgaacaaggtaagcttgcaccaagagtagatgaaagctcacgtgctgctaaaaagccgcgatgtgaaagtgcagacaataaagtaaagtgtgaaattgatgatggatctgattctactgggactgtatcagatattaagcgtgaaattgttttaggattaggtgctcgcggtggaaattttcaatatgataaagaagcagttgcatatacaaagcgccagagacagacaatggagcatgctacctctccttctttttctgggtctcgtgataaatctgggaaaggtcatctggaacagaaagaccgttcctctcctgttcgtaatgttaaggctccagctgcacagtcgctgaaaaaacggagggctgtttgtatctacgacgaagatgatgatgaagatccaaaaaccccattacatggaaaaccagccattgttccccaagcagcatctgttttgactgatggtcctaaaagggctaatgtgtgtcacagtacttctacaaaagctaagatatctgctggatctacagagagtactgaagtaagaaagttccctctgcgtaaacattgtgaggatgcatcacgtgtattaccaagcaatgcggagaattctactaatagcttacctgtggtaaaacccattaatgaattgccgccaaaggatgtcaaacagatcttgcaatctccgaagatgtcccctcagctggttttaactaacaagcacgttgcaggacagcataaagttgtaaaatcatcggtgaaagtttctggtgttgtgatggcaaagaagcctcaaagtgattcttgtaaggaggcggttgcgggatctgacaaaataagctcttctcagtctcagccagcaaatcagagacacaaatcagcttcagttggagagaggctaacagtggtttcaaaagctgcatcacgtttgaatgactctggttcaagagacatgtctgaggacttgtctgctgctatgtatgtcacattctatctgtcatctttttgtgtgtatgtcgcctactgcttataattattcttttcttgcaggcttgacctcaatagagaaaaggggagtgctacatttaccagtgcaaagaccccagattcggctgcatctatgaaggatctaattgctgctgcgcaggcaaaaagaaaacttgcacatacacaaaattcaatttttgggaatttgaaccctagtttcttgagcatcagtgatacacaggggaggagccatagcccatttatggttcagaatgcttcagcttctgctgccatctcaatgccgttagttgttcaaggtcatcatcaacaaggttcttctccgtcaaatcatgggcatcagtccttatcaagaaatcagattgagactgatgataatgaagagagaagacttagttcagggcataagtcagttggaggttcacttagttgtagcactgaggctgctatttctcgggatgcttttgaaggcatgttagagaccttatcaagaaccagggaaa

SEQ ID NO: 180807 - DNA, 358 bp, Arabidopsis thaliana landsberg
atgcaaccaaaaacagagttcgtgaagttcttgagaaaaggtgcgtatggatctagcgatctcgtcaagtacatcaaacgcgacgataacgctttgcctctttacgccgccgtgaaaaccgccgaatgtgaagactacaactctctcgaaagagaaattcagattctatccaaacttgaaggatgtcgaaggatcgtgcaatgctatgggaattatactttagaagaggacttcgatgtcggtggattccgagtctacaagatggttatggagtacgcagctgcagggagtttattcagtttcatggacagttacaaagatagaaagttaccggaaacgatgattaaagactttactc

SEQ ID NO: 180808 - DNA, 87 bp, Arabidopsis thaliana landsberg
atggcggttcacattaccgaatattgcgtggaagagattttacaaatgcattattatgacctggtgcggccggactatcaacaggag

SEQ ID NO: 180809 - DNA, 925 bp, Arabidopsis thaliana landsberg
ccgccgttgcaattccgtcgtgaccggtgctgttccaaaccgtcgtcgttccaaaccgccggcgttccaaattgtaagtgtagattggaacggtttttgatttttgagtgttttcgttgtgttgatttgaacggtttccttgattgttgagtggttttgcaaggtaatcatgggtcgtgtaaggttagtcactcctagttcgagtgaaagtgaagacgagagggtcacgatcatccgtgaagcggatatgaaccgtgaagaagtggcagaggaaaacaaatttgaagacgaaaactgtgaacaagagcctccggaaaaccttaacgaaccggaagaagaaaatatttctgaggtatatacaaatttatgaaaattttgtgtgaatattgatatagtgtttagggacaactagaaaacaatgagtacaagttaatagtataggtctgtgtaattgatgcatggatatacgtgattaatcatacattgggttgcattagaaaattgaattctgagaaaagttgataatgttgttctgagataactagtacaagtagtacagcaaaatattaattttatggttgtgtatgaattttcaggaagttgatgatgaggaaccaatgcagtctcaggccatggaagaaaaccctgaagaagagcaaaaagaaggagaagaagaagaagaatctgaggtaaatggttatttctgtaaattgtgtttgaatattgaaagtagtgtataggaaaatcaaaaccctaatttcttttcaatccaacccaaaacttaccagagaatttggatctggcgggattagattcggcgtcggcggaggttcgtcgtgttgttcgtcggcagaggttcgtcgtcagagaagagagaaggagagaagaaaagtttttgagagaaaaaaggagaagaaggaaataa

SEQ ID NO: 180810 - DNA, 99 bp, Arabidopsis thaliana landsberg
atggccggtgatagtattgctgccggcagtgagtaacatattgattgatctatgttatcagaacctctctctctctctcttttgtgtgtagatgactag

SEQ ID NO: 180811 - DNA, 187 bp, Arabidopsis thaliana landsberg
atgtcagctatggtacggccattagtaaaccggccggttggatttccacgagatggtttgaaatcgatgccattaggaggactgttggctctagacaacgtttgtaagtagttgttatttcctgcgtctactagcgaatcgccgaagacgaatgaagcggctaaggcgctttggtctcctgcgctag

SEQ ID NO: 180812 - DNA, 1615 bp, Arabidopsis thaliana landsberg
  unsure (1)..(1615): unsure at all n locations
atggtagatcctgaaaatcaaattgagctcgttggactcagccaacgcctcaaggaactaaaagaaaagttggaccttagccgcaaggaaactcgcattgttggggttttagggatgcccggaatcggcaagaccacactggtgaagagattgtatgatgagtggaaacacnnnnnnnnnnnnnnnnnnnnnnnnntgaatatccgtcagaagtcgaaggaatacgggacgcattccctagagagaatgattctgaaagagttgcttagcgacacttacaatgatataactgaagagatgacgtacgcttctgtaaaggatgagctgctgaagaagaaagttcttcttgttctcgatgacgtgagtagcaagaaacaaatacaaggtcttctcgggaatcttaactggattaggaaaggaagcaagattgttattactacgcgtgacaagatatccataacccagttcgagtatacttatgttgtcccaagattgaatatcacagacggcttaaagcaattcagcttttatgcctttgaagatcacaactgtccatacccggggaatctcatggatctttccacaaagttcgtagattatgccagaggcaatcccttagctctcaagatattgggtcgggagcttctttcgatagacaaggatcagtggccaaagagactcgatactctggcacaacttcccatcccgtatatacaggatctattgagagcaagttatgatgatctgagcaatcaacagaaagaagcttttcttgtcgtagcctggttctttggatcaggggatgaatattacattaggagtttagtggatacagaagatcctgattctgccgatgatgctgctagcgaagtaagagatctcgcaggcaacttactaattagcatctcaagtggtcgattggagatgcatgatttaatggctacgttcgccaaaaaactttgttcatccttatctaatgaaaataactatggataccaaatgatttggaatcatgaaagctttaatgctgcggctaaaaataaaaggatgagatatgtcaatcaaccaaggaaaaaagtcacagaatcggtaagtattcattactattaggaattttagagttaaatagatagagcttgttgtgtgattttctaacatgtgttgctattttatcaggaaatggacaatgtcatgggtatattgctggatgtgtctgaaatggataataacatgaccttagattctaaattcttcagcgagatgtgcaatctacggtacctcaaagtctacaattcacaatgctctcgagattgtgatgttggttgcaaactgaccttcccagatggacttaaatgctcaatggaaaatgtccgatatctctattggctacaattcccattgaagaagctttcaaaagcatttaaccctaagaatcttatcgagctcaacctcccttacagcaaaattacacgactttggaaggaaagtaaggtgtgcctaaatgcagcctctgtctagtaagtttatttcttttattgttgactaatgagtgactttgtttttggtcacaggaaatatccaaactaaaatgggtcgatctcagccactcgagtga

SEQ ID NO: 180813 - DNA, 132 bp, Arabidopsis thaliana landsberg
atgctcatgactgtaagcacggctgatataccagttttacactcttcagaggttgcacattttacccacaagccgtgtcacccattggacaaggggtctagaaatcccattcatctctaccgaggagacaag

SEQ ID NO: 180814 - DNA, 76 bp, Arabidopsis thaliana landsberg
atgggctgcggcgcggtgaatgtttgctcgggctggggcgccgatggctgccggagttcagggcgggcgccgctgg

SEQ ID NO: 180815 - DNA, 321 bp, Arabidopsis thaliana landsberg
atctgacgggaactgtttaccaaaaccgctactcgcaatcgtcctcttcttattatttttcaccaaagattcagatttaagccgcatattcaaaagaccagtacagagatttgcaggaggagaagacataatcatgctagcttttccttacctaatcaaaccagtgatgaacgatggtgagcggtagctttggtggacgtgacctccgaaactctctttcactcttggtgatctcttcctatctctcaccaacatacgatcaccactacagaatcagtgacaacaatgcctcacggacttaaaaacgatgatggccggtga

SEQ ID NO: 180816 - DNA, 128 bp, Arabidopsis thaliana landsberg
caaccagtttttacaacaaatcccaagctcaacgaagccatcgacgatccaaggaattggatctctattcttatatcgggtcagaatccatttgccggacccaaccaaccaccctcactatgggatag

SEQ ID NO: 180817 - DNA, 716 bp, Arabidopsis thaliana landsberg
gttggttctttgacgagattgattatccaatccatattccagaccctgaaacaaaaccaactagttatgtaacaacaccaaccaatctacaagagaagatgtttcatgttacaaaagagaatgttttgaaacttgacgctaaagccaacgacgaggctgatcaaaagatctcttctattcaagcggtgttagcatatatatggcgttcaatggttaaacacagtggcatgagccgagaggaagagactcattgcaggttacctataaacatgaggcaacggctaaatccgccactagaagaagagtgttttgggaatgtaagccaaaccgggatagctacggtcacggttggagagctgctggaccatggactaggctgggctgcaatgcaaatcaacaacatggagctgtcacaaactgatgaaaaagccaaagcatttgcagagaattgggtgaaaaatatcaagattccggtttctgttggtagcaaagatttagttgtcacaaactctcaccggttcgatgtgtactgtaatgatttcggttggggtaaaccgatagctgcaagagctggaccaccgtatctcaatggaagactcgttgttttcaaaggaattggagaagcaagtcttgattttcaggcttgtttactgcctcaggtagtggaaaaattagtcaaagatgctgaatttaacgaatatgtaagcattgtatga

SEQ ID NO: 180818 - DNA, 757 bp, Arabidopsis thaliana landsberg
atggctacaaagacatcaaatttcgtttctcttcgcgtatctttggttattcttctcttatttatctcatctcaagttgctatcgccgacgccaaacatctccaacgtaagtgtttacacactaacacacataaggcctcttggctttttctaacactcgcatgaacataagcttggttactgtgtagtgatttaacaatatacataagtttggctctgtattcaatgttcattgatgaaaattttattattgtatgaaacataaaatgaaagtttatatcttattatgtctcaacgtcaatttgtttttttaaaatatcaaattgttctatatgattgtttatagtctgcgctccatcatgaattaaatattgtttagaatatccaacattaattttgaatctaaaatattaatattcataatttttaatttttatctatgtcaaacaaagcatatttaaaaactaaattttataattgtaaatcaatagaattgagaaggaagttgcggctagtacgacgatcaagaagtcaaagaggtcgtcaatacagtcgaagacgtcgtcaatacaatccaccgacgctgcccgtgccgccaccaccaccaccgcccctgccccagatgccgagtgcagccacacctcccccaatgccgcagttgacaccactgcagccgaaaatgcatgtatcaacactgcagccacaaatgctctatccacctccttcgttgccgtatgcttcatcgccgacggtatga

SEQ ID NO: 180819 - DNA, 122 bp, Arabidopsis thaliana landsberg
cctccatcatcggtaaactcatttcggcgatgatgatgggtttaaaggactcggctttggactattttggcctttcccggagagccttggactcatctcacctcttaaatcaatcactctag

SEQ ID NO: 180820 - DNA, 145 bp, Arabidopsis thaliana landsberg
ggggaggcgccacgcaaacagccgggggcacggcagagcaaaccaaaagccccaacccgagcaacgaaaacaccggagcgaaaaacgcgccacggggccccccaaccagccaaaccccgacaaaaaggcagccgagagtgggtaa

SEQ ID NO: 180821 - DNA, 366 bp, Arabidopsis thaliana landsberg
atgggaaactgcatatgcgtaacggaaaaaacgacgacgtcgtggtcaggagacgataatggatcatataacaagagaaggagaagaagaagaagaagatccaccgtggttcacgacgacaacgacgacggagagaagctgctcggagaaacaagcaacgttacgtcaacaagttcgtcatcgtcttctgagagaagagagattaagataaggataacgaaaaaggaacttgaagatctcatgagaaacattggtttgaagagtttaacggcggaagagattctttctaagttaattttcgaaggtggagaccaaatcggattctctgcggtcgatgtgacgaatcaccaccaaccatggaaaccg

SEQ ID NO: 180822 - DNA, 261 bp, Arabidopsis thaliana landsberg
gataactatgaaaaaagaggaggaaagaaaagaaacaatggaggagaaatcttcgaagaagaatgatggtggaaatcagaaagtgtcgtttttcaaactcttttcgttcgccgacaaaaccgacgtagttttgatgaccgtcgggactattgccgccgcgggtaacggccttactcagccgttcatgactctaatctttggccagcttattaacgcctttggcaccaccgatccagatcatatggtagagaagtgtgaaag

SEQ ID NO: 180823 - DNA, 110 bp, Arabidopsis thaliana landsberg
atggcccatttccattattccggaggctaccagcgaggaccgtgcgcgcatgcgttggcctggaccaggcagccatcgtatgtgatctacgattcggctcactatgtcag

SEQ ID NO: 180824 - DNA, 1214 bp, Arabidopsis thaliana landsberg
gaatatacttgctagtgctagtgccgacaaaaaagttaaggtatgggatgtggctactggaacgtgtaagattactatggagcatcacacaaaggaggtaagaacaagattcgtagaactagaaatttcttagattataggattctcatggatttttgtttgtatgatccacaggttcaagcggttgcttggaaccattatgctccagaagtgcttctcagtgggtcctttgatcaaactgttgtattggtaaatgttttgttccatggtttatttcatgtattccagtcttttgttttacacaaggatcattaatataggtttgtatattgttgtagaaagacggaagacaaccttcacactcgggtttcaaatggtctgtcatgtccgatgttgaaagcttagcctgggatcctcatagtgaacactcctttgtggtacgttacactttaagtctttaattaatatatacaatgtggtttttttggcggtttaaagaattttttttcttcggtttcttatcccttgtggccttgcttatatataggtaagtctcgaagatggaactgtcaagggctttgatgtacgtcaagcctccatttcagcctctgaatcaaatccaagcttcactattaatggacatgacgaagcagctacttccgtctcatacaacatttcggcacctaatgtaagcgtctctttctcattatttgtttcgtttcgattcaaaaatatgaataattaactcataaattctaaactttgaaaacatatttcttattcccctttgtctactctctcttgtgtcattgttctttgttatgtatgttttactagttctcaccattttggagctgtaattgaacagcttttggcaacgggatctaaggatagaacggtaaagctttgggatctttcaaacaatgagccttcatgcattgctacacacaatccaaatgctgtaagaaccaataatcgaccatttaaaaaaaataaaattggtttcgttatcttaacttgattattaatttgttcatatatatgattccaacacttttgatatcacacagggaggcttattcttcattgctttctctccggacaatcctttcttactcgctatgggtggcgtaatgggggagttaaaactttgggatacactttcggacactaatgtctccagcagatacggaagcagagaagtccgaccgtga

SEQ ID NO: 180825 - DNA, 174 bp, Arabidopsis thaliana landsberg
atgctagcgaatatcgcaatcaaaagaggggacccccccaaagacaccgagtgccaccgccccaaaggccatacccgacaacgtcacattccccggaaaacactcaggaacgccccccagggcgaggaaccgaaacacccaggaccgccccacggagagccgaagacggcccaa

SEQ ID NO: 180826 - DNA, 780 bp, Arabidopsis thaliana landsberg
gtatgagtttccaactggaagagaagcagttcttgacatgcttcatgccctaatcttaaaattctcagaacctaatcttggcaagcagtctgttcttgaccagcagtcgcaaaaattgtttattcaacttactgtctgtttgtccaatgaaactgataaaaaagtgctgcccttggttggtgctgtgatagaagttctgataggccgcatgagtaaagatcaagttgattccagtctcttgtactgtttgtgttggtataagcagcagaacttaagtgctgcggcggcacaggtagatgctgtgggtgtatattcattaaactcatttcgtgacaatagttagatgtcggacagtaggaagtaggaacttctatttctaaatatgaagaaataggagtaacaagtggtgttacctgaagggttttattatgaatgtatggcttataccatcttcataaagcctgattgcgttcatagtgcttgtaggcaccttctgtagtatgtttattgcttcttactgatattcatttgttggatgctgtgcaggtattgggattttttatcagcgccatgaagaaaacatttcggaagcatatctacaatacagtggaggatgctagaactattttggagtctgcaattagtgcttccagcttacagttgcaagatactgttgaggaagccagtcttccgttctggaaggaagcatactactcattggttatgatagaaaagatgctagagcaatttcctgatttaagattcggaaaagatttagag

SEQ ID NO: 180827 - DNA, 1682 bp, Arabidopsis thaliana landsberg
ggagctcgggtaaatattattgtaggttctcatgtttggtttgaagaccctgaagtggcttggattgatggtgaggttgaaaaaatcaatggacaagaagttgtcatccaagccactactggaaaaaaggtccagtcatcaatcaccgaaattctaacatttcaacttcacacctatagtgtatatatcccaacactgattttatatatctgacttgtataggtcactgcaaagttgtcaaagatttaccctaaggatgtggaagctcctgctggtggtgttgatgacatgacaaagctctcttacttgcatgaacctggtgttcttcagaacttgaagatcagatatgaacttaatgagatctatgtttgtatctcttacatcaattctgttgtaggaccttctactgttttctgtcttggctataatctattattgttcatgacagacatacacaggaaacatccttattgcgattaatccgtttcaacgattgcctcacatctatgatgcccatatgatgcaacaatacaaaggagcaccattgggagaactaagtcctcatgtttttgctgttgctgatgttgcatacaggtgagtttaatacttatatatatgtgatctacatgtatataatgatgatatgtgttgtgagcataagacggcttttatcttctttatacactcagggccatgattaatgagggaaaaagcaattcaattcttgtaagtggtgagagcggagctggaaaaactgaaaccactaagatgcttatgagatatcttgcatacttgggaggtcgtgctgttacagaaggacggactgttgaacaacaagttcttgaagtaatgacttttctatctcttttctgtgatcttcttatgtatggattctacacgagcttaatctactaacttgtttgtaatatctgtctccagtcaaatcccgtccttgaagcctttgggaacgcaaaaactgtgaggaataacaattcaaggtgaagcaaaatctggttataatagtgggcatctatatctatggttcggaattcagctaactgtgtactatgctttggctcagtcgcttcggtaaatttgttgaaatccaatttgataagcaaggaagaatatctggagctgctatacggacctatcttctagagaggtctcgtgtctgtcagatttctgatccagagcgcaattaccactgtttttatcttctatgtgctgcaccacaggaggtatactcaccaggaagtctttgttaattctgattgtcattgaaaactcttggcataacattatagaactagcaggagctcgaaaagtacaagttgggtcatcccaagacgtttcattatctgaaccagtcgaaatgcttcgaacttgttggtataagtgatgctcatgattacattgcgacaagaagagcaatggatattgtcgggatgagcgaaaaggaacaggtaagcttgtgtatgaaagtgatcttctgatgcattttggtatttattttgatccgtcaccctctatataaatcaacaggaagcaattttcagagtggttgctgcaattctccaccttggcaacgtcgaatttaccaagggaaaagaagtggattcatcagttcccaaagatgacaagtcgaaatttcatcttaacacagtggcagaacttctcat

SEQ ID NO: 180828 - DNA, 393 bp, Arabidopsis thaliana landsberg
aggcagacgtactggtgattgcgctcggggctgcgtatgcctatcgccaccggaaaacgaatctgatcgtgggtaattgccataaagtgccggccgatcgttttatcaaggagcttcttcattttgatcagatcgcgatcgcatttgaacagttaatccaaaaactgattccctataaccgcaagctgcgcatattgctcacagtaagccccgtgcgtcacacgcgcgacacgctggcgcttaaccaggtgagcaagtcgacgttgcgtttggtaacccaccgtcttttggaaaaatacaagcatgtggagtacttcctcgtcgtcgagatcatgatcgatgagctgcgcgattaccgcttttataaggaagatattgatccaccccagcacc

SEQ ID NO: 180829 - DNA, 1082 bp, Arabidopsis thaliana landsberg
gttcgtgttgctactattatttgccctgaccttgatctggaccctgagcaagatttgtcgtggtctgaagacgatgaagatgagagagtcgataatattttaatgttggctgagcagggtcttattttcaagaatgatatgtttggtggtggatgtttcccatcacagatgcaattggcttccaaaaaacaaaaaaggtgtgttaagtcaaatggtggtcgaacaggaaaggcaaaccatcaaagaacactggtagggtcaggaccaaacatcaaagacccgtcccagaggaagatagtagttcagggaccgtttctatggattctatttcccgtatgttggacaaaaagcttaaagcgcaggggaaattaatcattgttgcgcttacagattggttcattaaaaacagttattgaaggtggactttccaaagatccggctagtgggggtgtttctaatcctgaagaggtgggtcggaatgagcccaatgatgattttgggtttgatgctctccgccggccatcttctaatgttggttctaatggccgtcaaagaaattctaatgttcagtctagtgtggatgagattttgtcttactacacagacaaggttccaagtggtgtttggctcaacgtgtcggaggtaattttgggaagtcacttacagcatatgaaatttttttgctggatatgtcctcagtttatttttgttcttgggttttaagcgcgatattgtagagctagtggaagatgatgttcgatctgctggcggcttgagcccgaacgtgcaggtgggttttttttcccgataaattactacttaggtgttattctaaatagttcataactggcacaatatatgtataatatcaagcgggtgttatttgtggttattagcgcgacaatgttgagccagtgggagtccaaacccatcagttagtttttttgtagcagttaactcatcttttagttgttattttaaatagttgaaaattattatcttctattgttgtgcaggctgctaacaatgttagagaggggcctgctacttttgatataatggaatccgaagataaccctggc

SEQ ID NO: 180830 - DNA, 546 bp, Arabidopsis thaliana landsberg
tccttagaaaggttggttattgggaaatcaatcctcgaaagctactcaagggctttggagagcttagcatcaaacatcatagcacgaatcgatgatttactctacgtggacgacttaacaaagcaatcagatgataacaatcttttgtcaagtccagcggtcagtagcattatagctcacaagaaagtagtaccactcccttatctaatatctgcatcaggaactccatatagaacaagcttctcaacaacaccaggcttctctccttcaatgattagccccaagaaaggagagaggagaacaccttactccagcaaggacactaacaaaatcattgagaaaggtcttccttctcgaggatatggagtgagaagagtcttgaacaattatcttggcatggaatcaaaactgaaaatatgcgttaatccgtcagataatgcagatacagcagtgattaaccaaatcagcaaagacgtggaagaagagaagaaaagaaactcaacatcagtccatcaaaagggtcctccaaagtacattgtctcttaa

SEQ ID NO: 180831 - DNA, 1788 bp, Arabidopsis thaliana landsberg
caaggggaaacgacggcttctggttgccctttttctaaatctgctcgtcctgacgaaaatgggagtaaaggatgtcctgaacaagaaggaaacttgaataaggactctactgattctgcaacggtacctgccaagtgcccttttggctatgactctcaaacattcaagcttgggccttttagctgtatgttatgtcaagcacttctatatgagagcagtagatgtgtgccttgcacacatgtgttctgcaagtaagccatagttgctcggccgcttatttcttttttggctcatgattgggtctacttttcttatactttgtggtttcttgaatgcagagtatgcttaacacggtttaaggactgccctctatgcggtgctgacattgaaagtattgaagttgatgaaaaccttcagaagatggttgatcaatttattgaaggccatgctagaattaagagatctgtcgtcaatggaacagaaaaagaagaggtcgaaaatgataagaaaaaagtgatttacgctgacgtttccatggaaagaggttctttcttggtgcaacaagctatgagggtgagttctgtctctaaattttgttgacctaaccgatgggattattctcttttgcaccacttacatttgttatgatgtcccgctgtgagatcttgttctaattcaacttgtatgcgcaggcatttagtgcccaaaattatgaaagtgctaaatcaaggttggcaatgtgtaccgaggacattcgggatcaactagggagggagggcaatacaccagagttgtgttcacagcttggtgcagtccttggcatgcttggtgactgtaggtatgatattgtcttcttttttatcccaagttgtttatttctaagatgtatccattctcgagtttctgtgaacaattaagattatgaaaacaacggtgctttcgaatgtggtcaccaatgtggtcttttatgatcccgcttgagccactttgttgttcaaattgattttttttaatttggagtttctcaagtatgtggcccttccttggcagtttcctcaattgatagtttctcaagtcgactggttgttgctttcatcttgcttagagtgcgcatggcactttgggaaatactaaaataatttctttctcgtttgaactagattctggttttctagatggaccctgtctacatcaattgactggaaatatattcatatattcagatttttctgtatcctcttatcatttgcatacatctttctctgtggttcaatcacctcgttcagaataaatggaaaggagaagcaacagtacatgcttggttcgaaaaacctactttatacataatcattttctcctcctgaactgtgttattttggccaaaatgtttgatcttctgtttggtgtgttgaattttttctttttccgggacttaagtttgatggttaaattattttttgttgttgttgcagccgagcgatgggagactcaagctctgcagtcaagcattttgaagagagtgttgaattccttatgaaactgccgttgaatgatttggaggttatagcacattggttcttgttaaattttgatgttgaaaactttttacctttttgcttacaattttaacttaacttgcagattacacatacactttctgtctcactcaataaaataggagatctaaaatattatgacgaagatctacaagctgcaaggtcgtattatgatagagctttaaatgtcagacgtgatgcaatgaagcaccacccaaatgctccttcacaa

SEQ ID NO: 180832 - DNA, 496 bp, Arabidopsis thaliana landsberg
atgcctgacctggacattgcaacggaaagcaaaacatctattcaaatatctgtaagtactttccagctatcttaagtttattagattcctcattttagttagtttggaatttgaagtaagcatgtatttggggctttcatcttctacatccaagagtgatgcttctctaatctttgagactgtagaaatgatctgtaattgtaaagatattagcatttaattaggagagttcacgcattagatggcttctatctgtaattagttttcatctcgactctgggttgatctttctggctaatatttgcttccatgctttactcttgcatatcttacaatctgtactcaattttttatttttggaatggagcccccatggtatttacattagattgctctttacctttctctatttagaaaaaaagcggttcaaatggccggcctaaatactcgacacttgagaaagccatcaggaatttggagaagttggtcgctgaat

SEQ ID NO: 180833 - DNA, 348 bp, Arabidopsis thaliana landsberg
atgggaaattgtgtatcactagatgtatcttgtcatcatcaaacgctaaatcatgcttgtggctgcttatttggtgatgggaattacattcacatgatggaggcaaatcttgaggctctggagaaaactattcaagaacttgaagagagacgagatgatctgttaagacgagttgtcatagaagaagataaaggtttgcaacggcttgctcaagtccaaggatggttttcaagggtacaaggtgttgagtctcaagtcaatgatttgcttgacgctagatcaactcaaactaaaagattgtgtctgcttggatattgttctaataagtgcataacaagcggcgatatg

SEQ ID NO: 180834 - DNA, 457 bp, Arabidopsis thaliana landsberg
atggcggtgatcgaccagctcggcacgcgcctcgtgcgcgccaaaggcttcgtgcacctcgccggcgaatttcgccaagggttcgtcgagcgcgccggaatccgcacggagctgcgcctgctcgacccgtgggaaacggagccgaagagcgagatcgtgttcatcggtgacgacctcgacgagccggcgctgcgtcgcgcgctctgggcctgtcgcgcggcgggataaccggcgccgttagttccacgcggccgatcgcacctgcgtgagggcggcgtcgcccgcgacgagtcccgcatcgtcggcatcgtgaacggcgagcccgatgaggttgccgcccgccggcaccgtaccgaacgcggcgtcgatcgcgatccacctggcgcccgttcagctgacggcccaccgatggcgaatgatgcgcgcaccatcgacgcgcaggcccgtcacgatgcgg

SEQ ID NO: 180835 - DNA, 6 bp, Arabidopsis thaliana landsberg
atgacg

SEQ ID NO: 180836 - DNA, 27 bp, Arabidopsis thaliana landsberg
atgacaaataatcggcgactcggcaag

SEQ ID NO: 180837 - DNA, 93 bp, Arabidopsis thaliana landsberg
atgaagacattccatatttgcatgcaagaaaaaaagaaggaagtaaagagtgaacagatagtcagatacgtaaaacgaacaaaggagaagatg

SEQ ID NO: 180838 - DNA, 1283 bp, Arabidopsis thaliana landsberg
tgaatcctttgaacaagctaccctattctaagcttgactcgaaaaatgttggtattaaagaaggagtggtattcttgacatacaatagcctcattgcttcctctgagaagggccgttctcgtttacagcagcttgttcaatggtgtggaccagaatttgatggtctcttgatctttgatgaggtaacagttctatgaatgaagtatattaaattatttgcgttaaaatcatcatccccctttttttgtgaattgaacaatttgagtataccctgtcgttgtaagttgcttgatcactggttttatcaattttgggccaacctctaatctttagtacattgtgcaggtactaatttgttttccttttttatagtgccataaagcgaaaaatttggtacctgaagctgggagtcagccgacacgcatcggacaggcagttgttgacattcaggtctggctacttgaaactgaatgttcttatcagtgttgcttttaatattgctcttggctctgaagagtgagagattatatacttcgacttgtctttttgggttgtactttttctcggtttcagataatatagtgtatattctagtttaacatgcttaatttgtggttagtgccatctagttgactctaaataatgaattctggaaaagcaggataagatcccccaagcacgtgttatttattgctcggctactggggcatcagaaccacaaaacatgggttatatggtcaggcttggtctctggggagctggaacaagttttagtgattttaacaaattcctaggttggttttcttttctactcctgttgattaattgatttttttttttttttgtgtgtgtgtaacatttggattagtacgttctatcttatagttcgataaacatgaattcatttaagtgtcaggttttagcttctgtctagagcatatacaaaatatttcattaaatgaagtttgaccgcattcactgaattctaataattacttcgcttctcttactctaccttatgcattgcataacttggaatggaactttaacacaactttgtgcaggtgcccttgataaaggtgggacaggagcgttggaattggttgccatggatatgaaagcgaggttttacaagccgtgtcatactatttagccatttgcattgctcataattcattctaacaccccttctatgtaatagggggatgtatgtatgccgaaccctgagttacaaaggggctgagtttgagattgttgaagctcgtttagaagcaggaatggag

SEQ ID NO: 180839 - DNA, 402 bp, Arabidopsis thaliana landsberg
  unsure (1)..(402): unsure at all n locations
gtttgaggagtatctacctgcgaggtcccgcgagtctccctaagcgacccatacttcgtgacagacgtccgctgatacgacccgatggagagaggtaggtaactttagatgttgttgctgctttttcatattatatgttcaaattaataatagaaactaatannnnnnnnnnnnnnnnnnnnnnngtcttggatgattttggagactgcagggggtcacggccgcaaccccaatggcatcctcggccttctatgcagggaacacttccctggacttgtcgagtacgccggagtgacgagcccagcatacaccttcgaccactacgccgtcgcccccgatgcagtagatcgggacggcagacaattcaacaacaaggtggagcgggtgaagcaagagctgtgg

SEQ ID NO: 180840 - DNA, 1895 bp, Arabidopsis thaliana landsberg
atgtttgaagccgcccatgaaaagtcatacctccactataggaaatcggagctagaactctgcactcttcttcaggtaagcttctcctaaatccaaagtctgttgctttcgatttcatatcagggtaacattctttcccaatgaattgaaaagttcttgtgttggtatttattccccaaatttgattaatctacagaggaaatagaacttttagctgcaagtaaaatgttgcaaaaacgttcttgtgctctgttactttctagaaaatggagaaagttttagctgcaagtaaaatgttttgcttttgtctttctgttactttcctagaaaatgtgttggctttatttatggttaaggcccagagatgggaatatacaaagttatcttctaaagcaacatggaatataagactagtataacatctagttggttgacttgtaatctggagtcaccgagtgattccgtgaatggaacgatgtgactctagtggtcaacgaggcctatcatttttctgtgctttcttatgttgcggccactatggctgtactatctattacaatcatataagaaaagagtgtccatagatctaccatccgggaggattcatattttatttgttctgttattgcattgacttcacaaagagtcatacattcagatccttaaacgagctcttgcatatcgtatgggaaagattggtgttgacggctttgcttaacggctcttcatgctgattatatgtcccaagctgggcctctgcctctatcaccagagcaagtcctttgtcaataggacaaactctgagctcccctaatggaacttatgagttagggttcttcagtccaaacaactctcggaatcagtatgttgggatctggttcaagaacatcacccctcgggttgttgtctgggtggctaacagagataagccagttacaaacaacgcagcgaatctcactatcaacagcaatgggagccttatcttggttgagagagaacaaaatgttgtttggtcaataggagaaactttctcttctaacgagcttcgtgctgagctattagaaaacggaaatcttgtactcattgatggagtttcagaaagaaacttatgggaaagtttcgagcatcttggtgatactatgttacttgaatcatctgtgatgtatgatgttccgaataacaagaaacgtgttttatcttcttggaaaaatcccaccgatccttcacctggagaattcgtagctgagcttacgacacaagtacctccgcaaggctttataatgagaggatccaggccttactggagaggtggtccatgggcaagggtaaggttcaccggcataccagaaatggatggatcacatgtaagcaaattcgacatttcccaagatgttgcagccggcacaggatctttgacttattcattcgaacgaagaaattcgaacctgtcgtacactacgctcacatcagcgggatcgttaaagatcatttggaataatggctctggttgggttactgacttggaggcccctgtaagctcatgtgatgtttataatacatgtggaccttttggcttgtgtataagatctaatcccccaaagtgtgaatgcttgaaaggctttgtaccaaaatcagatgaggagtggaataaaaggaattggactggtggttgtatgagaagaacaaatttatcttgtgatgtgaactcttctgcaacagcacaagccaataatggagacatcttcgacatagttgcaaatgtgaagcctccagacttttatgaatatctaagtttgatcaatgaagaggattgccaacaacgttgtcttggaaactgttcttgcacggcattttcctatattgaacaaattggatgttcgctatggaatcgatag

SEQ ID NO: 180841 - DNA, 272 bp, Arabidopsis thaliana landsberg
atggctgtgatgaagataaaaggagcagcgaccgtagcaggaacatggctgaacgaagccgttagcttcgtcgtgttctgtatcttagacatcgttgattcatttctttgtctcctctacaaagcagctgattatctcttcgaagccgagtggaagccttgctattgcttgtcggacaaggaacccatcaccacaactcgagggaagatccttttgtctcacaataatggcgagtccaagatcctcactctttctccgcttcaagaactcgg

SEQ ID NO: 180842 - DNA, 443 bp, Arabidopsis thaliana landsberg
gcctcggaccgactacgctacacgggatacatcattaccctacccctagctagccgccttaggctacgaaggaacaagaccggtgtcccatctaaggttactccggtaagaggtaatgatggttccccgcgtgcgtccatgacgtcggttgctctcaactccctacggaagcaaggaaacgtcagcaggatccatgccgcaccgccagctatgcttctacagggctcaaggcacttctccgatagccacgttagcacgtgtacagggctcaaggcgcttctccgccagccacgttagcacatagctacacccctattggggacttgttctcaaatgctatgaattaagaacaaggcaacacataaaatgttaaataataatgcccttcgcccgctgacccattatttcccaaggatttaatgaacttcggacgaaggttataa

SEQ ID NO: 180843 - DNA, 289 bp, Arabidopsis thaliana landsberg
atcctgcaccgggagagggcgaataaggtttttgggaagcgtcttcacgcgactgctcgtgatcttctgacatcgtcgacccagctgatcctggcgcgcgccaacaatcagtaagtctaatcagtacgcatcatctgatttggcttttgtttcagttcttctgatttggtcatgatttatatttggaatttgtctaattattcaacaatccaaaaaccttattgtagacaatttcctagtttttctatggctgcttttgccgacgcgctgaagccagaaaagtttaatg

SEQ ID NO: 180844 - DNA, 994 bp, Arabidopsis thaliana landsberg
attctctttccacccaaacgatcgtgtcgtttccgagaaacggcgcctgggaatctcaggagtcaattttcccaggaagatcaagttgaaaatcacttgcttcgccgccgagagaccacgccaggagaaacagaaaaagaagagtcagagccagagcactagcgacgctgaggctggagttgaccctgttgggtttctcaccagactcggaattgctgacagaatctttgctcaatttctccgggaaaggtataaaaatgtatcaactttgattttgagcaacaaaaaaggatcaattttgattacagctgtgtataataagcctgttcgtttttctgtaggcataaagctttgaaagaccttaaagatgagattttcaaacgccatttcgatttcagagattttgcttcagggtatgtatcctcttggtcccaggttctttcaagagaagattttgatcctggattagtgactgatgtgtatccaaaatgcttcgtctaatgaatagccttcttttcattgtagatttgagttattggggatgcatcgacatatggaacaccgggttgactttatggactggggtccaggttctgtctcttgctctaatcttaaaatttcattagtcagttcattacttacatttggttcagaaacagaatgaatgatgttctgaaacttgatttagtaatttgcgtctgttgggaagtttgataatactaacgaatcctaaattcaggttctcgttatggtgctataatcggagatttcaacggatggtcacctacagaaaatgcagctagagagggcctatttggccatgatgattatgggtattggttcattattcttgaagataagttaagagagggcgaagaaccagatgaactatactttcagcagtataactatgtcgatgactatgataaaggtgatagtggtgtctcagccgaagaaatcttccagaaagctaatgatgagtattgggaacctg

SEQ ID NO: 180845 - DNA, 99 bp, Arabidopsis thaliana landsberg
tgaggtatcatgtccctttttgccatcacttcctcttggttttgcatcggatattgagcatgtggagcacggggcattaggttatgtctgtgctcatcg

SEQ ID NO: 180846 - DNA, 514 bp, Arabidopsis thaliana landsberg
aaactagcttggtcatgggtatatgatgtggataggcagctcaaggagcagaatgagaagatcgtgaaattcaaagaacgagtgccaacttgtcaaaataaaattgatcggaaactggtaagtaatatgtttctatttactcaaatttagactgctatgcacagggtgcatgacttgtatcaaatagtgaatgttgagctttgaggttagttctaccctaaaacattcttctagggccatagtgtcccttgtgcactcttcatttaggagaggttgagtttctaaaatgtttattttcttacacacttatatacttgattgtggcatcaatcataccttagcatatgcttgaatccttcatattgaagttgattataactgaccttttatgtagggtgaggtggaatctttaagggtaagcttaaccgagaagaaagctcaagttgcctgcttgatagatgagtcaactgcgatgaagagagagctagagtgtttgcggcaatcaatgaagaag

SEQ ID NO: 180847 - DNA, 412 bp, Arabidopsis thaliana landsberg
ccaatgagagagctccacttcatactccacttttatcaatgactcgattttacggccactctcacccatgtcgcgttgagcgcgtgtctacgatttttaaaggggttaatccacaaaaatcattccttttttgatccacgcacctcattctcaaaaatccatcgcgtgtcttatttcttttggttttcttctctaaaccaaaagtaaaccgaaccgagatcaatttgaattttcaaaaccaatgtaaaccaatcgctgtgaaaacaaaaagctcggccactgtaacaacaaaaatggagacgacacaacttggaagagaaatcaactcgaaatagccaagagaatgttcctcaaatccgatgcttcctttcgaggacgaggactcgaggagtattacaaggtacctctatag

SEQ ID NO: 180848 - DNA, 737 bp, Arabidopsis thaliana landsberg
atgagcgaatggcgcgaatgtgttgtctttacgaatcatacgagagtaaacattgttcataaccagatttggtatcgggagcgtatgttattaaaccgttacttattaagactgaagagaaactttgacctcttatatcttctcattttattatatgctgaaggcctgaagctgtacacgaacaataacgtgagttttttttcattttttctatatgtggtatataaatgaatgtaagattaaaaagaaaaagtgaatgtaagtttaaataaatgattgtaggcaatcctgtgtttataatgtgtccagtgctaatataaattacaagtttatacatgtctaaaaaaaactaaatatttgtatataaaaatcatttacttgcacttgtacatcattaatatatgggataattgtgtttatctacttatagaatttgaagaaataaagtcaagacacataacacattcgaattaaattcaacccaaacaaatcaagttgaaccaccatctaaatagcttatgtggatgcatttgttgttaattaaataattaccgtttgaaatcattaaattacaaaatatataagaaaaacatttccagtaaattcattaaattttttaaaaggttagaaaaaaaaataagatgaaaaaatgttttacctcacttatctagccagtaggtcaaaaacggaaagatgaagatgatctagttttggaaactggagtattaaggatctag

SEQ ID NO: 180849 - DNA, 515 bp, Arabidopsis thaliana landsberg
aaaatgctcaagagagcagttcatcctgtctagaagaacggtttctatccaaagctatccaaagagaagcgcttgcagtaaggaactctaaagactgtccagaaataatgaaatcattgattcaacaccgaaaagttctgcttatagttgatgatgtggataacgtcaagacgttagaggaagtcttcaagatcaccagttggttggtccctggaagtagagttattgtgactgcacgagatgagagttttcttctggccagtggagtgaaatatatttttgaagttaagggcctgagatttgaccaagctcttcaacttttctatcaattcgctttcaagcagaaatcacctccggttcggttcagacagctatcagttcgggcaatcaagcttgttggatttctccccttagcccttaaagtgaccggctcaatgttatatcgtaaaaaagaatcctactgggaaactatattgcagtgttttgaagaaaagcagaataaaggtacaatttga

SEQ ID NO: 180850 - DNA, 239 bp, Arabidopsis thaliana landsberg
atgactactgtcgtggctaacttgacaaagaatttggagcaagtttctaagatccttgcggtgagtttttttgctttatgtatgatgtttttggtgatttagctgcaaagttaaaactgaatcttaactcgtttgattgtcaggctgcgaataggcatttaatgcaaaagattcagagtgtcgatgataaagtaaaaaagcagattgatctcaacgaggaaatcaatagccaagtatga

SEQ ID NO: 180851 - DNA, 168 bp, Arabidopsis thaliana landsberg
cactcggcaaattctttaccgagtgccggacaaaaagtactcggcaaagacaccgctgccgatgtacagttcgccgagcgttctttgccgagtgttacactcggcaaagactttaccgagtgtaaaagagcctttgccgtgtgtcggagaacacgaacagatagctaa

SEQ ID NO: 180852 - DNA, 676 bp, Arabidopsis thaliana landsberg
atggtgtcctcctctgcacctcgtgtatcgaagtacgacgtcttcctcagcttccgtggagaagacacccgcaaaaccatcgtcagtcatttatatgcagcacttgatagcagaggcattgttactttcaaagatgaccaaaggcttgagataggcgatcacatttccgatgaactccacagagcactagggagttcgagtttcgctgttgttgttctctccgagaactacgctacttcgagatggtgcttattggaacttcaactgataatggagcttatgaaggagggaagacttgaagtctttcccatcttctatggagtagatccttccgtggtgaggcatcagctaggaagtttctctttagtaaagtaccaaggtcttgaaatggtggataaggttctcaggtggagagaagctcttaacctaatcgccaatctttcaggcgtggtttcaagccactggtaagcctcgttttcttgtttacacacatttatcactttgtttagcagcacactggaaagttgaattataattttcctgctcaatttcaatattattagtgttgatgacgctataatggttggagaaattgctagagatatttcaagacgtgtgacattgatgcataaaatagactctggaaatattgttgggatgaaagctcacatggaag

SEQ ID NO: 180853 - DNA, 268 bp, Arabidopsis thaliana landsberg
atgctcagccggtttcatccgcggtggtggtggctccggcgcttttggcttaccacccggtaatttccaaatctgcgaagcaccaaccaccgttctccctcgtagcttcaccctaaattcggccacgacaacacgtgaacgttgccggtttgtcacacgtggcgccagcagcggagaaatcacggtggagacgacggctatgaaacgacagatggatctccggagaaattatagttgtatggttatgggaaggattgatgaagagaag

SEQ ID NO: 180854 - DNA, 466 bp, Arabidopsis thaliana landsberg
gagcttgacgggcgcactccagtacctcaccttctcccggttggacatctcctacgccgttcagcaggtgtgccttcatatgcacacaccacgggagccccacgtcaccgctctcaagcgcattctacgctacctccggggctccctcgactacagcctcctccgaccatcctcgacgtcggaccttgtggtctacaccgacgtcgactgggctggctgccccgacacgcgccgctccaccttcggctatgcgtatttatgggcacaacctcgtctcttggctgccaagcgtcagtgcgtcgtctcccgctccagcgtcgaggccgagtaccgcgctgtggctaacggcgtgccgaggcatcttggatgcgcactcctccacgagctctacacccccttcagcgcgcacccttgtctactgcgacaacgtcagcgcgtctacatctctacaactcgtaaacattag

SEQ ID NO: 180855 - DNA, 276 bp, Arabidopsis thaliana landsberg
tcgagtaaccatagctcagaccactcgatgacaccactcgaccccctggtcgagtatcactttgtcacaccacctgaccacactcggccgttcactctaccacattactcgagcctctggtcgagtataatcactcaacaccaacaccaccactcgaccaagcactcgatcacatcttcagagtctactcaaatccgcactcaaccagacaagctgagcacaaggaagggaagagtagaagaagaagtgtttggaagcgtccagagcttcatctga

SEQ ID NO: 180856 - DNA, 310 bp, Arabidopsis thaliana landsberg
gcgactatcagcagccacgtgcgcagcagactccgcggcgcgttgcatcacggcgttaggcaggccttcgccgtcctcgcttcccactacgacgtgtgatctggagcgggtcagcaagtgctactgcctacctgatgacgaggacgccgccctggccgaggtccaaaggcttgatgtggctttcgagggcccaggcgccttttttgaggtggagatccttccgcctgggtcactgtccgaggccgggccagaatccgccgtagggaggaacgacgccgagggtgctgctcctccccctgccgacacctga

SEQ ID NO: 180857 - DNA, 127 bp, Arabidopsis thaliana landsberg
ctcaaggaacgctgaggaagatggtgtctcgagagatccgcaggagaatgtggctaaagttgtgaagaagccgaacaagagatcgaagaaggaacagtcttcaaacattgttgaggaggctgcttaa

SEQ ID NO: 180858 - DNA, 106 bp, Arabidopsis thaliana landsberg
ctctccttcgtcggccggagcaaacaaggagcatcctcctttatcggcgtctgatcggattgagcatcaaagaaggaaagtgaaactactcaccatgcttgaagag

SEQ ID NO: 180859 - DNA, 872 bp, Arabidopsis thaliana landsberg
atgacaaaatataataacaaagccccaccatcacctgctgtcctgcgcggcgtctccgtcgtctctgtcgccgcatctgcgtcatcattttcgctaccgcataatctctgtctccgccgtcactgccgcagcctagaatatgatttctcgtttctgaaacccttgtataaggtagaaagagagagaaatcatccaaagcaaggaccttccagcgactttcagggtttaaggtttagcttctcgactatggcgattctagggcttatcaagagggttacacgaataaccgtaaacaattcgagggtcagagtgtacccagtgaggtacttccaaagcaaggacctttcaagcacaaatctattcaatggtgaagatgctgctaagcttcctgttctgatcgtcggcgctggaccggtgggactcgttttatccatccttctcaccaaactaggtacaatatttctcataatttccctgattttcatctgaagttttgagttttgagcttacattatcaagttaagttcacgtctttgatcgaattgaattctcacatttatgttaggagtgaaatgtgctgttgttgacaaagccacaagcttctcgaaacatccacaagcacactttatcaacaaccgatcaatggaggttggattttttgtgtttcctgccgttaatattgtttttggtggttttagatttttgaactttaatgtctcagttctcgtatacttagatcttccgtgcattggatggattagctgaggagattgaaagatcacagcctcctgtagatttgtggagaaaatttctttactgtacatctctctccggctcaactctaggcacagttgatcacatgcagcctcaag

SEQ ID NO: 180860 - DNA, 136 bp, Arabidopsis thaliana landsberg
atgtggaaaaaggaacgagctaaccggcttgcaagtttttttgtggttatcgctgtccaaggaaacttggacagcgtgaccagtctgcctggtttcaaaggaaaaatggtctgcttgagatttgacctgaccggag

SEQ ID NO: 180861 - DNA, 192 bp, Arabidopsis thaliana landsberg
gtcatttcataaatctagacaagaggttagttttcatgtcttttgtcagatcttaccagagtccaattttattgctgaattatagacatgtcttttgtcagatttaaccaaatttttaattcatttcaggttaggagagagcttggagttccagacaacgtgaaactacttatctttaactttggtgggcaa

SEQ ID NO: 180862 - DNA, 178 bp, Arabidopsis thaliana landsberg
atgaggacggcttgtgttacacaacatcaggtatcaatttttgtcatggaaactagccatcatcatcaagtgttagaggattttgatatgcaaatggtcattgaggatcaacaacctatcgtgacagaagctttgcgtttaatctctaaagatttccactgggacgtggctgagttgt

SEQ ID NO: 180863 - DNA, 255 bp, Arabidopsis thaliana landsberg
gttgacgccaccagtacaagaacgattgagcactgctcaatccggtcaccaggcacaaaccaatccggcaggggggcatatgcctgcagcaactcaaaaaacaacaaaaaaggacatcatcaaaataggcactgcagatgttgtcatacaagaagataataaagggccgatgattttcggcgaatcggccaacacgatcgaaaaggatacggctaccatcaaaacagccgatccaaaatactccatgcctcgatg

SEQ ID NO: 180864 - DNA, 374 bp, Arabidopsis thaliana landsberg
atgtgccaaggtcggggatcatgttactacaagactcttgtttgccctggtgagtgtcccaagaggaagcccacgaagaacaagaacaccaaaggttgcttcattgactgcactaacaaatgtgaagctacctgcaaatgtaagtacattctattcaattggtctcctttgttctatattcagttagcttatcgcacaagtaacaagaatatagatttcagttgtggattgataatttgtggtacaatgaatttgtttacttataacccaagtaacttggcttaatttcgggttcctctttctttcagggagaaaaacgaactacaatggttacggatctctgtgctacgaccctcgatttgtgggaggagacg

SEQ ID NO: 180865 - DNA, 281 bp, Arabidopsis thaliana landsberg
atgcggagaaggaatggatccgggtcgaaccatggaagctgcgaggtaaatggccatggagattttgtctgtgaacttgcaaagagcttcggtgacacttcctccgccgatgctatgtccatagagtatgactttgtggtgaggagggagatcggacaagagagagaagagaggacggttatattggtcggagtcgaagcgactgttagagtctatgaggctgatgcagcgccggtgagatctacggaggttgatttgaaccggcggcgtcgagaagagtg

SEQ ID NO: 180866 - DNA, 104 bp, Arabidopsis thaliana landsberg
cctcattatggaaagttggcaaatcctatacccaaaatatgaccttttcactatattacatcatctactacattcgaaaaagctacatcaagtttgttcaatga

SEQ ID NO: 180867 - DNA, 404 bp, Arabidopsis thaliana landsberg
atggagaaggagaagaagagagaacctgctcgggtgccaatagcaccagctcgcttaagacctttcttcttaagaatgaagctggaaccaatgaaaacacttgacgctgcaggtaggatcaaccccttcccattgtccgtctccattcccctatatcaacgtcaacggcaagctaaccctaaatcttatctatcgaatcaggaagacaattgaagtcaaccgaggtctgtccttgaataaccctatctatatagatcagaatcaatctgcgattataaatccggcggaaatgaagaaatttgaaacaagggttgttggtgctgatgatataagagaggatgacgaaagagaatcgaacaaggggttcgatgcaacgcggacacacaacgacttctgcgattttg

SEQ ID NO: 180868 - DNA, 74 bp, Arabidopsis thaliana landsberg
gcttagaagatcttcaagattcgagcaagaaaaacgattttggagaccagaatggaatagttaaagccttttaa

SEQ ID NO: 180869 - DNA, 56 bp, Arabidopsis thaliana landsberg
atgtccacaaataccaaaaatactaatgtgaaaaactgcatggacgagaagtgcag

SEQ ID NO: 180870 - DNA, 174 bp, Arabidopsis thaliana landsberg
ccaccatcactccgatcacaaccacctccggccaccaccatctccggcaaccaccacctccggccaccaccacgtccggccaccaccgcctccgtccataaccacctctggccactacaaccggccaccatcaccccaagccacaaccatatccggccaccacaccatctctag

SEQ ID NO: 180871 - DNA, 246 bp, Arabidopsis thaliana landsberg
atggcttgtcgtttccctctgcattcttcgtcaccttctcaattcctttcaccggaaaatcgtcagagactacccagaaattacccttcaatctcatgccaaaacaattcagctacgaacgttgtccatgaagatggtgatgataacgacaaagccaagacaaaccaagtcaatcttctcgcaataccaatcacactcactataatctccgcttctctagccaaaccgtcgttcgcggctgcgaag

SEQ ID NO: 180872 - DNA, 132 bp, Arabidopsis thaliana landsberg
aacttctcgttatcttcctcggtgactttgaagatagaatcgatgaacttctggcgatcatcaacaccgagcttggtaacgtcgacgagatcttcgtgaggatgaatgatagtggtacgaagacgagcaaag

SEQ ID NO: 180873 - DNA, 290 bp, Arabidopsis thaliana landsberg
atggtgtgggtagtgttgacgatggatcttatgccatcacatgaatacaagaaacttctttctagaaagattggccccattgaagtcatcgagtgtgtcaatgctaacatgtaccgccttcaacttgcacctcacctcaagacatcaaatgtgtttaatgtcaattttctctccaactttcgtggcgataatgacattccagattcagagacaaatcttctccaatccagaaagaccttatgcagcgcatctagacacaactctccccaccgacactgtctcttatgctt

SEQ ID NO: 180874 - DNA, 1266 bp, Arabidopsis thaliana landsberg
atgatttcggggtctagagatgaaagtctccatgcggcgagggattactggcgtcgactgaatgaatccgaggtatgtgttggagttgttgaagaggaggactatttgcatgttccttttaatcaaccctgaccctttaactcatctttattcactcatagcttcttgtgcatgttctgttactttagtgagtttttttttgtttcccttcattagtgtttcgatatcgagggaatcgaagcaccaccaggggccattgcactgataccctacgactgtcaactgcctaatagtttccatcctcttcctctctgggtcaagctttatgctagtgcggggcttcatcgattcaatatcttggaggtaagaccttgttttctcctccatcttatcatctatcaacctgaaaactttcttctgcagtgctggttgtttcttgtacacatgatcacaattctattttatcttctttctcagggaacaaacttcaagctcgggtacgtaatgaaattcaacaagaggctgtcatgcattggtgtccccttactacatcacgttgcttgcacaagattcagttagcggttcgcatcaaatctttcaggttctagttaatgaacgaagtgtcggcaagttgaatataatcgttccgattgctagacctaaaggtaaacattctttcctttctttttttctttctttgtatacaagtatagaaataacactcttgctgatgaataataatgtttcataggtgtgaccaccaacgagcgcctcataccttgtgatagtttttcagtggatgataagttgcctcagtggccgtcacatgattctttcaatgatagaaaacgattttacttggtaagatagattaacaacactggatcagcttttctttgttctcttgtactctgtgcaattcaaagggtcagaatctcagatgtaagtcttgtttttcttttctgcatatcaaatgatgacataccatgagtgagtcagtgcaactgttggttataatcattaacttgtggtttttgttgttccaaaactgtgtggttttgctgctgtagagcgatctgtccaagctgaagattgtgaaagcggtgatagaaaccaaggaagatatggtgcccccaaatgagagactcaacgccaaaactgcagtggtctacataacttttaagggattggccaatgctcgtattgctgctggtgagcatgatgaccgtaaagctatcattagaagaatcttcaatgagcatacag

SEQ ID NO: 180875 - DNA, 396 bp, Arabidopsis thaliana landsberg
atggatacgacgtgtttggtgttaacttggatgggatctagggttccaatagaaaccatcgaagaagacggcgtaagttcaatctctttctgcgtttttgaatcaattttttaattattcaacttctgagttttctcctacaggaattcgattgggaagcagcagtcaaagaaatcgacttggcttgtctaaaaaccacaaacgctcatccaccaattacggaaaatctcactaaaccacctgcgaaaagacaatctactctcgacaaattcatcggtagaaccgaacctaaaccagaaaatcatcaagttgtttctgagtgtggtggtaatgataacgataatagtcctttagttgggattgatcctgaggcagctaaaacttggatttatcgag

SEQ ID NO: 180876 - DNA, 685 bp, Arabidopsis thaliana landsberg
atgtttggctctttttcgttcatcaatggaggacttgggaaagaagagtttggtgatggacatagtcctaagaatatggttgagattgcagtagtttctgagatcttaaccaatcttctcaaaggtaaatatttgttgatcttgtatatatatgtaatctgtttctttatggttctttttaatttgcctatttttttaaacagtgtcaagtgagacaaagacgaagatgagtgttggtgttatttcaccttataaagctcaagttagtgcaatccaagagagaatcggagataagtacacctccgtatcagataaccttttcactttgaatgtccggtcggtggatgggtttcaaggaggagaagaagacatcattatcatatccaccgttagaagcaactgtaacggaaacatagggttcctctctaaccgtcaaagagccaacgttgcactgactcgtgcaaggcactgtttatgggtgattgggaacgagagaactttgtcgctgagtggttcgatttggaaaaagcttgtaagtgagtctaggacacgtggatgtttctatgatgctactgatgagatgaatctaagaaatgccatgaatgaagctttgcttgaggatgtgtcttcgagtcttggatctctttcgattaggaatggccatggaagaagaaatgtgtggtag

SEQ ID NO: 180877 - DNA, 195 bp, Arabidopsis thaliana landsberg
gtggtcgaagattgcgaacgatcttccgggaagaacggacaacgagataaagaacttctggaggacaaagattcagagacacatgaaagtgtcatcggaaaatatgatgaatcatcaacatcattgttcgggaaactcacagagctcggggatgacgacgcaaggcagctccggcaaagccatagacacggctga

SEQ ID NO: 180878 - DNA, 2704 bp, Arabidopsis thaliana landsberg
atggctattttacttggtgctgttgctggtgtcatggtgatgcacccgtcactaggagctgatgctattggttctttgactattattggtggcattgattctaagatgagtgtcccgctgttgctagctgttctatatttcagcaacttgttatctcgaactaacgtcccttgtcagagtctattggtgagaccactctcattcattttatgtatcttcaaatccaagtgcttgtctcttctatctattttttttccttagtctagttcccattttatttcttttatgtgcagtcaaaacttctggggttgctcccatcactagctgcacaacaggtgatgattccacttgtagttcagactattactccaatgctacgcaaggatgccaaagggtcagtacaccttttctgatcatttcttgtgtaccatatttttttaatcgtttttataattatatattgatttggaagccaaaaaattagtatgtgatgttaaatgctttaatctacatttaccaatcttgttgaattgggtttctgagctagaccttgtttccatttctgttctgccataaaatggagttgacatgactaggctctgatgatggtttattttttagtctgttgtatgctacagctattagattactttgccagacctgggtagtcaatgaccgtgccttttcgagtttgcaagtaagctattcttaccactgaaattttgttcgacattgatattgtcaccttgctcatgcttatttttaaatatgcaggaggtgttacgcccgcaaggatttatagaatatatttcagagagacatatctgcattagtatggctgcttccatccatgatgtatgcaagagacaccctgatagaggagtagacctaatcttgtccgttcaggtatagtttaaagtaatgtttgcgctttttgctttgcctgtttttcaaaacttttggaatgccttcaaattttccactggattcatactttgataggcctgtatagaaagccaaaactgtccagttagagcccttggttttcagagtctttcgcatctgtgtgaagccgatgtcattggtactctcttaatacttacttgtgttagttaattcctttctatgttactcagtttttatctaataacttttacgtgtctatccagatttctatactgcatgggatgtcattaagaaacatgctcaacatatcaaactggatcctctccttgcttataggttagcagagctaacatccctaatcatatttataggcacagttgaggtgtctgaagtggtgcatggacattgttttttgaggtgcctgaaaacatatttgatgtataactagcatttttttggtgaatatgttgcagtgtatgccatcttctaaagtggggtgccatggatgccgaagcatatcctgaagatgcagaaaacgttttgaacattttgtgggaaattgggagctctatgcagaagcctcatgattcccaatggacaaaggcaagagtctctgccatagtggccctgggtcaatatgaggtaaggcttggtctcttgtacgtcttcttttaggcgtgttctaagccatctttggttctaaactattaatatcaacacttgtatctaattacgatccatatttttcaggtatcatttatggaaaacaagttttctgacttaacaagaattgtacatatttactcttctcggagacaaatgcggaaattctgaatgctttagaagacctttcaatcaaaatcatgattcacgagcacaggtatagagcttgtaatctactaaactttttctggtttagattcccatcagcagcatattaaaactacttctctttctgacctttcagcgtccggcgtagatatgtaagagagaagaaagttcctggtagtaagattgaaaagctgcttgatgtgatacctcaggtcatcttccctgcaggtatagtttgactttcagctaaaatactccttaaattgtcgccacaattagtgagaaatgcaagtgagtctgttggaataaataaataaaaaccttgagatgggaggtatgcctaaacattttttacttgtgcttctttttgcctaataacttacttaacttgtcagttcttgctgtgctttgcaacttgtgtttcttataagataatgtcaaagtatacggttgcatcatgaaatactcagttcgtttcgttttgttattatggatagaccttttcgcttaatatgaagatcatcacttatgtaaatttctttgtactccatataaactaaatgcagcaccatttgactcacagggaaagaaataaagactggagaactacctggtgcggcattactatgtctatcttataaccccagagatgtgaagtttgggtcatcaagagtaagtattttaactttctgctaggaggtatcctatacttttgcatactgactttcatattttttaatcgcagagctttcatgatgttcattttcaatacgaggaggcatttagagtagtagtcaaatctctccagctctcaagaaatatttcccttgctcttatttccttgcaatcactgaaagcttttatgcggcgttggatgagagcgaatatattgtccattgatgcaacgactaaagaattatcatcggataagacctctaaagctgcaaacaacatcatgaaggtttga

SEQ ID NO: 180879 - DNA, 106 bp, Arabidopsis thaliana landsberg
aattcgatttcgcagaaacaaaaacttaatcaaagacgatatctacgaagaaacgaagattaaatacacatcggaaccgagattaaccgatcagattaaaggatag

SEQ ID NO: 180880 - DNA, 129 bp, Arabidopsis thaliana landsberg
atggaaagtgagcttatctcttgatcgtctctcttccatgatcggtcactgtaagctcgaattcgatcggagtttcgagaaaagatcagttggatcgggtttgactttttgacatttggatacaattag

SEQ ID NO: 180881 - DNA, 113 bp, Arabidopsis thaliana landsberg
gtgccgtgtcacatgacttatatacgttcaccgccaccgttgtgagagtttactcaattttacaacaaaacggactttttattcagttgattttacgcgacgacatcaaatag

SEQ ID NO: 180882 - DNA, 68 bp, Arabidopsis thaliana landsberg
caagaggagaagtggatttgatatggcgcctcctgatatgttagctgctactgctgttgctgcagcag

SEQ ID NO: 180883 - DNA, 122 bp, Arabidopsis thaliana landsberg
ctttgcaaaatcatgaaagagcacaagaactccagaattccaaggttcttagtgaaggcttgttatggatggtttcagcagttgatgactttggtgtctcacttttgaacttaaggttttga

SEQ ID NO: 180884 - DNA, 153 bp, Arabidopsis thaliana landsberg
gaatttattgggacaaactggtcgcgggagaagctacgacagattcgaatactaagagagctaaagaatcgactggaaaagaagactggccgtaaacttactgctggaccatctgagaaattacctcctacggctgagcgaaaacgccggtaa

SEQ ID NO: 180885 - DNA, 1215 bp, Arabidopsis thaliana landsberg
atgaatgagatattggcacctattttttacatcttcaaaaatgacccggataaaggaaatgcagtaagtacttgtccttgctaatgtaccatttttttcttattttatttgtacacatattgttctacctcttttagttctttttgggtaacacaccactagttctcctcgtttgcttaacactggcattttaagttatgcaggcatacgctgaatcagatgcatttttctgttttgttgaattgatgagtgggtttcgagataatttctgtcaacaactagataacagtgttgtgggtatacgttacactataacaagactgtcgttgctcttgaagcatcatgatgaagaactttggcgtcatttagaagtcacaaccaaagtaagatatttcacacaaccttggctgatgagacgtcttgctatattcattagttatgtctctgtagaatattttgccagtatgtattgctactggttcagagctatatgttgcatgaatgttgtgctgaaaaattcttaatccaccttaactactagattgataacaaccaaaactgtaccatcgctttcaaaatgtttaagttttcaagtttctgtatttctgtttaaatgtttcagcattttgacatttgagacctgtgtcaattttcagataaacccgcaattctatgcattcagatggatcacactcctattgactcaagaattcaatttcgtggaaagccttcacatctgggacacactcttaagcgacccggaaggtcctcaggtagtattcagcttactactattcagcttccgtaagttgtgaacgagatcaatttcaaatgttgcatttttataagtcattaaacgttcaaatacctctgagcaggtgggttttaggacagtaaaacatatacacgtagagatttgtatatgttatagtcctagagattggttttggtttgcatcttactgtaaaaaaattaaattagcagaattgagttaacgggcgcttgttatcttgcgagatatgaaaaagcttacaagtgtaactgaattttattttgcaggaaacactactgcggatatgctgtgcaatgttaattctagttcgaaggcgtttgcttgctggagattttacgtcgaacctcaaacttcttcagaactatcctcctacaaacatcagtcacatgctctatgtggcagacaaattacgcactaaataa

SEQ ID NO: 180886 - DNA, 205 bp, Arabidopsis thaliana landsberg
agcgttaaaagcacgccaacagcatgttcccgagcttgtaatgacccgttttcaagaacttccacgaccgctaaaactcctccttcatcagaaactaaccctgttctcgcctcctcaccagaaaccatcaaggcctctattagtgaacaacatttctcagatgttttcgacgactttttacttgatttgagaagattcagtattg

SEQ ID NO: 180887 - DNA, 377 bp, Arabidopsis thaliana landsberg
gtgggatgggacatcgcgtgcgcccgcgcactgcgtgaactcgccgagatcaccgaagggagcgcgaccctggacgaagaggaatccctgcgtcgccagttcacctatgtaccgatcgacgtaaaggtgtatcagtgatcacaagcaagtaccgggcctatccgccggacggcggcaagcacaagatcgtggagcttaccaacgacgccaagagacgctatgaggcgaagggttggaagttcgaacgggcgactacatctgatagggaatcctgggcatgaccctgtacgagaaggaagagacgcgggccgttgcggtgcaggctgccgctcaaatgctgggcgatgctgcctactggcgccgagaccttcccgggg

SEQ ID NO: 180888 - DNA, 329 bp, Arabidopsis thaliana landsberg
agactcaggttaatcaacaccgatattttggacgagctctttgatactagcgtaagtttcttatcctctcttctcttggcttggtggttccttagttgtcatcacttttcaggtctatacaattctgttcgtgtttcttctttcagccaacacagaagaaaccgagaaccgagacagtaacggagaagaagaaggaagagcatgagattgttgaagatgaagaagatgttgaagatgaagaagactacgcagcaccacacgcagatgagaacttctatgaagacgaagtggaagaggaagagaatggttatgattttggattgtattaa

SEQ ID NO: 180889 - DNA, 3 bp, Arabidopsis thaliana landsberg
atg

SEQ ID NO: 180890 - DNA, 1059 bp, Arabidopsis thaliana landsberg
atgaaggctgcagatgtacctcacaaccttctggagaagggagacgaagcacctgtccagaagttatgccccatgatgaagggtgagaaaatgcctgcacttgtgcatttaaactatattatgctgcctttttcaatcatatgacactctaactatttgcatacacctgacaaaatatcaggtgccataatctttttgcatttcgcacagttgacaacagtcttttcacaactctaacggaactaaatgattggatcaatcataccgaaagtgaccgttgcatacgtacacaattttcctgacgtacagaatatagattatgaggacgtatattccaagtgtacgtccataaaatcattttattcttgccaagtactaacataacatcatatgttggtgtaccttttgcagcacatggaaatgatcgcactcttgatgtagcacaagaacggggagaatatgaagagaaatcggtatgtcgtggtggaccccagactcccttgggagttgtcaaggcgtgccactgcattcaaaagctgtgttaacccggagactttcaaattggacaaacttttcttacaatttgctaccggggaaagccttaatcgtgaaccaaagctaaggtggatcaatgatgtggacgttatatttgttcccatgaactagaaagatgagaagcattgggttgggttgtctatatacctgcaacgtcgcactattgaaaccatggatcatttggtttctctgacgcgggagtctgtggttaggtcacaaatccttccaattctggagatgctaccatacctcgtgagagcgacatgtaaggattatctcgagaagccctatctcataactccttttacttatataaggaatcaacgtctttcacagaacccaactaccggagattgcagtctgtacgcgatgaattttatagagttgtacatgcttcaaaatccttggaatgacctgattttgattgaagaggctaacatgtacaattaccgtaagggttacgctgtcgacctcaacgagcatggaattgggtccataacctaa

SEQ ID NO: 180891 - DNA, 607 bp, Arabidopsis thaliana landsberg
actcgtagttcgttggataaacaacagaagcttttagacggccaaaccgtggctcttgacggtattcagtttcttacccggtttcagtctgaggcactgcaagagagtaggtaagtttcaaatacacattttatcagtttaaattcaaaggcaagacacttttctccaagagctaattgtgttctgttttccctgcaactttgtaggaatacattgcaacgtttgaaagaatttagtcaggagcaacaagaagatcttgcaaagcggcaagaaaagcttcaggaggttcatgatcacttgtttgaaaattcaaaatcaatgttggaagcccaggtcagtcctcccaaatcttaacaaatattcaaaagctgtacaagcaaatgtcacataaaatcaatatataacaatctgtttttgcaggtagcgtttgaggctaaacaagcaaacatgtttgtagctttggataagctgtttgctttgcacaatgcgatgcttctcgagtcgcgagtgataaaagcctttgtcatctacttcttgtcaatctttgtcatctacatgtttacaagcacaaaacaaacttatatcataaggccaaggctttacattg

SEQ ID NO: 180892 - DNA, 439 bp, Arabidopsis thaliana landsberg
  unsure (1)..(439): unsure at all n locations
atggctggccgagctctcctggtgccgcgcgttgagctccctgccgtcgctcaactcgccggcgtgcgtcctactctttanccgcccatcgccgtgcgccaagctacctgttggccgcgctcgaagctctatgttcgtcgtcatcgctcggtcgcacgacagactaattgcgtgtcgtgtgtcgcacatcctaggtcctcgtcgtcgggtttcgtgcgtgctcgcgtttaccgtcgagtcgtcgaacccgtcatcctttgttcgacccccacctcaccagctcgctccaaacacgatctcgtcatcgttttatgcgtcatcaagaaatccaaaaaaatcgggtgaagacgaagctagcagcgcgatattccccaagcggtcgacaaattgcctagatcggaaaatcgctaccgatctcgcggattcgtgtcagctgtga

SEQ ID NO: 180893 - DNA, 2195 bp, Arabidopsis thaliana landsberg
atgccacatggaaggccacaagtctttccaatgcaaggcaatgaccgggataaacaaaggcaaaagctcaagcaaaagccatcaagcaaaatctccaacacctacatcaaaagggtgaacaaaaaggatgctacaccatatttgatcaagaagaaaaagaatggaaaggtgatagcaatcaaggccaacaagcaagccaacaaaggaaaaggggccaaacgcatctgggtgccaaaggagataatttcaaccatgaaaagcaccaagaaggtttggatcctgaaagggaagtgagtggaccaaaggtcttcgggaaatttggagacttggctaaattgggatgtatatcatgggatacatcatattggatcaagtttattgccaagtgggttagtgaaaatttttggacccaaatttcccacccatgactaaggtaactagttttattgtatttctcgtttttagatatgcatatctatttatcttttatctagtttacctttcttgcctagtattacatttgttatgtacttttgttcaaaatcatgcatactaggtaaatcatatggtaggattgctagtttttaaattcatatacttaagcaaacctacatggcttaaaatgtttagttaaagcacggcacatagcttttatatcactccatagtaaatgatgcatcaattgaaaattttgatttctacaaagtgtatcatttaacttatatgcgccaaagtttggattatggataatttgcccctcttgatatcaaatcaaagtgcatgtcttctacaagtattcaaaacttgtatgcacactttcagggggagattactctataatctaagactttgagactaatattgttttcaagtatatttcatgtaatagtctcattgtaaggaaaatgaagtcccggagaaagacaacaaacttccactgcaaaatctccaagaactttcatgtctcacaagtctgtcattggtcttcaattggtccgtcattgactttcaattggtatctttgagactacatttggtatcatttacatgtcttctccaaaatttggttagactatatttcatatcctatacttcccatgttgctatacatgcataagttgttaactcatatttgttacttatgcataagggaaggtagtctaatcaaatcatgtcttgcacctctatttttcacatgctttttccgaagtagaagatctctattaaggggaaatttctttgtctctaaagggggagaaaattctttctaaaggagaacactcatttaggaggagtaataattttttggtgcttcaattggtataaattgacaaatcttttatgagggcaagtcttatttgcttcctatgtgctcttaatgtcttcctttttggtggttgatgccaaagggggagaatttagggaccaaagcaatgaaaactatatcaaacaccaaacaccaccaatttaaaattttatatctacaaatggtttttaagtggttttggttatttggtccaaaaataggaagtaagtgaattatggagttagggggaggcttaagtccataatttcacattgtggggacaatcatgcatcttagcaagtaaaatgcatattttcactctaatacttgtattatttgcttgctttggttgtgttgtcatcaatcaccaaaaagggggagattgtaaggaaaatggatcccgggccatttggctcaataggttttggtgtttgatgatcaacataatatgtggactaatatgtttgctagtatttatgtttgtagttcacaggatgcgaagagattcgactagggaaatgtggcgcatgacttcaaacgacgacatacatagaagcatagaagtccaagactcaagaacaaaagaaacccaaaagaatcagcaaagaaattcaagaaaaggtaggtcagccagcgcctggtggcacaccggacagtgcacaatacctgtccagtgtgcgccggactgactgtgggacaaccggacagtctacgcagaggggcacgctgaaaggccacttcggctgcagcatcggactatccagtgtacaccggacagtcaggcaacggtcggatccaatggtccactgctgcagaccccaacggtcggctgacgtggcagacaccggtcagtgaacagtgccctgtccggtgtgcatcggactgtccg

SEQ ID NO: 180894 - DNA, 408 bp, Arabidopsis thaliana landsberg
atgctcgtggaggagaagttggtgatgttcttggaggagaatttggtggagttcttggcggtgatagtggtggtgcacgaggaggagaagtcggtggagtattaggaggaggaaccggtggtgcacgtggaggagaagttggtggagttcttggcggggatagtggtggtgcacgaggaggagaagtcggtggagttcttggaggaggaattggtggtgcacgtggaggagaagttggtggagttcttggaggagatagtggtggtacacgcggaggagatgttggtggagttcttggtggagaaagtggtggtgcacgcggaggagaatttgggggactctttggtggagaaaccggtggtgtttgtgggggagcggttggtggagtctttggaggaagaattggtg

SEQ ID NO: 180895 - DNA, 3026 bp, Arabidopsis thaliana landsberg
  unsure (1)..(3026): unsure at all n locations
atggatggatcaaagcatccatcagtctttcagaagctacatggacaatcttacttgatcaatagactttctccgagtgtgcaagctcgtggttactgtgtctctggtgcttatgtcaatggaggtttgcagagtctattgcagccaactagccatggcgttggctcgtctcttatacctcatggttcatttcctgtattagctcacgctcctagtgagaaaactggtactggtttcttgatcgatttccttatgggaggagtctcagctgctgtttcgaagacggcagccgcgcctatagagcgtgtgaagctcttgattcagaatcaagatgaaatgatcaaagctgggcgtctctctgagccatataaaggaatcagtgattgttttgctcgaacagtcaaagacgaaggaatgcttgctctttggagaggaaacactgccaatgttatcagatacttccccactcaggtttgttttctcttctttgacgtggtatttgtatagacgtcgagatgggtatgctaagcaaatagttttgttttgcaggctttaaactttgcgttcaaagattacttcaagaggctgtttaacttcaagaaagaaaaagatggctactggaagtggtttgcagggaacctggcgtctggtggtgcagctggtgcatcatctctgctttttgtgtactctttggattacgctcgtacccgtttagccaatgatgcgaaggcggccaagaaaggtggtcagcggcagtttaatggcatggtcgacgtgtacaagaagactatagcctctgatggcattgtcgggctttaccgtggtttcaacatctcatgcgttggaattgtcgtgtaccgggggctttactttggattgtatgattccttgaagcctgtggttctagttgatggtctccaggtaaaaaacaaagaaaactcctcacttcaacatattgagtcctctgttactgtttactcattgctataatctgtacaggatagcttccttgctagtttcttactgggatggggaatcaccattggagctggactggcgtcttacccaattgacacggttcgcagaagaatgatgatgacgtcaggtgaagcagtgaagtacaagagctctcttcaggccttctctcagatcgtcaagaacgaaggggccaagtcactcttcaagggtgcaggtgccaacatccttcgtgcggttgcaggcgctggtgtactggccggctatgacaagctccagctcattgtgttgggtaagaagtatggctctggtggtggctaaacgatgaggatgatgaaagaatagcccttgaggtctgtgaatgaataaagcagtgtgtccgttcgtataaatgttgcttttagaatatagagtgtctctgtcaagttgtggccctttgtcttagttctatacttctatgacttttgttgacaaaagaataaatacaaagaaaaccaataccatgtttatgttttttgtagttaaaacagttttagtgaatattatcagttaaaaagtcaacataagctgagagatcaaaagaactttaaatgtatggttatgcgaaagtttgtataattcagattcggtttccttgggttgtaagcgaatgagtgatctaagtccaacactaagatttggtcttcaaatgtgtcagtctcaaatcccacttcaaaccactccagacagctacaagtaaggagttaagtccttttccttgatcttataccactacctgattcatcctctgtaatcgttgcaccaaagaccaaacttattgtctttatatataaatccaccacacttaagacaaaggatccataacttgtctttgaatggctctctctataacatttcctgtccttatctcagttcttctttatcatttctctttggtatcaacagcaaaacatagccttcaccaccacacaagtcactccacaaaccctaaacagcatcttcagcaagcgtaccgtgcacttaaagcatggaagaaggtaatctattctgatccaaagaacttaactgcagattgggtcggtccctcagtctgcagctacactggcatcttctgtgccccatccccttccaatccaaacactctagttgttgccggaatcgatctcaatcatggtgacattgctggtttcctgcctgaagccattggccttctctctgacctcgctctcatccatctcaatagcaatcgcttctgtggcatacttcctcgttcgtttgccaatctatccttactctatgaacttgacctcagcaacaaccgctttgtaggtccttttccggatgtcgtccttgcactcccttctctaaagtaccttgaccttcgttacaatgagtttgaaggccccttgcctccaaaactcttcagcaatcccctcgatgccatttttgtgaacaacaaccggttaacaagcctcatcccccgagatttcacaggaacaaccgcctctgttgtcgtctttgccaacaatgattttagcggttgtctgcctccaaccatagcccgctttgcagataccttagaagagcttctcctaatcaactcaagcttatctgggtgtctaccccccgaagtcgggtatctctacaagctaagagtcctggacatgagctacaacagtttagttggtcctgtaccttacagtctcgctgggctaggccatctcgagcagctaaatctggaacacaacatgttcactggcactgtccctcttggagtctgcgttttgcccagctnnnnnnnnnnnnnnnnnnnnnnnnnnnnnntcagtgaagaagaaggtatctgcaggaacctgacttccagaggaatagccatcgatgatcgctacaactgtctgcctgacaaaccgcttcagcgtccccaaaaagtctgtgatgctgtacttgagcaccccatagactgctatgaccacgaatgctcacccatggctccactggttgctccatctaccgcaggaccttccattgctcctggtccagctgacacataa

SEQ ID NO: 180896 - DNA, 515 bp, Arabidopsis thaliana landsberg
cccacctacaactctacatatttcgactacagtttgacaggtcgtgttgctgcggcaccgatacacttattccacggttgcagacttgttggtttctcacccctcctgttgtgcaaggtaagaattggtaagagcttgtgtggcaggttgagagtgagcgccttgcagcagctacatcctaatagttgtagagtttttattccttcacgttttttttcttgttgcctctgttcgtctaaccatggcaggattggaggttgatgatgcttctcgtaatatgccacactctcctcgcaccaagggtatcatacaacactttgtaaggctggtgaagacgcacacggaaggtcttgataatgacatgcaggtgacgaatgaaaagatggggcaattggaggccacacagatcgacacaaacaccaaacttgcaaatgtggaaatgacagttgctcatattgacaagagccttgtcgcactcttgaggcggtttgatgagatgcatgctaatatcaatg

SEQ ID NO: 180897 - DNA, 144 bp, Arabidopsis thaliana landsberg
agtgaaggagaagaagaaggctcaaaagcgaattcggcaaccaagattcgcattcatgaccaagagtgatgtggataatcttgaagatggatatcgatggcgtaaatatggacaaaaagccgtcaagaatagcccattcccaag

SEQ ID NO: 180898 - DNA, 1014 bp, Arabidopsis thaliana landsberg
gattccacggaactggattcagattgcttctggctaaacaaaatactgaaggcttcgaaaggcagacaattaactgacctcttcaaactgaaggtagatgtttcgactagagaccttatcaaatttcgcggtaacaacaagtgttgcaccttcttgctcctgccaaggattcatttacagtaactgtctggacatatatgaaattgaaagggtggttacaagtagagaagcaaaaacctccaacaagcttggaagactccactgaacaacattccgaatgatcccaccgtcggatctatctctgcactcaaacttctgaaagacctgccctacctgatcaaaatccacacaggattaaaaccgaagcccaaaactaaagtctctctctgctttgttcattatcattagtagtatatacctgaaagaagggaagtcttgaagcagcttcaaacagaacaacaacatcaggtgcagatgtatattgtagcctccatgttccatctaacttcactggatcaatttcttcaccgccattaaacccttccacagtcacctgaaaagtttctaccaaatccagactcattgaagaatataacatcgtcactcaatatcatacatcaacagtatccaatgcaatggctgtaccagagcctcctcaatgatagatcgttgatcagaagtggcagtgagtcctcgttgagtgtcttgaacagctctcagtagatcgtgtttcttgtgttctaagtcaagttcattgtcgacgacgacctgagttatcaccgaaacatactcaaatcatttgtttcagacgagccaaaaacaaaaatgtgcagagaacaaaccctggccgaagtctctccagaagctacagctactcgacacgagaatctctttctatggttggttttaatgtttaagccaaaagggctgattctacagacgcgggacaatgaaatcgcagggcaagagaaagtcgcagacgcaattcgatccattttcgaacctgatggataa

SEQ ID NO: 180899 - DNA, 533 bp, Arabidopsis thaliana landsberg
atggtggttggaggcgtcagtctcttcccggagacggcagaagcgatcgtgatgggaccgtcgatgcagaagctgacgtggcattactataaagtttacaacacttgcgagaatgcagagaattttgtgaggcaccaagttgagatattttacaagaacgataaaagtattgctcctaagctccttcgtctcctctactcagactgctttgtttccgtacgtttttcttattcttgtcttatcatttaatcaattatgaacccaatggcatatagaagtgtaagtttgtaaccacaaaactaatcgagtgctaagaaagtttaattagaagatttactaattactgctctcacattgtgcgacactatctataatgatagggatgcgatgcatcagttcttctagaaggtccaaactcagagaaaatggcgccacaaaacagaggacttggaggattcgttctcatagacaaaatcaaaatagtcttggaacagagatgtcctggtgttgtctcttgcgccgacattccttaa

SEQ ID NO: 180900 - DNA, 2064 bp, Arabidopsis thaliana landsberg
  unsure (1)..(2064): unsure at all n locations
atgaattatacaggtctgactggacaaatcgagtttaattcagagaaaaaccggattaatccagcctacgacattctgaacataaaaagtacaggtccactgagagttggatactggtcgaatcatacaggtttctcagtcgtgcctccagagacattatactctaagccttcaaacacatctgcaaaaaaccaacgtcttaatgagatcatatggccaggggaagtaataaagccacctcggggttgggttttccctgaaaatggaaagccgctgaaaatcggggtgcctaaccgtgtaagctacaaaaactatgcttctaaggacaagaacccgcttggtgttaaaggcttttgcatcgacatctttgaagctgcgattcaattgcttccatatcccgttccacgtacttatatactatatggggacgggaagaaaaatccttcatatgacaatctcataagtgaagttgctgcaaatgtgagtcctacttcttcttctattttactcaatcaattacacgaaacagtatacttatgttttgttctatttatgtctctagattttcgatgtagctgttggggatgttaccatcattacaaacagaaccaagtttgtagatttcacgcagccatttatagaatcagggcttgtggtggtagctccagtgaagggggccaagtctagtccttggtccttcttgaagccattcactatagagatgtgggctgtgaccggtgccctttttctctttgttggagccgtcatctggattcttgaacatcgatttaacgaagaattccgcggacctcctaggcgtcaaatcattacagtcttctggttagttccatacaattattgaatcgacacaaaactcatatgtattagtttaagctcaagtgctaaagctttgctttacccccttcctttctcgtcttcaatattgcaggtttagcttctcaacaatgttcttctctcacagtatgcacacaattacatntaagatcatacgaaaacatcaaagagaagaaactctcggttcttttcttttgttacctttttcgcaaggtgttttattcttcttcctttggtgatcttcaggggagaatacggtgagcacgttgggaaggtttgtgctactcgtatggttatttgtggttctaatcatcaactcaagctacacagccagtctgacttcaatcctcaccgttcaacagctaacatctcggatagaaggaatggacactttaatagcaagcaacgaacccattggagtccaagatggtacctttgcgtggaaatttctggtcaatgaacttaacatagctccatcaagaatcattccgcttaaagacgaagaagaatatctctctgctcttcaacgtggtcccagaggcggtggcgtggcagccattgtcgacgagcttccttacattaaagctctcttgtcaaacagcaactgcaagtttcgaacagttggacaggaattcactcggacaggctggggatttgtatgtgaaaaccaacttcaattttttaagatcagtctctgttaaaactttgcttaatggatctcgattcttgcaggcgttccagagagactctcctctagctgtggacatgtcgacagcgatcctgcaactggctgaagaaggaaaactcgagaaaatccgcaagaaatggcttacctacgaccacgaatgtacaatnnnnnnnnnnnnnnnnnnnnactatcaaatatcggtacagagtttctggggactcttcctaatatgtggcgtcgtttggttcattgcactcacactcttctgctggaaagttttctggcaataccatcggttaagaccagaagagagtgatgaagtacaggcgaggagcgaggaggctggttcttctagagggaaaagtttgagagcagtgagtttcaaggatttgatcaaagttgttgataagagagaagcagagattaaggagatgcttaaggagaagagcagtaagaaactcaaagatggccaaagttcagctgagaattcgcagtcgaaagatcacgaaactccacagtga

SEQ ID NO: 180901 - DNA, 519 bp, Arabidopsis thaliana landsberg
atgaagcttgtctggtcgccagatactgcttctgctgcctacatcgacaccgttaaatcagtatgccttttaactagattacatatgtgtgtaattacatgcttttttatataatctttatttgattttgcatgtaaatatatgtgtgtatagtgtaagagcgacaaagagtcaggagtggcagaatttttatcagctacagcggctggatggaacgcgaggctgatcgttgagacatggtcacgcggcgatccaatgcacactagcgtcggactcgcggttgctgcaactcacacgggtggaagacacgtgtgtatagtacctgacgagcaatctaaacttgagtacgtgttggccatgagaggatttgttacgacggaggttgtggtggtcggagaatctgttgagaacacgatggaggagtttcccggtgtggatttcttggtggtggactcgaagcggcgagagttcgtcagaacgctgaggtttgcgaagctgagcaacaagggtgccgttttg

SEQ ID NO: 180902 - DNA, 95 bp, Arabidopsis thaliana landsberg
atgcccccactccttatataaatccagtcagcgccctgacggttaatatcaacgttcgcacctacgatcaccgtattaccgtctgcactcaatga

SEQ ID NO: 180903 - DNA, 59 bp, Arabidopsis thaliana landsberg
gtcgctatatccagcgacttccatacgaacaacatttggtcgcggtcgccaacgactag

SEQ ID NO: 180904 - DNA, 93 bp, Arabidopsis thaliana landsberg
gtagtggcggagcttatcggcggtggaggtcggcaatgttcttcctccttcaacttcgtgattaaacgttggtggacgcgtgttatcttttga

SEQ ID NO: 180905 - DNA, 843 bp, Arabidopsis thaliana landsberg
gttgtggcaaagttaaataatgtctaccccaaggaccccgagttccctgaacttggagtagacgacatgacaaagcttgcatatttgcatgaaccaggggtcctgctcaatcttaagtgccgttataatgcaaatgaaatatatgtaagcttcaattcgattactagttgtcaagtatttcttgctttcaagtaattttgttgtttacattaaccatcacgtgatcttaagatgtctccacagtttatgcaatctaatttttttcatgatggatccagacgtacacaggaaatatattgatagctgtgaatccctttaagagattgccccacctttatggaagtgagacaatgaaacagtacaagggcacagcatttggtgagttgagtccacatcctttcgccgttgcagattctgcgtacaggtaactcttttgccgtttaaattagcttatattattgtttcacttacaactgtttttcggcattatgatcaccaaaaacataacctttcaggaaaatgattaacgagggagtgagccaggcgatcttggtgagtggggaaagcggtgctggcaagacagagagcacgaagatgctcatgcagtatcttgcctacatgggaggaagagctgagagtgaaggaagatctgtggagcagcaagttttggaggtaatgaattttttaaaatacatggcttcattcttgcaaaagatagacttggttagtttcctccagtaatatcttgtcatacttttcgctgattgactttcctgttttgcagtcaaatccttttttagaagcttttggcaatgcagggaccgttagaaacaataattcaag

SEQ ID NO: 180906 - DNA, 655 bp, Arabidopsis thaliana landsberg
atggatgctcaccgagccgaagttcttggtcattcagcacggattatacagagaaatgtccttacttatcaatctcgcaagaagtttttgttgttgcaggccgcttcaacagaaattcaagccttgtgtagaggtaatacatgttatatgcgtttgttggattcaatgtttgtttatcaggctgtctgtcttattccctccccaaactaaatttaggacaagttgcacgtgtttggtttgagaccatgcgaagagaagcggcttctctgaggattcagaagcaggcacggacttatatttgccagaatgcctataaaaccctgtgctcgtctgcttgttcaattcagacagggatgcgagcaaaagctgctcgaattgaacttcagttaagaaagaagagaagagcgacaatcattattcaagtaagtttaagctcgcatattgatgaaattgtttctcattttgcctattttttacctatcacatagatctacttgtttgagtattgatgacatgaaacttactggctacgcagagtcaaatcagaagatgtttgtgtcatcagcgttatgtgagaacgaagaaagcagcaattactactcaatgtggctggagagtgaaagttgcacgccgagaattgcgaaatcttaaaatg

SEQ ID NO: 180907 - DNA, 861 bp, Arabidopsis thaliana landsberg
atggatccttggcttcctggcatgcccaaacttgaaacacacaggtaaattctgataatactacctgatccttgcaatcaaatttttattagtttagattcttgtgtatctgtaagacacttggcttgtcattttaattatattcctcatctcctgcaatcaaattattatttagggtccgcgttacgggatatgacacttgtgttcctaagattgatatccagatggccttgtgtgaacatttctcttcatgtggagaggtcacgcaagttgtggttctgcctaggtttgtcgcttctttcttcctccaatttgtcccagctctcaagttgttgattctaactaaagactctttgtttctgttgaattcggcagcggttcaggttcaatttatcttcaaggagaaagatgtgaggacaaggcgcttaaaataaatggatgtataatgggaggaatgaatcttgtagttgaatctgttttgatgaaacccgaagacctaaaaaaaagaaaggggcgcgccatcatcacgcctactggccctactggctatacgtccttaagtacgtaaaaatatttgatttcttattcttggtaacaaactcaaacctggatctcatcatccgtgtccttgtttatatttgatatttaggttgtttatgcaaggcgtatgagcttaagaagaagaagatggagatggagatggagatggagatgggtgagaagaagaagaagaagaagatgaagattgagctgatgaaggtagagaaagtgcttaagaagcatatggagaataagaagaagatggatatgagcacgaaaaagaggatggagatggagagtttggagatggctctcttttag

SEQ ID NO: 180908 - DNA, 690 bp, Arabidopsis thaliana landsberg
atggctgtttttgggtttttgcggatagacggtcacttggttcatcacttgcgagatggactcgtgctgcaatatacttcgactctctaccattctattattaggtaatgttatttctacaacctttaaagttaggaataatttaattgttattactatatagtagaagtatatttccaaaattccaaagactgtatagaatcgatcaaattaatctcagataccaagccagatagattaacaaattacttaccagaatatatagcaaggggggaaagaaaagtgaatatgtttaaaaaaactattcattttcacggagaccttttgttctacctacggatatatattggctaacttttttttggtaaaaagttaaattttataccaattttctaattttttctgtacaatgctgaaacagcttatttaaaaaagcaacaactagaaatggaaggagatacaaccaaagtagaaactaagaagagaaatagaagaagaaggaggaccagggaaggatagaaggcggtctctaacggtgcggtccacggcagccttagtcacagaagccgaagtggagatgttggtgaagatccttgcatttcgttcgcgccaaatgagatagcacgcaacctgagcgatgaggttgatgatgacagaagagagagtttgaggttggagcttgcgctgtaa

SEQ ID NO: 180909 - DNA, 315 bp, Arabidopsis thaliana landsberg
catgaccgaagccaagtcaataccagagcgaaaacgaaactggatgcacctatcatcaatgatgcggccatgtacacgagaagccataccccagctgcgaggcaaggccctaagtactcttctgaggtgttgagcatggatgttaagcggtcttgcaataagactcagtctgttgccagcaacaacaacaccataagctgcctgaggtacaaaaagttctggatcatcgcgacccaaaaccatgtactgtatatcatgccaaatctcatcagccatcaggaaacaagaagaagtaaagaaaagaagacactataa

SEQ ID NO: 180910 - DNA, 865 bp, Arabidopsis thaliana landsberg
atggtgtttggatatgcatatcctgcttatgagtgcttcaaaacggtcgaactcaacaagcctgaaattcaacaacttcagttctggtgccagtattggtatatgcatacattctatcctttatctataacctttttaggttcctatatatatcctgcttccttccttcctctcaaaacatctttgcaggattattgtagctgctttgacgattttcgaaagaattggtgatgctcttgtttcttggtaggttgtttatattacttacttagaaaacaaagagttttactgtatagtattcttatcattcttatgttttcatgttgtcttgaaggttaccaatgtatagcgaggcgaagttggctttcttcatttatctctggtttccaaagactaaagtaagtaatatcttatatatcttttgattcaactgaatttttctctaatttttattacctatgtgttatatcatgtcagggaacaacatacgtttacgattctttcttcaggccatatatagcaaagcatgaaaatgaaattgaccgcaacttggtgaaggtaaagacccgagctaaggatatggcaatgatatatctccaaaaagaaatcaaccaagggcagaccaaattctttgagatcttacagtatatcacagaacaatcagcaccaaaatctaagggtgaggtatatttatttcttcacctctcgactcttatctgtttcattttaacatttgacttgtgagtgaacttcaatagaaatcgttgctcatttttctatttgtgcacaggaaaagaaagagccttcaatacctcagctcgatgatccaattcttaaggtgaaagaaaacgaagtcactaaatga

SEQ ID NO: 180911 - DNA, 106 bp, Arabidopsis thaliana landsberg
atggatttcctgatcatcatgctcctgtttggagaccgcaccgtggcctacccgaacgtgctgttactgttctaagggcttggctcttcgatcatttcttgcatcc

SEQ ID NO: 180912 - DNA, 1171 bp, Arabidopsis thaliana landsberg
gaggaaggagggaactcggagattgaagaagattcttcaaagttacaccaaaatgtctatgactctgtaatggaagacaatgtcgatcgtgttccatcaccatctcaccaggtaacttttgttcttattatttcattattgtatgtacaaaatattttatgttcttaatgttcttacttttgacataacagcccgaacattgcattcctgatggtggtaactttgaacaactcctgcctgacccaatactgtctgacccagccattgagaaaatgtcagatgatgtatcttcctcgtcccatcaggtacaggagtacgtactactaattttagtgtacgtacagattatttctaatttgtattgtttgcatttgtataggacgttgcgaaaggccttggtggtaatcctgaagaagacgttgttgctcctgagtcacaacagttggaggagccacaatcaccagaggtcaaggttaggcaagaatttgcttttgaagttacagaagatggcaatcccattgtacgtacaatgtttttgaaatctgtttcgcacctatgaatgttttgctgtgagtttgactaatagatggccatccatctccatataatgaggtcaggctgaaacaatttgtggggatggagaggaagctttgaaggaggctaaatctccaagcgttgtagatgaagccttggaggtatgtgttactattttgctatttgtaacgcttatttgccaattagagatataaccaattatttggttactaaatctgaaggacactgcgttacctggatttgttcctccgacgactgtaggggattttaattatgaagcgaatctcagtgacccgtcttcaccaaccgtagttgttagcaaggtaagttcctaactaactataacattactgtcggagatatcatttgatgtttgttatattgttttcattaggtgcttactcaattgaaggacgatattctcgcagaaaatgtatctaaaattcctgagaaggttgtcgtccctgaagaagtaatttattagctaactattaataacattactgtcggagttataatttgatgtttgttaaattgttttcattaggtgcttactcaattgaaagacgatgttctcgaagaaaaaatatctgaaaaggttgcaatccccgaagag

SEQ ID NO: 180913 - DNA, 1007 bp, Arabidopsis thaliana landsberg
atgcttctggataagagattgctgagaggcaagattgcttcatttgatgatgaagggtcaatagatgtttgtgatcacaatgttcactacgccaagacacatcctcagggcgatgatatcataacttggttacttgacgactattctttaatagataagagctttgggttccccagatctattggggcacacaatcttgatataaggatggctgttctgagagccattcacttcacgcgtaggactttggcaaccagatatgcaaagaagtggcagatcctatgttacgacgaatgtcttaatgacgccaggaacttatgtatacaagaagatgaaagtagaatgaatgttccggaagatcaaaggaacatatatgcatctcttctatgcgacagttgtgaagagcagttaacgatagacactgaagatcctctttttacagaattatacttgtgtgcagtacgagatgttctcgaaggagcatcacatccgacatttgatttcactaatgcagaagattgcctggaacttatacatgggcttataaatatcagtgatgatatagtgttaaagtccattgaccttctgaaatcagtggtcactagcaaggttcaatcctgatctaagttttaatttacaacgaaataaccgttattgttttcttaaaatctatattgacttgcaggttctgctagccgattcaaagattttgctggttgaaaattcaagaatacatttgctaaacgacctcatcaggctttctgtttttgactaccgctcttatatccttcccttgctgaaacgtttcttgcgggttggtttttaatcaaattggttcatagagattttatcttccatctgatatttttattgacgcatgtaccttataattgatgaatcttcttttaggaggagttggaaggaattgtagatatggatgccaaagccaagttagctgcattagaagaagaacttttaaccgaggaaaagaaaaggaaggagaagca

SEQ ID NO: 180914 - DNA, 1098 bp, Arabidopsis thaliana landsberg
atgaaggatgaggaaggtttctactaccctcacaacgttgattttcgtgggcgagcatatcccatacatccatatcttaaccatctcgggtctgatctctgccgaggcatccttgagttttgtgagggaaagcctcttgggaaatcagggttgcgttggctgaagatacatatagcaaacttatatgctggtggagtcgataagctggcttatgaggataggattgcgtttactgagagtcacttggaagatatatttgattcttctgatagacctcttgaaggaaaaagatggtggcttaacgcagaggatccctttcaatgtttggctgcttgcattaatctttcagaagccttgagaagcccctttcctgaagctgcaatatcccatatccccatccaccaggtactcgctagattttatccatacttgtacatgagcaacttttgtgacattcttgcgaaatgaaagctatataggtgcctttgttgcttcgaatttatcatcatctatgctctttaagtagataatcttactttcctgtattaatttctattgcaaggatggttcatgtaatggtttacaacactatgctgctcttgggagggataaggtatgccattagttttacagtacctataatttctttttttgtatgcatcctttcaagcataggcaaatgtatttctcctcaaggttctctgattcatttctttcaaattggttctgtttatagttgggagcagatgccgtcaaccttgttacaggtgaaaagccggctgatgtttatacagaaattgcggctaggtactttaactatttttatattcccttatctctctgactatagtaacactctaatcagacaggattttaacttggtttaattaaatcagggttctcaagatcatgcagcaagatgcagaggaagatcccgaaacatttccaaatgccacatatgccaaactcatgctcgaccaggttttcgcatatcttacttgttatattggccattttctgccaaacatgttacgtgatagcctattcttatcccttcaatataaggatcagatgtactgctactatgagtcacattaa

SEQ ID NO: 180915 - DNA, 649 bp, Arabidopsis thaliana landsberg
atgggcaacggaaagtttccagataagggaaatgatctaagtaaatcctcgtattttaaagacatgaaatatgttgatgccaatttcaagtacaatcccatcagtgagctggagatgattgttaatacgccaaaaccctactgttttaggttgaattatttgaaagatcaacaaaccattacatatggtgggcctggtccttgcccttattaaatctcttctttttatttataaacaatatgatcaattctataatgtaattctctagtaatttcttatctatttttatgaacaatttgctttcactatcaataaacttgggaattttgttttgtcgggttctgtttagatgagtttgtatgtataacttctcgtagtgattataggtatgtgagaactatgtggatattaaattgtaacactacattttggcttttgataaacgttataaaacacacttttgtttgtttaacgcgaagttaatggccggggtcatagtcttcatggagaccagagcggataaataaccttctttcagagaccagcacctcctcaataagcaatagtccgtgttcgaattcgtgttcggtatgaggccgtgagctatatgcatgctacccgaccaacgaaaaagttagcattgaattga

SEQ ID NO: 180916 - DNA, 1055 bp, Arabidopsis thaliana landsberg
atgaagacctttgaattgattatttcagaatcaactcaaagctcgggggctacaccaattgggtgcgcttcggtcaccaacagattcacaatgcctgaaagccaaatgctgatttgaaaagcaaaagtatgaagacctttgaatggaatacttctaaaatccactcaaagccccgggactacacaactgattcacaatgcctggaagccaaatgctgatttgacaagcagaaggatgaagacatttgaatggattacttctcaaatccactcaaagctcaggggctacactcattgagtgcaccttcagtgccccaacagattcacgacaccctgaagccaagtgctgatttctaaagcataagattaagacctttgaatggattatttctaaaatccactcaaagcttggggcctacacccattgggtgcaccttcggtgccctaatagatttttagtcccatgaagaaaaaatgctgatttctaaagcataagctgatgacagaatgctgatttctaaggcacaaaatgaagacctttgaggggtttgttttcaaaaacctactcaaagttccaaatgctgacttccaaagcacgatatgatgataagatgctgatctccaaagcatcgaatgagcacctttgagaagactgtttttactgagtcactcaaagtttaggagcaatgctcaatatgtgcacccttcggcgcgcccatcaccagaatggataatcaagccacagattcgcgagctgtacctagaatctttgggctgattatttcaaaatcaactcaaagattgggggcttgtgggggacagatatccccgggtccactagaaggcaagaaggcctcgcaaaaggctttgggcctattatctcgcaaggccatcccttcatgggccaggggagaactactggtggaatgggccgatgcgagaaagaagcagactcaggcccaagcgactcgttggacttaagcgctatctacagcgcccacctgactttcccgcgtgcagcgaccttgaatatcggagcgaattagcgataagtcg

SEQ ID NO: 180917 - DNA, 516 bp, Arabidopsis thaliana landsberg
atggaacacaagcgggaggatgaggcttatattatcttgcaccagggtgctcgtagtaggggttacaagcgttgcagagagagagagggtttggccttgaggtgagctatctgagtttgcctccacgcgtctctcctactctgcctgcatctgctcgcatgccttcgtccttcatctctccccgaggaaggccctggacatccccttttatagatacaaggagatgcccagctgtacaatggggtgtagctatgtgctaacgtggctggcggagaagcgccttgagccctgtacgcgtgttaacatggctgtcggagaagtgccttgagacctgtagaagcatagctggcggtgcggcatggatcctgctgacgtttgcttgcttccgtagggggtttgagagcaaccgacgtcatgggcgcacgcggggaaccatcattacctgttgctggagtaaccttagatgggacactggtcttgttccttcatagcctgaggcggctagctaggagtagg

SEQ ID NO: 180918 - DNA, 269 bp, Arabidopsis thaliana landsberg
atgcacgatgatatcgaagctcttcaggaactcgacgcccttctcaatcgaacgcgggcccttgatcgcgggcctgatgcgcgggaagccgcggttgcgcagatagctgatcgtctcaggccgtgagctgtccgcagtggaccaccatttctcgctatcgggcacacccatgaacagttgcggctggttgttgatcttcgacgtgcaggccccatgcctaatggtcgacatacagcttggtgccgtcgatataacagcgctccagacag

SEQ ID NO: 180919 - DNA, 114 bp, Arabidopsis thaliana landsberg
gtggttaagctgcttgtttatataagtgacaaggatcttttcgccgtgtttttcaggaagaaacaagcccgtcggctcttatttgatcgcaacggtaatgactaccacgaatga

SEQ ID NO: 180920 - DNA, 905 bp, Arabidopsis thaliana landsberg
acacaaaccgcttcactatagtcgataacagaattatcggaaacataagtacgtatcaggtctgatgccatagtgtttcatccccataagtgattcccaaccttaatcaaaatagccatcagagcgattttgcttatgaatagtctaagtacagccaatgtcggctcaagcatatgctaggctctggggccaaaaaaaactggacccttatatattgaaataatttttttacaagaataaacataaagaaaacatcatttacaaaaaataaagcaacaatatcattttgcaaaagagatttgaccccataaatcaataaatattttgcaattgttggtctaaagtaaatcaacatctaatttggacacaacaaatttataaagagaagaattacgttaggctttaaagaaatgcaaatatatatgaacctctttttaatattatttttcttcttttctcttatacttacacaaatttgtttttattgagtatgttttcaaagaaaaaataaatgtgtgtgcccccttttggttatgggcctctggttcttgcactgctcccccctaaacctatgcaccactaaaattttataaagtatttatcatttgataaaaaaaaagaaaagaaagtatttatcaacaattaaagtacttgtaaagattatataaaaaattaatagaacagaaaaagatcaattaattcacataaataagaaaacttagacaatggtgaacagtccaaaaaaagtggtctttgttactacaatttcgataatcaaaacagaaaacttagacaatgcgactgcgatagaagttgcggcagcgtcgacgacgacaaaacgaacaacctgctgtagtgtttgccgcaaccgcaagcgacaaacaaacaaacagactaatcaataa

SEQ ID NO: 180921 - DNA, 288 bp, Arabidopsis thaliana landsberg
gcaacattcttcgtggagagccgctcattctattggatggaattcctgtcagtcacgcggacgatatcatggcatttgatccacgcaaagtgaagaagcttgaggtggttacaaaacaatttttcctcgggccgccagcacaaaatggaatcataagcttcactacctacaatggagatgtggcaggtttcaagcttgaccctaaagcactggcaattgactatgagggattgcaactacatcgcgaattttatcttccggattattcgattcaaagcgaacatgacc

SEQ ID NO: 180922 - DNA, 406 bp, Arabidopsis thaliana landsberg
atgctcaaacaaacattaatcggaacaggagctttactcgtttcagcattcgtgctattcgttttcgcaacaccagtcgaggatttctttaaaaccactctaggatctacagaaaaccaaccagaagtttccatttcaagaaccagcaacaagttcaatataaggtaaggagatggataagtatttttggtatttaagaaacaaaaaaaaaaactcatctcttttcactataaaaatttgcagaaaagaacaattgcttcgactacccgtagatgttgtgactgacgatgatctggcagcagccgcggctgaggccgctgatggaagacctgtctattgcagagaccggtactaccgtgcattagccggtggtcaatactgcaaatgggaagatcttgttaaatag

SEQ ID NO: 180923 - DNA, 156 bp, Arabidopsis thaliana landsberg
atggctatcaacggcgccgggataactaatatgttggccaaccttgtcttaacggatgttacgatttgcggcaatacggcttctttcaatggtgggggagtaataaatattactaacggaactgccaattatggcgctgacgccacctttacaaac

SEQ ID NO: 180924 - DNA, 808 bp, Arabidopsis thaliana landsberg
agattcggtggtcgttgtttcattccaaagagattcagagaatatgtgggatatgagaaagttgtagagcttcaacaagctggtgagcaacacaataccaatgactcttgacaatacatatatagacacacagttttgttgtcatacaattcatttatcttgttcttaactgttttaggttgtgtaatatctacagttttgtgggaaagcaaattgttatagagtgaatataaacttcaataaaaatggaaccaaattgccaaagctctaactttgccttctgctgattcaatatgatagtacactgcatttgaaaaaagaacagaggattctcttgtagactgttctatagatgctatgaaaacagagtctagagagtgttcttaacaaaataaaattttggtacatttggtactaataagtattgctgaaggaagactcaaccgttaagaaatcacattcctaaatccttgtctcagaagacatctttggtatcatcacgtcaaggaagaataagaaacttttagcatggacttcttgtgctgagaatcactgtggtttcttcatcgatttcaattttgtcatctttcatccgctgcaacagagtatcaatgttacgtccgccttctcttatatcagccttgacaagagcatgatacatctgtttgttcacaccgatacaattcctaagagatgcaacaaagctttctacttctttcaaacttccttcatccccgacccaactcaaaacacttgtaaccagcgtcaatccaggtcttcattttctgctacccacttttacacctaa

SEQ ID NO: 180925 - DNA, 241 bp, Arabidopsis thaliana landsberg
cttttgcttggaaatgactcaagaagattcatcgcgcggattaacaagtgtaggcagaaacgacttcacacatcggtttgctgatagatataaagattggtcaaggacaaccggtgacgatacaaaacaggaggaagatcgtttggaatctgattctgaacttccagcccatgacatctatggtttcgagaatgagatcaaaacattgcaacacttcttgttggatcaaaagtcttacaag

SEQ ID NO: 180926 - DNA, 644 bp, Arabidopsis thaliana landsberg
gtcgctctgcggtctctaaatttaggaatatgcccaaaattgagtgtgctcaatatcgaagcaccttatatggtgtcccttgaattgaaaggctgcggtgcactgtctgaagcatccattatgtgtcctttattaacatctttagatgcgtctttctgcaggtaattatttgtttttttttttgtttttttctctatttatgtgactgatattatcgtgctgctaatcattttcccccattccagtcaactgagggatgactgtctgtctgcaaccactgcttcttgcccactcattgagtcattggtgctaatgtcatgcccgtctattggctctgatggcttgtcttccttgaacgggctcccaaatttgactgttcttgatttatcgtacactttcttgatgaatttggaacccgtcttcaagtcctgtattcaacttaaggtaattaaggcattaagacttgtatgatgctggatgtttccctttccgtcagcagtagagcatatacattatcttgccaatgaaaacttcttgagttatgttgttgtgtgcattctttgtatatcagctattcatgattcatattgcttttgggcttactttgagactttttattgtttaggtactcaaattacaagcct

SEQ ID NO: 180927 - DNA, 54 bp, Arabidopsis thaliana landsberg
atgaacatagagcgtggggaccttgaagcagaaggtctgtatggtgacagaccg

SEQ ID NO: 180928 - DNA, 706 bp, Arabidopsis thaliana landsberg
atggaagataagccttgtatgtttcatgatgctttatctcttcaagcagctgagaagtctctctatgaagctctcggcgagaagtacccggttgatgattctgatcagcctctgactactactactagccttgctcaattggttagtagtcctggtggttcttcttatgcttcaagcaccacaaccacttcctctgattcacaatggagttttgattgtttggagaataataggccttcttcttggttgcagacaccgatcccgagtaacttcatttttcagtctacatctactagagccagtagcggtaacgtggttttcgggtcaagttttagcggtgatttggtttctaatatgtttaatgatactgacttggcgttacaattcaagaaagggatggaggaagctagtaaattccttcctaagagctctcagttggttatagataactctgttcctaacagattaaccggaaagaagagccattggcgcgaagaagaacatttgactgaagaaagaagtaagaaacaatctgctatttatgttgatgaaactgatgagcttactgatatgtttgacaatattctgatatttggcgaggctaaggaacaacctgtatgcattcttaacgagagtttccctaaggaacctgcgaaagcttcaacgtttagtaagagtcctaaaggcgaaaaaccggaagctagtg

SEQ ID NO: 180929 - DNA, 380 bp, Arabidopsis thaliana landsberg
gattcatcagtttggattgcggtttgttgcccaacgactctccttataacgacgacatgttcgaattaacatatatgtcagatgatggctatgtccggggtggaaaaactggtagaattgggaaggggcaagaaagtgacaactttaagtcatctttgaggctgagatactttccagatggaattcgaaattgctacaatctcaatgttacacagggcatgaactatctgattagggctagtttcgtatatggaaactacgatggtcttaataccatcccaaactttgatctgtacctcggatcaaataagtgggcaacggtgaacgaaattttagcaatcaaggagatcatccacgtgatgagatccaactctttgcag

SEQ ID NO: 180930 - DNA, 1103 bp, Arabidopsis thaliana landsberg
atgacgaaattattcgtgtatgatgcgatgacgaaacgtatgtctttagataaaaatatatgggcgttttcagtgaggcccaataagtatgggcatagtccatttgctttttctattaatatcagcacgtagcttcagaaattgatgagggattactatttacgtccaacattgtttcccttttgaaccacctgaaacgctaagtgagcagagctctgttttgtttctattttcatgactttgtgtgttgtgttgtattgaatgtttctctctccctctctcatcatctaatctcgaatctcaatttcttctttattcttcttcttctctctctcctctgttctatctctttctaacactcaagcctctcacggtcacgggctcacggccatggaagagaactcaagtaaaaaaacgctatcggaaactatgagcttacaagatacagttctgaagtttttcagagtttacataccaaatcaaaccgcggatgacatggtagtacgttgcttaaatctcttagaacagagcatttccgttctgtttttgcaagatcttgtctttttccgagttttgaatgatatgtattgaacaatcttgaaagttttagctttagcagacattttttgagttttaggttgtgtgtttatgtgatgtgacaaatccatcggtggtatgatatggttttgaaattatgttagtgttgttcaaagtaagatgtgtgtttctctattgttttgtacagaatctacctttggtttcagacaagatctcagggaagcctcttcctcggaaggtaactgttaaaagtgtgtcctcggggaacatttggaggatggaaatgaaagcaaacggtaacacagtgtttctccgagacgggtggaagaaaatcgtcaaggacgagaatgtgactgagccaattttcttggagtttgagttcgatggttatggtgtgttccacttttgcgtgtacgagtatggttcaatgtgtaaaaggatgagatctccaatggaaaaagaagtgattaaagtggacagtaaagaagatgtgcttgtggggaatgaagagagcccaaaagggcctgaggaatcgccaagaagag

SEQ ID NO: 180931 - DNA, 219 bp, Arabidopsis thaliana landsberg
ggaaccagagttctacatgctacactccacaacctgcattccaaaagacctttcctcagaccaactttcagaagacttatggtaattcagcttgagcagattcttgaggaacagtcaaagcttgttgttgagtttaatggcaagtttgatgctatctacacagaccttaatgggaagatcgaaaatttgagctctcatatgaagaagctagatgtatag

SEQ ID NO: 180932 - DNA, 69 bp, Arabidopsis thaliana landsberg
aactttaggttggctgtaatagcggtagatcgaatcaagtttacgtacaacaacttgttcgataattga

SEQ ID NO: 180933 - DNA, 140 bp, Arabidopsis thaliana landsberg
gggctggtagagatgaaattgatgacactccatacttcgagatgcaggatagtaatggagatgttgaccatggagaccgtggttatctcctctttccccgtcttccatactctctggtgctcgagtatgttgagatggtg

SEQ ID NO: 180934 - DNA, 1677 bp, Arabidopsis thaliana landsberg
atgttgttgctggtggactgctccagctgtcgtacgccgcttcaccttcctcccggagccacccgaatccgctgcgccatttgtcacgccttcactctcatcgcccccgagccccgtctccaatctcacgcgtcggcgagcccttttcctttccccaactcatctccggctccatccactttcatctacccgccgccaacaccttctccgtacactcacgcgccgcatgcaccgtctccattcaaccacgcgcctccagattcttacccgttcactcacgcgcctccagcatcgtctccattcaaccacgcgccgccgggtcctccaccgccggtacatggacagaagcgagcggtgatagtcggggtttcttacaagaacacaaaggacgaactcaaaggatgtatcaatgacgcaaactgcatgaagttcatgttgatgaagcgtttccaattccctggatcttgcattcttatgctcaccggtattattctatatcataaaatgtcataatttgtgtaacacgtaaaagtaatgttaaaagtgtcaaaatgttgtagaagaagaagcggacccaatgagatggccaacgaagaacaacataacaatggcgatgcattggcttgttcttagctgcaaaccgggagattccctcgtctttcacttctccggtcacggcaacaaccagatggacgacaacggcgacgaggttgacggcttcgatgagactcttctcccggtggaccacaggacttcaggtgtcatcgtggacgatgagatcaatgctacaatcgtacggccgctcccttatggagttaagctccatgccatcgtcgacgcttgccatagtggtaccgttctggatttacccttcctatgcagaatgaacaggtacgaattcaataattattgacttcttgttatgtacgtgtgtatgcagacctcgatagcttgtagaaatgtttaaaaaaacaaaaaacaaatggagaccatatagttcttatattggttataaaccctataccctatgaactaacacaaataagaaactgcttatgcatagcacatgtaacccattttttttttttttcttgatccttcgttttaggctaggaaactatgaatgggaagaccatcggcctaaaacaggaatgtggaaaggtacgagtggcggtgaagtcttctccttcacaggctgcgatgatgaccagacctcggctgacactccggtacattcccaactattggccatataaataatctctctagatttcaaacaacttttgatagtatttagcaagtccagtcaaaccatccacattttatagtttcaccgagatgttatagtcttatagtaattaccccataccttcattctaaaagtattcctcacaaagaaacgtgtgtgcactacagcaattgtcagggagcgcatggacgggggcaatgacttatgcattcattcaggccatagaacgtggccacgggatgacttatgggagcttgctgaatgcaatgagatcaacggttcatgagatcttcgacaaaaacaaaggtagagagcttgtggaagtgggaggtgctgattttctctctactcttcttggtttgctcatcttaggcgcttctcctcctgatgaggaagaggaagtaaaccaagcccctcaaaaaactcag

SEQ ID NO: 180935 - DNA, 162 bp, Arabidopsis thaliana landsberg
atggatgaccttgccattactaacacgatcggtgttacagcttcagatggagcccctctcgacatcgccattcagggagagaagatcgcgctcctggcccgatctggctccctggcaaagcacggcaccagagtgagagatgctgggggtggctttattatg

SEQ ID NO: 180936 - DNA, 196 bp, Arabidopsis thaliana landsberg
ctggtgaaacaatatgcgttacaaaaggtgttgtaactggagttaaaactggaaattaccttcgaagttccactaaactactgacaatacatattgacgcaactacctacggtggaaatagtggtggcccggttattacaggagacaaagtccttggtgtactatttcaaattcttggagataagaaaagtacagg

SEQ ID NO: 180937 - DNA, 468 bp, Arabidopsis thaliana landsberg
cgtggccaatctaaaaatgggtatatctacggattaggtagtgttcaataccgggatgtcaatcgatcagagaaacatgttgttgctatgtctcagaaccttgacaatgagttgcgcatctatgatttggaaaaaaccaatgaggcactcaagaaaaacaatgaagcactcaaggaagacatgttgctgttgaagtctggtgtaggcaaggtaatggacgaattggcgacaacccgacttgcgctgaatgcgattatgaagtctctgggagttacaatcattccacctgaacttgttgctggtgctgccactgctggtcttggtgttcatggttctgctggtggtcatgatggttctcctgctcctactacttctcctgttgtctctcctgctgctagtccgaccataccacctacaagagcacaacaaagccctttggatgcttggtgtgcttcactaggtttataa

SEQ ID NO: 180938 - DNA, 374 bp, Arabidopsis thaliana landsberg
atcatacagctggatctgagtctccaaaggcggaagctgaaccggatgctaaagcgagcataagcaatgaagtcagcaagggactagagactgacgtcactgtgctggatgagattttgtcatcagcaaaaacagcaataatgtccgaagaggcagttactgggagcagcgataaacaactacggaaagaggtaagaacgtggattctacattttgagatttgaatttccctctcataaacgtgatttggggtgtgttctttttagggatgggccactaaaggagatagccaagacattgcagaccggttttatgagcttgttcctgacatggcgattgaattccctttcgaattggacaactttcagaaggag

SEQ ID NO: 180939 - DNA, 2245 bp, Arabidopsis thaliana landsberg
atgttgacatttcgaaggtgtgtaaagaggatagagctgtattcaccactaggcagcaagagttaggccaaactgtgaaaaaaaacaaaggagagaagggtaagagtaattctcaaaggagtggtgttaagcaggtttggcaaagtggaggcgtttatacattggatcagtttgaagctaagtcgaaagctttctacaaaacccaattaggaacggttaaggaactggcaccagttgtcattgaggcattgttctggaaagcggctttagagaagcctatatatatagagtatgctaatgacgtgcctggctctgctttcggtgagccagaggatcatttcaggcatttccggcagaggaagaggaggggcaggggattttatcagaggaagacagaaaataatgatccatcaggtaagaacggtgaaaagtcatcgcctgaggtagaaaaggcaccccttgcttctacaagtttatcatctcaggattcgtccaagcagaagaacatggatattgttgatgaaatggaaggtactgcaggctggaagctctccaacagttcgtggaaccttcagatgattgcacgttcacctggttctgttacacgtttcatgccagatgacattcctggtgttacatctcccatggtttatatcggtatgttgttcagttggtttgcctggcacgttgaggatcatgagcttcacagtatgaattatcttcacactggctcaccaaagacttggtacgctgtcccttgtgattatgcgcttgactttgaagaggttatccgcaaaaattcttatggcaggaacattgaccaactgggtacgttctttttgaaaactactgctaaagatgatatactgtttctgtatttatagagatatgttgttattataatgcatgtgaaaaatgaggtttcctagaatgattaccgcattgacgttttctttattagcataattttcctactttgcaaatgaaaatatggctaacattgaccatggtatgaagagagtttattaattgtggttaattgtcgtaggtcttattgcttttgcgctatgatagatagaagagattgcaatactcttaggaaaagcattgtcctgtttctcattaactcttctctgctcgttgttactgtcagctgctctcacccaactaggcgaaaagacaactcttgtatcacctgagatgatagttgcatctggcattccctgctgtaggtaggccttttatttcatttaaactttcacttctgttatgtggagatatgaggcagtgttttcttataactacttccattctctgctatatctatgtttatttatgtttgtttgcctacgtaggttggtacaaaatcctggtgaatttgttgtgacttttccgaggtcttatcatgtaggattcagccacggtaaagtgccttttttttcaaacatttctttcaagtcttagtaattctgttcattccatttgcattctacaaagtggttgagaaaatgtgagaaattgaataaagctgtggagaaaaagggtgtttatcgacatagcatgaggtgaggattgatcttccaatcagaagaatgaagaatcatatttctattgggtagttatttcaggcgcatagtaaaaaaagtggatagtttggcttaggttaggaatacgaattacaaacttttcggaatccataactaagcgggtttaatataacttttcctaggttttaactgtggggaagccgctaattttggaaccccacagtggctcaacgtagcaaaggaagctgctgtgcgtcgggcagccatgaattatctacccatgctgtcccatcagcagctgctatatctcttgactatgtcctttgtttcaaggcaggttaccatggtctctttgtcatataacctgtacgttttgatggaccatgtcaatgctcatattcttgtaattattacattttccagagtgccacgatcattgctaccaggtggtcgtagctcccgactaagagatcggcagagagaagaaagagagttccttgtgaaaagagcttttgtagaagatatattgaacgaaaacaagaatttatctgttcttcttcgagaaccaggctctcgtttggtgatgtgggaccctgatttacttccgcgtcatagcgcactggctcttgcagctgctggagttgctggtgcttctgctgtttcacctccagcagtggcaaaaaaagaacttgaggagg

SEQ ID NO: 180940 - DNA, 147 bp, Arabidopsis thaliana landsberg
tacgtaccgcaagccctacggtaacactaaggagatcgattgtgttcgtcccggttaccagattaatcggtatatccaaagaaatcttctgtttgccatgtccgctacctgtaacagcaacattgtgtatgcaatagaaatcatttg

SEQ ID NO: 180941 - DNA, 57 bp, Arabidopsis thaliana landsberg
atgttggtcgtctttaagaagggtaatcttcaaacaggaaaggtactattgaagaag

SEQ ID NO: 180942 - DNA, 2324 bp, Arabidopsis thaliana landsberg
cgactctatttttcctcgccgttggtgttttttactttctcaaaaacaccgccgctaagtacttcgacatcggagccgccgccgccggaggtttcgacagggacttcatggcggttgatgctgaggattgctctgtctgtgggaatttttccaccaagaaatgctcccgctgcaaatccgttcgatactggtatgccctcaaattcagtctctttgttgggatcatctcgagcttagcgtaattgaaagattgatttagtttgcttgctttgagcttgcgatgtgtaattcttttcaattttcaaagtcttgagcttttcaatagaagaatcatgggtttggaagttgttgcttagatacttttgtgaacttaatttgtatgagctcagatagtttggattatcttggtgtttcttcccgcggctttgctccgagttttcgctagtgttcaattgatgtttgagctgtgatgttgtttctttattttctgtagatttctttgttcagctacttgttttctttgtaacttctctcacaaattcgaaaatggtataaatttttcacattgttacccaaaaaaataaaattggttttagtgcatattttcgaaattgagtatctttgtctgaatggtctgtttgctatcagctcagcagagtgccaaaggtcagattggagttcgggtcatcaaagaaactgcagggattatgggattactacattaacaccatctgcaaagaatggcataaggttcagagcttctccattcggggatagttccgcgtctagtaatgcactcatttccgaacggggccaaaacaagagtagtctcaagccaagagaagtaatgtgtcttctttttcctcatgttgacactctcttgatagagtctttgtgttaacttgtacttttgttttgcatcttctgcaggttctttttccatatgaagaatttgttgaatattttaactgggacaatccagaattggctccctgtgggctcatgaattgtggaaataggtttgtgttcatctactttctagtatatcttaacagtatcagttgaaggaatggattttttttttctcccttgaatatgatcttctttactcctctttcagttgtttcgccaatgtgattctacaatgcctttcctggacacgtcctcttgttgcatatctgctggagaaaggccacaagagagaatgtaaaacttctttcttttcatttttgcactaatgcttcaaactctttcgtttgtggttttctgtattcgctttagctttgattctacgttttgtttgacaggtatgcgcaacgattggtgcttcctctgtgaatttcaaacccatgttgagagagcgagtcaaagtcggttccctttttcaccaatgaacattatttcacggttaactaatattggtggaactcttggatatggaagacaggaggatgctcatgagttcatgaggtcagtatctcttgctcatgaaaatagctaattcctagtggtgtttagtctgtgaatctcccaactgatggatttatacaactcacatactgcaggtatgcgattgatatgatgcagtctgtttgccttgatgaattcggtggagaaaaaatagtgcctcctcgttcacaagaaacaacacttattcagtatatatttggaggtctccttcaatcacaggtgatatttcctgatctaaatatcagatgtccatctattaaggcaagcgagcaatagatgaaattccactctctagaattattgggatcttacgaaattccatgttatacatatacatgttagaattcaacatgctacttattttgtctttagctggctgcctccattgagaatatatgtaacttgatttcagttgataaaaacgatcaagatccttcctgtgataaacttacattaacttctaatgttcctctgtgtgtggagctttttccctgatttgctgcattttcaaatttccaggttcaatgtactgtttgcaatcatgtttctgaccaatatgaaaatatgatggatctaatcgttgagatgcatggggatgcggggtctttggaggaatgtcttgatcaatttacagccgaagagtggcttcatggagataatatgtacaaatgtgataggtataaaagctatgtttcttaagcaatgtgttagttgattagttgacaaattgactaagtttcttaaacccgatactattctttctgtccaggtgtagtgactatgtaaaagcatgtaagcgtcttacgattcgacgcgctccaaatattcttactattgccttaaaaagatatcag

SEQ ID NO: 180943 - DNA, 457 bp, Arabidopsis thaliana landsberg
atggtcgttgtcgaaaagcctgaattaatccctggatcgctccggtggcactatatgcagttttctaaacaggtgcgaagtttaggcaatattgtttaaaatacacgtagtaaaaaagatactatgattttcatgatccgtctgttgccggtgcctaatacggcagcttctccacgatcagcgtttttttgaagcgtccctgctctacaacctgccggaatataaaggccagcttacggtatgctttcacttccctgccaccctgagtggccgattgccagtaagggcaggaaagctttaccagccggacggcctctgcttttgcggccgcagttttatataacaggattctgatcccggatattcctccacgcggatgcacaatgaatctcaatatgaccgtgtccgcaaatgggcttcggcttgcagtagccggaccaaagcggggaaaaaataa

SEQ ID NO: 180944 - DNA, 953 bp, Arabidopsis thaliana landsberg
atggaggagcttcgtgggacgatggcggtaattacgaaggtgttagaaagatatgcattgggacaggtgagattggtatcgtttctgtcaagtttctgtatgaaaatgacactcacgagatagtagtgggagatcatcatgggaacaagaacctgattaaacatgaagaggtgattactacttcacttttcttaattaattgtccaattacgtaccctaacttagttatataattgagcttgatattattatacttgattttctaatttttatttgtagttcgagctggattatccgggtgaatacctcacattagtggaaggtagttatgacatagtacctggaagtgaggaaactgaagttataatcatgctcatgtttacgaccaacatgcgagcctctccatgttatggactcgatgataacccaagctttgtgctccaaaagagaggtcacaagatcgttggattccatgggaaatcaagtaacatgcttcatcaacttggaatccacgtactccccatcacccacccctaatcatatttatatgacttagaatgaaacactcttctcctatgttttcattaactttgattcgtttctcatctttcttttttttccctctgttttgattttgtttctttttctctgtatttgaacttttgaataattcatgttttaagaaagtgtatggaggctcattgtgactatctgttttcaataagttgtttccaaaagcaagaaccattttcaagattcctggaaaaaggatatgttctatgaatctcaactcttcttctaattagtttagtatattcacaagtcaactgactaataaacatcacattgactggcttgagcatttggatttcggatcgaattcggattcggataattcggatgagggattttattatgcgttcggaatatatgactattcggaaaaaacgtga

SEQ ID NO: 180945 - DNA, 643 bp, Arabidopsis thaliana landsberg
atgccgagagtgattagcattgacgatgatgatgatgagacagaaaatgttcagaaagctgggagtagttcaagcggtaacttgcaaacatctgcagaagtggataatgacgattgccaattcattcaggagaagtgtgctacttttagattttcaaaatgcaaacagactttctctacaatgccctctcatggtattcgatttggtttaggctctgatacttatagtgacttttccgagagtgactgttctgattgtgagattttagaagggtctcatagagatgtccgcgagcagtgggaacaagcagctctcttgagaaaaatgaagaaagcaggtaaagctggtttgagtgaggaggctggtccttcgaatctccactgtgacactaatttcgagcctggttttgaaaggagaactgaacaacatgatcaaacgtctttcttctttgctgcaagaaatccagatggtggaaaagctggtctgactgaggaagctggtccttcaaatctccactgtgacaataatttcagacctggttttgaaagtagaactgaacaacatgatcaaacatctttcttctttactgcaagtaatccagatggtgaaaaagaaacctcttctactttctttggagccgatg

SEQ ID NO: 180946 - DNA, 618 bp, Arabidopsis thaliana landsberg
gtccactttgagctgcagcatcatgctcctaacctgaagagaataatcgatgaccaacaccagcggcttgctgaggcaaatgagaaaatatcaaaagttgagaaaaaccaatcttttctggagaaaaggattgacaaagcaattgaaagacatgattctcttgaacaatgcttgcaacgtgtccgtagcttgcctggtacacacaagaaacctctgacgagagcagaactggattttaaatcggagctcggtaaatcaaatatcccccataaattttgtccgcaaaaggatataccggaacccatttcatcatcttttcttttcgcttataaatgaaaaattgcagatcaatatgcgggagttgaggtggatgcgcttcaatcatccatcgaaacactgagagcaagagtgaagaagtcaactcaaaaatctcacaagggcacagtagtcgcagctagtcagaaaaagcagtattcaaagaaaaacttaattcaagatacacaaatgtcacagcttcagtccacactcgccaaactatccctgatgaatagcgataactccaagaaagtcaagatcgtggaatctgcgctgaaatcgcaagaaagcagtttcatgtag

SEQ ID NO: 180947 - DNA, 226 bp, Arabidopsis thaliana landsberg
atgatctcacaacactctttgtccaatgcgaaattattcttcgcccaactcgaaaatatttgcgagaaacatttctcgttcgctttcgacccatctttggacaaacatttctctaattcaccggattgcgacacgagaacagactcaaacggacgacctggaagtccagggatgttatggagtcccgggatgttaggtattgtgattcccggaatgttcgaaaacg

SEQ ID NO: 180948 - DNA, 462 bp, Arabidopsis thaliana landsberg
atgttcgaaacgattcaagagagtccaaagattgatgcttacgatatgagcggttctgttcttgaggatattagaggagacattgagcttaaagatgtttactttaggtatccggctaggcctgatgttcaaatctttgctggattctcactctttgtaccaaatggcaagacggtggctttggtgggacagagcggaagcggaaaatcgacggttatcagtctaatcgaaaggttctatgatccggagtcaggacaagtattgatagacaacattgatttgaagaaacttcagctcaaatggataagaagcaaaatcggtttggttagccaagaacctgtcttgtttgcgaccacgataaaggagaacattgcttatgggaaagaagacgcgactgatcaagagattcgaactgcgattgagctcgctaatgcggctaaattcattgataaactcccacag

SEQ ID NO: 180949 - DNA, 61 bp, Arabidopsis thaliana landsberg
atgaaattggtacaacggctagcattagaggaggttccataccgccaatcgaagcaccgag

SEQ ID NO: 180950 - DNA, 712 bp, Arabidopsis thaliana landsberg
atgattgggataacacaaccgaggcgtattgctgctgtgactgttgctaaaagggtagctgaggaatgtgaggttcagttaggccaaaaggttggctattccattaggtttgatgatactacttctggttcgacaaggttcaaatacctcactgatggattattgctgaggtaaacaaaataaaacaacttataattgtagcctaattttatgaaattgtgaaaatctattgctgatctctgttctaacaaactgaaaaatcaaaaactgcagagaagcgctgttggatccgcatctttctagatattcagtcattattgtcgatgaagctcatgataggagtgttcatactgatgttctgctggctttgctgaaaaaaatacagcgtactcggtcacagcctgttagtgagaaaactgagtttggtaatgtagcatcacaagtacagacaacaacaagggatgcgaatggtcctcagcagaatggtgtattaaaagggtatcaaggcagaaagttatctccgttgaagctgatcattatgtctgccagtttggatgcacgagttttctctgagtatttcggtggtgccaaagctgttcatgtgcaggggcgacaatttcctgttgacattctttacactgttcatcctgaatcagattatgtagatgccaccttggtcaccatatttcaggttattggtttggtgatctaa

SEQ ID NO: 180951 - DNA, 309 bp, Arabidopsis thaliana landsberg
atggcggtatgcaaacatcggtgaatcagtctccattgaggtttaggttacccaacattaacaatcgtcaggcccctgtacgtccaaacgcaaacgcaatcatacccccacaggtactatttcttttatgcaatgaataatgtatttatatgaagttttcatcaatattacacaaatgaatacacatgcactacaaaagcattattgttaatatcaatgttacagggtgaaattttaggatgtcgacgaagaagttacccaagtcgatttgaatttggacaatcatcatcatcttcggctcaacgaagg

SEQ ID NO: 180952 - DNA, 353 bp, Arabidopsis thaliana landsberg
atggccaacacagttgatggcaacgacgacataattgatccatacgagcatttacagtggactccatttgtgggaaaagaattttcttcacagatcgacgcaaagaaattctataataaatatgccttcaataaagggtttagtattcgtgccgctacacatacaacatcgaaatcaggggtaatcacatctagattgtggttttgctccaaggcaggattttctaaaggtgtcaaggaagctgtaaaattaatgcagactactggaaatcaacaaagcccccaaaaggaggttgctctcccccgaaccggttgcaaagcacgtcttagagtggcattgaaggatggagtgtg

SEQ ID NO: 180953 - DNA, 420 bp, Arabidopsis thaliana landsberg
cattggagtttaaccttcgatgctcgaagttcatgccagacttttctatggtcggaatgatggatgaagatatcccaaacgtgccaggaagtgggccttcaccacctcgcagcttcttcaggtcccaaatccgaggtccatgtgcactgatcaagggacttttggacagagaccaagaaatcgcgatggcattcatcaaagctcttacggttcagcatcagaagcgttcgttggaaaagaggaagctccgaaaaaagattaaccgaatgttacgtatagtcaccgtaatatcaagggaacttcacaacctcaactctcatctcggggattggatcgaacttggaatctccgaattcgctcgcatcccggattgtatgatgccgatcatctatcttgctggccaaggagtccaagtgtttt

SEQ ID NO: 180954 - DNA, 970 bp, Arabidopsis thaliana landsberg
atgaacagccgatcaagcggagaagtggttccatcggatctatgggcttggcgtaaatacggtcaaaaacctatcaaaggctctccttttccaaggtattacattaactcatcataccataatactcacatgattcgaaactaaactttctttcaccaccacatttttcatggctcaagtttttatattcgtatgttgttacaactctcctctcaaattgtgatattttgttggtctatacaatatactcacccatgaaaataacatttgtttacatatactaattatgataagttactatgacagttcagtcattacgttaactctaaagtaatgaatgacaaaaggaaagaaaaaatttgcaatgatgccgttttaattaacttcattttgtagttttatccttcattttctcatattttgatgataatcttgatgaatattagtgattcataatggttttttattatatatttggctaatctctatggttacttatgattgttgctttcaggggttattatagatgcagcagctcaaaaggttgttcagcaagaaagcaagtcgaaagaagccgaaccgatccaaacatgttggtgattacatatacctccgaacataaccatccttggcccatccaacgcaacgctctcgccggctccacacgctcctccacctcctcctcatctaaccctaatccttccaaaccctcaaccgcaaacgtaaactcctcatccattggctcccaaaacaccatctacttgccttcctccaccactcctcctcctaccctctcatcctccgccatcaaagatgaacgaggggacgatatggagttggaaaacgtagatgatgatgatgataaccagattgctccatacagaccggagcttcatgatcatcagcaccaaccagatgatttctttgcagatcttgaagagctagaaggagattctctaagcatgttgct

SEQ ID NO: 180955 - DNA, 216 bp, Arabidopsis thaliana landsberg
gtgaaacaagatacatcaagagcggttgatagtgatacatccatagacaaggagtcatctatggtgaagacagagaagaagagctggtttattacagaggaagcaatggagagaaaccgcacaatccacggtatatctatctcatgagaatgatcataggcttcattctcttgctggctctcattagcaacatcatatcggtgttacaaaacttga

SEQ ID NO: 180956 - DNA, 408 bp, Arabidopsis thaliana landsberg
atcggagccgtcaagaagggtcgcggcgtctgccaggccctagccggaaacgatgcggcgctaatggcgcaggaggcagagatgatcgtcgaggcaaccaattactttgcgaaagacggcgatacgagcgccgtgttggaacaacggcggcgggcgacagccatcagggtttcactcgggctcgctcccggcaaagtgctggtaaagatcgaaggagacgggcccgacgtgcgatgggaatgcgctttcgcaagcttggaggattatgaaatcgacagggccgcccgaaagacttcgaaagacttcgaaatgtcccgaaagaaaatgctgacgttggtcgaccggtttgaaaggcacatttccgcggatgacggtcattttccgccgccggagcagcgagcttcctga

SEQ ID NO: 180957 - DNA, 375 bp, Arabidopsis thaliana landsberg
atggctgtctccttccacgttcgatctcacagttacccctcgatacctcacccacaagccgctcatgttgatgagcagttggccagattaagatcttctgaggaaacctcaacatcttcaagctcttctatctgtcaaagacttgacaaccttcaagaactacatgagtctcttgacaagcttattcgcctacccgttacacaacaggctctcggtcaagagaagaacaagaaagacgttgagcaacttcttgatggatctctcaagatattggatgtgtgcaacatatccaaggatgctttgtcgcagatgaaagaaggtctcatggagatccaatctattctaagaagaaagcgcggagatctatcaggagag

SEQ ID NO: 180958 - DNA, 449 bp, Arabidopsis thaliana landsberg
catcagcgttgccaagggtcccggcagcagcgtgctgaagtccgccacacgaatcccggccaacgcgccgcgcggcagattcatgtcccgccctccagaatggccagcttcagcacttccatgcgcaccttgcccgacgcggtacgcggcagcgcatcgaccagttccagacgctccggatacttgaacttggcgacctggcgctgtgcgagaaattcgatcagatcgctcagcgtcggcggcggctcggcattggccacgaccacggcgcaagcgcgctgaccgaggcgctcgtcgggcaggccgacgacggcgatctcgccgacgccgggcgcctggaacagcaaatcctcgatttcgcgcgggctgatgttctcgccgccgcggaaaatgatttccttgcgccgaccgacgatgcgcagatagccgtcggcgtcgacgcgcgccag

SEQ ID NO: 180959 - DNA, 464 bp, Arabidopsis thaliana landsberg
atgcttgttcagctgtcaactaacagtaaccagataaagactttacttgaggttcgtttttcagtaacagtaaccttttattgtaacaatgattgcagatttactgttatctgcagtataccatctttctacataaattgatttgagttgtgattattggtgtttgtcaatatctactctattgtatcactctgttatgtactcgttggagtaaaaacagcgtaaattactttgtattctctttacagaacccatcaagatgtgtccataatgaaatatactatgtctaactaattttctttctaatatttacgcatggttttacgtcaaatgttgtgtacgtgtatagctgcattatgtttggtacatacaacattgtgatacgttctgtttttctttgttaggaaaataacgattggggtgagtgggaagctaataccttgcctgatcgatatgcactttag

SEQ ID NO: 180960 - DNA, 446 bp, Arabidopsis thaliana landsberg
aactatgcagggaaaaagcgagaagatgttgaaaatttcatcaatcaaggagtttacgaaatcgaaaagctcaaggaagcggggctgataaaggatattcgctatgatgatgaggtaataccatttctattctcttatgtagattagattcagtaccttctatgtaatcccagaagccaggagtgatgattcttgttattcagtcctttatcatgaacttttttccttgtggatcttttggtatactctcaaaatattgggatggattagttatcatacttataaagattcccctataaatctatacaaagggaattagattccggcccagaactcctgctgatctatataaattactttgaatgtacctgcaggttataacgatgctgaaagagaggcttggagtcgagaaagacaaaaagcttcctactgttgattacaagtaa

SEQ ID NO: 180961 - DNA, 507 bp, Arabidopsis thaliana landsberg
gcgcggacaacgccgcggttgcctccggagccgcccgccgcgccagcctgcgcatggtcgagacgtcccggctgggcttcgattccctgttcgagcgcttcggcagcggctggggcgggctgtccgacgcccaggcgcaggccgcccgcgatcggcatggcgccaatgaagtcgaccacgagaagccgctttcctggccgcatcacctgtggctgtcctatcgcaatccgttcaacctgctgctgaccgcgctggcggtcctgtcgaggctgaccgacgtgcgcatggcggtgcccgaggaccagtcctggacggccgttgccatcatcggatcgatggtgctgatctcgaccgtgctgcgctttgtgcaggagcagcgttcgaaccgcgccgacgaagccctgaaggcgatggtgcgcaacaccgcgacggttctgcgcagcgatgcccgatcgcccgacgcgggcaatggccgcgcttcatcggcgcggacttgcacgccaccgg

SEQ ID NO: 180962 - DNA, 255 bp, Arabidopsis thaliana landsberg
atgctactggtgagattatatatactattatatgcacatgcacatgaacattaagtatccatgtttctcatgaatcattcagatcaaatatctaagccacactcacattgatttagctactgattgttatgatcatcatggtatggacaaatgtgttaaagtgaatgaaagtctaataatttagattggtgtgagtatgttaacttaaatgttacatctgtttttcagccggttttgattcacgtgaattcgtga

SEQ ID NO: 180963 - DNA, 370 bp, Arabidopsis thaliana landsberg
aaaatacctcattttcttcttcatcaaatcaatgtattatgacaggtaaacatcaccttcccaatgtagttgcctggttggcggaaccattggcgccacaactgtttcagatattgttgcctggttgaaagcagatcctgcaattcctccatggaaaaaatttcgacttgctctcattgtccttgttgagggcatcatgttatgtcggacacaaccggttaagccttcaatagaagttgttgagattgttaaaaatgtccacttcttcctcaattatcccttggggccgccacgctttctctcgcacattgcgtatgatcaaagttggcaaccatatcacatctactgcctcacttgtcaccaagcttaa

SEQ ID NO: 180964 - DNA, 281 bp, Arabidopsis thaliana landsberg
ggtcgaattcaatcagatcctgcgggaaaggtggttataacaggccagccagagcagcttgacaatccttgggggattacacccttcaaaaaggtaaaactttcttctatattccagatatgtccattaactgaactgatacagagactgagaaccttcctgtcattttgatatgttttcaccagattgttgacttatcagcaagaattgatccgcttcacacatccgcggtcatgagcatgcatggacggttgttcatacgagttccgtttgagcagtaa

SEQ ID NO: 180965 - DNA, 670 bp, Arabidopsis thaliana landsberg
atggagaatcagacaacaagtctgaaaagaagaaccagaaaaatggagattcatcagtcgataagtctgataagaaaaatcaatgtaaaggaattggttttaaggtttaccatccctgttaaagaatgtccatcccaagtttctcatggcttaaggggctatgatggtaatactctattaaaagaaacattattagattactttccctctttaatggaatcatatatatatggtctcgatcataagaatcaatgtcaaatatttaatcatttatcattgagtgaaattgtactataatttaacttaagcattatctagtctggtttcagttttatttttctttcctgtaatctagagaagttgtctattaattcccacaatgacataacgaatagtaatctctagttcttaaagcatcaattaaaaaataggattaccgtttttttcttcttactcatgactcataagtagctattatcttatttgtcttatagggggtgagcatattaagacagagataggagacaataaagttgttgtgtctggaaaatttgatgatccgttgaagatattacgaagagtgcaaacgaaatttagtagaaatgctgagatgatttccccaaaacataaccctaaacaagatcagaaggagccacagcaaaagaaagaa

SEQ ID NO: 180966 - DNA, 1702 bp, Arabidopsis thaliana landsberg
atgttcaatgagaatcaggtgtacacggatcttatgttaggaagtgaacctatgatgggagctcagtaagttgtaaaggtagttgatgagatctatggcactgttaaagaaagtggtgagagttccaagacaggtggagttatcatagaatacatcaaacaagattcaaattcagatgatatgattacttaagaaccgtctattgccagcattgatctcaagaactatcaattggccagagagagtgttagaagagcttcaaaaccaccatagaagttggctaattatactcaattctctgttgcggtgtgatatacctctatttttttactgttttagctataatttaggtataggtattagaatctttttgttatttctatagtcattttagagtctattcatgtacttctaagatcaggacaagaatggagataaggaggcattttggagcaaaacgtaaagaaactaagttgaaggacgaattcagttccatatcaagttgagagtgtcgaccgacacactcttgatgttgattgacaccagttgcggcccaacaaaagtctaagacgatttagactttgaagaattggaagtttgccccaaaagatttccttatttacattatatatatatatatatcaaggtcatcgtttagacctaacatttattctaagcttttaacactcattttctataagactaagattttgaagaccctcttcttagagtttcatcagagatttcaataccttaccgcgaagagatcttttctaaactcttttttttttaattactttatgctttctaattcaaacatgttatctgtttctatgatcatgtttgagtagtatgcttgttaggtttcgggtttctcattatgtttatatatgatttattagatcgccaacactgtaagatatctgtaggattcttcatctttggttgttcttaacgctagttttagagtagctaattagaacttgatcttaggtaataggtagcattccaaagggcatatattaccagaactatcattagatgagccggggttttagatgtgtactaagaacggtctatctacttaggtgaacttattaaacttgattataatgcatgtttagatttaggtatttgcggttactctgtattagtgatttgagttcaagaactgtttattaacatcctagtcattattagatctactaatcatctattttctgagaacttccctaaacttaacgttttaatatcttgaatttacatcctcataatctgctattgctagcttttgttttattttattttcttacttattgtttagcttaatctcgacactataacctattgtgtgcacaaaagaactttgtggaaataagtccctaagtattagaattgacctcttattagagaaagagtagtctagggttaatttgaacacttatcaaatttggcgccgttgccaaagttcttgggaatgaccattaggttttgctttcgagattttgtctagatttttattttccttttgttgcctactcctttcttgttttttttttcttttctgtttttcatgtgtatatataggctcacaagaatcacgaaagataaggacctcgtcaatctgtcaacacttgatttgcgtacacaagaacgcaccaaccgaaaaactcagagattagtaccagtggttaacagataa

SEQ ID NO: 180967 - DNA, 1159 bp, Arabidopsis thaliana landsberg
atgaagctaagaccactcgtgagttctcttcaacggctacaagagatatttgtgtgccttcactcattctagaagctccctataggcttctcaatgtgttcggcccaacaccttgtagcttacacacaacactcggcctcttttctttatttgtacggacggatgctctttattaggtcttgctcaatagctcttgctcccgcaatgtcataactgcattcttaagccttcgtagacatttaaccaaagaggcaatttccattgacatctttacatctgctagcttggtagagcacatgcacgaggacctctgttggcttgcccttgacaagaatgtagctctcgttgtacttccttttcaccgttcttggtctgttgaccgctcaaccattgtctctgacgacaaggccatgcagaatctcaaccacaaagtcttgaaaagagcgtcttgctctgttggaatcttcgtctaccggaaacctttatgggaatctcaaatgcacggctcatgttacaaggtacttgttttttttcttttgtaattaagagatctcatggttaatttttggggtcgtctggcttccaactcaaaacaaaccgacgattagtatatttggcccatgttttttctatactagtgttggtacctacacatttcttccgatgtgtgatcttaacaagttctaaactggtctcgtggtttgtatttcaggtgtgtgcaatagttgtgggagggaaagacgataaagaagccttagcattcaccagccgtatgaggagaaacaagcagacaagcgtaaccatcttacacctcatacctcaacttactaccgaggaaagcgaagactcggtgcagaagttggattacgatgacataaaagagataatgaagactgaggattcaaatgaaaatgattcatggatatgtatagaaaaaagcgtcaaagaaggggctgagacttcagtgatacttagatcaatagcgtatgattatgatttgtttatagttggaagaagtagcggaatgaatagcgcggttacaaaaggattaaatgaatggacagagttcgaggaacttggagccctcggagatgttatagcgtcaaaggagtttccttcaagggcatctgtcttggtcttgcaacagcaacaatattag

SEQ ID NO: 180968 - DNA, 258 bp, Arabidopsis thaliana landsberg
aagttgagtagaatcttaagtattgttagagttgtggtggtgctgaacaacgttggccgtgatgggagcaacagaggaagctgcggcaaccgcataaatgatttgctttatggtttcgcagtcgttcatgaacttcaggaattgaaagatgagtgtttttgccttcaatttgatcaacggcggtcttgtactcctcagggagaccaacatgtattacttcaacttaatcttcataatcaagaggtttctcgagaatag

SEQ ID NO: 180969 - DNA, 503 bp, Arabidopsis thaliana landsberg
agaaggaaacatcacaagtttctgaagatagggatatatgggatatcaaattctgcaactggagcggagcctgtggtgcactcggatcacattgtcccacctgtagaagaagtaccgaaggaggaagctttatcaaacacagaaactcatcaaattgcttatggtcaagaagctccactcagtgtgtttggtcttgtcccctcgttgtcagcaataggccaacccgttaacacagaagcagcggagactcaggtatgtggtatatcttgtcacagtatatgcactctaaacaatccctgtatctattctctactttttcgataactgcttttctctaatttgcagcccggaaattccaactctccagctatttcattagtatcatatcctccagatcagagctccatagcagcagccactcaacagacaaattttattaggcagcaataccctcccaatttcttcccttacggctattactcgccgtattatatgccaccgcc

SEQ ID NO: 180970 - DNA, 399 bp, Arabidopsis thaliana landsberg
gcgctgaccggccgcgtgcgcatcagcggcctggacgccagcttcggcctgaacggcatcagcggcaatgccggcgaactggacatcaaggaagccaaactggacagcacgtccaagaagggcgaacgggtggtgaagctgaattttgcgtcgccgctcagcctgaatctcttgatgcgcagcggcgccatgtccgcgctgcgtggcgacgtaaacatcaccgatccgggcctgcccaagggcagcctccagatcccggtgattggcagcctgacggtggacctgctcaaggatcaggccaccagcaagatcaacgcggtgctggaaggcggcaagttcgacctgagcgccgacatcaccaaactgtccgacacgccgcagatgaatgttgcgctggcc

SEQ ID NO: 180971 - DNA, 265 bp, Arabidopsis thaliana landsberg
cacaaaacgggggaaggctgtaacaaaaaggaaaacgaccacagtctatacaagacgcaaaaacgccaaacacggcaaatgcgtgcacaaacaacattgcgacagcggagccgtcatcaaacactctcagaggaccaatgacagaactgggagacaacgaaaaaccctcaaaaacacaaaaacgaccactaaggaaaacgaacgcgaagaaggcagagaacaacacgagacacagagaaaagccgccagaacacaacgagacgag

SEQ ID NO: 180972 - DNA, 140 bp, Arabidopsis thaliana landsberg
atggcggaaaacggcgcgggcgccgaggggcgacgccgtttccgcggggcccacgcgtcagagagagcggaagggcagacggcgccaacggtcgacggggcggggcgaaccgaccgtccgcggagagaacccagccgccg

SEQ ID NO: 180973 - DNA, 390 bp, Arabidopsis thaliana landsberg
ctaggcgacctgctcaaggaggagtatgtcgtgcagaagggcctcaagcccgacattgagtctctctccagggagcttgtgatgatgaacgccgctctcgtcgacgcgtcccgggttccacctgaccagcacactgaggtggaaaagctctgggcacgcaaggtccgggacttgtcgtatgacatggaggacgccatcgacgatttcatcctgcgtgtggctggtggtgacgactctgccgccgactcaaaattcttcaagaagacccttgccatggtcaaggacgtgatgtcgatgaagaaggtcaaggaccggcgccagatctgcgacaaggtcaaagacatcaagaaactctccaacgagttagctgaacttcgtgccaagtacacg

SEQ ID NO: 180974 - DNA, 282 bp, Arabidopsis thaliana landsberg
gacagaagctacactaacccaaacacagggcacgaccattgcaaagacccccacagtaggagggtaacactctacacagcttatcagccttcccaggaaggagccaaaacattggccctgtgtcagtcccatcagatcttctctaattgccccaaccagacatctggtaggctggatgccatccagaccaatgtccaaatcagcaccttaagaagtcctgccaagctaggaggagcctgggaagcttccccactgtgggaatactgggaggagttcatctgg

SEQ ID NO: 180975 - DNA, 109 bp, Arabidopsis thaliana landsberg
atgtatgaacaccaaagggagcaagtcacgtgtaagcaagagtctaacaatactcatgcgaatctcgagacagatgtacttggacgtgagagttccctgaccaccgcag

SEQ ID NO: 180976 - DNA, 147 bp, Arabidopsis thaliana landsberg
aaaagaagtagttttgaaattaaggattttgaaacggggatgatgaatatgatgcgcatgctgacgaacggaccactcccaaattcagatcttgtacaacagtccacctcactttcagaaggatggctttcacatttctatttttag

SEQ ID NO: 180977 - DNA, 1044 bp, Arabidopsis thaliana landsberg
  unsure (1)..(1044): unsure at all n locations
aaaagtcctaatctttgaagatcaaacagttctcgttctcgttagtttggatcttctgaggagaacaaatcttatctcacttctacatgtgaaagaatccaaaaggtagggattcatatagtgatatgaaatccaagaaaattgatgggagatagtcaagattctagaaaaaaattgattctttatctctttagaaaattagatgtttgcatggttagtaagtcgatggaaagtctgtaaataatgttgcattatatatagataattagaaccaaatacattcctagttcgattagaattacttaatttttcttctcctttacttttgtatgcctcgaccaaaagcaagatactgaccttcattaattccatgaagttggttagtttgaaagtaaacattaaaagaataaaagtaaaaaagttagtatacagaaaagattcgatttactaattgggaatataaaattagataaaatctaattaaacttatatgatacatgtaaatccactgcattttgccatttacatataagagttttttcaccaccgatcgattatcctatatgtggcttcaaaaatgataacaaaattagttgaactctatatacaagaacgttaacttcattgagagggatagtgtaattccgttttcttngaaggncagttcatggaagctttagaatgatttggacccaacgggcggcattataaaggtcaagaagacaagagtagtacagacatttattaaaatactttttttggagatgaaagtctttgcatgctttgtctccttctcatctccaataattcaagttatcaatggatcacatttgggtatcaggattcagattaaatagaagataaagctacatatataaaaagattatattataggtcaaatcttcactgatcaaattttgatttaggaaatatttagggatccggaccatgtttgtacatggagcagtggggccattttcctataaatcttaataaatttttctttttaacagtagccttgtgaaccggaggatcttagtatga

SEQ ID NO: 180978 - DNA, 327 bp, Arabidopsis thaliana landsberg
atgggtccaaacgaagatataagtatttttgaccatccaatattgtatgtcgcagcaagtgcattaacaggatcacaagtaagtatatagcatatgaaaaacgtcttatatcacaagtataaagcatagatagatatttatgtttgttgttttcttttgctgaacaaggtattcaatatccatatcgtgagctacgtgaacaagattatcatcagtttagctgtcgatgcaactgtgattccagatcctcatcgactatgtgatgatatggtagaatcgcttaatatcatcaaatctgctgcgttggagagaggatcccatatttaa

SEQ ID NO: 180979 - DNA, 489 bp, Arabidopsis thaliana landsberg
ttgaaaacatttactaccaggtacggtctgcctcatcttttggatatgatgatatactacaagctacgaattcattttatctgatcaagtttcattttcacctgaaaaaggttccttttgaagaggttcctgaccttgtagctagtcggagagtattattacagaaagggtttgcctttgtagctggtactcaggtaagtaatgctttctatttcaatttgaaacaaaacttctcttatgtagatagtagtgtctctttcgtttaactcatatttgcttatgtctttgagcagttggtttcccttgttgtcacacaatttcgatctcatctatcaaaggccctcattctaacaaacaggttattctggtttatatgaatatttaaaagttcttctcatatatgtcacaccttagtaacaagattttctttttgtttgcagaaagtggacaactaccattcgagaacgagaaaaagacagactaactcca

SEQ ID NO: 180980 - DNA, 351 bp, Arabidopsis thaliana landsberg
gtgtaagccggtacaagaactcaccaacctggaataaggtatggccgctgtacgaagccggcgacattacccagcactccgtaggattcactgtcgtaaaggagcaaaaacaacccgattacaacgaaatatcagaggtaggactatgggaagggtctgccgtgctttggggcgccaacgatcaaacaccaacgcttggcgtatacaagtccttaaccaaagacgagctgcgcgaccgtattaaagacgggttttcaaggctcgcaaaaggtgtaaagatggaggttgaacacagcctcctgttaatagaactcaaacagttagagcaagcatatatcgaaagcatcgaag

SEQ ID NO: 180981 - DNA, 84 bp, Arabidopsis thaliana landsberg
atggcccaaaaattggatgttaaacggggaaggggaaataagtgggatgatggatccaaccatgatgaagtagcaaagatatat

SEQ ID NO: 180982 - DNA, 2165 bp, Arabidopsis thaliana landsberg
atggcaaccgaaaccgtattagccacggcggtgagcaatggcaaaagcaaaggatgttgcaagtccggtccaggttacgcgacgcctctcgccgccatggccggtccacgggaaaagctcatctatgtcactgccctttactccggtaaacatttcattttctcatcttcaacttatatataaataaatatattttttttgttaaacattttcaacttatatttttattcaacaatttcttgctattttgagactaaatcttttttttgatataaaaaaaaaaaaaaaaatctgacttaatcttatacttttaacgtttaaagaatctttgttagatcccatggaatctcaattgaatcacataacaatgttaagtttcatggacttgtaactcaagtcccttggcaatagttggcttaaatccgtttaatcttataaaaccggactacgtactagtactaggtaatgttttgagagcttttgctttatttgattgtgttaatttaggaacggggcgagacaaaccggactacttggcaacggtggatgtggatccaagctcacccacattttcaagcgtcattcacagactaaaaatgccatatataggagatgagcttcaccacactggttggaactcttgcagctcttgccatggtgatgcttctgctgatagacgttaccttgtcttaccaggcttaatgtaagatccttacattgaccctctcacatttcttgatgatgaattgactaaaaatatgtttctttcttgtttgaatgaagttctggtcgcatctatgcaatcgacacaaagaccgacccaaaggctccgtctttgtacaaggttgtagagcctaaggagattgctgaaaagacaggattagcatttccacatacatctcattgcctagcttcaggggatatgttggtgtcatgccttggggacaaagaaggaaacgccaaagggaacgggtttcttttgctagactctgacttcaatgtcaaaagcaggtgggacaaaccaggacatggtcctttgtttggttatgatttttggtaccaacctcggttcaagaccatgatcagcacttcttggggtgcacctaaagccttctccaaaggttttaatctccagcatgttgcggatggcttgtatggaagtcatttgcatatttatcaatggcctgaaggtgaaatgaaacagataattgaccttggaaataccggtctcttacctcttgaggtaacattacaccaacataaatgttgatgatctgtgttagtaaccaagtatgtactcttattggggttttgttgttatgtggttgcagatcagattcttgcatgatccttctaaagatacagggtatgttgggagtgctttgtctagtaatatgataaggtttttcaagaacagtgatgacacatggagccatgaggcaagtgaagtttctaaatctttttcttttgtcttatctcaaatctatgattaacctgtgatttaaactggtgttgttttaggttgttatatcggttaaaccgttgaaagtagaaaactggatacttccagaaatgccggggcttatcaccgacttcttgatctccctcgatgaccggttcttctactttgtgaactggcttcatggagacattcgtcagtacaacatcgaagaccctaaaaacccggtcttaactggacaaatatgggttggaggcttactacaaaagggtagtccttataaggctgttggagaagatggcaacacttaccaattcgatgttcctcagatcaaggtttgtaatcaaaatgtataatcttttggagcgttttaactaaagttgaaacaatttgcattctattgaaactgtcttggtgatttcaggggaagtctctaagagcaggacctcagatgatccaactaagccttgatgggaaaagattgtatgcgacaaactcgctgtttagcgcatgggaccgtcagttttacccggaaatcatggagaaaggctcacacataattcaaatcgatgttgatacagacaaaggtggtctcactctaaaccctgacttctttgtggactttggtgatgaaccagacggtcctgcactagctcacgagatgagatatcccggcggagactgcacttccgatatctggatctga

SEQ ID NO: 180983 - DNA, 450 bp, Arabidopsis thaliana landsberg
gtatatgaactggatagattatatcaagttcagaagatattgatgaagaacatggagatcaacaaatttactaccaagaacaatcatgtaaattcaggtctaggaacattcatcagaagagttgacaacgagattgaccggccggcgaaattctccggtggtaataataatatagagattatggatgagagtgagatcgagttaacccttggtccctcgtgttacggtggtgatgaaatgatgaggatgaacaagaagaagaaaaagaactctttgccggagatgatggacgggagtttaaattccggtcgccggagtttttcttcgtcttcgacaggatcaagtaataacaataacaacaatcttgaagaacaagtgaggcaagaaagaatgatgaaacatcagaagcagcagccatggcttcaagcattgaccttgaatgttatttga

SEQ ID NO: 180984 - DNA, 961 bp, Arabidopsis thaliana landsberg
aaattgttgctatgtcccagaagtatgacaactgtacagcagacagaatactcattccacaaagaacaggcccagatgcagaaaagatgcaggtagtacattttgtctgcatatgccgtatcataaaacttgtgcaagtcatttatttttaaaaatgggatctttgggaattagtgttgttgcaaatgctaattctttccggatttttagatgatgtggaaacagccctagctaatacattgaggacaatatacatgttcggactttgcaatttcttatcagagggagcaagcacaatatgattgtagcttattagaatatgtgactgtattattctcaagatagacgcttcattaacaaaaatatgactgcctagaaactatgacagaactggcataaacccaaagggctagttcgtgattatttcctattctgtgtttgaagatcggagatttcttaattgtgattatccaaagggcaagttagagtgtcggaatataagcgttttccttctctttgttccattttggtgtttattttttatttacttaactgtggcctttccgtctgctgatacatgttgaatacgttttcatgttaattattttttcttttcaagatactggatgatgatgggttagctactccaggggagattatcagaccgaatgatatttatataaataaacaagtccctgtggacacagtaactaagtttacatctgcgttatctgataggtattcagttaacttttcaaagtatatgaccataattgtttcttaaaactgtaatcaccaatgtacaattcgttgtgtaattttcagtcaataccgtccggccagagagtatttcaaaggtcctgaaggggagacgcaagtggtcgatagagttgctctctgttctgataagaaaggccagttgtgcatcaaatatatcatacgccatactcgtcgaccagag

SEQ ID NO: 180985 - DNA, 875 bp, Arabidopsis thaliana landsberg
atggtcgtagcatcaccgacggtggaggatggcggtagatacggagggcggtggagagccgtgagggatgaagttacggaggaagcggtggtcgtggctggtaatcgtaacaaagtgggttttgtggctctgtttttggtctacatattgctcttgttcttgttctgattcttttggattacttttttttttgatgtaacagatcgtttaagtctcttcgcctgaaagaagaagaagaagacggtttctcttcgctctttgtgattcgagttttcttttggtaaattgaattcccaaagtcagaagttattttgaaatttttgtggttttgttaatttggaaggtctaatcatctgtgatctctctactctaagagaagattatcaaagagatgagttccgcttctctgcatccctttttcctggttttgatatttagtgccctttttccttattggatacgttcatttgatcatattatatgtagaactttagattcaatatcattcctattaacatttccggttcaaatttgatttttctctggattgtttttggtaggatgttaatctattcactttctggacggaggagacactaattgaagacaaatctttatcattttgcacttgtaatggagaaagatggagaagattgttttctttctacaaggtatcatctcgagtcactagctaccttatttacttgtaagtgctttaacatactgcatgtcgtgttaaaattcagtggctgatgattcttaaagaaacgtcggatatggagaatctgttacaaatggttcacctttctttcttatgtggtatggagggttttgttctaccgctggtttgcaagaggacactcaagttttcaaag

SEQ ID NO: 180986 - DNA, 376 bp, Arabidopsis thaliana landsberg
tgattcacggtcggatcgagagaagtagaagagagcgccgaacagagagaacaatgaaaggggagaagaagaagaagaagtgagggaagaaatagagaacttgcagaaggagagatcaatcgcttatttctctgcttactctttctcacttttcgataggataattacgatattttcactaaattaagggtttctattgtaattccaattactatttggattcagatttatatgtttccctgagtgttcgtctgagaaacgtgacaggctaatgagaatgcgacatatacgactcttcagatgctgtcaccaattaaaactctccacgtgtattacacgtgactgtgaccgtgacggtgtgggacgtcttcggtga

SEQ ID NO: 180987 - DNA, 235 bp, Arabidopsis thaliana landsberg
atgtttcgtgctaaaaatccgtttttatattcgcacaaagagaaactaaaaataaagaaaaataagagaattcatcattgtcgatttagatctccttcagatacactaagaacgctgaccattcggttggagaagacacaatcttcaccaaatctgaacagtctgaaaaaacgctacatcttgattatcaacttcaatcatacatctcatcgccgagagaaagccttccacttcg

SEQ ID NO: 180988 - DNA, 616 bp, Arabidopsis thaliana landsberg
atgagagaaaaaggtgagtctacatcgcctggtatctttttgtattgcaggatattctatattcatactccttctattcctgcatgaacagagggtatgatttgttagtatgaaaaaccaaagatgacgcatcagtttgcacttgagactaggtttaagccaagcatattgatccttttgttgcatgagtctgatactgggatatatcataagtggaaatattgcatagtattttcaaatctcagttaatggagaggtgaataagaaattatattgatatgttttgtagtttgccatctgcgttagggggtgtggtatgttgtgcttgagttgcatagtataagtatcggttgttgatctccctgtcgtttcgtgtctctgatttgtatagactgatatgcatctaatagaggatatataccttttctatgtttcttacatatcgtttgtaaattacgtttatttgcttctggatttctcagttgtcttttgtaacctcttttatgttgcagcctttgcaccaatgaacgccgcagcaccagactctagagacttgaattggaatgcacagagacagccatttgatgctgagagatacactcggggattgaattga

SEQ ID NO: 180989 - DNA, 400 bp, Arabidopsis thaliana landsberg
atggtcgacgatgaggagttttatgaaagagagaagccattatcgctacaagatatcaggttgctcatcattatccttaagcaggttagtgttttgattgatctcattttgcagtgtgtaactttgacgtcaagagttttaggtgttatgattaaagacaacataaaatatcaatggcgcgattagctgagccttagattgcaaattgtaacaatcatataataagctagattgactttgcgttttcatatggttgctttgttgcattggtttgactcttggtgaatcttcgctctttcttgtccaggctttatggcagttactgtgggtgaatccacttacgcaacctaacactgggaaatctgtcttcaatgacctcttgaagaagaaccctatttga

SEQ ID NO: 180990 - DNA, 458 bp, Arabidopsis thaliana landsberg
atgacgggttttatctggtcagccgagagaaaaacaaagcagtcgaaacttgagaagattcagaatagtctgattcacgctgcaaaggatggggacatagagactgtaaggagacttgtggaggagatagaggtaagctctagggtggagaagcagagtaaagtcatctcgaaccggacaatgactgtgtttgcgtgtgccacagtgatcacaactctcactatagtgattctggcattgactttgacaagcgacggctaaaagagaccttcgagggtttagtcataagcttaactaaatggattgttgtctttccacgtttttctactatcttcttttcgtggtttattgtttgtaatgtactaaagtgtcataaaagtttttgtgctacttcaatttcaaccgatccgagagcaccaaaagctccaaaccacctaacgaaagccagtgaacgatga

SEQ ID NO: 180991 - DNA, 279 bp, Arabidopsis thaliana landsberg
atagaccagattatctttgatgaacctaaggttctggtttccgaccaaaacctttttgactatatgatacctgttgtcagcccttctcagagacctacgaatgttgttcatcatttttggtaccattttaaactcgagacgacagttctcgatatcccagaggaaaattatctcaaaagctggatccagattctgatccatactgatttacgcgaaccagagaagaagaaacagcggctcgaaaacgtaataaccaaaaacgatcgtaagagtgtttag

SEQ ID NO: 180992 - DNA, 213 bp, Arabidopsis thaliana landsberg
atgcatggccacgcgctgggcgcttccggtgcactgaagctggtggcggtactcggtctgatgcgcgatggcgtggtgccgcccactgccaacctcgacacgcccgacccggcctgcgatttggactacgtgcccaacaccccgcgcgagctgcgcgtgcgcgcggcgctcagcaactcctttgcgttcggcgggctcaacgccgtgctggcg

SEQ ID NO: 180993 - DNA, 341 bp, Arabidopsis thaliana landsberg
atgattaacaagaccaaatccacaatcaccttctcaactaaaacccctgaaagcatcaacattgaagcacaagctatattaggtattcaaagtactggcggattgggaaaatacttaggcttgactgaaatgtttggaaggaaaaagagagatttgtttaaccaaatcattgacagaataagacagagatcacttagctggtcctctcgcttcttgtcaactgccgaaaaaactactcttctaaaatttgtgttagctgcaatgccaacttacacgatgtcctgcttcaagctaccggtgtctctctgcaaaaggatagaatcagcccttactcgattctg

SEQ ID NO: 180994 - DNA, 1343 bp, Arabidopsis thaliana landsberg
atggatccggagcagacgtttattagggttcaggagaggttttcgcagatcttaacgccaaggattagaggtttcttagagtatacttacctcttcgttgccatcactttgttctgtatcctcgttgttatgcacgccaattatgttcagcaggtaatttttgactctcgtattgaatcctttaatttataggtcgtttttagtgcaaattgcctttgttaatgacttcattgttgaaattttaagtctgagatactacaatttgaaaaggatgatgtagcatttttctgtgttaggagtaatctgatatgaattgtggagcttaagctaattctgtagaacatgttcgcatgagcgtggttaggagactactgtttgtatctttactaaggttgcactggtcataattatataaatccgacggaagatacttttctgatttctttgtgtttatgtttatgttaacattagtacactttccaataggaattacggcctatgcaaatgcatttgaatacttctaagattgcaaacttcaaaaatcaaatatctgttggcttagctctcttctactttaagagtttcgtgtagtgtgcatgccttcctaagatttatctttgctagactctcctaagcttctcttatctgaccattattgtttctctctaactaatttcgttaatttttttgattattattaaagcctggttgttcaagtgagctgactggagttgagttagctgaagcagagcttatgcaaatcaaggtatgtagctattatcgcttctgatgctagcatgcataattagtgaaaaattttagattttctaggctttgaactggttcctcactcgtactttggaaaactctttcttgaaatcagttagccacaaataaaatttctattcatccttagttctctaaccaactgattttctgtgatatagataacaagtgcagggttgtggtcacgtaatgatgaaagtactgctgcagatgttcctcgagttgttgctgcaactgatagtttagaagtgtcaaagactgatcaaggtgtttttttattggtttggatagactgtttgtaggagctcaatatctttgacgtttgcaggtactgacactgcctcttttgcaatcatgcagaaagctctaccagtgaagaaaataccgatgatacatttgtgaaaattgataaagaagagccccgcagtagtttctcagtgtctgcaaaagagaatgtcagagcagctattcttcgctttcttaaaaagtgttacaggcgcatatctttcgttttacagcatacagcacggatcctcagaggtgttagaaaaatatgg

SEQ ID NO: 180995 - DNA, 131 bp, Arabidopsis thaliana landsberg
gtaagtgggttcaatacgacgatgccaacactagtcttcagcggggagaagatatcattaaactctctggaggaggtgattggcatatggcatacatcgtaatgtacaaggcccgtctcatctccatgtaa

SEQ ID NO: 180996 - DNA, 221 bp, Arabidopsis thaliana landsberg
atgggtaaccgtcattttcgtccaacggaaataaactgttgtgagtttcttctgcagctccacgaatttacgaacagaactccacgtgtcgttcaacgacgcaaggtttagacttcacgcgcttggtgttgcgagtgtggatgatgccatcttgttccggtaattactcgagtatcatcacaacggttttaggagaatttatacgaagatccgttacttag

SEQ ID NO: 180997 - DNA, 151 bp, Arabidopsis thaliana landsberg
gcaattgctcaagttcgaactgtttattcttatgttggagagagtaaggcacttaatgcgtattcggatgcgattcagtatacgcttaagctcggttataaagcggggatggctaaagggttgggtttaggatgtacttatggaatagctt

SEQ ID NO: 180998 - DNA, 469 bp, Arabidopsis thaliana landsberg
  unsure (1)..(469): unsure at all n locations
atgtcgatcatccgacccggcgcgcgattttgccgcccgcaccttccaaacggacgaaattcggctaaaaggctcccgctggtggtgtacgcggaaagaacggggaaaacccatccgcgcatgcagctatggaacgtggacgggggcaaccgcgtcctttcggggtttgggcgccgggcgcccggaaaatcgnnnnnnnnnnnnnnnnnnnnnnnnnnnnnnnnnnnnnnnnnnnnnngaactgcgccaggatcaggcgaaggctttcctgtcgaaatacggcctctggctgattgccctcggcctcatcgtggttatcgcgaccgtcggcttcgtcctctatcgccattgggatactaagcgggccaaccaatcaggcgatgctttttcccaggcgctttcgctcgccgaagacggcaagaacgatcaggcactgaccgatctcacgaagatcgagaagaacggctaa

SEQ ID NO: 180999 - DNA, 293 bp, Arabidopsis thaliana landsberg
attagattcttctcgtgaaagaaagtcttgcgagtcctatgacttcaggccccggaaaggacctatgaagaaatacattcacacttcaatggtttgtcttactctctaagactatagagttttcccattttttataatctatgtaaaccaaataccatctgctattgcaggagaaaacattttctgatgatcagcttactttatctgagagtgaagatgacatttctgtaacaaagacatccagaaccaaaagtgacaggagaaagaatcagaggatatggactcttgatgaa

SEQ ID NO: 181000 - DNA, 829 bp, Arabidopsis thaliana landsberg
gaagagcgtaaaaggcagcaattagctgtatcagacgtgatcaagaatgctgatgtaattctcacaactttgactggtgcattaacacgaaagctcgataatagaacttttgacttggtgatcattgatgaaggagcacaggctcttgaggtagcatgttggatagctttgctaaagggttcaagatgtatacttgcaggagaccatctccaactcccacctacaatccaaagtgctgaagctgaaaggaaaggattagggagaacactctttgaacgactagcggatctttatggagatgagatcaagtccatgcttactgtccagtatcgtatgcatgagcttataatgaactggtcatccaaagagctttacgacaacaagataacagcgcattcaagtgttgcctcacacatgctttttgacttggagaatgtaacaaaatctttttcaacagaggcgactctactcttagtggataccgctgggtgtgacatggaagagaagaaagatgaggaagagagcacctataatgaaggtgaagcagaggttgcaatggcacatgccaaaagactaatggagagtggagttcaaccttctgatattggaattattacgccttacgctgctcaggttatgctgcttaggattctgaggggcaaagaggaaaagttaaaggacatggagatctttacagtggatggtttccaaggtcgcgaaacagaccttattattattttcatggtccgatcaaactcgaagaaagaagttggatttttaaaggaccaaagacgaatgaatgtggctgttactcgctctataagacaag

SEQ ID NO: 181001 - DNA, 244 bp, Arabidopsis thaliana landsberg
atgggaaagaagagaattaaggaagtgatagattcagttctccagggactcgccaaatacgaggagagagcgattaaagctatcaagccgagagtgaaagttaccattgagaaaggcatcactttgctacagagggtaagtgaatctttcttacatccacaagacatggttctatgtgtgttatttcatctttctctagacttttgttgctatttcggtttacaaacttttgattgtggtttga

SEQ ID NO: 181002 - DNA, 366 bp, Arabidopsis thaliana landsberg
tcttgcatccgtgctgactcaactcgcttaaagttttcacatcagaaagagcatcgagctgcttctctaattcaggtacttatacgatctccaagtttgtatggtacatgtgcgttaagactttttctgttactgaattaagttcttatatagggtaatctagagtcgtctagtttcctctcattcatgatttcagtctctaactcattttttgtgctttaatattgtgtatgataaatcttttaggctcattggagaatccataagtttcgctcagcattcaggcaccgtcagtcatctattattgctattcagtgtcgttggcgacagaagcttgcgaagagagagtttagaaaacttaaacag

SEQ ID NO: 181003 - DNA, 273 bp, Arabidopsis thaliana landsberg
atgagatcaggtggcggcaatacggaaccattgattttttccaaccgtgaatgggaattccccggtgtgctcaagtatgagctaattaatggaaaaatacacaataaaaggtcggtggaaaaactggccgccacctatcatattaccgataaaaacatggtgaaggaattcaccgaaagcgccattgttcagcttgcatcagaaattgcctgggaaaacaggtcttttccacgaaaagtttactcacggctggtggagctttaccagaaccag

SEQ ID NO: 181004 - DNA, 2283 bp, Arabidopsis thaliana landsberg
atggagggacatatcagctgttttcttgtttctgctgttatcctgctcatcaaattcagccttgatcttcaggtaaaatatgtgttgcacattctcttttgtaatactttcttctgcacatctgctgctgctagtgtttcatattgattattctcatcaatttgtatgcattttacttgtctatggaattgggaaaaaaaacaagccgttcacgccaagacctcagattaaatctaacttgatgatgcaggactacaccatcttggtgattcgcaaagctatgtttagacgggaagatacagttcgtgttgcagcaaccaaagtaataactgatcttatacttgcagagaaactagctaagagagacagctcatttactttccaagactcagcaagccaagccagttccagtcagcagactgagatgagctgtattgtgaggggaaacctctttactgaactgaatgggttgcttcaaagatgtctttaccagcaggtgtctttttccttctttatcatgaaaagttactttcaagagtatgaaaatattctttgagctctttggttcctacatgtaggcaagagtgaaggaagtagtttatgatgggcttgtgaagttagtcctgattgatccatcaagtggaggacatgtgttggactttcttatgcctcattttcttcgtttcttcggacaggtaactgtcagcttcatccctccatgcttgacaaaacagaaaacgttgatatatatatatatattgtgaacttctctctacccttgactatttttacagggacttgctgttgattttttcaacttttattgttgaaagacacaacctcacacatattttgacaacttacgattatgctggcaggacacagattttcaacttggaatcacttcatgcattagagtagaaggtgacaaatttactattgaagagcccttggataggcttctcttttgtgtctcttggattttacttctccagcagcaaaacagctctgatcggccttccgatgctgcgtggccatgctttggtttctccctttcacaagataatgaggtattgctacagaaagaactggttttgtgttacctaatagagcatagctgtcaataataacgtgtgggtacattcaaatttcgtatggcagcagcaggttggaagaaacctatctcatgaagcgtactccagtgctttggtaaagatccgaagcttcttactaggcaagaagttaggaggtacgtgacaaatgatcgttcttaaaaaaagccttgactagttttatatacctgaacacgtttgatctgctgttacatttgtttgctttcaagtctggttcgtataggttgtgtgttaggcttagtctagtgtcatttgaagtacaagctataaatagtgagtcttctaaccgaaaggagcacctgtctcaaaaaaaatctgtttatttagcacatagcttctgatcttttcgtttgcattttacagatattgtagggcagtctcaggacacagtttctgcatctctcgaagaagataaaagaaaatcctattgtttgattatattgggaatcgttcaagtgctgctaaattatattatagtggatctagagaaacagccagaagggaaaaagggttctgtcagaaaggagattgtcgacttaattgatctttatgaatcactggaaaaggatgtgggaaaatcgaagcagagcaatgttggcaagagagtacgatttagcgcctgtaatgatactgatctgggaaacacgagtatcaatgaagagcgagagaaagttccctttttggctacttcaagtatctaccagctatttctactcagtttcaaactctatagcagcaaatccgttggtactcagtcaggctcgcaggatcacagccattcatcaccagcgaagacagaaaaatcaattttctccttcactttgcatgtttgtgttgggcacataaattcatctctttgcatgaaggaggaaaatccacttaaaccgttggtctgtggtgacatgaaggttctgggtcctccactgctaaaagtagtttacctgctaaagccagagccacctctagctactggacagacgaataaggagaagaaaggaaggaaagatgttgacggaagaaaacagtgtctacatctggccttacttagcttgaaagagctactcaatatatattcaagtggatctggtttgactggcttgcttgaagatttgttggcagtacctgcatccgaggatgctactttagaaga

SEQ ID NO: 181005 - DNA, 198 bp, Arabidopsis thaliana landsberg
gggaaagcggagaaagcgcagggcggaaatcgaccaaaggcccggcgacgcgaatacgcaagacagcagcagacagcggaaggaacacaccatcaggagaaaacgaaaggcacactgccccccgcagcgcgccgagaaaagaggaagcgcagcgacgagcccacgaacagcccagacagatctcaagccagccaataa

SEQ ID NO: 181006 - DNA, 166 bp, Arabidopsis thaliana landsberg
gaatttgagaaataccaacagaaactgcaggccaaagccttcgagtcaaaacctcccaacccttcagtttccggaagcatacagcatagtgatgggtctcctttgctggtttacacggatctacctcaagttgaagaatttctgacacgcccagaatttgtgatca

SEQ ID NO: 181007 - DNA, 61 bp, Arabidopsis thaliana landsberg
atgggcagtggacggcgcatagtgtgcatgcagatgaccgacccggcgcaagacaccagag

SEQ ID NO: 181008 - DNA, 485 bp, Arabidopsis thaliana landsberg
atggctatagcttttcatacctttcttcttcaactgctactcttcttctttgcttcttttgcggaagcaaacgactcgcgaaaggtgagaaaaaatggacctttcttctttaactaatagcgtaatgtttttttggagatacatataacgacgaatgtttgaattttaacatagaacttcttgctttctatggtacagacataccttgtgcagatgaaagttggtggacatcgatatgggtcaagttccggtcaccaggaactactaggcgaagttcttgacgacgataggtttgattttaattatgccttattctttaagtcatataggttttgatgagatatattggttcaaatttcccaagaagccaatcctctatgttaacacatgcagcaccttagcggatgcatttatctacagctataaggagagcttcaccggtttctcggcaagtctcacaccaagagaacggcaaaagctgatga

SEQ ID NO: 181009 - DNA, 1774 bp, Arabidopsis thaliana landsberg
cagtctttgacggtcataatggtgcagaagccagtgacatggcttcaaaacttttattggattactttgctttgcatatcaactttctcttgcacgctacattttatgctatgacgaggaagttgattggacgattcccaactaaaggagaccacagtgtcattttgcacggcgtaagtcgggatgaaatcatgcatctatacaacctggattttcaaatgcagttgagtgccttttcattttatttctctttcgtttatcaagtcgtcattttcgcttcattgcagtgtcccaattttcttgcaggtttcgagactcattgccacttcattttgatgattctctccacttggatattatgaaggaagcattgctgagagcgatccatgacattgatgtcaaatttactaaggtatagtggatatcttctatacactccgtcgagcgttgttactatcatgataaggatataaccagctacactttgtttttctccaggaagcatcaaacagaaagctgaattcaggttcaacggctacaattgcacttattgcagatggtcaactaatggttgctagtatcggtgactcaaaagcacttctctgttctgaaaaatttgagactctggaagaagctagaggtttagcaacatctgtttctaaaatcaagctgcctaacaaaaagccagtgttgtatttatttataaacagtttgttgcaatggtgtttgtttattgcagctactttggtgaagttgtacagagagcgaagacgcaatcggggctcttcaccatcaaggttctctgactttaaactggaacatggcaatggactactgcgtttcattgccaaagaattgacaaaggaccatcacccaaatagagaggatgaaaagattcgtgttgaagctgcaggaggttatgtcactgagtgggccggtgtgccacgagtgaatggccagctgactgtctcccgtgcaattggtgaccttacttatagaaggtaggccttccttgttgtatgttagtgtctctctgtgcatctgaacatgattaatgctgaactcgtttacattttgagagataaagtgtgagttttgatatctctttcagttatggtgtcatctctgcacctgaggtgatggactggcagcctctagtggctaatgacagcttcctggtagtgtcatctgatggcatctttgagaagttggaggtgcaagaagtatgtgatcttttgtgggaagtaaacaatcaaactagctctggagcaggagtgccttcatactgctcaatttctttggcagactgcttggttaatactgcctttgagaagggaagcatggacaatatggctgctgttgttgtccctctaaaatcgaatctagttactcaactccaacggaaggagcagagtatgaatgacaacaaagacaagattgcttcagcactaccctgtagcaactgtacgcttccacgtgagtttctctggttgcaatcaaattccctaacatcctgtgatgaaatgtagggttttgaagcttcattgacaatcgttcatacaatttcatgtgctaatcaagttttttctttttctttttcttttcagcagtgcctaatgatataaatttgggtccattgcaattgaaacaggctcagccacttggaaccatgttaaacaggttatggtatgccccagttgacacaatctcactattcccatattcccagattaagcttatgacttacaccattgcttttgaattgcaagaatga

SEQ ID NO: 181010 - DNA, 444 bp, Arabidopsis thaliana landsberg
tcattaattgggcattttgacctggatccaaaccgtgttttcgacattgtaagttttcactgttgcttctgtcatatttttgtttgatattgcataacgcatcaatctgtccttcccgattagtaataatgtaccctttgtttttgatgaataggttttagattgctttgaactcgaacaagattacgacacatttctcaatctaattcctatctttcccaaggtttggaatgtcttcctcgtatttttatcttctaatgcttagctcaagagactattttttgctaaaaaaaataattttcatgtgcagtctcatgcttcacaaattcttggatttaaattccaatactatcagagactagaggtgaatagccctgttccagttgggctctataagcttacagccttgctagtaaaggaagagtttatcaatcttgaaagcat

SEQ ID NO: 181011 - DNA, 104 bp, Arabidopsis thaliana landsberg
gtgtagccgtcacgatcggtcgtgtattgatgatcgcgatcgagcttgaccagccgcgcaccatcgacgctcggatcacccagcgtgccatcgatgcccggcag

SEQ ID NO: 181012 - DNA, 2004 bp, Arabidopsis thaliana landsberg
aataaatggaagattcgtcttcagcttacaaaaccagtcacttggcctccactggtttggggagtcgtctgtggtgctgctgcttcaggtaatcatacgaacctcttttggatcatgcaatactgtacagaaagttttttcattttccttccaattgtttcttctggcagggaactttcattggaccccagaggatgttgctaagtcgattctttgcatgatgatgtctggtccttgtcttactggctatacacaggtctggttttacacaacaaaaagctgacttgttcttattctagtgcatttgcttggtgctacaataacctagacttgtcgatttccagacaatcaacgactggtatgatagagatatcgacgcaattaatgagccatatcgtccaattccatctggagcaatatcagagccagaggtaactgagacagaacattgtgagcttttatctcttttgtgattctgatttctccttactccttaaaatgcaggttattacacaagtctgggtgctattattgggaggtcttggtattgctggaatattagatgtgtgggtaagttggcccttctgacattaactagtacagttaaagggcacatcagatttgctaaaatcttcccttatcaggcagggcataccactcccactgtcttctatcttgctttgggaggatcattgctatcttatatatactctgctccacctcttaaggtaagttttattcctaacttccactctctagtgataagacactccatccaagttttggagttttgaatatcgatatctgaactgatctcattgcagctaaaacaaaatggatgggttggaaattttgcacttggagcaagctatattagtttgccatggtaagatatctcgtgtatcaataatatatggcgttgttctcatctcattgatttgtttcttgctcacttgactgataggtgggctggccaagcattgtttggcactcttacgccagatgttgttgttctaacactcttgtacagcatagctggggtactcttttggcaaaccttttatgttgcttttttcgttatcagttgaaatatgctcttgcttcatgttgtacctttgtgataatgcagttaggaaaagccattgttacggacttcaaaagtgttgaagcagatagagcattaggacttcagtctctcccagtagcttttggcaccgaaactgcaaaatggatatgcgttggtgctatagacattactcagctttctgttgccggtatgtactatccactgtttttgtgcagctgtggcttctatttcttttccttgatcttatcaactggatattcaccaatggtaaagcacaaattaatgaagctgaatcaacaaaggcaaaacataaaagtacattctaatgaaatgagctaatgaagaggaggcatctacttttatgtttcattagtgtgattgatggattttcatttcatgcttctaaaacaagtattttcaacagtgtcatgaaataacagaacttatatcttcatttgtacttttactagtggatgagttacacaatcattgttatagaaccaaatcaaaggtagagatcatcattagtatatgtctattttggttgcaggatatctattagcatctgggaaaccttattatgcgttggcgttggttgctttgatcattcctcagattgtgttccaggtaaagacgttaacagtctcacattataattaatcaaattcttgtcactcgtctgattgctacactcgcttctataaactgcagtttaaatactttctcaaggaccctgtcaaatacgacgtcaagtaccaggtaagtcaacttagtacacatgtttgtgttcttttgaaatatctttgagaggtctcttaatcagaagttgcttgaaacactcatcttgattacaggcaagcgcgcagccattcttggtgctcggaatatttgtaacggcattagcatcgcaacactga

SEQ ID NO: 181013 - DNA, 162 bp, Arabidopsis thaliana landsberg
ataactaccgatacaaatgagatctcctcctttgaaatgatggattccatcgccagcgaacagcatccctgcaccttcaattacatggataaattcaaactccggatgatagtgccagctattgtgtttataagaataatggtcggatcttgcactaaatga

SEQ ID NO: 181014 - DNA, 600 bp, Arabidopsis thaliana landsberg
caacaacaaggtcagaacaaaccttttgttccttacaatgaaggttttgttcccaagcagcaattccaggggaactaccagccgcaaccaccacctgggtttgcaccggagcaaaaccaaggtcatgctgctcctaatgctgaaatgaaacagatggtacaacagctgctacagggacaagcatctagctccatggaaattgctaagaaattatctgaattgcaccataagctggactgcagctacaatgacctgaatgccaaagtggaggcattgaataccaaagtcagatacttggagggaaattctgcatctacttccgcttaaaaacagataagccaacttccaggaaaagcaattcagaatccaaaagaatatgctcatgatattactctacgcagtggaaaagctcttccctcaagagaagatcctaagacagtcactgaggtcaatgtaaatcaacatggggaagatttcagtctcagtaaagatcaagctaacaaggaacttgagcagccactggaccagtcactcgagcagccactcgaccagtcactcgagcagccactcgatcatgtactcgaccacccttcccaatga

SEQ ID NO: 181015 - DNA, 146 bp, Arabidopsis thaliana landsberg
atggcggtagtcggtgtgcatgggccaactagcgaactataaagtcttatctttcgccattttcatttttagcgagaagaccgaaaggcgtgttgatagaatatttaagccaagaaacttaccgaatcgaagaaattgccgtgtga

SEQ ID NO: 181016 - DNA, 253 bp, Arabidopsis thaliana landsberg
ataagagagtcatggcattccgcaacctcaacaagaatcgaaaataaggttagaaaaagacaattgacgcaatctgttgctttcttttctctcgagcatctcttctagcaaattaatgaactttccaaactcatgtctcctctttttgtttttgttgaaacagacgattgcagagtctgtaggtgattggtacttcaaccgaaaaccggtgaagctaatcgattgtccttatccgtgcaatgcctcttgttga

SEQ ID NO: 181017 - DNA, 240 bp, Arabidopsis thaliana landsberg
atggaggggtttatgtcgtatgccttcctggtcacctgcgagggggcgatgaacgcactctctcacgaagggtgccggcacttcgaggtcttcgaccaagccgatgaggattttgaacgagatatctacaaggttgaggaccctatagtgaaggagtccgccggagccatctacgaccagatgtggggcccgcacggtcgagaggtggtcagggagcgggccgagacggcgagggctcag

SEQ ID NO: 181018 - DNA, 790 bp, Arabidopsis thaliana landsberg
atgcctcttgatgatgatttacctgctgatgataacaatgcttctacatctaattctgcatcatctgcatcatctattccacctttacctagtactgtgaatactcagaacacagatgcattagatatagatactaattctgtacctattgctagaccgaaaagaaatgctaaagcacctgcttatttgtctgagtatcactgtaattcggttccttttctttcttcactttcacctactacttctacttccattgaaacaccatcatcatctattccacctaaaaagatcactactccatatcctatgtccacaaccatttcctatgataaacttactccactttttcattcttatatctgtgcttataatgttgaaactgagccaaagacttttgctcaagccatgaaatctgaaaagtggactagagcggctaatgaagagcttcatgctcttgagcagaataagacttggattgtggaatctttgactgagggtaaaaatgttgtaggttgcaagtgggttttcacaataaagtataaccccgatggaagtattgaacgatataaagcacggttggttgctcaaggctttactcagcaggagggaattgattataaggagactttttcacctttggcaaagtttggcagtgtgaaattgttacttggacttgctgctgcaactggctggagcttaacgcagatggatgtttctaatgccttcttacatggagagcttgatgaggaaatctacatgagtctgccacaaggttatactccaccaactg

SEQ ID NO: 181019 - DNA, 114 bp, Arabidopsis thaliana landsberg
gatcctttgctgaggaagacattggaaggcaaggtgcgagtacagctgcaggaaatgctacccctggccgaggactggaagttgcagttgctaatcttcaggattactgtaatg

SEQ ID NO: 181020 - DNA, 868 bp, Arabidopsis thaliana landsberg
atggatcgaggtggttaccgaggaggtcgtggtgatggccgtggcagaggcggcgacggagatcgtggttacagcggtcgtggtgatggccatggcagaggtggcggcggagatcgtggtcgtggttacagcggtcgtggtgatggccgtggcagaggcggcggcggagatcgtggtcgtggttacagcggtcgtggtgatggccatggcagaggcggcggcggagatcgtggtcgtggttacagcggtcgtggtcgtggctttgttcaagatagggatggtggttgggtaaatccagggcaaagttcaggtggtcatgttcgtggtcgtgggacgcagttgcaacaacctccgccacaggaagttcctccgtcgtcgtcgcaggctcaagtgagtcaaggcgttgcaccaggagacgtgggtcaaggcggcgtcggagacgtgggtagagacggcgtcggagacgtgggtagagacggcgtcggagacgtgggtcaaggcggcgtcggagacgtgggtcaagtaggcgtcggagacgtgggtcaaggcggcgtcggagacgtgggtcaaggcggcgtcggagacgtgggtagagacggcgtcggagacgtgggtagaggcggcgtcggagaccgtggacagagtcagtcgggaccatcgtcgggtcactttggtcgtgggacgcagttgcaacaacctcagccacaggcggtttctcagtcgtcttcgcagggtcaagtgagtcaatcctttgcaacaggaggcgtgggtttaggcgcgtgggctcgtaagcctcaacttttctctgattcgacggtcttaccttctagttcttcgtctaacgtcgttgcttctcacaccgctagtg

SEQ ID NO: 181021 - DNA, 78 bp, Arabidopsis thaliana landsberg
agaaacttgacatttatggagtctgtgaagacaaatcctccacgcaaggagcgttgagtaccgcctcgccgtggaaag

SEQ ID NO: 181022 - DNA, 1219 bp, Arabidopsis thaliana landsberg
cttccttcgattctctgactcaatcatggcgccgaagcgaaagagacctgcgacaaaggatgacactaccaaatccattcccaaaccgaagaagagagctcctaagcgagctaagacggtgaaagaagagccggtgacagtggtcgaggaaggggaaaagcatgttgcgaggtttctagacgagccaattccagaatctgaagcgaagagtacctggcctgacagatacaaaccgattgaggtaattccatacatcggaaactggaattttgggtgtttgtgtatggaatggttagatctagtagaaattcgctgagatttgttgcagatctgttgatttctgaaggattttttgtttgttttgtttcaggtacagccacctaaggcttcgtcgagaaagaagacgaagtaagttccttgaatcctttggttcttgtgtatagtcagattgagaggctttacttttgattttgattaagtgaattcgttttgtagggatgatgaaaaagttgagatcattcgtgctcgatgccattatagacgtgcgattgttgatgagcgtcagatatatgagctgaatgatgatgcttatgtacaggtatgactctattacgtctaaattgcatttgttacattttaaagcgtagatttatgtggtacattgaagaaaatgagttagagaggagaatatgcatgacattgtgtttcttggtgtttgagtttgatgactattgaggttttaccacttttttaatgtgccaacatggttttactgtgtagaaaatttgatgtgtagggtaaataattaaccaaagttgatcacattctcctccctcaccactatcaactgtccgcaataaatatttgtgcattgtctctgtttgtcatgctttgtatatctccaagtccttatgatagtagttacctttcgaagctgagttctcatctgtaacaataactagctgattgttatttagactggcattgcatattatgcattggctatatgaacgtttatcatgttgttttatgtttttcgtacagcgtaggtagatgctttaccatatataacttctgtttttaacaactgagttttgtaatttttgtgcagtctggtgagggaaaggatcccttcatttgtaaaatcattgaaatgtttgaaggggttaatgggaaactgtatttcacggctcggtggttttatagaccttctgatact

SEQ ID NO: 181023 - DNA, 99 bp, Arabidopsis thaliana landsberg
atggcgtctaaaggtggtaaatctaaacctgatttagtaatggcgtccaagagtgggaaatctaaacctgataatgaatccagagctaagcgtcagaag

SEQ ID NO: 181024 - DNA, 682 bp, Arabidopsis thaliana landsberg
aggcttctgcgctcaatggttttggaatgtaaaaaggtaagctctcacttttcttttacatgtgattcagtgcttttctgttggaagtatgcaatatttattgggttttcttgcatgatcttctgaagtggtatttccctagacacagcaatgctagggtagccaccgtaaagatgcagattaaattaataacaacccatccttggttgcattctctattccaataaaaggaaagaaaatcaaaaccaaagggggatgtactcttagaaacgccacaaaaggagaaatgttgatatgtgtccatataatcacatcatttgataaattgtgcatgttatacacaatcaatgagaattttgttattgtagtctcttcataagactgactgcgaaattcatatttccagcgccttgacacatcaggagaatcaagcaatgttttggagttgattaaaaccatgcattctctagcttctttaagagaaacaattataaaggaacttaatagcggcttgcgaaatgatgctcctgatactgccattgcaatgcgccagaaggtgagctattttaaacaatccagcattatcatgtaccaatttatttactaatatagtttcctcgtttcattagtggcgcctttgtgagatcggcctcgaggactacttttttgatctactaaccag

SEQ ID NO: 181025 - DNA, 165 bp, Arabidopsis thaliana landsberg
aaaattacaatagggccgaaagcccaacaagaaaccaaaacgaaaagagatggcccaatcacaatacgggctcgcctgaaacctaatcggaagaacaacggaggtagaaaatggctaaacgcccatcgatcgaacacgcttgcttggagagtctcaaaaaggtga

SEQ ID NO: 181026 - DNA, 123 bp, Arabidopsis thaliana landsberg
gaaggtccctatcgaatcaccgatgtggtacgtgacggcgtctataagctcgaaaaagttatcaacggagtacctgagttacggccttggaatgccatgcatctcaaaaaataccacaaatag

SEQ ID NO: 181027 - DNA, 228 bp, Arabidopsis thaliana landsberg
gcagtagatgctttagacaatggtatccatcaatatgatactgaccaacctccaagatatgtaaacaatactagcctggggcataggattggaagattgaacttagactggattgaacctgatcagtctagtgccaaagaagatgaagcctttcatcgggcaatggagcttgctggctctgagttcttggaggtttttcccccttctatatctcgttctgttacataa

SEQ ID NO: 181028 - DNA, 1633 bp, Arabidopsis thaliana landsberg
ctagtgccgagtgcagtgtgcgttgaacaaccaccaccacatctgataatggcaaatgcgatcacatttttcaagctcaacaccggcgctaagttcccttcggtgggtcttggaacatggcaagcttctcctggcctcgtcggtgatgcagtcgccgcggctgttaaggttcgtctttcgtaggttgaacttatttgcttcccatctcttgtagattctttggtttgatgataccatactctgtttcaattgtttttcttaggtttttaatgctttttaactagtttgatgttaaccctaattgcagattggctatcgtcacattgattgtgctcagatctatggcaacgaaaaagaggtaaaacaaaaacagatgtttaaattagctaatctgaagttcaatctttttggtatgagttttgtggatcttgaattgatattacatttgcccttcaattcttgactgtcttgttcctctttaagtgtcttttgatctgctttatttgttatcttgtggctttcctctgttctgttttgttgtaagatactgaaaagtgaatactccttaccatgctcagattggggcagttctgaaaaaattgtttgaagacagagtagtgaaacgcgaggatttgttcatcacctccaaactctggtatctttttttcccacctaatcaaatgcatattatgtgaaaaactgtagctttaattattcttacatatattctcaaattgtgtaggtgtactgatcatgaccctcaagatgtcccggaggcattgaacagaactctcaaggatctgcagcttgaatacgtcgatctttatctggtacacatcacttccttgtaactttttttggaatgaatgtaaaatctattcaaccaaaaaaccttgtttacaatatatcattttttcatcgaagttgcttaaaacagagtatttaaattgcagagcaagtaacacttccttgtaaaactacttcttgtggggaaagattattgtgtaacagtttttttttgtgatcttgttgaagatacactggcctgcacggataaagaaaggttctgttggaataaagccagagaaccttttgcctgtagatattcctagtacatggaaagcgatggaagcactatacgattcgggcaaggcacgagccataggtgtaagcaatttctctaccaagaaactagctgatctcttggagttagctcgtgttcctcctgctgttaatcaggtcgaatgtcatccttcttggcgacaaactaagctacaagaattctgcaaatccaaaggggttcacctaagtgtaagcattactcgtctcaccaatccatttactttctactttatacattcattgaatgattttttttttccaggcatactcgccattaggttctccagggacaacatggctgaagagcgatgttttgaagaacccgatactgaatatggttgcggaaaaactcggaaagagtcctgcgcaagtcgcccttcgttggggactccaaatgggtcacagtgtgcttcccaagagtacaaatgaaggaaggatcaaagagaactttaatgttttcgactggtcaatacccgattacatgttcgctaagtttgctgagattgaacag

SEQ ID NO: 181029 - DNA, 816 bp, Arabidopsis thaliana landsberg
atgcaggacctgaagtcgcagctgcaagagttaattccggaacagcaggttagattagactctgtttgctttaaatgaaaatttgtgttgttgacttttttttttcattgaatgtgtgtattatttgttatgttagctgagattgtttctaagttaagaaggcaggctagttgtagtgaatctctttgcttttctagtttcctcttttctcacaagaattttccaatttcaggaccgtctgaagaaactgaagtcagaacatgggaaggtccaactgggaaacatcactgttgatatggtagaaacaatcatgattttcacgtttttggtttgtttatatgattttcaccttccattgcataactcatcataatcccctttgaaataaaggttattggtggaatgagagggatgactggattgctttgggaaacctcattgcttgatgcagataaggtatggttataattttgatcacatagataattttcaggtcagatcttgaattagaattatataacatatgatattatcttttgtatcagggaatacggtttagaggcatgtcgattcctgaatgtcagaaagtattaccttcagctgagtctggagaagagcccttgcctgagagtcttctgtggcttctgttaactggaaaggtgtgataatcttaaaaacattttatacatacaataagtttcaactttatatatgaatgatctaaagtatagttttccctcctttcggtataggtgccaactaaagagcaagctaatgctttgtcaacagagatggctcatcgtgcggctgtgccag

SEQ ID NO: 181030 - DNA, 2410 bp, Arabidopsis thaliana landsberg
atgcagatatactctggtctcgacgttctcaccaataaagtcaccgtcgatgaacaaaaaggtttggaagttctgatcttgtaaatttattgtagatagagatgactttggtgtcagtgtaattggaattgattagctttgtttttaatgtgattttgggaatttgtgtttaggagtgcctcatcatttacttgggacggtgagctcagatatggagttcacagctagggattttcgagacttcactgttcctgtgagtacaaatttatacctccttttgttttgaagtttcaatttttttttttttttgtgtgtgttccattaagaatctgataatcatattggaggattgtgttagagagagagagatttaagaattttgaagtcctatacgttaggattaggatcttttcattgtgatgttgttgttgtatgtaagtgtttcaagtaatcaaattaatgctgctatgtactggtatatgagtgttcatatggtttttgtaatatggacaagtcacgttctaagtgatggtttggttggtatgatatagttgtgattgatttgtttcagcttattgaggagatcgtttctcgcaatcacattccagttcttgttggaggaacacattattatatacaggtgatcttgttactgctctagtcaatgttggttttgtggttagaccagtttataatttaccttgctaacgcagttaatcttatcttattcatgttttcaatgtaggctgttgtaagtaaatttcttcttgacgatgcagcagaggataccgaggagtgttgtgcagatgttgcttcaggtatctaggatctctatcaacttgacacctttgtgaatatcttttaactggataataagaaattttatgccgacagtggttgaccaggacatggttgttgagtctgtctttgggagagatgatttgagccatggctatgaacttcttaaagagctctgatcctgtggcagctaacagaattcaccccaataatcacagaaaagtgagatttatgatatgctattttcttccgtgtagatagacaatgatcctgaatttatgttgcttcgctggtctttacacaatttcatgcgatttctggtttattcactctggtttgatgttttgtagattaatcaataccttagcttgcatgctagtagaggagttcttccaagcaagctatatcagggaaagactgcagaggtagattctttcttcttaacctcgagtttaatttcattttataaatatgcaattagatgtgtgtatctctcttaggtagaacattatctgttaaagttaaagagtattgatgacccttaagcttaactgctctgagaagttaattaactaatgtgtttcggcagggcagaactggggctgcatcaatgcatctcgttttgattactgtttgatatgcatggacgctgaaactgcagtactggacagatatgttgaacaaagagtagatgctatggtagatgctggactacttgatgaagtatatgacatctacaaaccaggagccgactatactagaggcctaaggcaatccataggtgtcagagagtttgaagatttcctgaaaatacatctctcggagacatgtgctggtcatttaacaagcttaagtaacgatgataaggttatgaaggagaatctgaggaagattctgaattttccaaaagatgataagttgaggattattttagaggaagcaattgatagggtgaagttaaataccagaaggctccttcgtcgtcaagtaagtccttaatgcactactctcaaactttggaattgacctatcagttctgatacatttcaattttatgttgtgtttcagaaaaggagaattagtcggctagaaacggtctttggctggaatattcattacattgatgcaacagagtacatattaagtatgcattatgtgtttcatcaatgtttcaagcaaataccatatagctagccacttggagaacaaactttaaaatttctcttgttggtgtgttttttgttctttaaaggcaaatctgaagaatcatggaatgcgcaagtggttaaacctgcttcagagatcatcaggtgtttcctggagacagaaaccgaatcgggtcgggatccaacttcaggaaagtccattgaaagagatctatgggctcaatatgtttgcgaggtatctctcattttcccttaaaactcaaatgggtcatccctaaatactgaaacatatttgttgaaagcaggcttgtggaaacaagatactaagaggaagacacgagtgggaacatcacaaacaaggccgtacgcatcgtaagagaaccactcgacacaaaaactcccaaacttacaaaaacagagaagttcaagaagcagaagtaaagtga

SEQ ID NO: 181031 - DNA, 373 bp, Arabidopsis thaliana landsberg
catctcgaagcttccattgtccaacacgacggatccggaggttatattcaggctttctttacaagttgtcattgacgaactcaactcaatcgttgagttaccgaagaagctcgctgaagagacggacgatgagggactcaaatcggcgcttagtgtttgcgaacatctgttagacctcgctattgatcgtgttaacgaaactgtttccgccatggaagttgttgacgggaagaagattttgaatgctgcgaccattgacgatctccttacttggctcagcgccgctgtgacataccacggaacgtgtctcgacgcgcttgatgaaatcagccacacgaattcagcaatcccactgaagcttaaatctggcatg

SEQ ID NO: 181032 - DNA, 480 bp, Arabidopsis thaliana landsberg
atgttcatccgagacggagaactggtgctgcacatgcagatggagaccgtttctgacaagtatgcgcatctgatagtaggacggtccaaccgtgcggtcgccgaggccttggtcaccatgtacagcgaaacgcgctcgagccagacagtgatggtgttcgacggcgccgtccgtgaaaaacttcccgaactcggcgaagtctggacgcggacgctttacgacatgtttgttgccctgatacagcggggaaatgcgtgatgcgaagcctgactgccctcatccatcagcgaattcctcgaacatcgcggcgcctttctatatgcgccgatggtgctgacaatcctgttagtcatcggcacgatgatgcccttagtttccgggcatttccacagcttcgtcggcatgagtgacgtcagcacggcgcgcttatataagatcgcgaacatcttcgccataggcgcctggtggctctacctgctg

SEQ ID NO: 181033 - DNA, 228 bp, Arabidopsis thaliana landsberg
atggcgtcggtgatgacggctcggggcccggtgcccgctgatgccttggggatgacgctcacccacgagcacatcttcatcaacagcatgatcgaagagcgggcgaccggcctgctcaacgactacgagctcatgcgccaggaggtgtcggcgttcacggccgtcggcggacggacgctagtcgagctgaccactgccgagctgaccgctggagcggcgcccgacccg

SEQ ID NO: 181034 - DNA, 410 bp, Arabidopsis thaliana landsberg
atgaggattccagtgctttggttctgtggcaaccacgcaaatttccgagtttcgcgagttcggaatcaggtgtttcatctcgtaacttggtcttgaacgcttagaagcgatccgaaacaatttgagtagtaatgttgtatttattttctgtagattgctttaatctgtttcatgtaatctctgtaattctgtcaaaaatcaaaaatggtataaaacttaaccttttaccaaaaaaagaaaaaaaaagacctgtgactatgttgttttagcaaatgccatattagtagattaacatggtcttgctactttagaaagaaaacaaaatccaaattgatatcataactttagaaaagaagaaatgtgagcaacaaaatgatatcctcatctgccacgatttttcggaaacgtga

SEQ ID NO: 181035 - DNA, 426 bp, Arabidopsis thaliana landsberg
agattcaagttcttggggacgcagtgcggagtagcagcacaaagcccgacacgaagtccgagtccgaggacaagtccattggtacagcttcgacgaaagaagacaactttaaagatgcttttgagtcttgcatctccgagtcgccgagagcagcaaccgttgattcatcatcatcacaaggacgtagccggacggaaacttaaagacttattcgtctcttcgtcttccgcagaggaagaacaagaagaggacgagagaccaaaggggaaaacaaaagaagaagttcttgcagccatggcggctaaactgaatgcagcttcaagattacaatgtgagtctgcttatgcagcaccagtttggttcggattcagcaaacggcttcttcagcgagcttggcgtcctaaacttggtaccattcacgagtaa

SEQ ID NO: 181036 - DNA, 101 bp, Arabidopsis thaliana landsberg
gatatgaatcagagaatgtaaacgattggctcaatgccggttctacgggttttcgaggagttgcatctgaagctacagtactactgaagaaacaaaattag

SEQ ID NO: 181037 - DNA, 339 bp, Arabidopsis thaliana landsberg
gtgcgtggcactaaactcaaggattccgttgacatcgtatcgctcaagccctgccacctcactattgttgaaggtactctttcttgatctaacggtctacattctccggttgaaataacttccctagggttgcccacagaggattatttaattttgaattcgcagaggactatacggaggagcaagccaccgcgcacatacggcggctcctcgacatcgtcgcttgcaccaccgcatttggtccgtcgaaacccccggtgtctcgtacgcttcctaaggattctgaaaagaaggagtcaggctcgacggatggagattctccgaccgaaaaagatgccg

SEQ ID NO: 181038 - DNA, 454 bp, Arabidopsis thaliana landsberg
atggcgttcaccggtctgctgactgacgtcgcgtcggaacggaagctccacgagcgaccgctgcaactatgcattcgcaccaccggcgccgtcgacggcttgctcaccgtagagcttgatcgtcggaccgaggttccgcacgactcgctggtggtcgacgtgccgcagctcaatctcgcccatcgcacgctcgggcgcgccgacaagctggcggtcacggtcgctccgggagaagccagtttgaaggccgatatccgtctcgatggcgatcagcttgtcggcacggtggagttgaagcaatcgtcgacgctcgccgcgcagatgccggcgttgcgtgacgatcggatcgccgcggtgattcaggaatcgcttagcggcgtcgaccgcctcgaagcgaagatcgcactcgcgcggacgctcaagcggccgcagatcaagatcgaatcgaacaacg

SEQ ID NO: 181039 - DNA, 172 bp, Arabidopsis thaliana landsberg
gctcgcctctctcctccgccgtgagaatgatccttccgccgccatgaagcttttccgaaaccctgatccagaatcaacgaacccaaaaaggcccttcagatactcgcttctttgctacgatatcatcatcacgaaacttggtggctccaagatgtttgacgagctagatcag

SEQ ID NO: 181040 - DNA, 126 bp, Arabidopsis thaliana landsberg
gacatgtctttactctttgcgccataacttctgaacggattcatggattgcttcgattcgacttcgacattaatcttgacttttcgagattttcaatgacaccaagataccttcatgccaaggtcg

SEQ ID NO: 181041 - DNA, 64 bp, Arabidopsis thaliana landsberg
atgaacagcttggcccctgatctttctagaatttgggacgtagtccaggaaataaagaaaatag

SEQ ID NO: 181042 - DNA, 1450 bp, Arabidopsis thaliana landsberg
gaccaccaccgtgaacgaggatcggacgaagaccgacacacgcgaggagcacgagatcgcttacgacggaggatttaagttccggcgaagtcattgctgcgccgccgtatttgacaactatggttttacctcggaatttttggataaatggtagagattcggagagaatctcgactctgtaatccggtgaaggtgcatttccggttgcgattgaaggtggtgttgatacggtggcttttatcgagaaacctagacggtgatggttcttgttgcgagttggataacagagagatggtgatttgttggggattagggttttgaaaggattggaaacagtgaaggagaaggatttaggtgaagcattggatgtgacggtgccattcctgaaccttaccggagaaggaggaagcggcggcgaattagctgaagcgagatggtctctcagatcttcttcgacgattttagttaaacaacaaaatgaacaaatgattaatgtccacgtggagcgtagacacaaagatgctgtcctagccctaagtttaaacggtgacgtacttgtgaaatacaaaacgctgacgttgttgttctgtctctttttgtacttaaacgatgtcgtttcatcttgtagcgggaaataaaacagagctcaggctttttttttttttttttttttctgttcgtcgtcgtctccgcgagattgctacaaattagagtagagagtaatttcaatcagcaataaattaaatacctggaattgctgattattgagagggaaatggaggaggaattgatacgaagatcagaaccggagtctctagtctccgtcactgtagctaggttcatgagtacgcttctctcagctcgccctaaaaagctacgagagtctatttctcgtctaactcctgattctcaaaagggtgtctcaggtaataactgttttcaatttcaattttatccttaatctgtgtttatttatgtttacacatgctcttttggggtttataatctgtttgttttcgttaggctctatcgatgaggcactctggtttttggaaaagtgcgttatagacgctgctgagagagacgaagccatgagtgaaattcttgtacccattatcgaacatgtaatatcttaaaccctgtgaaaagttaaaaccttgcttgattgttgtaatgtccggtcttttatcttgtatgttcttacgtgttggtttctctacttttgttgttgttttttagacattaaggtttaaggattctaagcatggtaacccagctatgatacttctaaattggctatttcaagatgaagttctctttcaagccgtttcgagaaatctttcgaatatcattttgaggaacgaggacaggtttttagcgcttggatggtgtttacttatccgacgtcttgtagaatgtgaggatactggggatcaaggtttttggcatg

SEQ ID NO: 181043 - DNA, 787 bp, Arabidopsis thaliana landsberg
gaaggatgcaaaggcctgctttacatggtgcttcatgcaagagctgttctcgatttgcatgagattcgtgagcaggaaatcagatttgaacaggttgaaggagactttgactcgctagaggggaaatggatttttgaacaactaggaagtcaccacacacttctcaagtataccgtggagtccaaaatgagaaaagattcatttctttctgaagcaatcatggaagaggtttggcttacaattgactgagttcagtgcaatcttttttttttcttattggaaccacaatgttttctctgaatcttttcaggttatatatgaagatcttccgtcaaatttatgcgctatccgggattacattgagaaaagaggagagaaatcttcagagtcatgtaaactggagacatgtcaagtttcagaggaaacatgttcttcatctcgtgccaaatcagttgagacagtttacaataatgatgatggttcagaccaaactaagcagagacggaggattcctggtctacaaagagacattgaagtcttgaaatcagaaattctcaagttcatatcagaacatggacaagaaggattcatgcccatgaggaagcagcttcggttacatggaagagttgacattgaaaaagccattccaagaatgggtggatttaggagaatagctttgatgatgaatctttcacttgcttatagacaccgaaaaccgaaaggatattgggacaatctcgaaaacttgcaagagagagtaaaatttctagacatgttcaaaaattaa

SEQ ID NO: 181044 - DNA, 237 bp, Arabidopsis thaliana landsberg
acacagcctgaagaggaagatgaagatgatggtgtgactgaattacctccgttaaagaggtccgtacgcagaaatggtgaacgagggttggcaatgactgtttataacaatgcaagtcctagctccagcagtcgcttgtcaatggagcccgaagaagtaccaccaatggttctattgccagctcatcctatggaaacgaaggtttctgaagccagtgcacttgttatcctcacatga

SEQ ID NO: 181045 - DNA, 720 bp, Arabidopsis thaliana landsberg
gttcagatgaaccaatggttattgtgcatgccctgctggaagttactgcacacccagaatttgatatagcctcgatgaccttcaacttttggcacagtcttcaacttatgttgacaaagaggtaacttcagccttttctatgtttttgcctgttcctagggtcatattctgagagtgtgatttttaatcttcagggaatcttatagttcattgggtagtgaagcatccattgaagttgagagaaaccgaagactgcatatctttcagccagcttatcagagccttgtatctttggtgagtgagtcatcagagggcagggtaatgttttactctttcaagaatatttgaagctcgttgttgaacccaggccgcttctattggtttgctctaatccagagagacaaaattgaattctcatgctcgggtgacttatgcttaaattaatattgctctttgaaaaaattcttgatttctaaagtttatttggtcgatcatcttttggtggaaacagaaaatcatatgggttattgtatgctctgcagtttatgtcacctatacactggtttcccttcacaggttggcttcagagttcagtatcctgaagattatcaaggcctctcatatgaggaccttaaggaattcaagcagactagatatggtaatcaaagcggtgtattacttgttctcaatattacattagatcaagatcttttgagttaa

SEQ ID NO: 181046 - DNA, 360 bp, Arabidopsis thaliana landsberg
ttttttcgccaggagtcgagcagtctcaggtaaagacgttttattagatttatacttccgatgcccacgcataactgttgtcactgcatagatcgtcctctgggacttgcgggatccccgacagccgtcgcttatcctgagtcccggcgccggcgacccctgcggaatggtgaccgcgctgtcaaatctcgcgaccccggacggcgctgtggatggtacggatccttcctgcgttccctactgtatattctatggctgtctgtctgacgacgtcccactcactgcaggatccagcgaacgacttgctgcgggatatgaagacggctcggtgcacatgttcgacccccgccggccctcggg

SEQ ID NO: 181047 - DNA, 159 bp, Arabidopsis thaliana landsberg
gtagtagaggagaagccaggttctgttgatgggttgcctattcaaagagtggttaagaaggctgttaattcagtgaagaacaaggaagctgctacaaaggtccttactaagaagaaagttgcaaaatctgataagaagaagacaattgtcaacgtatag

SEQ ID NO: 181048 - DNA, 785 bp, Arabidopsis thaliana landsberg
atgtatgacaatgacagttctactgaagggaaatctaagaatggaggtatgtgcctcttgcttctgtatcttcttcactctggactttctatttctgtatttctcgatttaggaaataatttagaattccattttactcttgttacgttattgttctgttttctactaatatagtaaggtttttgtcaacttctcaattgtatctctaatgctgttgcaggtttaagagtgggagaaatggaaagagattgtctaattgcttatggagccagcatgttgatctacgagcggctcatgatatctagtgatcctttcgaagttcaggtaattaaatcataatgcactgttttgaattatgacaaaccttgtgagaaatgattgcaattttgtgatacactgtttaaacgtttgaatgcaggtttgcagagcttgtggtttgttgggttattacaattacaagcttaagaaagcagtttgtacaacatgtaaaaatggcgataacattgctactatgaaactcccatacgcatgcaagctactattccaggtaaaaaccattggtctattcttcaaattgaaactctctacttcgtcccatttggaaaatgataaaataattctgatctctggatataaatttcttcctaaaataagtaaaaatcactgatgttttcggttttactggtttgtttctctgttatttcttaatcgttgtgcgcattacgtggtaacaggaactccagtcgatgaatgttgttccgcgtctgaaactcacagaggcttga

SEQ ID NO: 181049 - DNA, 1044 bp, Arabidopsis thaliana landsberg
atgactacttcaccaatccgggttcggatccggactcggatccaaatctccttcatcttcctccttacccatctctcacaatcttcttcctccgaccaatcttcactcaaaacggactcattatcactcctctctttcaaaaccatgatccaagacgatccaaacaacattctctcaaactggtcacctcgtaaatccccttgtcagttctccggcgtcactgtctcggaggaagagtcaccgagattaatctctccggtagtggcctctccggaaccgtctccttcaatgctttcacctctctagattctctctctgttctcaaactctcagagaagttgttcgtcttaaactcaacctctcttcttcttcttcctttaaccctaactcatctcgaactctcttcctccggtttaatcggaaccctccctgaaaatttcttttccaaatactcaaatcttatttccatcaccctctcttacaataacttcaccggaaagttacctaatgatcttttcttaagcagcaagaaactccaaacccttgatctttcttacaacaacattaccggtccaatctccggtttaaccattcctctttcttcttgcgtctccatgacctatctcgatttctccggtaacagtatctccggctatatctctgactcactcatcaactgcaccaacctcaaaagcttgaatctttcttacaacaacttcgatgggcagattccaaaatctttcggtgagcttaaactcttacaaagtttggatctttctcataaccgactcaccggttggatcccgccggagatcggagatacttgccggtcattacaaaacctccggctttcttacaacaacttcactggtgtgatccctgagtcgttgtcctcatgttcttggctacaaagtcttgacctttcaaacaacaacatctccggtccgtttccgaacactatcctccggagttttggatctcttcaaatcttacttctcagcaacaacttaatctccggtgactttccgacttcaatctctgctt

SEQ ID NO: 181050 - DNA, 1909 bp, Arabidopsis thaliana landsberg
atggggtgtgctcaatctactattgctgttgtgggaaggaagaacaagaagaggatcattcaagaatctgtagtgtttgttctacagttccgtgttcctgttcagtctgatcttcagcgccaactcaaaggtgtttctcccaagacaaccatcgatcggttgacatgtttaagaaatcagattgagttggtagctgaggacacaggtatagagaaattagaccaacttcttcctcttttcttgcgtgtcaagacataaggttccatcttttctactgcagggggttcagccatctctgagttgcgtacagctttggaggagtacttgtcacttctatccggtcttatcaagaaaagttcgtgtttgcaagttttgattaacttaaacagtttagtatattcaaatggtgatattagaatatttaactctacaggtaaagatggaatggagggctgcgtagagctcaaatggaggacccttggcgatggtcgacgagtaagttcggtttttgcttaaattaagctgatcctaaggatattcattttgtttgttctagtatcattaaaatcttaacaatgtgaagggtgtatacaggcagagatatgttgcacaaacctttggatggagatgttgatagtgatccacatgatggctgctttggcattgactgaagctaactctctcatgattccaaaggattgctatgcttctggttctggcaatggcgtccgtgtggtctccactggtgtggcctcgttgactttcacacttttattttaatttattgtgtttacaaaaaactaattaacctgtcactttcaaacagattgcaggagagatgcggttgacttgctctcaagtcatctggatacttggagttctgcgtccgagagattctgactcaacttcctcatgatataaagtatgaagcacaaatacataaattctaggatcacattaatacttacatatctgaaaatttgctatatgtatgcaggagtaagttgccagatgatatgcaggaaagtgtattacaaactctctctatacaagcactaggccaggttacacacatgcttactttgaaactgtgactcctaaacctgaatcttgtatatatgttttcaatttgtaagtttggttgaatctcactgcagggaactgagattcaacttggattagcagttgatagtcagaaagcaacattgtctgtgaagaggagaattgcatgtgagcaagtcatctacttcactcaggtcctcctcatagtttaacaatcttcagcttcttataactgtggcatgctttcggggcaatcatatgtcttttctctgttttaattattaatttgctataaaatgatctcattatcatttcaggcatatcactgcttgtctagttgtgaagcagttagccatggatgcgccaagaaacttctccggtttatctactggaagtttctggaagcaaaggtattgtatgtgtatgtaagctattgttgagagtgatccgatatatattcatctctattgttctttcataactatatctctctattatgttctgcttttttcttaacaggctgcagcatactactaccatggactggtaacagacaagggaagtgagccggcttgtcacttgagcgctgtgtgttgtttccttgcagctgcagagatcctaggagaaagcaaaaaagcctgtcttagcttctgcttagctcctcctgtcacaaggtttgtgttgttgtatgatatcctacatgtgaattgtgaatgattcagaattattttgtatctatcagggctcctcctatctggggtgttatgaagcatttgagccagaagattccagaagttgcttttagaaagtctcagacatatggatacttgcttgaagaagaagaaaa

SEQ ID NO: 181051 - DNA, 256 bp, Arabidopsis thaliana landsberg
ggccgattgcatagacctggtccgcacgattgaatatgtagcgcaagacgagtcgagaaatgagcgagagcttgtcgagcctttgatcggcaagcgtgatgagaagtggcaaaccgctcttgcgtttgaagaatatcccggcgagacccgcatagctcgccatgagcgaccaggcaaagagatagcggtgcttcttccgaagctgcgcagcgatatcagatccgtcgaacggcaggacatatttatcgagcgatga

SEQ ID NO: 181052 - DNA, 394 bp, Arabidopsis thaliana landsberg
atgttgaacgtagactgtgacatgtatgctaatgaagcagatgtggtgcgccaagcaatgtgtatatttctacaaaaatcaatgaattcaaaccattgtgcttttgttcaataccctcaagatttctatgattctaacgccgacgaactcaccgtcttacaatcagttaaatttctcttactctttatattttttgatcaatttaatgttattaatcgttatgtacttaataggttgttttctttatgttaaatttagtatttgggacgaggaattgcgggaatccaaggacctacatatgcaggttcaggatgcttccacactagaaaagttatgtacggtctatcaatagatgatttagaagatgatggaagtctttcttcacttgcaacaa

SEQ ID NO: 181053 - DNA, 119 bp, Arabidopsis thaliana landsberg
ttcgcataatcaaatcggagttgaattggaggaattctgatctaataacgaagttagaacatcaaagatctctagaaactatagagaagtcgtttgttggaggaacgatgagcaactag

SEQ ID NO: 181054 - DNA, 2388 bp, Arabidopsis thaliana landsberg
atgaactttagccttgaaataaagaatggattaacaaattcccatgtacatctagtagcacgagatagtgactatagtaaggagattagcattcaaacatcaaaaacaattagacaagtgaatcaaacccaattgatcaaaacgacaagttaaatgcaatcgaaacaatcacctctgaattgttacaccgacgaagcaaaaaaacaaaacagtgaatcgagatacgcacaatcatttcaatcaaattagtcagtagcaaaactactcaataaacacacaaaattgacacagtgcacctacaagaaggatccccaaataagattagcagtaacaaaaaaaacaaatcgtcaaaatcatcatcaaacttaaatagaagaaggatcacttggggatgaagatcaattaacacgatctaagaaggacaaaatcaaaagggagaaaaatccaatcttaccaaataagaagcaaaacccagataaggtttggcgatggcagaagaaagagaaagagatagtgattaaggaacagcccggaaacaaaggagggaaggaagaccgctatagagatttaggaagcggtgaggagatgatagagagagagagagagagcaagttctggaaaagagaagcgttaaagaagatgaaaaggagagagagactcaataagaaaggcaaaacaaatattataaaagaaggcaatagaagaagcaaagggcagaggcgtggctgatcacaggctactctcgatctaatatatagtcccaacaaaatcttatgcattttcctttacatttactctattttcttttatcttcacattaatatttctgatacttacttaaaatacgttaaaacggtgtcgaatcagcagatcaaacggaacaagcggaataaatataagttttcgtttatagaaaactagttttgaaatgattgtagataaacaaaacagaaaaaagttaatttcaatgatatcggtaatgctattcttcgaggattatttggttgtgttcaacaagtaatttaatcatatatataggcggactagagaaaggaatgctttgaaaacaaatatttggtgcggaaggtatgtgatttggcagaattgtcttgtgtttttagattgtgttcaaatcttatgtaacataggccgtctttatacatcaatacgatgccaaagaaatgtcaaagcaaataatatatagaaatccaactaaaagcttggaagaaacaaatattaagggtttctttttaaaacctttatgcattgtatttggtaggtgaactttgaatgacaaaatatgtgacatggtaaaagatttttgatggcgatacacgtttgacgtttaccttagtccttaagctgcatgtattggtttaggctttacacgtttagtctcgtgttatcatacatatgttataatgcgatgcgtggtgcaaaatccgcattaattgaccggaaataggagaaaatgagctagtaggaaaaaaaaatgttatcatcagaagtttgtatatgaaaacccggaaagaaaaaagcttctccaaagactggtccgccacgtatgacgtatcgtttgtgattccgttggtagaatcgtaatgcaaaattatccaaacacgacaaagacgatacacacgaatttgcttgaacaataataaacaaggttctttgaagaaaagaaagtaataaactatgcacggcactaggagtagaaatgattgaaaccctttaacaaattgaactcatcttgttgccgaagttatacagataacgtatggaatatgaatgggtttgcgattactagtttattggactttcaggccctttttagagaaaattagtttcctcctcccgaaatagtcctgcattagggaccacattatgggcccatattgaggcccaccttaatggtacttatatactattttgtacggaactgattgatagacattagacacggagacattgttgtcgttcttcgcagacatttcgattttgaggacaaatcacaatgggagaagcgcctgcccagattcgacgagtttcgcccacgagcttagggcttgtcttcgatgccgcctcgtcaagacttacgatcaggtctggattctcttgtcacttgtgatttgcgtgtttcttctcttgcgaatatttttttgcctaatctggtttctccaacagtttagggattctggatgcgagaactgtcctttcttcaaaatagaagacgatcatgaacgcatcgtcgatgttacaactcccaacttcaatgggtatggcttaaattcgaatccttactttgaaaatttacatggcactgttcataagtctgtctctcgtacttgtcgttacattgaaatttctgaacctagtctatacttatga

SEQ ID NO: 181055 - DNA, 564 bp, Arabidopsis thaliana landsberg
ttcttctccaccagacctcttccatgtgatccttcaagcttgcctaaatatcctcccagcaaagagctcgatgcaagaatgcgggatgaggaaagtagaaggtatgccattcagattttctagtctgatgtgacttttatcctgcaatgctcttacgatagcatagtatcattaacgcaaaaagaaatatttatagaaatgctttaatctagttcctgtttttgtagacaagttggaggaaacagggaccaaagacaccaagaaagaagaggaactaaggaatctcgagccatcccagcccctgacgcaaatgcagagctggttgcatcaatgcaggttaaaaaatcttaaaaaatctatttctttcgatgttaaagctttttgcttttattcaacgtttttgaccctctcgcatttatgtcattgcagaaaaggcagagccagtctactaatagaagtcgaagcgagaagtttaatccacatcctgaagaagttgcatccggttttccaatcgatccaccaaggccgtcatcacatgcatttgaaccaaacagagaatcttag

SEQ ID NO: 181056 - DNA, 413 bp, Arabidopsis thaliana landsberg
  unsure (1)..(413): unsure at all n locations
atggcgaatgcggatgcgctccggcgtcgcttcgatctcgcattcgacctccgccatcacgcccaggtacagattcatcagggcgtatcgtcgcgcaggatcaacaggccgcgcgggctgtcggcgacgaaaatgagcttgcgtgccggatcgacgtcgagcccgaccgcgccctcgaagaactggctcgtcgtgtagtcggcctgtggatcccaggtgttgtagtagccgacttgtttgggttgtgtcggatcggacatgtcgagcacgcgcacgccgtnnnnnnnnnnnnnnnnnnnngccttgttcccgaacgccatcaagttgtggatcgagatccagtcgcgcgtcttgtagctgccgatcggctgcatgaacgtcggcgacgcgggatccacatcgaccacgtcgag

SEQ ID NO: 181057 - DNA, 320 bp, Arabidopsis thaliana landsberg
aacaagaaatcggtttccttcgtgctcgaaatgcgggtttggctggaaatttagaagttacgaaagttgaagagaaagaacgcgttaagggattaatggatcaggtaaatggtatgaaacatgagcttgaatcattgcggagccagaaagacgaatctgaagcaaagttggagaagaaagtagaagaagttacagagacgaagatgcaattgaaaagtctgcaagaagaaacagaggaagagaggaatagactgcttgaagagattgaccaacttaaaggagacaatcagatgctgcatagaagaatcttagagctttga

SEQ ID NO: 181058 - DNA, 687 bp, Arabidopsis thaliana landsberg
aaaatatgaagaagctctacagaaaaggaaccgtacacccgtcgccgccgcagataaaatccaacgaccaccttcttactcttcttgccgtcgctattttctcactagcggcggttctctcaccggaagaccgtgaagttttagcctatctcatatcaaccgcatcttactccggcgagcgaaaccctacctcttgcctgaataagaccaaagcccacaaaaaagccctttttcgacaatcactcgcctcttttccactgtgactgctttaggtgctacacgagttactgggttagatgggactcgtcaccgagtcggcagcttattcatgaaatcatcgatgccttcgaagatagcttcgagaagaacaagaacaagaaaaagaacgttactggtaagaaagatagaagaaagcgttcagggaagtcttcttcacttcttgctagttctagctttagtacggatgactcagagattccgagtcgactcggtgagtcagttgtgaattcgtgtccgtgtacgagttcaagcgagttgactcaagatgtaggtggttgcagcggcggtttggaaccaatggagtttttttgtgccggagacgcttgtgagaaggtggaggaggagaagggaaccgtgaggagatttgtgagttttattggtgagaaagtttttggtgtttggggataa

SEQ ID NO: 181059 - DNA, 159 bp, Arabidopsis thaliana landsberg
atggcgaacacaagagagccggacacccaaatgcgagagataacaacccaaagaaccaaagcagagccccggagaacgaaggaccacccaccgagagagagtcctacaccgcagataccacaaaatgccagtgaagcacccaagcgacgcagaagaaag

SEQ ID NO: 181060 - DNA, 53 bp, Arabidopsis thaliana landsberg
atggcgatggttcggactcttgctctatgccacaatgctatagttgatgctaa

SEQ ID NO: 181061 - DNA, 194 bp, Arabidopsis thaliana landsberg
caattgaaaccgttgaccaaatctctctggaggaaggtgacagtctgacagataccgttatgatgtgtatggatgaatgcaaaataacaacgaaacgcaagaagacagaaacagtagagatagatgtgaatgcatgcatgggaatggacaagatgggaagaacaaagaagcttgtgctttcctgttgtggttga

SEQ ID NO: 181062 - DNA, 629 bp, Arabidopsis thaliana landsberg
atggaccctgattacaacgtggatgaagctgagtcctggtccgctaaaccgagagagcaacatgtttaccagagcttcagggatgaattcgaacgctctacagcccgacgtaatcagagaagagctgaaatcgccaaaagaaagagggcgatgtcaagtagatatgagctgattgatgaggatatcgaaactgagtatgagccagagtcatggcgcaaggagacgaagctactgaacaaacccgacgaggttacagtggaggagtatatcagattctttgagatgaatgacttctggggaacgcggtatccgtgttatgagactttagcccagctggggttactggaggacgtgcaacatctgttcgagaagtgtcacctggagacactcatgtcttacccttaccctgcctataaggaggagacaatcgagtttctttccacgctgcaagtggagatgtatgcggcactcacagactttgagctggataccatggggttaggcttcttgacgttctcagtgaatgaacagtggtatcagctttcgatcaagaagttagaagaactgtttggtttccctagtggaaagggaactaaacccagatttgacagagaggagcttaaagattt

SEQ ID NO: 181063 - DNA, 276 bp, Arabidopsis thaliana landsberg
agtgacaaagaccatttaaaaccaattttcactgatgtggatcaagagatgatggagccagagctcttagactcatctggagatagctcagatgataatttcgttgatgcaccaatcacgcaaagtgcaagtggaaggaagcttcatcgagcttggactatctctgaagttgaaaaactagtggaaggtgtgtccaaatatggagtagggaaatggactgagatcaaaaagctttcattttcaccatacacgcatcgtaccactgtggatctcaag

SEQ ID NO: 181064 - DNA, 878 bp, Arabidopsis thaliana landsberg
atgacgaagcattcatcagcgcgaagaacagtggttccttctatatctctctttgctctgaatagttcactgttaaatcgattgaaatcagaaaatcatcagacaaaatttagttattacattgctcggatttcagctctagctgactgtttttgttttacatcttcttttaggtttacggatgcattcactttattgatatcgttgccgaaagatactcatatttggtgtgggcacggggatataatgggacctcttatagagactttctacaattacttcaaagatgatagagttgattcacctctcaaggtcttgtggaagagaatctctgaagagatgcggctttgtgcgcaatgcatttgtcagcaccatcagactcaagagatgtatgaaaaagagtatgagtgctcttctgttggtccattacttgttgtgttgcggaaacttgatgaggaaagggtgacgaggcacttgcaagagatcaatttgaaaatagaaaaaggaacatatgatccagatcatcatcatgctgaagttgttagtgttatgtacgaggtattgtagtatatgtgctttttcatttcacttaaaataattactggattgttcttttcactgatgaatcatttgcgttaccgactgactctgatgatctgtatttttctattcattttgaatcctcatgtcatgtcatttctttgcatcatgggattggcatctagtaaatagtaacttatgagcctttattttggtgtcaggttttgatgtttccattcttctttgatgatatgtccttatgcactgagtttgagaaatttattgagtcaatcgacaacatacacgagcttgcgtttgctgagaatcaagaatttccg

SEQ ID NO: 181065 - DNA, 174 bp, Arabidopsis thaliana landsberg
tgcagcatcaaccgctgctcgcaacctattgcccttattattatcctcgccaatatttcgcttttggtgattaccaacagcatctttggttttctcccccgcctctctgaattccctcgaccggggtacaccatctacatgtgccagttcatctttacatttcgcttcacttga

SEQ ID NO: 181066 - DNA, 266 bp, Arabidopsis thaliana landsberg
atacttttcacgaacgtaagtctcgaagtcacacggctttctcagtggatttcattgccgagggtaaccctaacggcgtcgttttcaaagaattatatgtcaaattaaaggcgaaacgtaagatttacggaaatgtctttggttatgctggacatattgatataaggtgtcaaaatctaacccgaagctatgagaacgttgagaagattcatttccactcttcttacacagatatggaggctttgactggaagtcgttgttattaa

SEQ ID NO: 181067 - DNA, 1017 bp, Arabidopsis thaliana landsberg
atgccttctcaacatatttttcatcacatggactttgttcctcatccaactcatgacaagtatctctctccaccccaaagtgagtcaaaaaatttagatgttcatttaaatagtattcttccctcacatgtgaatagtgatttttgaaaaatgctcttcttgtttcatttcaatagataaatgctggattcttgactccagcgcttatggggctttacgttgtgtttatctgctggtgcgccattcgaaggcaagtttcatctgaatatcgagcaacttgagagtagtagtctctatttatatgttcaagaagtaatagttttcaactctacaacattttgttttgcagtgagcctgtaggagaaacttgcaacagaaaagcagaaggttctagtagaacagactggcttaccatcatagtacaaatctcaaacctttccaagaatattttcatgacctttcggatattttgagattgtaaagaaagtactaaaaaggatattctatgtatgttgtatattgtgcagagctttgttgttgcactgcttgcaatggtaatcgcgacattctctactggagtagattcacaatgttttcaggtttgttatctatgagctctgccaacttttctgcaaaacttcaaaagagaaacttgactaatgacaatagcaaatgtccctttacagtttagaaaagatgagaatcatgaggaagatgcaattccttacggatacggattctttcattttgtgtttgctactggagcaatgtactttgcaatgctacttgttggttggaacattcaccattccatgaaaaagtaagttcttgatgaacaaatactacaattcatatacctaaaagaaacaactaagctaggtttttgtgttaggtggacaattgacgtcgggtggacaagtacttgggttagaatagtaaacgaatggctcgcggttggcatttacagtaagttaacaataaaaactctctattacctgtttttgatacagtttgtaa

SEQ ID NO: 181068 - DNA, 653 bp, Arabidopsis thaliana landsberg
atgcataaagtggatgtcaaaagcggtatctccacctctttttggtatgaccactggtctcagctgggaagactcttcgatgcaacgaatcctcgtcgggtcatagacatgggaatcccgcttgaagcaactttggattctgtcttgcaaactcatcgcagtcgtagacaccgtgttgaaatctacaacaacattgaagctgaaattcagagattacaacaacaggaacgagaagctggtccggacgtatcactttggagatcttcgagaaatgagttcagaaaacagttcgtcaccaaaattacttggaacaatgtccgaatgcctaagccacaaatgaactggtataagggtgtatggttcccctactctacgcccaagtactcttttcttttgtggctcacaattcataatagactcccaacaggggatcgcatcaaaacatggagctccggccaacaagtcgcttgcaccctctgtggcaatgatgaggactcacgaaatcatctctttttctcttgccaattctctgctggaatttgggagaacatgactcaacgcctcttgtctatggattactcaacggactggcaccatctacttactctgctctgcaactcaaccatgccaaaggacttactcttcctgttccg

SEQ ID NO: 181069 - DNA, 5086 bp, Arabidopsis thaliana landsberg
  unsure (1)..(5086): unsure at all n locations
gggtgacatctactggtgctcctccgaagcttgtacgtccaaaaacagatatgtggcttgtatctgcatccatgagaatactggatggtgaatgttcttctacagctcttgcatataacttggggtggttatcacatccaggaggaagtgcaattgcagctcagttgcttgaacttggaaagaacaatgaaattcttattgatcaggttcttcggcaggaactagctttggcaatgccaaagatatactcaattcttgcaagattactaggttcagatgagatggacattgttaaggctgtacttgaaggtagtcgctggatctgggtaggtgatggatttgcaactttgagtgaggttgttctcgatgggcctcttcaacttgttccctacattcgagtcatacctaccgacttagctgtttttaggggactatttgtggagcttggtgttcgagaatttttaactccatctgattatgctgatgttttatgtagaatagctgtaaggaaaggtacttcacctcttgatcctcaagaaatcagggcagctgtgctgattgcgcagcagttggctgaagcgcaatttcttgacaaagtaacaatctatttacctgatgtttctggtcgactcttcccttcaagtgacttggtctataatgatgcgccatggttgactgcatcagacaatcttaacagctcgtttagtgcagagtctacaatgctattgaatgcgaaaagaacaatgcaaaagtttgtccacggtaacatatctaatgaggtagcggagaagcttggtgttcgctctcttcgtagagtcttgctggcggaaagtgctgattcaatgaattttagtttatccggggctgctgaggcctttggacagcatgaggcgttgaccaccagacttaaacacatactagaaatgtatgctgatgggcctgggattctttttgagctggttcaaaatgcggaagatgcaggagcttctgaggtgacattccttttggataagactcattatgggacgtcttcactcctatctcctgaaatggcagattggcaaggccctgctctgtattgtttcaacaactcggtttttactcaacaagatatgtatgcaatctcacgcattggtcaagcaagcaaacttgaaaaaccttttgcaataggaagatttgggctgggatttaactgtgtttatcatttcacagacatccccgggtttgtttctggagaaaacattgttatgtttgatcctcatgccaatcatttgcctggtatttctccaactcacccagggttgcggattaaatttgctggaagatatatattggaccagtttcctgatcaatttgcaccattcttgcattttggttgtgacttggagcatacatttcctggtacactctttcgatttcctcttagaaacgccagtgttgctcctagaagccacataaagaaagaaacatatgctcctgaagatgtgttatccctcttcacttccttttctgctgtagtttcagaagctttaatttttctgcggaatgtgaaaacagtatcgatttttactaaggaaggggctggtcatgaaatgcagttactgcatcgtgtttgcaaagatcacaatgttggacaagatactgaaccaaagccatctagtcaagtgtttagtcttcttgacgaaaatatttttgctggaatgaataaagatcagttgctaaaaaaactaagcaacactgtagttaaagatctgccatataaatgccagaagattgtggtgaccgagcaagattcatctggctgtattttacatggatggataacaggagaatgtctgaatgccggggtaagtaaaaagaacttgaaccttccagaaatgtcccataagttaataccatgggctagtgttgccgtgcatataaattctgtcaagaatgaaaatgtggaggatctggctgctagcatttctaatatatttgggccatccactatttcaattcagaatagaagaaattttggggggcgtgcattctgctttctgcctctacctataactacaggcctccctgcgcatatcaatgcatattttgagttgtcatccaacaggagggatctttggtttggtaacgacatggcaggggatggaaaagtacgctcggattggaatctttacttgattgaggaagttgtcgtaccagcctatggtcatttgcttgaaaaaattgcatctgaacttggtccatgtgatttgttcttctctgtctggccagtaactctaggaacagaaccttgggcatccttggttcggaagctctacagttttattgcaaataacggtcttcgtgtcttatataccaaagcaagagggggccaatggatttcaactaagcaagcaatttaccctgatttcagctttcctaaggcggatgagctagttgatgtccttgcagacgctggtctccctgtaattaatatctcaaagacagttgcggaaagatttggagaggcttgttcatccttgcatttaatgacaccccaactattaaggactctgttgactcggcgaaaacgtgagtttagggatagaaatggcttggccttggcattagaatactgtcttcttgatttaaaagttccttttctggcggatcttctttacggtctacccctgctacctcttgctgatggttcatttacaacctttaacaagaatggtactgctgagagaatctttttcgctgaagagattgggtatgaacttttgaaggattcacttcctcaccaactcgtggaccgcgaagtgccggaaggagtttatagtaagctattggctgtagctcaaagcggagaatcatgcatatgtctcctctcttgcaatttgcttgagaagcttttttttaagctactgccagcagattggcatctctcagaaaagatactttggacacctggccaacgaggacatccgacagtagaatggataagggtactgtggagctatcttaagttatcttgtgatgacctctcagtattttctaagtggcccatattacccgttgaagatggctgtctcatgcaacttattttaaattcaaatgttattcgagatgatggctggagcgagaacatgtcttcattattactgaaatgtggatgccggttcttaaatcgtgagcttccagtagagcaccctcagttggaaacatttgttcagccaccaacagcaacaggcatattgaatgcacttcttgcgatttctggtgggcacgaaaacataaaagggattttccttaatgtttcagaaggagaattgcatgagcttcggaattttattcttcagtcaaagtggttctctggtggacatatgaatgaggtccactttgaaaccatcaaacacctccccatatttgagtcatacagaagtagaaaacttgttagtttgaactgtccagttaagtggctcaaacctgatggcatcagggaggatctgttggatgatgattttgtacgcttggactcagagagggagagaactatcttcaaaagatacttacaaataaaagagccctcaaaaatggaattctacaaagcttgtgtacttaatcgcatgtcggagttcctttcgcagcaagaagctctgttggccattttgcatgatctaaatgatctggtcgtcgctgatgtttcgcttcagtgtgcaatatctacaaccccttttgttcttgcagcgaatggattatggcaacaaccttccaggtttgtctatcttattaccattttcctattctgatacgttaaatatgttaaatcaaagactaagctacagctgcaacttgatattagctatttttgtttgcatttacacgcttaatacagcaacctgatattagctatctttgttggcatttacacactttatagagaacctgtatatctctatagttgtcttcatatttttgtcctattttcaggctttatgatcctcgtgttcctgcgctacaggagcttcttcacaaagaagtctactttccttctgagaaattctcagattctaagatcctggatgctttggttggtcttggacttagaacaactctggattgttctacctatctggatgctgctaaaagtgtgtcaatgttacatgacttgggagatttagaagcatcgagatatggaagaagattattattccatatcaaaactctttctatcaaactatcatccaagacaggtgaagcgaaccatgatgagtcccaaaatataatgtccattacaagcgaagactcgtttgatggacaaacctatcctgaatatgaaacggagactagctatcttgggagcttgcttactcaacaatcagaggatgagttttggtgtcagctgaggtctatcccatggtgtcctatttgtcttgatccaccaatagaaggaattccatggcttgaatctagtaacttggtagcatctccagatagagtaaggcccaagtctcagatgtttnnnnnncctgccacaatgcacttactggatggcgagtgccagtcatcgtatctacatcagaaacttgggtggatggactgtttaactattgatatcctgtgcagacaactaatcgagatatcaaaatcttataaagaacagaagtctagttcctcagtaaatcctgaatttgagagcatgttacaaagccaaattcctctactttataccagactgcaagaactttctagggaaaatgactttcttgcccttaaatcagcactaagtggtgttccttgggtgtggcttggtgatgattttgtctctgctgatgttctttcttttgattctccggtgaagtttaccccttatctatatgttgtcccttcagaattatcagactttaaagaattgcttctagaattgggtgtgagacttagttttgatgcagcagattatatgaacactctgcagcatttgcagaatgatataaaaggatcacagttaacagatgagcagataaattttgtcctttgtgttcttgaagccgtgcagactgtttttccgaggtgtcttcagatagtgataacaattcagtgctag

SEQ ID NO: 181070 - DNA, 170 bp, Arabidopsis thaliana landsberg
atgaaaatctacatcgttttcggactcctgtgtctggttggctgctcgctggtccaccaaagtgaagccggcgactgctggaacttcctcactgggtctcgctgtgacaatgaagacttttgagaacaaattaggctacgctcgatgcaatgacgtgtgcaagaaacgag

SEQ ID NO: 181071 - DNA, 76 bp, Arabidopsis thaliana landsberg
atgggtgcgattcgaaaatctatttatgtggttgagatgcttaagcggagaacaacgtcgatcgttcaaagatttt

SEQ ID NO: 181072 - DNA, 73 bp, Arabidopsis thaliana landsberg
atgagaatgttaaatccgttccccggttggttaaggagaaaagagcagagtaagctcttcactcgagaatgcg

SEQ ID NO: 181073 - DNA, 838 bp, Arabidopsis thaliana landsberg
gacattaaaaaatggaaactggccgatccaagaaaatttcattacctgaatcaatctcaatgcattgagttggagagaatggatgatgcgaaggagtatcgtgaaactagaaaggcaatggatgttgttgggataaattcagaggagcaggtaactttttgttttttggtcatttccttggtaaatattatggtatcgacatatgagtgtcttttgatataactttatgtcaggaagcaatatttcaagttgtggctgctattcttcatctgggtaacgttgaatttggtaaagggaaagaagcagactcgtcagccccaaaagatgacacgtccaactaccatctaaagactgcggctgagcttttcatgtgagtaaattatctatgaatttataatgtgaaatcttcgtggaactgattcattgaagatgggataaagaagtagttcctgactccttggatttcgtcaggtgcgatgagcaggcacttgaagattctctttgtaaacgtgtaattgtgacacgtggtgaaaccattacgaagtgtctggatcaagaatctgcggcactcagcagagatgcattggcaaaaacggtgtactcaagattgtttgattggtatgtctaatcttaaatacactcagaatttgggtacctaaatgcttctctttctttgcatacgtactttaataaaactttcttaatttgctctattgctctttcaggattgtgaacaagatcaatgattcaattggacaagatcctgactcagagtatttgattggagtgctggatatatatgggtttgagagttttaagacaaacaggtgcttaagcg

SEQ ID NO: 181074 - DNA, 105 bp, Arabidopsis thaliana landsberg
atgaaagattggactacgataccctatcgcaatgatgggaaaacagtgaccaaacgatgcaagcttctatataccattcatcaaggataccctgaaaggttcaag

SEQ ID NO: 181075 - DNA, 1112 bp, Arabidopsis thaliana landsberg
atgaagcaggcagtttttctggtgagttctttgggatatgcataagaggctactctagtgtgtggttcttagacatgatactggcatgctcaacacttcactgcacaacttatggcatactttcaacaagtttcgatatgtaattctttgctctgtcttcagatgaactgatctttacatgttcctgcttttctctttacagaattcaaacaggaaaatcggcgaaaaggcagaacaaaaacaaatcagcattttgcttatgagcaggaagaagatgtcacagaaaagtagagcatgctacatgtgcttacagtgtaagcttccaacttcatcttctttttgtagaactacagagatcaaaacattgcaattaaatggattgaatacttaagatctgagatttaggaattaatttaggatctcctttttctggaacgttctactttacatgtaattataacaaggattaggtttcgtttgagagaattatccaatctggaaagtgctatagaggctaggccaatggggtttaccagacctggtcaagcccttccaaacctatgcctctcttctttatggtaccagctctttgtttcatcgatagacttgatttgacttgtattgttatggccatatgggatattagaatgataggagaaagggatgaaaaatgttgcatttggcgattagagtcgtattataacatgatggtgtcaccggataaatcttcgttttcaggtacgttgataactcttcttgagtgagctataactagttcctatcccgtgatcagtgaaacgagaagacgccaggtaaattacagattatgttatttctcaagacctgacatatatagtattagataaaccacatatgggatgttatacttctcactgtcttagaagcttaggcaagtcgaaccagacaaagtggaacctgtgtaactaataaatccataactaactgttcttgctaatgaaagtatcagagattcataatatcctaaacccaaaacatatatgttacatttcaactcagaaatcttgtttgatcctcctatagaggctctggcaaaacctgcacaagcgaaaaagggatcaaatacgtcccaa

SEQ ID NO: 181076 - DNA, 2645 bp, Arabidopsis thaliana landsberg
aaaacaaagcaacaacaaaattcgatttacagtcgataacggagatcgagggaagagaggatgtgatggtgatttcaagattccccggtgagtttctctctctccggacagattgagaaaaaacgtgaaccgcggagagagagattgagcaaaacgtgaaatgtcacattacctgtatgaacggaaaaagcttgtacttttttcattttttgatccttaacttttctataatattccaaacgtgactctatagtttagaatcttaacggtatatcctccttttattataaagtgataaatggtctacgatgattacattgctctgagctcaggacacgtggatggtagacattggtggagaaagtgattatgtcacgacgttaattgattattttaaccaagatactaacagattacggattaattagaattagattaaggattatgatagattagtccagaatttaatgaataaaatctctagatagaactttacgtgactaaaaagggtcaaaagcaaaagaagtttaaaattaggactcttttttaatcatcgcacgtgagaaggttccgaccatatcacgtgccaaacccgaataagactcgtttttccaaggcgtttaaaatcaggtcccacttttttcttttatttttcactcttcttcacatcaaatccgcgaccagagatttttctttcctttgatttttcgtttcgtttcgtttcaaatattgttcctcctgtgtgaaggaaaaacaatcttccatttcaatccgcgtcaacgcgattttcttcatgacggtgagcttatctaatctcttcgctttttgaaactagttagttttggtttttgttttggatttatcctgagaaaggtcgatgtttttgctgttgatttgattgaggaagatgtgaacagatctgttgattttgattgttgttttctaatttgttttgcgagaaatggcgttgattattagtgaagaatcgctagtttttttattttagaggatttgaagctgttctctgtttttgatttgggtgaaaattactgtttctgatatgaagaatttttttttttagggtaaaattatttttgtttggattaggatattcactgtagcatttgttttgttttgtaatctgttaatatctgatctgtgccataggattagttttgagacaaggatttgcttttcctagattctgaggttctttttatcttcttgtattgatgatgcaatgtttctgtgttttctgatcattgtattgataatattggttgctttaggagtgtgtgtgtgtgtttagtcattgttttaggcgataaggaatcgagaaatgtgtaatcgaacaactaatgaataagtctgagatttgatttagctggtgaaatggtttgaaattttagtttttaagtcacacgagattatatttcacttgcagatgacaacagttaaagtgagcaatgtttctctaggagcaaccgatagagatctcaaggagttcttttccttttctggcgatattctgtaccttgagacgcagaggtttggtttcctctctattgttacttttgaaagttttagattacagcttttagttcgtcaggttctttactcttttgacatgtttgtacagcgagactgagcggactaaactggcatatgtcacttttaaggatctacaaggagctgaaactgcggttcttctctcggtatttttacttcttagcctgattagtttctcagagaaactttctctatatgattgtatcctttgagtgactgagtattaatgtaattctttcatttcagggagcaacgattgttgattcttcagtcattgtctctatggctcctgattaccaactgtcccctgaggctttagcttccttggtaagctcgtaactcatcatctcttctgagatttttcacaagttaaaatcttaccatttcattctttttcacaggaacccaaggacagcaataaatctcccaaggcaggtgactctgtattgagaaaagccgaggatgttgtgagcagcatgcttgcaaagggctttatactgggaaaagatgccatagccaaagccaaaagtgttgatgagaagcaccagctaacatctacggcatcagccaaagtcgcatctcttgacaaaaaaatcggtttcactgataagatcaacaccggcacagtcgttgtgggagaaaaggtcagggaagttgatcagaagtaccaagtttcagagaaaaccaaatcagcaatcgctgcagcggagcagacagtgagcaatgcaggttcagctataatgaagaaccggtatgttctcacaggtgccacgtgggttactggagcattcaacaaagttgctaaagctgcagaagaagttggacaaaaggctaaagagaaagttggtatggctgaagaagaggataagaggaaagtggttgatgagtttgctagagttcacttgtctgaatcaccaaaggcagcttcatcaacgcaagaagccgaacgtgaatcaaaactctctgaatctcctaaagcaaagaaagattctgaacatcttgagccacaaccgaaaccattgcagcaacaatctcctccacctatggcttcagctcctgctccggctcaaccttga

SEQ ID NO: 181077 - DNA, 273 bp, Arabidopsis thaliana landsberg
gtagaattagtaatgaagatctttggtggaggagaattggagcgtaagatcatggagaaatctggatgtttgagttacgctagtacaacatgggaatctaaaaaaccgggagtctacgaaagacggctttcttacaagtataaccactatgtgtctgtgtttggaggtggagtcacatgtgcacaacagaaatctccagctccaaatgatgaaggctggatcttgaatgaaattgtggctctccacgatgttccattcggagatcattttcgt

SEQ ID NO: 181078 - DNA, 647 bp, Arabidopsis thaliana landsberg
atggcgtaagtcttttctaaaaccaattcacagaaagttgactttttatgattttcattgacttttttaatctcttaaaggtatcaaaacatgccagggatatggaggaaagaacaaatcgaagcatggaagcccatcgttgacgctgttcactctcacggcggcatcttcttctgccagctctggcacgctggtcgcgtttctcatcaaggtttatcaaagaaactgttttacaagtttactcttttaagatttgaaaattgctaaacatggttctttgtgtaaatatttgtagattgtcagccaaatggagaatctccggtctcttcaacagataagccattcgccgatgatccatcgaatgagtttacacctccgagaaggttaagaactgacgaaatcccgacaattatcaatgattttcgtctcgctgcaagaaacgcaaccgaagctggtaaaaaaatccaaactttcactttccaaccaaaccctagaaaaaaagattccaacctaatttttttattatctttttctaggttttgatggagtagagatgcatggagctcacgggtacttgattgaccagtttatgaaagactctgttaacgatcgaaccgatagttacggcggatctctagagaatcgat

SEQ ID NO: 181079 - DNA, 1971 bp, Arabidopsis thaliana landsberg
atgacgaccgacaggccactggagctcctacacatggatctattcggcccgatcgcttacataagcatcggcgggagtaagtattgtctagttattgtggatgattattctcgcttcacttgggtattctttttgcaggaaaaatctcatacccaagagaccttaaagggattcttgagacgggctcaaaatgagttcggcttaaggatcaaaaagattagaagcgacaacgggacggagttcaagaactctcaaattgaaggcttccttgaggaggagggcatcaagcatgagttctcctctccctacacgccacaacaaaatggtgtagtggagaggaagaatcgaactctattggacatggcaagaaccatgcttgatgagtacaagacaccggaccggttttgggccgaagcagtcaacaccgcctgctacgccatcaaccggttatatcttcaccgaatcctcaagaagacatcatatgaactcctaaccggtaaaaagcccaacatttcatattttagagtttttggtagcaaatgcttcattcttattaaaagaggtagaaaatctaaatttgctcctaaaactgtagaaggctttttacttggttatgactcaaacacaagggcatatagggtctttaacaagtccactggactagttgaagtctcatgtgacgttgtgtttgatgaaactaacggctctcaagtagagcaagttgatcttgatgagataggtgaagaacaggctccatgcatcgcgctaaggaacatgtccatcggggatgtgtgtcctaaggaatccgaagagccttcaagtgcacaagatcaaccatcctcctccatgcaagtatctccaccaactcaaaatgaggatgaggctcaaaatgatgaagagcaaaatcaagaagacgagccacctcaagatgatagcaatgatcaagggggagatacaaatgatcaagaaaaggaggatgaggaagaaccaagaccgccacacccaagagtccaccaagcaatccaacgagatcaccccgtcgacaccatcctcggcgacattcataaggggtaactactcgatctcgggttgctcatttttgtgaacattactcttttgtttcctctattgagccacacagggtagaggaagctctccaagattcggattgggtggtggcaatgcaagaggagctcaacaatttcacgaggaatgaggtctggcatttagttccacgtcctaaccaaaatgttgtaggaaccaaatgggtcttccacaacaagcaagatgagcatggtgtggtgacaaggaacaaagctcgactcgtagccaaagggtattcacaagtcgaaggtttggatttcggtgaaacctatgcacccgtagctaggcttgagtcaattcgtatattattagcctatgctacttaccatggctttaagttttatcaaatggacgtgaaaagtgccttccttaatggaccaatcaaggaagaggtctatgttgagcaacctcccggctttgaagacagtgagtatcctaaccatgtctataagctctctaaggcgctttatgggctcaagcaagccccaagagcatggtatgaatgtcttagagatttccttattgctaatggcttcaaagtcggaaaagccgatcctacactctttactaaaactcttgaaaatgacttgtttgtatgccaaatttatgttgatgatattatatttgggtctactaacgagtctacatgtgaagagtttagtaggatcatgacacagaaattcgagatgtctatgatgggggagttgaagtatttcttaggatttcaagtaaagcaactccaagagggcaccttccttagccaaacaaagtatactcaagatattctaatcaagtttggaatgaaggatgccaaacccatcaagactcccatgggaacaaatgggcatctcgacctcgacacgggag

SEQ ID NO: 181080 - DNA, 1115 bp, Arabidopsis thaliana landsberg
ggaaaagttacatatgttgttagaccagtattacctttgggttgtgaagggaaaactagaccctgcggtgccattggagcaagggataatgttagcttagctggttatggtgtggagcttgctttgaagaacatggagtacaaggctatggatgatagtgctataaagaaaggttagagttaagcattcatttattcattttgccacccaaatattgaaagttgaatatttttttattggtttttattccttatcttcattctgttagctatgaatttgctactctttaattgtttctgctatgagtttcaggtatcactcttgaagatcctaggactgaagatcttagtcaagatgttaggggctttatattctcaaaaatcttggtatgtttaactcgaaacataaccagtatataatatataaatatatatagaaccatttctttcaaaaaaaaaatcacttcatttgatctgcaagaatgcatgaatgctcgcaaaatgaaaatgtgtttgttagtggatgtgagatggacgaagataagagaggaatgacagagaatttttttgtagcagctttttcattttctttagagtgatcgttaaggtcaatgctcctcttttgcaggacaggaaacccgagctaagatcagaagtcatggcttttagggattatctcctatcatcaacagtatcagacacgcttgatgtttgggagctgaaaggtactactgcatgtttcgcgtggtttaatagaaattggtatagtgtttcctaatttacctttgttccaacagatttaggacaccaaacagcgcagagaatagtccatgcctctgatcctctgcagtctatgcaagaaattaatcaaaactttcctagtgtagtttcttcattatctcgcatgaaggtatgtcattgtttttttgatgttgtgtttacctgctggttgaattgtttccttgtggttttagatgtgtctggtttatcgtgcagctcaatgaatcaatcaaagacgagatactttcaaaccagagaatggttccccctggccaggctttgttggctctgaatggtgccctgaaaaacatcgaagatattgatctatacatgtaa

SEQ ID NO: 181081 - DNA, 55 bp, Arabidopsis thaliana landsberg
atgctagggatagcaacgggatatgagagtgtcacttctgcatttgacgacatca

SEQ ID NO: 181082 - DNA, 476 bp, Arabidopsis thaliana landsberg
  unsure (1)..(476): unsure at all n locations
atgcccagcaacaatgatatcaccaagatcggtacgttntgttctgatgattttcgtttttaatcaacgagctatagtcagatctgagttgagagaacaatcctttgaagaaagatttcgaaaatctgtacaaaaaaaaagccttgtttgcatctatatgaacggagatcttttacatgttttacacaagtaagaagcatcagcgtctaaggatagaagaaggtcatgatgatcaagacaagaccggtttcatcatcacttccgttctatattactttgatgagttttaaaaacataaagttttcgatccgaagatggttttaacatgtgggatttgtttatttgacacagatcagcttgaaagagtaaaaaatgtgaggaagaacagttcacaatccgaagctggctcttcttcatctgacaactcttcttttgtagcccttgtcaaggcttcaaatctaaaggaagatgcactg

SEQ ID NO: 181083 - DNA, 519 bp, Arabidopsis thaliana landsberg
atgtcgaagttgtggcgcgtggcggcggcgtggccaatcccatggtggtggagaagggtaaggccgagatcgctttcgccaatgttgcgacttcggtttgggctacccagggcgccgatatctatcacggcaaaaaagcgactcacatccgcgcgctgatcggcggcctgaattcggtttacgtgacaatgatagtgcgcaacgccttcatcgagaagaccggctttgacacgatggacaagattatgtcgtcgggaaagccgctgcgcatcgtgatgaagccgcaaggctccgcggttccgccggccgtcgatcttatcttatcggcctatggcctggaccgggcgaagatcaaggccaatggcggcgagattatccaggtggccacggcgcagatcccggacattatccgcgaagggcgtgccgacatcctgttcgacacggttctcaagggccacccgatgatcacggaagtggcgctgaccggcaatatccgcttcctcgatttgtcgggagaag

SEQ ID NO: 181084 - DNA, 274 bp, Arabidopsis thaliana landsberg
cacacggaccgcaaatttaccctcaaattctctgcgattgagatctacaatgaagctgtgagggatctcctaagtggggataataatcaacggaggctcctcgatgatccagaggtacacatcgcgtgtttttcgatattatgctatcatattgtgttagacccactcatttccatccgcttgcttcatcagagaggaaccgtcgttgagaaacttattgaggagaccatccaagacagaacacatctagaggaacttcttacagtctgtgaaa

SEQ ID NO: 181085 - DNA, 352 bp, Arabidopsis thaliana landsberg
gaattcttcattcattgagctcgtaggctgcatcctaaatcctaatcaagtagaaatatactcaattatgagtcatttttcaagaaaaagtaagttaatcctaagtaatataccatgatgtctttatacatcaaagggatacatgtatgtaatatactaatatacatcaaatacataaccaaactggattttttccccgtttagggttccttattataaccagaagagacatgaacacatacctttttaagaatttgtttacttctagtgtcgtcaaagattgctaagaacaaatctgcggtcacctcacgaattcgtgaattcgacgagagagagggaaagagacagagag

SEQ ID NO: 181086 - DNA, 313 bp, Arabidopsis thaliana landsberg
gcgccgatgttgtccgggtgctggtcgcggtggcggcggcgcccggttcggggatcaggccttgttgcacaacgccaaacgctcacgcaccccccgcccgcgatcgctggcggcgatcccgcgggcggcccggcgagacccgtcccgagcctcgagatggtcgacgatcgtcgtcctggcgttcgcggggacgctggcgttgctggtggccggtggcgacctccggatcttccaggccgacagttacaaggcgctctatgacggacggtggatcgtcaagcatggagtgccccgcatcaacgtgctgtcacag

SEQ ID NO: 181087 - DNA, 450 bp, Arabidopsis thaliana landsberg
atgagaaagaccaattttatccaaagtcacaatccggtcaccacccccaagcagctttcgttcagcctggagattgccaccgagcgcgaaatcgacggcgttcagatgggggtgctgagcaacggtgctccgtttcttactattcgcggcctcgctcgcatgtgcggggttgaccacaccgctatcgtgcgcctgacagatgagtgggccagtggccttgatcgtcctcgcctcgcacgaattcgcgagctagttcgatcccagggcgcggcggacactgtcgcctttgtctcggtcattaaggatggcaccgttcaccatgccgtgccggacgcggtctgcatggcggttcttgagtactccgctttcgagagccccgccggcgaacagacgctcaagagttaccgcacattggcccgcaaggggttccgcgacttcatttactcgcag

SEQ ID NO: 181088 - DNA, 607 bp, Arabidopsis thaliana landsberg
ataagaggctcgatcccgttaaggtcacgggtgtgaagatctcccctgaccctgttgtgagtggtgcagccgcaacatttaagatttttggttctactggtaaatgatacttcctgcttccttaataagtttcagcactagataataataacattctttaccttcttgacatttcttgataacattattgcgtgtggtgtgtgtactaggcgaagacatctctggaggaaaagtagtgatcagggtttcatactttgggatacctgtccataccgaaacttcatgacctctgcgatgagacggcatgtccggttgcacctggcagctttgtgctttctcattctcaaacactcccttcaattacaccatctgtaagatttcttagcacttattatctacaaatctatatgctggtagtattcatgaataatggtttgagactcatttttcatttggtaatcttcaaatgcattatcctatgagagtggcggcttctctggtctaacaatacgtctctttgaaacagggtacttacacgctaaagatgacaatcaacgacaagaatggcggaagactaacgtgtatcagcttcaaattcaagatcaca

SEQ ID NO: 181089 - DNA, 57 bp, Arabidopsis thaliana landsberg
gttttaaaaccagatcaacgaggactgacagtaacagaacaacaggaacattcataa

SEQ ID NO: 181090 - DNA, 133 bp, Arabidopsis thaliana landsberg
atggttcctcttgaatcctcaacgcttttcggtgtttacggcggtttcacggactcgatgatgatgagagaaacaactaccaacaatcaagatcctagtggagatacatgttccgtctccgatccagcaccag

SEQ ID NO: 181091 - DNA, 179 bp, Arabidopsis thaliana landsberg
atggccacacattcttcttccacatgagtgagcgcagaccaagagcaaattccagagccactaaatcgattgaagcctcgcaaatgaagtacaaaccaaaatctagggtgaggctcaaagatggaaattggatgagcttacagacggcaaagtatgaagcggagagacatcggatttag

SEQ ID NO: 181092 - DNA, 1757 bp, Arabidopsis thaliana landsberg
aatatatgatattcatgcagccactcataacattggggtaatcatcgccatatggggtccaattgtcttggtaagtaatctgtgttgattaacttgaaaagaatatttccaataccctgaagtttgtgattcatatttaggtttactttatggatacgcaaatatggtatgccatattctctactctttttggagggatatatggagccttcagccatctcggggaggtaattgttgcacttctcttagtacggaaaattttataaatgaaaatcttatgtgacaacaagtttgtgattccccaacattctgtatatttttcttctttaacctccatttttacttttgcagatacgcacacttggaatgttgcggtccagatttaaagttgttccatctgctttctgttctaaacttacaccgttacctctaggtcatgcaaagagaaagcacttggtattagccacacatacaaatttaattgataagatagtgtacgccaacaagtttcggtttgtgggtgaaaatgtaacatttgagtaatgcaggacgaaacggtggacgaaaaagacattgcgaggttctcacagatgtggaataagttcatacatactatgcgggatgaagatctgatcagcgataggtttgaggactttttgtttctcttttatagagtcatcacaattaccttctaagttcgtttcataaacatactcgtgttctttacttctttgatgtgtagggaaagagatttgctacttgtaccttcgtctttctggagatgttactgttgtgcaatggcctcctttcttgcttgctagcaaggtaaataagacagctctctcaataacctcttcacgccatcaattatctcttctttgctgaattgtggttaccttttggtaacagattccaatagcattagacatggctaaagatttcaagggaaaagaggacgttgacttattcaagaaaatcaaaagcgaatactatatgcattacgcagtggttgaggcttatgaaaccgtgagagacataatatatggccttcttcaagatgaatctgataagaggtgagtatttttttttttccacttcattattaaaattggccccaacatctaattgtggatggcctactaactatactactgctgtctcccaatctatataggattgtaagggagatttgctacgaagtagatattagcatccaacaacacagatttttaagtgaattccggatgactggtatgcctttgctcagtgacaagctagagaaattcttaaaaatcctggtaatgtaaatatagattgttttttctcgttcaatgccaataattatcatttgtttatgttaattcactccccctctctaaattaaatttggtcctgttgacagctaagtgattatgaggaagatgattacaagtctcagattatcaatgttctccaggatattattgaaatcatcacccaggatgtcatggttaacggtcacgagtaagtcttgatagttcatatgtaaaaattttgcctcattttctatgcaagaaaatctcctctgcttttcttctttctagtttccaacaatccttaaatgtgtaagcccaaaaactcgtccatgaaacatgctttgtcattctacctgtagaatccttgaaagggctcatttacagagtggtgatattgaaagcgacaagaaagaacaaaggtttgaaaagatagatcttagtttgactcagaacatatcctga

SEQ ID NO: 181093 - DNA, 1832 bp, Arabidopsis thaliana landsberg
atggatagaagttcggtcttaacacttcttctattgattttgttcatctccaatgcttcctccttcgatagatttcgtgagctagttgatgaagaaacacaaaaggataattcaaattcaaccactaaacaagtaaaattcgattcctttatgtgtttttaagtgttttgaacaatgtgatttgaatttactctgtgtttatgcttcaggagtctccgttgattaatcctcaacccatcggagatggaaaatctaatgtgacctcatcagaaccaactctgccaactagtaattcgacgaacactaatcctaaagagcctgattcaatgagtccacctcctccactgatacctgtaaatgagaagaatgatactaaagtgttaaatacaaccgagccgatgagcccgcctccgcctccagcgaacctaacggatagtcaggatagtggaaagctaccggctaacatggcaccgcctccaaagagtttggagagtgggaaaaatgagacagagccaggtaaggagagtcctcctttggctaaagatcctgctaagggaaaggatgataaggggagctcagagtctgccagtgtagatacctgtgtaggaaagtctaacatatgtagaactgagaattcattggtggcgtgcactttgagcattgataaaggtatatttgcgccttcttgtagtgatgttttctttggtattcttggtttcaacgtttactggaaatggtatctctagcatgtgcgttcctgtttatcgacaatgcaatagtattagtcgtgttagcttcttgaataaaagtcatattgcaggtgctgtttgtagcatagttggataagttgtaattcgctgggatgatggtttaggatatgttttactttattcagttattacgttgtgttaatttgtaaatgattgtgatctcaaggatatgaaactttcctagacattatagttattccccaacaatttgcaaggtctttgctttgtatgttctgttttctccactaggttttgtttgagttgattgaattttcatttcaaagctctgttttatgattgcaggtgctgctaactggttgattctagttcaaaatgaaggtgaaacatctctaaaagcaaaaattgttcttccggttaacgctttacaagagctgacactgccaaaacaccagagtcaaaaagtatgtctttcggttcttccgagttgattctatagataaaagtgttatctttgacatgacatatatatatatatatatataaaagtctgattttctttttgtgatttttaatgatacaacgcaaactttactctagttattccaaggtactaaactgaatcgatcttcacttggacaggtaaacatatccattagtggagatacaaacaagatcatactagatactggaaaaggacagtgtgcgcttcacatgtacccatcagaagaaagcaccttaccattccactttccctcatatgaaaaactagtgacgcccattaacggcgcttatttcttaatagtatccgtcattatttttgggggaatttgggcattctgtctttgccggaagaatcgccgtgcaggcagtggagtgccttaccgtgagctagaattgagtggaggaccaggcttggaaaacgagtcaggggtccatgatgtggagacagcagactgggacgagggttgggatgatgattgggatgagaataatgctgtgaaatcgccgggtagtgcagcaaagagtgttagcatatctgccaatggcttaacagcgagggctccaaaccgagatggctgggatcatgactgggacgactag

SEQ ID NO: 181094 - DNA, 188 bp, Arabidopsis thaliana landsberg
atggggacaccctacatgaacaccttttactactctatctattatcacatgggcttgtgcacccatgcgtacacacccttcaaaactataccatcggaatctgtgccgcctgcgacaaattccttattaactcacacgacttggctaccgatgcccatgatcccaagagtagtgcatatcattctacc

SEQ ID NO: 181095 - DNA, 54 bp, Arabidopsis thaliana landsberg
gaacgtgaagatgagaacggtccccacatgcagccacgtggatttaccgattag

SEQ ID NO: 181096 - DNA, 392 bp, Arabidopsis thaliana landsberg
atggaagaacacgacgctgtttctggagggtgttctccgattcccagatccgacttaaaggtaacttctttacttcttcttcttctctggggttcgttgaatttatgtgatatattttttctttcaatttctcgatctaattatacattgctttactttttcaatttctgggattttagatcggcggcaatgaattggatgaaagacaggagttgagtaaaattgaacctgttacaccaactctaaattcaggtaattttactgttactactcgaaccaatttcactcagtttgaattgagtttgaagtttagaacaaggcatagaatatgtaacctaaactctgaatcacttttacctctaatagcccttgaaatgtattgtgaagtacag

SEQ ID NO: 181097 - DNA, 58 bp, Arabidopsis thaliana landsberg
atgaataacgaagaagcttaccaatgtgaatccatagaagaaaccaccaagcacaaag

SEQ ID NO: 181098 - DNA, 375 bp, Arabidopsis thaliana landsberg
atggatggtgcgtttgatttttataatgcacattctctatgagcttagctctaaatatcatcattatattatgatgacttgtggaggccgatttgtctgactgtcaagtgattatgtaacttttataggggtgccatatagtgagcattcaagcttcacagagcttcgtgagtttgttcaagtatgtatcaggaatgtcattattttatctatccgtatctgtcctggataagtttttcacttcttttagcattaactgatttcgttattgcgcagttcttaaggcctgataagattattcctacggtgaacaatggaaatgctggaactcgcgagaaaatgcaatcatgtttcagagaatggctcagacgctga

SEQ ID NO: 181099 - DNA, 1213 bp, Arabidopsis thaliana landsberg
agtcgagaagaacatgctgaacacttgttattgatacttcggaggttgaaagaagagcagttgtatgctaaactaagcaagtgcgaattctggcttcaagaagtaggatttttgaggcatttggtatccagggaaggtgttgctgtagatcccgctaaagtcgaggcagtaactaagtggaaggagccaagtaatgtgtcagagatccgtagttttctgggattggcaggatattaccgaagattcatcgagaatttttctcaaattgcaaaacccctcacacaactactttgcaaaggagttacgtttgtttggagtgagtcttgtgagcagagctttagagcattaaagaaaaggttaacttctgctccagttttaactctttcgagacctggtgtaaggtatgtgatgtacaccgatgcttccttgtcaggtttgggctgtgtattgatgcaagaaaataaggtgatcgcttatgcatctagacaagtacataaacatgaggtcaactatcctacacatgacattgagttggctgcaataatttttgcacttaagttgtggcgtcaatatctatatggtgaaaatgtgcaaatattcacagatcacaagagtctaaagtatttgttctcgcagaaggagttgaatcttagacaaagaagatggattgaattgctaagtgactatgactgtgaaattctatatcatccaggaaaggctaatgtggttgctgatgctttgagtagaaagcaagtaactgtggcatctcttagatcgcaatggaacttaatagagcagatgagtcagtttcacatttctatccgagaggaaaaatttggatttcttgcaacattgggtattgagtcgaatttactagcacgtattcgggatgctcagaggcaagatggtaaattcggtcctgtttgtgaaaaacccgaggattttcgtcagctaggatcaatcttagagacgacgcagtgttatcttttaaaggtagattgtgtgtgcctaagatgtatcaaacacttaaacctttttatcattggaatggtatgaagggtgatattttgtatgccagcaggtagaaattgagcatcagaagcctagtggtaaactacaaccattacctatcacagagtggaaatgggagaaagtttctatggattttgtcacaggaataccaaggtcgcagaagggaaatgactcgatttgg

SEQ ID NO: 181100 - DNA, 970 bp, Arabidopsis thaliana landsberg
ttgtgccatatacaaacttccagaagatatcagaggcagtgagattactcatcagattccaagattggcaatccctaaaaaggtattgttgagtttactattgattggcttccaattttggtttcaagttgtggtgaagaacaaagaaactgctttgatgggttttagtagtagaaccaaagtcacttgtttttagtggttagtttacagtgttcttcatatatattcttcacagactatatctctagtggatttgaaatctggaggtcttctatggcatgaagatggggacaaaagaagagctcctccaaaggttataaaaatcaagaggtgaatattacgaaatgttgtgatattcaagagtcttggaaggcctttatttacggatggtgttaaatattctcaatttcttctctttgtatgcaggtataatccagaaggatctatttctgggggtaggcttgggaaggcatctcatagacttgtgttgcaaacaataaatgcccaacctgattatacgaacatcaactcggaaccagcgttgtgtccaaatactgttttccagaacgaacgagtgccgaaaaagatccctacatttaaagataatgggatacaatggataagccctcctccgagtcaaatcactccgaagaagatgaatagccctcaaaggcaaaaggcttggaagaaggatgaaacccctcagagtcgagagaaatcgaagaagctgaaaagctctctgaaagtaaaccctttgaagatgaagaaaactaaaagccctcagagagagttcactcgagagaagaagaaggaaaacataacccctcaaaggaaactcactaaggcacagaggcaggtgaaacacatacgcatgatggaagaggcgaaaatgataaaacagaggaaaaaagagaagtatttaagaaagaaagccaaatatgcacaaggagctcctcccaaaacagcttga

SEQ ID NO: 181101 - DNA, 186 bp, Arabidopsis thaliana landsberg
atggccgtctttattaaagttgtggccagtgttaaccggagtcgagcctttgtcatcattgtattgttgggtaaggaaaactaacctcttaatgtcttcttcttctgcaagttcgtgttttgatctcatatatccttagtttaaatctaggttttgtttgtgaagaagagcaggaaactgtgacaa

SEQ ID NO: 181102 - DNA, 4228 bp, Arabidopsis thaliana landsberg
  unsure (1)..(4228): unsure at all n locations
atggacattctttttgctcagatccaggcggacctccgttcaaatgacgcgcttcgccagtcatcggcgcttcttcaggcgctgcagcaatccgccgccggaagagatatctctgtgatcgctaagtctgctgtggaggagattgttgcttctccggcttcagctgtttgtaagaagctggcattcgatctcatccgatctacccgcctcactccggatctttgggacaccgtttgctcaggtgtcaaaacggatcttcattttccggacccggatgttaccgccgctgccgtctccatccttgcggctctccctgccttctcgcttcctaaactcatctctgattgcagctctgagattgcttcctgcttcgattctccatctgacaaccttcgtttttccatcaccgagacacttggctgcatcctcgcgcgtgatgatctcgttactttgtgcgagaacaatgtgggtctcctcgacaaggtctccaactggtgggctcggatcggccagaacatgctcgacaaatccgacgccgtctccaaggttgcctttgagtccgtcggcagactcttccaggagttcgactccaagcggatgagccgtcttgctggcgataagctcgttgacagcgagaactccctcgccatcaggtccaagtgggtctcttccatggttgacattgtatggagaaagaggagcgctttgatggctaggtctttagtccttcctgtcgaaaccttcagagccactgttttccctcttgtctttgctgtcaaagctgttgcttccggtagtgtcgaagtgattagacagctttccaaggcttcctctgctgctgctgcagctaatgccaccgttgtggactccaacgccgagaagctggttggcgtctcagatttggttacccatttggcgccattcttggcttcctctttggatccagctttgatttttgaagtgggaattaacatgctctacctggcagatgttgccggaggcaagccagagtgggcttcacagtccattattgcaattttaacactctgggaccgccaagaattttcctctgctagagagagtatagtcagggccgttgttacgaacctgcacttgcttgatctgcatatgcaggtatgtcgttttttacttcattgaagctcggttagttgtgtacctttgtcttgaagctgtggcctatgatttctgaatcattctttttggaatttgttacgaaggtttctttgtttagaagactgctgcttatggtgagaaacttgagagcagaatcggacaggatgcacgcattagcctgtatctgtcggacagctctctgtgttcacctttttgccagagaaagtgcccgaagaggtcagaagcctctgcctgggacagatattatttctctctttgaagatgcaaggattaaagatgatctcaatagtgttaccagtaagagcttatttcgggaagagctggtggcaatgcttgtggaaagctgcttccagttgtctctacctttgcctgaacaaaaaaactcgggtatggagagcagagtgattggtgcgttagcatatggtactggttatggtgctctgaactggacagaaccagcccttgaggttgtggaagtttgtaggccttgtgtcaaatgggattgtgatggcaggacgtacgctgtagattgctatttgaaattgcttgttaggctgtgccatatctatgatacccgtggaggagtgaagaggctgaaagatggtgcttcccaggatcaaatattaaatgagacacgattgcagaacttgcaacgtgagcttgttaaggatctccaagaggtaattaagcctcagctgaaagttagaagtaacccttggcaattttcctcgaagaattttagttaggctttcttaagtactatttaatactaaatgtggaggagaactattgcttgtggactgaaacgtggtcaatgtcttataaaaatcttgatctcaatttggcaggtaaataccccaagaatcctcgggcgtcttatatggacaatcgcagaacatattgatctagaaggtctagatccacttttagctgatgaccccgatgatccattgaatattatcatagcaaacatacataaggtctcttcaacttggatgccgctgctactacatcgaatatgctacaagatgttcaggcagtcttattatgcgcccagaggatgggatcgcgtcatgcaagagctggccagttattaaccaaagagcttgaagagtataggnnnnnnnnnnnnnnnnnnnnngttagcaaacatcaaacccgtttaatattgcagaggatcaaatatgtttcaaatcttcctgaaagaaagtgagctttcccttggcttgtaatccttttattatgtgagttttactgcatttctggattggaactcagacaacctattattttccaggtgggctggagttagtgagacaagaggagattacccgtttagccaccataagcttactgttcagttttacgaaccatcagctgctcaagacaggaaattagaaggtctaattcacaaggccattctcgagctttggaggccaaagcccactgaattaactctcttccttacaaaaggggtcgactcaacttctatcaaggttcctcccacagcatatcctttgaccggaagcagtgatccttgctatatagaagcttaccatttagcagatacaaatgatggaagggtcactttgcacttgaaggttggtatatattctactgtaccatcctgcagttacttgaatacagttttagtggataaagttttagcgtctcaacaccttatactttatgttacctttcagattattaatttgacagaacttgaactgaatcgtgtggatatacgggttggattatctggtgccctatacttcatggatggctctcctcaagcagtgcggcagttgcgtaatcttgtctcacaggttgcatgtcattcttcagtgcttatatactcccatctctttacagttctctaatttcttaagtcttgtcagttggaaaccgtttctgttcttaccaatcaatcagtttcgtatatgttagctgtattatcatggactctgtgatttacttttgtaggatcctgtacaatgcagtgtcaccgttggtgtgtcccaatttgaaagatgtggtttctgggttcaagtcctctactatccattccgtggtgctaggggagaatatgacggtgactacatagaagaggatccacagatcatgaagcagaagagaggttcaaaagcagaactcggagagcctgtgatcttaagatgtcagccttacaagatcccactgactgagcttcttctaccgcacaaaatctcaccagtcgagttctttcgtttgtggcctagcttgccagctgttgcagagtacactggcacatatatgtatgaaggaagcggcttcatggcgaccgccgcacaacagtatggggcttcaccatttttaagcggactcaaatcattatcctcgaagccattccacagagtctgttcccacattatacgcacagttgctggctttcaggtgaacttggttctgttattcttcttgttccttaactggattgatggtctgataaacccctaacttgatgtcactacagctttgttacgctgcaaaaacgtggcatggaggttttgtgggtatgatgatctttggcgctagtgaagtgagcaggaacatggatctgggtgacgagactaccaccatgatgtgcaagtttgtggttagagcatcagaagcatcaatcacaaagcaaatagagtcggatattcagggatggtgtgatgatctaactgacgggggcgttgagtacatgccagaggacgaagtgaaggcaaccgcggccgagaagctgaagatctctatggagaggatagctttgttgaaggcagctcagccgaagaagactccaaagatagaggaggaatcagaaaacgaagaagaagaagaaggagaagaagaagatgatgatgaagaagtaaaagagaaaaaggagaaagaagagggaaaggacaaggaagagaagaagaaaaaagagaaggaaaaaggaacattttctaagctgacagcagaagaaacagagcacatggcgcttcaggcagcagtgctccaagaatggcacatcttgtgcaaagatagaaaatataccaaagttaactaa

SEQ ID NO: 181103 - DNA, 260 bp, Arabidopsis thaliana landsberg
atggtgctggctgcacaagtttatcaaccatcacatgtatttcaaccatctcaacatggtaagtattgattcaacaaatctaccgcgggttaaaatctagtcttcaatattttagaaaatttctcaaaaacaaaaaaaacagatatggaaatattcataaaagtgccctgatttaatgatatgtaggggttgacaacgagcttcttaaacagaatgagcaatggttcaatcagattggtgcaaatctcacatccttaaac

SEQ ID NO: 181104 - DNA, 571 bp, Arabidopsis thaliana landsberg
atgcgagatcggctgcccgcgcaacagccactcctgctccggcaacggaacgggtcgcatcggttctgctggcggatagtgcgccgccacggacggcgccatcagcacttcaacttcatacgcagcagcattgcgggcctgaaatggcttttcataattcaatgtaaaactttcatcgacttccttgagtgcgtccatgatcggtgcctccttcgcggaagtgagcaccagcggcgcgggcgccgaccatgtcatgtcgagatcgttggtcgagtcatagccggttgcgaaacgctcgcctgcctcgatttcataagccgccatggtgttggtgccgaccaccagcaaggccgcacccaacagcctgcgctcatccaccgcgcggagaatctttccggccatgccgtcaatcagcggcaatcgcaggctgcgatagatcctgatcgtgtcagccatgccgccaagtacagcgcgtgcacgttcacgctgctcgcgttcctgcgtgtaccgcgcatggagcgcttcagtttccggcgcacgcggacccagagagcgcgaatcgccacgccgg

SEQ ID NO: 181105 - DNA, 316 bp, Arabidopsis thaliana landsberg
attgccaaggtcggtgcttgaagtttcaaagaagatgctaacagaatcaaggagaaatgttacagttgcctcaagtgaaaaggaagctggatggttattgttatcatcgctattaaattctatgccaaaggaggtaatataatccttatgtctttaactgctgtgtttggagcattcaatttcttatgcaatcctgtttgattatttaggagtttggagaccaagattttgatatattaatcttgtggactgacgtctttgctggaaacccagaacacttgatcaaacaacaggcagaattaaaatctatgttaag

SEQ ID NO: 181106 - DNA, 280 bp, Arabidopsis thaliana landsberg
gacttgtcagaaagttaagtggcttaacacagaagctacacgtcccagaattcattctcttttacgaattcatcaaaccctaaatatttcatcaaacaccatatcgttgtcggttacacgaatgtgggccgggacaatctccggcgtggaggtcggcgagaggtacaagtctcacaccttccaccaacaggcttatgacacgttgtccactcacatgctttcatgtctgtcaacgcattacccggccgtcctctcacgtgacaaaacccatgctccataa

SEQ ID NO: 181107 - DNA, 329 bp, Arabidopsis thaliana landsberg
gatgggacaaaaattctctggtcatacccggaaggcctacgaaagcttcttaactatatcaaaaataaatataacaatccaactatttacataactgaaaacggtaagaacgttagaaacataatcttgaacatttcaataatgtctaacttatcatcaatagatgttttatctattctctttatttaatatatgtaaccacgtaaaaatgtataggtttcgatgactacgaaaatggatcagtgacacgtgaagagataatagaagacacaaagagaatagagtaccaccaaaaccatcttcaacaactccagaaagcgatcacgtaa

SEQ ID NO: 181108 - DNA, 364 bp, Arabidopsis thaliana landsberg
atgacttcatctccctccactgtgcttaatcaccctactcaccagtcaccaacctctcttcttccatacccgaattctcattttaggatccgacccggtttttgtaaccttatgaagcggggcaagaagaactcggatgcgggtgaccgactcaccaactcggatactcgaaccgggtctagcgaattgaatgcgatgatgaaaccaagtttgagttcgatgaaaacgatgggtctacttctggcggttcttatggttgcttcggttatgttctctctgtccgtggtgctcagagacccaccttccgatgatgttattgagactgaagcagcctctagagttcttcagagcagattgcaccaag

SEQ ID NO: 181109 - DNA, 530 bp, Arabidopsis thaliana landsberg
atggatcggactcaaatctctcatttggctctcgacatcggaggtaatttaaaatccaaacttggctttgtttcattcagttttagaatttttcggttctgggtttgtctcgaattaaccggaattggggttttttttttctggtttcgtagggactctgatcaagcttgtgtatttctctgcaaatggagattatagcgaagagtctcgtaatggttgctctgttgtgaaaggaaggctttgtttcgctaagtttgagactagaaagattgatgattgtttggagttcattcgattcaatatccttcatcattccggtaaagttttgatttttatgatcctaacctctgattcataatcggattcatatgtactcagaagtattatgtctatttgcagtagtaatgtatgagtcattagcttactgatttcgagaaaagttgagttcttttgatatttcactgacagaggtccctcctcaggtgtacagcacccgaatgacgaaggataatgataaactttatgttaag

SEQ ID NO: 181110 - DNA, 56 bp, Arabidopsis thaliana landsberg
atcacgccgtagtagcttcggcctgcgctaccgtccattccgctgcggctgcaaac

SEQ ID NO: 181111 - DNA, 91 bp, Arabidopsis thaliana landsberg
atggagttcattgaccaagattcaagaagagaagacaagaagttcagaagtccaaagaggttggaagaaaattatggagagacttataaag

SEQ ID NO: 181112 - DNA, 2463 bp, Arabidopsis thaliana landsberg
atggccgattctattgttgcacgggtacggttgccaccctatgtaagcaacagaatctcatcctctttgactacgttcccaaatcgctgtccaatggtgttgattgaatcatacgcccaagcatgtaacacgaaagtcgtatccctgatggtgtacgacttgccaataggcctcaacatctttatagaaacaacaagggcttaaaatgctgaccgaccccatggataaatcttcatggcttcgtcatcaaaaatcttttggtactatcaaatggtatgctagagttaggatgcaagccataaagtccaatggctagaagagtcaataacccaaaccatctacgcttttcaggaggccaagctctaaacgttactaagccctgcctaagttcatctagattaggaccttcaccggttggcacacgcaattccctgaagaacactttgtagtcagcttcaggctcaaacttttctgtaggcagttgatctatatttaaacccgtgatatgatgaaattcgttcaatccaaaccggatgggtttaccagccacgatacaccaaagcaccttcttcagtattctcagctgtctgcatagtagataatgtacggtcttaccagaccatagaaaatgactatcaacaagcttagcaattaatccaggctctgtctctttcagttctgcccatatatcttttcctattgattctctaattgcagggaactctcccagctttatgttgtgattaatgcctttaccctccagattagaatcctcctcttggtaaagtcttggagggtactcccttgcttggtctttagacatttgtataaccataaatcagccgtaagcattccataactcagccataacataaaacaaactcatccacagataccataactcaggtaaaacataaatctaactcaggcatagataacataactgcgtcataacataaaccaatctcagccacacataacataactcagccataagataaatctaactcagccatatcttaacagaaactcagtcaaaccataacataacaacagctcagttaaaacataaaccagactcagctatatcaaaacagaaactcagccataacataaacaaactcagccgtcatataaaagaaactcagtcatcgatgtaaggttaaaccataactcagtcacaacataaaacaaactcagacacggaggaattgataaatcataaatcagtcggcaaacaaacagtaactcagccgtcaaatcaaatagatctaaaaaatcagccaccatatgtcaatcaacgacggcgaaaaccagccggagttagcatgtttaaaaaccatcaataacatcgtgaatgttttcgtaaaacggtttcagtgacgggaatcacttgctattgaacttagatgtcggattaatatcgggaaattagaaataagttaggatagatacttaccagaacttagacaagtgtagttcaaatgcgatgtgactttactcgacctgaaatgcgggaatgtgacacgtttaggcacttttagagaattttattccttttgaggcagtttacagggatgaagcacttttccttatttttgtaagagaaaaagacaattctatccttttccaattaaaccatcaaatgcttaaccgttttgatttgttttccgcaaaaataaaacgtgccaaacagagcataacagacggttgagatctgcgtaagagctaactagcctaacagaaggacctttcgatttacggaaggtttttgctagtcgccatggaagtgagcgatgaaatgtctcagatcttaaattcggtgaaatatgcggcgtcatggcatggttcaatttcagaaatatgcaaataaacatccaacacaaaaactcaaaccctaattcccctttccctgtcttctttattcttttaggcaaatttcaattgcgtccaagcaaagcaccacctcttaccccgttgattataaccaagttatgattttgagtcaaacaatggttgatgaagctgagatcagggttcttgacgttaagtgccatatctccgctgctaaagatcagaagaattttcagatcgacgaagttcgtgtttctgagtctgtccgtgctgagattttgggatccgctaaaacgcctcgattcggatcggtatgtgtttttggtttcttgttctaaaaatcgctcatttttattaattgggtttcttagaaatttcccttagaaattagatcatgtggattcttctttctcgtaattgagtttgttggtttagattaggagttataatttgattttgagattagaccgttgcttgaaattctgataatgatccgattctgcatcagggcttatattagttttgggtttctttttgttctctattgcataataatgttgaatcctacataccctcttcgattaggttcgtgtagacaatggaaaatga

SEQ ID NO: 181113 - DNA, 275 bp, Arabidopsis thaliana landsberg
atggctaaagatgtaagtgtgttgggttttaacttagtgctctgttctgatcttagtggttttggtttcagtgggggtaatgcatcatttttagaattggtccgatgaggaaactcgctatttttttcaactctatgcggatgagagaagaaaaggaaatagaacaagtataggaatgaaccaaactgggaaagattgcatcatgaagaagtttgaagagagatttcagagaggttatcagaaatggaacccttttaagaataggtatgatgcat

SEQ ID NO: 181114 - DNA, 384 bp, Arabidopsis thaliana landsberg
gttttgaacttgacaaaatggaattagcggatcgagcagtcgggcttctactatcttcaatcagcttgtccatattcacgtactatactttttgggtcatcatcctggtaagtgacaacatctcccccaagttccttaaaaagacattgtcagtttgatgtaccaatgtcatctaatgtttaggatattactaggaaaaagctgacataatagaattttcgttttgtacagccatttgtagatagtgatcacttcatccacaagtacttcttaccccaagactatgccattctcgtacctgtctttgccggcatagctcttctctctctcatttccgtattcatcggcatggtcatgctcaaatccaaaaagaagaaggcttaa

SEQ ID NO: 181115 - DNA, 152 bp, Arabidopsis thaliana landsberg
gaacaacacagaatgacacctacgattctaatgaaatgccaaagcacgaaaatttagctgacgaattcaataaaaacacacaaaattcacggaaagtactgaccgattcccaggaagtgcgacgtttgcgttctaagacaggagttgaatga

SEQ ID NO: 181116 - DNA, 481 bp, Arabidopsis thaliana landsberg
tttgcttaaagaaggagatttctgtggggaagagcttttgacatgggcacttgatcccaaatctggttccaacctaccatcctctaccagaaccgcaaaggctctaactgaagtagaggcttttgctttgatagcagatgagctcaaatttgtggctagccagttcagaagactacacagcaggcaagttcaacacacattcagattctactcgcaacaatggagaacttgggctgctatcttcatacaagccgcgtggcgacgatacgtgaagaagaagaaacttgagcaactcaggaaagaagaagaagaaggagaaggatcagttactagcatcagagcgacgttcctggcttcaaagtttgctgcaaatgcacttcgtaaagttcacaagaaccgtattgaagcaaagtctactatagaacttgtgaaatatcagaagccttcagaacctgatttctctgctgatgatactagttga

SEQ ID NO: 181117 - DNA, 849 bp, Arabidopsis thaliana landsberg
atggagacttgtgttgaaattgtggaagacgttgttcttcttggagtaccaatttcaatcaagaacgagaatcggtaagacgtaaaaaaaggtgataaattttaactgatgagagttctcttgcattatgaacaattaacgtcataatctaggtaacaaagagaaatgttttccatgtaaaaatgaaggagaaaaagataaatgtggatagatttgcgacaagaaatagagatataaagagaaaaccattttcttgatgaagaagaggtcatattgtgacactataagataagcttaaataattagttatgagaaaaggtgagaaaacagttatgacatgaactccttaaagcaacattgggttcatatatttaggagtttctggtattaatatctttaagttgaatggtggatatacattcaaacattttttgtatgtgtattttatctaagcttcttcaatctgtttggaaaagaaaaatcttttaaagttttaaatatgacaggcatcaaacaaacatccaaacataattggactaatctgaaatttggtaggagacgtggaactaagttttgatataaagacatcaaattttgagttcaaaatgttaaataaacaacactggtctagtttgtttaatttatttagaagcttatagaactatgttgggttaaggttagtatgtttaaattcattcttgttttcaacacataataacatattttttatgaagaaaagatggagaagatgaggaagaaaatgatgaagatgacgagaaagaggaagaagaggagtttaacaaagaagcggatggggaaagtaacgatgacatgaccatgaaaatttga

SEQ ID NO: 181118 - DNA, 1096 bp, Arabidopsis thaliana landsberg
aaaagtgaccgaccagaaggtaaaagcgattacaaacgataaccctctttctccgctctctctccaaattttgaattcgatggaattcagatacagagccatcgataataatcgcccacctcctgcgacggacacgacaccatctccgtcgctgaaaccgaactttcctttcttgtcggaacgatcaatgccaggtttgtactgtctgtgcatcgtattttttatccatccccgacagagaacattgttatgattctgcacttttcgtattatgtttggtgatgcgattgtctataggagttgatttgttgagacctgtttagtttctgtaacgtaaattttgagtgtttgttttttcatgttttgatttcacgaaattgaaatctgtgtgaaaaatctgaagtttatgaatcttctcatgtcgaaatgtgaagtgattatgaacctttttcgtaggacaacaaagtgaggatcaagttcgggaagcgatcaaacgagaaattgagaaagaacaaatccgtcaagagatcattatcgcagaagcagcgagaaaacgagagcttatagctgaggttttacaagagatggctatcgagagagaaatggcgatacgacgagtttcagacacggagatgtctctagaggaaaagctaactatggggggcaatcaaaggaagcttccaaatcaaaatcagaatcagttcaacaactttttcagacagaagtatagttacattgattctctgatcaacacaggctcttacaacagtctacttacatcaccaatgatgcaattgcctcaacttcagcaaatgtctgaagctaccggaacatcaatgttggagtctaataaagagaatttgattgtattggtgagttctttaagtaatggtaaacataaatgatagagtatatataagcctttgtttcatatgtgttctctttgatttctctattgcagaatagggctgatcttataggagctaagcctaatgcagacagtgttggtgccatgcaattgcctaaacttcagcaaatgcctgaggctacaggaacatcagttttggagtctaacaaagagaagtttattgtattg

SEQ ID NO: 181119 - DNA, 347 bp, Arabidopsis thaliana landsberg
atgtatgatgctgagtctctaggagctggatatgcaatctttgcttctggaatcattgttggattctcaaaccttgtatgcgggtctgtataacctgcttcatcctctaattgttcccctcctgaacctttgtaaacattgaaattctcactgtttatggggatttgtttgtttgttgcaggttatgtgtaggaatcattggaagcagctgcgcattgtctgatgctcagaactcgacgctctttgttaagattcttgtgattgagatctttgggagtgctctcgggttatttggagttatcgttgggattattatgtcagctcaagctacatggcctacaaaatag

SEQ ID NO: 181120 - DNA, 1104 bp, Arabidopsis thaliana landsberg
atggcgctggaagagattttcccatggatgacgtctttactctctcccaaggagaaatctgaagttgagacttgcttcaaagaagttgtcccaaatgaactctctttgcaactggtatggtatattcaatactgagatatggctttagtctctttcattttttgttattgtgacacgactaaattatttctgaaggtcataaactcttggctgattgatgacagtcaatcttctttgacggctcttacaaagattatgaaaggagttcagtctgtagaagtgtctgaaaatatgaccaactctcagacaaattcatcatcaagtggtgtgtttcaacgtttttggcagtggagtaaaaaaatgtccttgtctagtccaaatacaggacacattttggttcatggtatccatctttggcataatgcaattagaaaagatttggtagacattcaaaaaggactatgccaattgacatttccaagcctttcattggacctcaatgttctggtggttcggctaaacttccttgctgatgtccttatcttttataggtaataatttggggaactttgattttgtttctttcactttgacatggtgtgtagtctcttggacttgtcttgttccttttctctgagaaactggtgacatacttcatttcagcaatgcatttaagacgttcttttacccagtgtttgaagatatggtggatcaacaacactcttcctcttccaaacaattcaccatagatggacatgtggaaaacttcaagaagtcactagaccttgaaactagagcagggagtgacaattttgtcataacccttcaggagaaactggagtctcttatattgacagtagctaagcagttctctatagaggaaacagaggtgagctgatttattatttggattttgtctaaaatagaattgcatgtttttgaagactagtcactttgacatatttagcttcagagattacatttaaagtatttactcattgttcttctccaggtattcccgatcatcagcaagaactgcaacattgaaatgcagaggcaactactatatagaagcatccatgtcctgcctcttggattgctaac

SEQ ID NO: 181121 - DNA, 639 bp, Arabidopsis thaliana landsberg
atgcactatgctggtccaactgaagttcaatggcacgccaaggcaaggattaacgctggtgctaatttatacattgtaggtcgtgatcctgcaggaatgggccaccctactgagaagagagatctatatgatcctgatcatggaaagagagtcttaagcatggcccctggacttgagaaactcaatattcttccatttagggtaacacaaatcgattctgactgcaaaaccaaagtttcttgattatttgattatcggaatatgctgcttcaattcccaatcatgtgttctttgtatctttcaggttgcagcttacgatacaatcgagaagaagatggcgtttttcgatccttctcgtgcaaaagagtttcttttcatttctggaacaaaggtaagagacagttttgagacttaagattcttattgaaggctccaagtttcgaggttctgcttatgtgcgattacacctgagtttttattcggtgttttttgttgtgcttacagatgcgaacttatgcaagaacaggggagaatcctccagatggatttatgtgtccgagtggatggaatgttcttgtcaaatactatgagagcttgcaagagagcgaagcaaaacaacaagccgttgtttcagcctaa

SEQ ID NO: 181122 - DNA, 231 bp, Arabidopsis thaliana landsberg
atgtccgaggccgtctcggacttttgccgggtccttggctccggcgacgtcccctcaggaagctcccctcaaagtcgcctgcaggtcttgggcgatcatgtgcgcggcagactcccgaggcgcttcaccacggcgtcaggcggtttcgccgtgctcgcttcccagtacgtcgtggacctggagcgagtcagcgaggggtattgccttcctgacgaagatgaagccgccctg

SEQ ID NO: 181123 - DNA, 1157 bp, Arabidopsis thaliana landsberg
atgaaggtatgtgcttcacatgcactagcatcggatatcttcttttatttatgtatcataattagttgtatcaagttaactaaacattgtgtaggttctttgaaaagttgggaaagctctgttgttcttgttaatgtccttaaaaacgagatccgtgatggacagcttagcttcaggggcaaaagggtcctcgaggtacttcctcctcttctgaacttcttatctcactgaacataattgcaccaaaaatgtagagtgtcactgatatattccaatgtctgtagatcagcagtaatctacaaatcatatctctgtagctttggcaaaattgtttacaaattcgttcaaacgttttactttcattttccatttccaggcaatggttaggtggcctgatacatttttcattcttgttgttgtgttttaactatgaatttgtagtatggtaaagatgtcatggatgttccattttgagaacaaactccaattccttgtgttctgacttgactctttatttttcctttgtaaggtgacttgaacagataggttgcaactttggagttcctgggatatttgcctgtttgaaagtaagtaaactaacgctgcaagattgctgttactttcacatttctagaaaaaaaagtcttattgttgaatcttgattgctttttctaaagggtgcttcctcagtccactttcaagacctcagcgcagaaacgataagatgcacaaccatcccaaacgttcttgcaaacctggagcaagcacaagacaggcaaagccgtcagccagaaagcccactcacaccatcaagacaagctatctctgcatctgtccgtttctatgcaggagaatgggaagagctctctaccgttctatccatcattagaacagatgtccttgaaccatctatccccgcaatgaacttgagcttttcagaggaagatttcatggatggatgtagcagccaagacggaagcattacaggacagccagatttctcctcgaggcgatcaaggaagctctcaggaagcagagcgtgggaaagagccaacgagactggtcaagaaggagaatatggatatgatgttatactaatgaccgaaatcccttactctattacttctctgaagaaactatattctctcataaagaag

SEQ ID NO: 181124 - DNA, 362 bp, Arabidopsis thaliana landsberg
ctcacgacgagaaaaatctcaccgttcacgctatatacatctatttgcaggtgattttttttcttctagatttggtatctcgttttctccgaaaatctcgatcttgatctttgcttttctcggattcgtaacgcatgtgtctgattagagttcatatacttgtgaatttgttgtttttcgtatttagggatttgatttcgtagaagtggttttgggaaacactgagatgagtaatcatcacacggtcgtatatgttaatggattggttcgaccggtactcgcggaggcccagtatcctatgagaacagagtctccggcggataaagcaataaatatctacgacggagatactacggagaata

SEQ ID NO: 181125 - DNA, 754 bp, Arabidopsis thaliana landsberg
tttcggagtgaatgccaccgaagaagatggagacaacccattcttgcatggacttcactggaaacattgtgatgctaggtttgtgatgtctcttctttggatgtttgtctcatatgctgtgcctcttttgactgattggttttacattttaccagtcaagaattcagtcagctctctgatgttataaacaaaataaagaacaatcctcatgatcaaaggatcatgcttgccgcttgtaatccattagatttcaagttgtcggtatctccttgtcatacgttcacacaggttagcacgtttttcatcttgaaacttgttacatttccattgtaaaatcatttcaacgtttcaagatatacaaaactgaaaatgatttggtttttggttgttgttgccagttctatgtggcaaatggtgaagtttcttgtcaaatataccaaagctcaaccgaagcgagtatcgggattcctttcagtatcgctacatactctcttttgacatgcatcatcgctcatgtttgcggtatgtacacattttattagctcttgagtctaaagtaaaagagttgaaacctttgtatggtttcttgtcttgacagatcttggagctggtgatttcatccatgtgattggacaagcctatattaacaaagctcacgtcaaggctatacaaaaacagcttcaaatctcccctaaaaccttgccggtaagtactaaatatattttgctctctctcaaatcaggaaacaatataa

SEQ ID NO: 181126 - DNA, 119 bp, Arabidopsis thaliana landsberg
attcgtttatacctttcacggcgttgctccggcgtcaaaccatcgtcaccattcttaccctttccaccagcacgagcggcagctctttcacggtcacgctctctctgacttccacgtga

SEQ ID NO: 181127 - DNA, 87 bp, Arabidopsis thaliana landsberg
atgtcggatgtttccggtgacggagatttatcggcgacggttactgaacatgaagtaactccacaaccgccggttttcttcggcgac

SEQ ID NO: 181128 - DNA, 3684 bp, Arabidopsis thaliana landsberg
  unsure (1)..(3684): unsure at all n locations
gcggctgaagtctgcttggagaaaatctcagataccaaaaaggaaagtgaaacttataaagaatgctcaatggtgtgcaaggaatttcttgaggatattttatccaccattggggtgtatttgccgcaaggtaatgtattcaaagctctatattgcattgagtcctcttctagtcactaatattttcactgtttatcatttgtgttatttaacagatgataagagtctggtagatttgcagcaaaaccatctgtcagcagtaatttctgggcatgtatctccaaagctaaaagaactcttccatctattggattcctttaggtaatttaaattgtttctctaactttcaaaattgcaacaaaatctccatctgttcttacgatatcgatttgcttgcagaggtgacaagcaaaaacagtgccttattttagtcgagagaattataactgcggaagtgatcgaaagattcgttaagaaagaagcctctttggcttaccttaatgtcttgtatttaaccgaaaacaacccctccatcaatgcatcggcacagaaaatgcaaattgaaacccctgatttttttcaagatggcaaggttagttgttcttcatcacagtcagatgttttataaattgagaaatgtttttagtttgtcttctctgaaagctttttaatgcatgcaggtgaatcttttatttatcacagatgtggttgaagagggatttcaggttccagattgctcatgcatcgtttgttttgacctgccnnnnnnnnnnnnnnnnnnnnnnnnnnnnnaaaaacatgccaaacagagtaattctaaatctatcatgtttcttgaaaggtaggaagcattatttattaacacaaaatgtttaccaaattccagtttttgtagcttatttctgaatactaattattgtagagggaaccggaagcaaagagaccatctgcatgaccttatgcgaagagaagtcccaattcaagatccagaagctccaaacttgaaatcgtgtccacctccagtgacaaatggccatggtgtgaaggagattgaatccatggttatcccagattctaacataactgtatctgaggaagcagcttccacacaaactatgattgatcctcctagcagaaatgagcagttaccaccatgtaagaagttacgcttagataacaatctcttacaatccaacgccaaagagaaggttgcctcttctaaaagtaaatcatcttcatcggctgcaggtatgttttataatctattaattcgtcaattagcgtggtgtcgctgattttagtctttagttcctctatcagccgcggttgtattacacacatacacgcacacatcagcagttgcatatcaaatgtttatgtctaaggtcatggagcttgtcttaatttgtttacttatgtatacattcctttttttcgctgaacaggttcaaaaaaacgtaaggagttgcacggaacaacctgtgcaaacgcattgtcaggaacctggggagaaaatatcgatggcgccacctttcaggcttataagtttgacttctgttgtaatatttctggcgaagtatactcgagtttctctcttttgcttgagtcaaccctcgccgaggatgttggtaaagttgagatggacctttacttggtcaggaagcttgtcaaggcttctgtctcaccttgtggccagatacgtttgagtcaagaggaggtacataactctgatccgtaggatttatacagtttcttgtttcatggtttgaacttaatgtcttcttctttgtgttttggatgcagatggtcaaagcaaaatattttcagcagtttttctttaatggcatgtttggaaagttgtttgttggatctaagtcacagggaacaaagagagaatttttgcttcaaactgacacaagttctctttggcacccttcctttatgtttctactgctgccagttgaaacaaatgatctagcttcgagtgcgacaattgattggtcagctatcaactcctgtgcctcaatagttgagttcttgaagaaaaattctcttcttgatcttcgggttagtgatgggattcagtgcaatacctcatctggtgaggaagtcgtactagacgataaaatggaagaaacgaatctgattcattttgccaacgcttcgtctgataataatagtctcgaagaacttgtggtcattgcaattcatactggacggatatactctatagttgaagccgtaagcgattcttctgctatgagcccctttgaggtcgatgcttcatcaggctatgctacttatgcagaatattttaacaaaaagtaagtgatattctagctatggctgttctcttcaatctacttatcataaatttctagttaatgttattcccttttaatcaggtatgggattgttttggcgcacccgaaccagccgttgatgaagttgaagcagagtcaccatgcgcacaaccttttagtcgacttcaatgaagagagtaagttgattcttgagaatttctccaacatatggaatcattgtgtatgttctcatgatattgtagtgtgcgagctctaagatgttgtttccaatgtaaatggacagtggttgtgaagacagaaccaaaagctggcaatgttagaaaaagaaaaccgaatatccatgcgcatttgcctccagagcttttggctagaattgatgtaccgcgtgctgtgctaaaatcaatctacttgctgccttcagtgatgcaccgcctagagtctctaatgttggccagccagcttagggaagagattgattgtagcatagataacttcagtatatcaagtacatcagtatggtttttgaaactatctgtcatttagagatgaaactagatatcttgattgtcattaaactcttgtcttggttcaataaatcagattcttgaagcagttacaacacttacatgccccgaatcattttcaatggagcggttggaactgctcggggattcagtcttgaagtatgttgcgagctgtcatctattccttaagtatcctgacaaagatgaggggcaactatcacggcagagacaatcgattatatccaactcaaatcttcaccgcttggcaaccagtcgcaaactacaggtatcttctaacatttgcaagtaatgtcttacatcagtcagaacactaaagaaatatcttttcatggggattggtttgatagggatacataagaaatggcgcttttgaaccgcgtcgctggactgcacctggtcaattttctctttttcctgttccttgcaagtgtgggattgatactagagaagtaccgttggacccaaaattcttcacagaaaacatgactatcaaaataggcaagtcttgcgacatgggtcatagatggacagtttcaaaatctgtatcagattgcgctgaggccctgattggtgcctattatgtaagcggtggattgactgcttctctccatatgatgaaatggctcggtattgacgtcgattttgacacaaacctagtcgttgaagccatcaatagagtttctctaaggtgttacattcctaaagaagatgagctcacagagttggagagaaagatccaacatgaattctctgcaaagttccttttaaaagaggctatcacacactcctctcttcgtgaatcctattcatacgag

SEQ ID NO: 181129 - DNA, 139 bp, Arabidopsis thaliana landsberg
atgctgtgctctcgacgtcatgggagatctccggtgaactttccgccggaaaatgttcaaacgacacgacttcttgcgtatcatgctgctgctgccatatgtcggcgttattactaccaatgttgttctctctctgcat

SEQ ID NO: 181130 - DNA, 489 bp, Arabidopsis thaliana landsberg
aatattttggcagctcagagtcgtcagaagagttatgctgatgtgaggaggcgggatctggaatttgctgtgggtgaccaagtccttctcagggtatcacccactaagggagttgtccggttcagtttctctggtaagctcagcccaagatacattggaccgttcactatcttggcccgagtggcagcctggcttatcgcttgctgctgccggattccatggcaggggtacaccgggtttttcatgtctctatgttgaggaagttcttgcgggacctggatcatcagatcgaaatggaatcaattgttgtgcagcaggatttgactctagagtgtcgtctggtgcgtatattggaattctcagagcgtgttttgaggaagagatcaattaagtatgtcaaggtcttatggactaatcagtctgagcgtgaggctacgtgggaacttgaggacctgatgcggcagaagtatccggaacttttcgttgtgg

SEQ ID NO: 181131 - DNA, 524 bp, Arabidopsis thaliana landsberg
  unsure (1)..(524): unsure at all n locations
atgatgcagaagatcgtcagtggtcatggactgctgatgatgatgatgatgatggtgaggatcaaaccaagcacgaatcataggtgtgttaatggactgaaggggacccctctgtgataaaagctgactttggctataaactggatgcaacgacgacggagaagcaaacacaaatcctccggtacttccggcggattcagctgctccgacgttgttccatgacactagtctctgtatctttccnnnnnnnnnnnnnnnnnnnnnntgttcccagcttgccgtcgatgagtcaaacgctaactgattattgctctggccggagaacagagcaggttctgtttgattaggaaaaggtggaccattttggaaagattgaagcgagagacgaagaagatcttggttctgtgtattgcctcgtgacggtggctgatgatgatagctctgttgcgttgaagctaccggaaaaaacgactttatactgtcagctatccaatcagaatccattgacgccaaaagaaaactaa

SEQ ID NO: 181132 - DNA, 108 bp, Arabidopsis thaliana landsberg
gcacttcggtgtgagcaatataagcctcatccctcttctgctggaagtagggcctcgcattgcccgaaccaggataaactgcttgtgccaactcgcatcaccatctag

SEQ ID NO: 181133 - DNA, 423 bp, Arabidopsis thaliana landsberg
gctggctttggcaactcgcccaacgacgtgaccgagggcgagggccaagatattgtactggacaccatcaacgctgccgagggccaatactccgaggccgattacaagaaggttctctggaagatcgaccttgttctcctgcccctgatgtggctctgctatggcacccaacaggcagacaagacgtccatctccactcaggcaacttttggcatgcagagaggacactgggctggtcggccagcaattctcatgtgagtgatgcctagaaccgaatcttggcccttgacctgctgtgtatggcggagtgctgagactgacttgtcaactcccagggttgagcacaatcttctatatcgcgtacctgatcggcgaagctcccggaaactacctgatgcagcgcttcagcctgaacaagactct

SEQ ID NO: 181134 - DNA, 74 bp, Arabidopsis thaliana landsberg
atggaaattaaattatcggatgaaacggtacgggtcgggtcggaaaaccggtgtattttgcaatgggcctctat

SEQ ID NO: 181135 - DNA, 841 bp, Arabidopsis thaliana landsberg
atgtgtccctgcgtagagcgtcgtgctccacctggagtttactatactccgccgccggcgagaacaagtgatcatgtggcggcgatgccgatgacggagaggaggagaccaccgtattcttgttcttcgtcgtcggagagacgtgatccgtttcacattgttcataaagttccttctggtgattctccttacgtcagagccaaacacgcgcaggtataatcaattttcccgcgaaaacaagacaggggaatttttcttttgacctaatttaggaattctagattcttcctcatgtgataaaatctcttaaaagcttttcaaattttgagtgatcttcttgaacctgtctatgattgaggttttctaacaaatggatattgtttatgtggaagaacagttgatagataaagatccgaacagagctatatcattgttttggactgcaataaacgctggagatcgagttgatagtgctttgaaggatatggccgttgtaatgaaacaattaggtcgatctgatgaagggattgaagctattaaatcctttcggtatctctgttctttcgagtctcaagactcgattgataacttgctactcgagctctacaaggtaatgcagcctccttctttgttaatgcagcaagtgttatggagttgttataacttggaaatgggttttggtgtttttgcagaagtcagggagaattgaagaagaagctgttttacttgagcacaaactgcaaacactcgaacaaggaatgggatttggtggtagagtcagtagagcaaaaagggttcaaggaaaacatgttattatgactatcgagcaagagaaagcaag

SEQ ID NO: 181136 - DNA, 244 bp, Arabidopsis thaliana landsberg
ggtccgaaaatcgtcgttcatatgtgaccgttccgacaacaaccactggtcgttaattagcgaccgtttagcatctacctatatcgtggttgttacggtcacaaaatcgtcacaaagaagtcattataatttgcgactgaataagtggtcacaacaaaccgtcccaaattgcaggttttcttgtagaacgtatgaagctgagctaacttccttgaagaaccgagtccaatatctagaaaacaaa

SEQ ID NO: 181137 - DNA, 749 bp, Arabidopsis thaliana landsberg
atggttcgagcgacggttctgaatgtcggtgatcacgccagtgaaggttcgaatctagtcttgcttacgaaatctctcttcgcaatctgttcgtcttcctagttctgtgttttaatttgaaatagagagctcacatctcgggattttcagatggttttgttccgatttagatgctaaattgagtctcagaaacctaataatacctttgtggatcttcgctaattgttagtgtttctcttcgcattcgattgtttcaatttcatttgcttggaatttatgggcgcaatgttgtttttcatcgattttatgggtttcttcagtttttgctctaattacacgagaatgctagcctttccatgattaattacgattagatttgtttgaaatcggtaggtgtgcgtactaacaaagctaaaggagagaaaatggttctggaacctccgatgaacagtgcacaaagacgaaagttgggggatattactaatttgcagaatcagaagaatctaatgaatcagggagcgaagcatcagcaacaagctatattaatctcttctaaagaaaacgctgaaaatcttcaaaaggcactgagaaattcttctgttcgatatagagaaatggattttttttccttgtctttgactgtgcttattcaggctctttatcaacatgtttttgcaggaaaacacaaagctgatgaaagtcgtcatggagagagagtaatctttgttctaaaatatgaaaacttatga

SEQ ID NO: 181138 - DNA, 562 bp, Arabidopsis thaliana landsberg
atgatcttgcaaattaatttagatattgagctggcgagttttgtccggacagctggggcagttgcctcccatgtaagtgtttctaaagtgtgatctgaatgagtatctaagggtggttattgatagatatagaaagtcaatagattagcaatgtatatatatatatttcataattattatatgaccgttgtaacaatcctttatggaatactctctatgaccgtcagttataccttagcttttaatattttaaatgtttcaaataattgaagctttgtgtgccaagacctgagcatcttggatatgttgattcgatatcaataacgaaaattgatggtgtgacattaagtagaagtcattttctatcctttaagttaatatattttgtctttcattgacaatatatgaagaaaaaatctgtttttttgctatgtcaaggtcatgattgcagaaaatgatgaagttgctaacaccattctccaccgttgttttgcgtagaagcaaatatagcatcctggatgatcttgaaggatacattaccagtggagtttatacatacaag

SEQ ID NO: 181139 - DNA, 434 bp, Arabidopsis thaliana landsberg
ctcctgctgctgaagaagtgcctgcaactggccttgctgacacttatcccaatgggtgtgctccatctgctgctgaccccaatgggggtgctgcttgcgttgttactgtggaagatgaggaggaagaaaatgaagctccattaactcggaaaaacagtcggcagttcatcgccagcggcggaagtagtggagttccttctcctgcattgtctgcccttattggtctgcaagaactgtccctggccaactttgatcaaactctagaggatatggtcccggaggacttgttgtcagagcctgtggatgatgatgcaacagaggcttgtgctgccgtgcccgatgctgggttgaggtcatcccgtgcctcgtcgaccttagagcatgatctcgagggtcgggatgctgacttggattgttctagcccatggaagtag

SEQ ID NO: 181140 - DNA, 558 bp, Arabidopsis thaliana landsberg
atgacgcagttcgcgcacgccgcctccatagaagttgtgaccaccgacggcaggctctcccagtattaccttggcgtcgagtactcgccccgggatctgttgctcggcctcgtccagggatccggtaacaagatcggctcgccggtcgccaatattctgacgtactgctatcgctacgatccgcagaagaacaagcactcgctcatcgtcgcccgcgtggtgcaactcggcggtatggtcaccatggcatggctgggcggcttcatgttcctgatgtttcgcaaagatctacggcgggcacgcaccagcgacctgactaagaaagagaatggataaagggtaacgatgcatattagtccagttctgtggcaatttctggtgaagtggctcaacgcttccgcgctctttccgcgcgaggcgtcgaccatcgcgccctacgccgacgcgctctattttttcctgctgttcatctcgaccgccggtctcctggtggttggggcgcttatcttcggcttcgccgttcgctatcacaaagagcggcccccgctggcggaacag

SEQ ID NO: 181141 - DNA, 195 bp, Arabidopsis thaliana landsberg
gcggataccaagtcgcgtcggcacaggcggactatacggaagaactacgagggatcgccgagtcgatccggcctaggctcgggtacacgacccgatgtaccaatcagacggttcgtccgcgatcgcggggcgggagcgtactgctcaaccactggtatatcgacgcgtctgtcggggcggtggccgcgccggaac

SEQ ID NO: 181142 - DNA, 168 bp, Arabidopsis thaliana landsberg
gacgagtttgtaaaacgtataatcgttctaattgagatattatcggttcttccactacatcacgtagaaaaagaagttgattttggacttctaattaaccacacttacaaagtgattatattcgaaccaatgcagttgcaaactatgatgcaacgggtaaagaattaa

SEQ ID NO: 181143 - DNA, 241 bp, Arabidopsis thaliana landsberg
tgttactactctgatgcggctatagctgatgggtacttcagtgtgttggctgaggtttacatgcgacaagaaataccaaaatgtgaaatccagaggctcttaagtctaattctctacaaggtagtcgatccatctagacaaattcgcgatgatgctcttcaaatgcttgagacactttctatgcgtgagtgggctgaggatggtatagaaggttcaggaggctatagagcagcagttgtag

SEQ ID NO: 181144 - DNA, 459 bp, Arabidopsis thaliana landsberg
aatctcaagatgctgaagaggatcaaccttagccattcacagaatctgcttgaagttgaggaactttcggaagctcgaaaccttgaggaaattgatctttgcggctgtaagaacttgcaaagtttcccagacattcaacaattgcaaaaactccgagttgttgatctctctggttgcacacaagtccaaagtttcccagaatttccatctacagttgaattgaaattcgaggtatcatccattaagaccatctttcctccagtcacactcttcgttaagagtttacacgaattcttagacaatcagcgaaaaccccttttagagacacctgagtcccatatcttcgacttcatgaaattcagaagcttccgaagtagccaaggaaggataacaaatacagactttgtagaatcaccacctacatttaaaagaatgatatgtcaaaaagcacttagatag

SEQ ID NO: 181145 - DNA, 290 bp, Arabidopsis thaliana landsberg
atgataatctccgacatgagactctcttgcaacttcttattaagccgagccatagcgatctccttgatagcaacgacggtgccatgaacaagatgcctcccttcccaaaccacggaaaacgaccccgacccgatttgtcgacccaccgcataatcgccgataacccttccgcttctccccgccgccgccaccaacgacgactgagccattttacctccgacaaaggagtaaaaatacaactccggagatccgaaattgagctgatgatgactaaaagttgcagaaattga

SEQ ID NO: 181146 - DNA, 66 bp, Arabidopsis thaliana landsberg
atgagtcagaaagaagagcttgttgaggacgacgacgaagaagaagaagaagaagaagaagggctt

SEQ ID NO: 181147 - DNA, 36 bp, Arabidopsis thaliana landsberg
gtcgaagaggacgaaccagttaaggaaggagaagag

SEQ ID NO: 181148 - DNA, 364 bp, Arabidopsis thaliana landsberg
atgataagaaccaaaagagcgactcttccacctctggttaatgctttggaagtctacgcagttattcagtttccgcagttagaaacagatgaaagcgccggtatgtgactttcttttccaggtctatggtttcttatgggactttcttttccaggtctatggtttcttatgttagtaacgaaataaatcaaaaacacatcgattcttttattatgtcagtggttgctatgaaaaacatctcagccagctatggattgagtagaatcaactggcaaggcgatccatgcttccctgagcagcttaggtgggacgctttggactgcagcaacacaaatatctccacaccaccaagaatcacttcttt

SEQ ID NO: 181149 - DNA, 1206 bp, Arabidopsis thaliana landsberg
atggaatgtgacaagcaagtacttggtggtgatactaattatgatgataagactttaaacagtgatgaagaaggtctggtagatgatgatgatgatgatagtgatgatgatgatgagggagatgagtcagaagaagaagatgactttgaagctggaagtgtcccaaacacgtttgaacgacctgagtatgaagctctggctgagaggaaacgcaaagcacttgctgattctcaacggttagtttctctctatccttttgtacaatgtttcataatacagtgacaataagaattagccagtttatatttgattatgtgaaaatcaatgattcttaggctgtgcagttcttattatatcccattcaagtaacttttagatggatttgtcggtcaaatacttcccttgcattactctacatccttttgagctggttatttgtttgtaaatgtgacagtaatcctagtaacatctcgaatagcacctcgggcgtggagggattcatggaatttatgtcttctggtcgccgacggaaatccagaaaggtgtgtttttctaggatagctactattttcatgtcacacgtattacattgtctcttgaatccgtctcttactgcaataactattgcatatcctaccacttctttttaagttatacgttctatactgatgcagtataagaaaaagggtagaagacctgggtcaaagaaagaagttgcacctgacattctaaagaggtttagggaggctctttttcttcatgcacatggccgtgacattgaggtaatccaggtcaagtggttattttctgttggtatcatgcttatagagagaaaaccgaggctaagtaacagacttcataatttcctgaaaaaataaacttatccttctctaatctctaccacaatattgtttgagtattacgtatatgacataatgctttttcctaaatagtgtgtatgtatatatcttttgtatatttaaggactgatcctgatttatgtggatttactttcttccaggctttacctattttagtaaaagttattaagcaagcaccagctttcgatatagcatactattacctttcacgtgtttctgagcaacttggtaagaccgaatcatcctctacggaagcattaaagattgctgcaaatatcaaaggttcaaaatcacctttttggaagttgctttatgagaggttcaa

SEQ ID NO: 181150 - DNA, 381 bp, Arabidopsis thaliana landsberg
ggacaggaaaggtgatttcagctacagtatcagcggcaatatttctttcaataccaacgaagtggtgaagtacaaagggcagctgacagaaggatggacaaaagatgcttccggcaaccccgtataccagtcaaacctcggcgccgtttcttccggcgatgtgaacaggatagtggaaggacataagatcaacgaatactatctctacaaaatatacaccggcacaggcaacaggttcaactccgatggaagcgttaatatcaatggcggtcccaaagacggtatgatccgcacaccggatgatatcagctgggcacaagccatgctggccgcaggctataaactgcgccctgccaatgccgtgcgcaataacgccatctg

SEQ ID NO: 181151 - DNA, 102 bp, Arabidopsis thaliana landsberg
gaaataattaacaagaaaggacaagatcgaaaaataagaatccgcaagttttttcaccaaagatacgaaatccgtatcccacctaatgatgatgatggatga

SEQ ID NO: 181152 - DNA, 49 bp, Arabidopsis thaliana landsberg
aattttttgaagaaaacgaatctgttgcaaatggaggaggcaaaaacag

SEQ ID NO: 181153 - DNA, 110 bp, Arabidopsis thaliana landsberg
ggcttctatgatttttaccgagaaggacttttagtgcttcacggattttctgatctaggatatctacaaatggctcctgcacaaatgatgatcacactatcagtgccttg

SEQ ID NO: 181154 - DNA, 68 bp, Arabidopsis thaliana landsberg
atgacatccgcaagagatctgcgaccttccttagttacggttgttgccgctacaacgttaagctcaag

SEQ ID NO: 181155 - DNA, 152 bp, Arabidopsis thaliana landsberg
ctatctggttgagtggggaaatgaggaggatccgaaggcgctttgaacgatcaacaagtcttgtagaatccggtgcccgtgatcgagtacttggtcgagtagaggatcgagtagtgtctgctgcctcctctatggctgcctggatcgagtga

SEQ ID NO: 181156 - DNA, 122 bp, Arabidopsis thaliana landsberg
atggcaaacatgtcgccgtttttgatgttcatcggaatcctcctatcatccataatgatcaaccaccttcccgtagcaaactcaaaacaatggtgtgtatcaatgccgacagcgacgtatga

SEQ ID NO: 181157 - DNA, 414 bp, Arabidopsis thaliana landsberg
atcgttacggagatcaactcgatttcgaccgcagatgattccgtcgttgtcgttatcttagatctggaagattctagatctcggaatgaggcggttaatgaaggatcgacgccgaaaccaccggagatgcaggattcaagagacggagaagagcggagatcggcgtcgttaaactcaggcggcggtgtggtatcgatcgcagatatactaagggagattgaagacgacgaagaatcagcgggtgtaggaacttctcggtgggtagaagaaggggaaggagagaagacgcctccgccgtcaggatcggcggcgaatcaaacaaacggaatttcgaattttctggttcggagttcaatggcggcgatgaagagatctggttacgatagagcaaaaaattaccgtttaccgaaataa

SEQ ID NO: 181158 - DNA, 78 bp, Arabidopsis thaliana landsberg
tttcggttaattatccgatcggattctattttcaaataattgtaggtatcggtattatccgaaccgaacccgatactc

SEQ ID NO: 181159 - DNA, 173 bp, Arabidopsis thaliana landsberg
gtcctgactacatcatcccacaagacttactgacagatgatgaagtggcggcctacgagactcctcgatcaactgtggtagacggcgatgagtccatgagctggtcctcagcttcctcggataacaacaatgcgggtgcggcggctgcttatgccgcaaccaccacccatgtc

SEQ ID NO: 181160 - DNA, 99 bp, Arabidopsis thaliana landsberg
atgggtagctttgctgctgatatttttttcttggctgatcttgagtggtcacctgatgattgttctattgtagcgtgggattcgcctcttgaatataag

SEQ ID NO: 181161 - DNA, 124 bp, Arabidopsis thaliana landsberg
gtaccatccggataagactgcaaatgatccggttgcagctgacatgtttaaggaggtcacgttttcttacaacatcttatctgatccggagaaacgtcgccagtttgattcagctggttttgag

SEQ ID NO: 181162 - DNA, 108 bp, Arabidopsis thaliana landsberg
ggttatccctcgttactggtaaagatcgtatcggataacactcgaaatgcacagctgagctatcatcgtgccaaggctagggtggaccggtggtaccacttcgcgtag

SEQ ID NO: 181163 - DNA, 107 bp, Arabidopsis thaliana landsberg
aaaagacaatgaagcgtttgcgtttaaccgcaaatataattagccgctattatatggaaaaacggttaactaaagatttacccgagcagcaggagcagaaggggtga

SEQ ID NO: 181164 - DNA, 52 bp, Arabidopsis thaliana landsberg
atggataagttcgttatagagggactcgacctttatatcgaagggaaaaaag

SEQ ID NO: 181165 - DNA, 120 bp, Arabidopsis thaliana landsberg
atgaaagtcgcgacggcgccgaagccgctgacgaagagcgagcagcggctcgccgacgtcctgtcagcgccgcggggaaagctgcattcggcgtctgtccagctcaacggcgactacagc

SEQ ID NO: 181166 - DNA, 229 bp, Arabidopsis thaliana landsberg
ttacagcactagcagtattcatcgtgtaggcacctccagccttaactttcccacagtccttacatccccaaattccaacagccttccgtttaacagcatacttgccacagaactagcagaagtatttgctgtgctgactcacttccatcttcttgatttgcttcctaagactggcaccatatctggtcccttaacagacaacatttcaacagattcagaaacaatgtaa

SEQ ID NO: 181167 - DNA, 276 bp, Arabidopsis thaliana landsberg
atgcgaaaaacactttcagtctcacaatccagccgccgagtgagggtatttccatctcgtgactctgcgcgcacagagaagcgagagggcaggtgcctccgaagccagtgtcgttcgagaccttgcacgggggatcggcaattaggtttttggggagcgtcttcgcgactgcccaacgtctgtcgttgtcttcatcgctggttcttggcgtcttcatctcgatcggatgacaagagaagttggacaaggattaggatccatgaagcgcatgggagg

SEQ ID NO: 181168 - DNA, 306 bp, Arabidopsis thaliana landsberg
cttcgccagtggcccgtgaagctttccaagccctcgaacccgacagaacctcaacggagacccaggatcgccttctccggacttcggtcgcccgtggattcgcgtagaccgagcaatccggtgagccattcttcaattcctcgcgcacaccccttccttgatctctggtgaagctctatgacccgtttgattggtcaatttcgccctggataggccggactcctcgccgccgacgagctcccctcgcctgcgcacgcggaccggccaactccgaccatccccgacgcgactcgcacatcgtcgtga

SEQ ID NO: 181169 - DNA, 221 bp, Arabidopsis thaliana landsberg
tgcgagggtgtgagatgagcatctcgatcggcatcggttggtggatcgccccgacagtcgtcacgatcatagcctttgccttcgccgggtacatgggcagagacgaggggagccatggcgattacgcagccatcggcaacgccttcgtcggcttggtggtctatggcgcggcgctaatcgtttccctcatcgcgtggcttctctgggctctcatcgcatga

SEQ ID NO: 181170 - DNA, 190 bp, Arabidopsis thaliana landsberg
atgtttgatgccgtccgccgtctgtttgtcaacgacctctccatcgatctcggcacggccaatacattggtctatgtgcgtgacgagggcatcgtcctgaatgagccctccgtggtctcgatccgcctggactcgcgcggcagcaagaagatcgaagccgtgggcctcgacgccaagaaaatgctgggtc

SEQ ID NO: 181171 - DNA, 141 bp, Arabidopsis thaliana landsberg
ggaacctcgtctaggagctctcatccctacacttaccaaaacgatggtgttttagcatttttaaccctaatccaagatccgaacctagaaataccactttatattgagaaaatcatatacttcttccacaacatctcttga

SEQ ID NO: 181172 - DNA, 1392 bp, Arabidopsis thaliana landsberg
atgcatttacaggcagaaagtcacaagaagactagagtatttcgagtttggacttctggtaatgctgggtccgaatgttctgatcggtttcctgagaaagctgaaaatcgtagctgggaaaacaatgtaccgattaatgattttggcacacctcatgatactggtggattgactcagacctccatcgaacacagtattgcaatttctgatgctgactttgctacacctgcaaggttaactgattctgaaaacaattcaggagttctccactttgctacacctggaaggctaactgattctgaaagcaattcaggagttccggattgttccccatctgatgccaaaagaagacatgtccttacacgccgtaacttacaagaatcattccatgagatctgtgataaggttgttgatactgcaatggggtcccctgatttggctttgtcagaaatgaaccatctcgctccaccgaagccagctaaaccaaaggtgcaccaacctcagccgattactgttgaaaactctcgaagagagcggagaatacttgagcgcttaaatgtacttactgttctcttttctcgacattgaatgccataatttatttctccttttcccttccaactgaataattgtttcttctttctgggctggccataggaggagaagtttgttgtaagagccgagctacataaatggcttctcagtcttgagaaggacaggagctccaaagtggataggaaaaccattgacagaattctaaataggcttcaagaagaaggactctgcaattgcatgaacattagtgtcccaaatgttactaattgtggtcgcaatcgtagctctgtggtagtttttcatccatctgttcaaagtttgactcgagacatagttggtgaaattcatgataggattaggtcttttgaactgggactccgtggccagaacttatcaaagaggaaaagcaacgagctaattccaatattgaatgacattcagagaggtcaaacgaatgtggatttggatgcgcgtgctagcaaatcaggagccatgcgagccaatgggtttgtgcttgcaaagatggttcgtgtgaagctcttacattgtttcctttgggactattttagttctttgtctagctgggacaatgccttttcgtctatacatgatcagaaatctgacaatttgtttgcacttgaagatgcttttaaagccatgccactcgaactgtttttacaagttgttggatctactcagaaagctgatgatatgatgaagaaatgtaaacaggttatgcgtctttctgagcttcctggtgaagagtataagcttctaatggacactcttgcaactgggagattatcgatgcttattgatattttacgtcgcttgaag

SEQ ID NO: 181173 - DNA, 132 bp, Arabidopsis thaliana landsberg
aataaaggcttccgtgctaatgcatcttctaggtatgagaatccgtcatactcagaacatcgtgtccatcatgactggctctcacggtcaaatgtacaatgtgctctctatggcttagatggagtatcctaa

SEQ ID NO: 181174 - DNA, 1054 bp, Arabidopsis thaliana landsberg
atgttcatcgaaaaggaaaaggatttggaaaacagaatcgaagagttgctgactaaactccaaaatagccaagaggtagaagaagtaaccttttatgatttagacatactttcctacaacctcagacattagaacagaactcttattttttgaacagactggtgaaactcatcaaggtccagaagcgattgctatgcaaaacaaggaagtattgccattaaataagaggtatgttcatgaacctacataaacaaagaaaacaccgatgatttctgatcgttttctgcttttacagtgacaatcctcgagatttggtgaatgaagtagcatcgctaagagagcataatggattgatggagatagtactgaagcagatgcaagagagatattcagagataagcctaagatttgcagaagttgaaggagagagacaacaacttgttatgactgtacgttatcttaaaaatgccaagaagaagtgaaaccgatattctccgaagaatcaatggtgcaatattgtacaaatttctcttaatttcatatatagttttttttttttttacatatatatatatagtttctcatttttttatatatgattttcctgagagaataagtgagtttcgagttttggcttctttttttttggtgtatgtactatttgtaatagataccgcggatataattattgatgttagtttgcttattttcatcgtattaaaaaaatattctttctaaattcaccatttcaatatttgtttctaccactccaaaaaccaagagtgtaaccatgaaacaatttttaaatacaatcaaagtatgctcactagtttaactgttacaacagatcaatcaactcataaatgatcaaataaagaatctaatctacaacaaacgtagcagatgaacaagaaagacctaagcagcttttgtgattgagagcttctaaattaaataagtgttacctctctcttcatagcaaagtcggatacttggcgtcaagaaactctctgagacttttagcaactttgtgaccacccatgagttctgctaa

SEQ ID NO: 181175 - DNA, 89 bp, Arabidopsis thaliana landsberg
atggttgaggaagcagcggtaatccccactccttggagccgagatcatagtgccgcgctgcctcaaccattgcaaacggccgtgataat

SEQ ID NO: 181176 - DNA, 169 bp, Arabidopsis thaliana landsberg
gtgtttatccgaaaacgaagaaaacctaattctcgtggctattctctctttctctcgtctcttccgcccgaaacttttaacgtcgttgtcatcgagtcgcatttcgtctcaactcaacttgtttcgatatgtgtcaaatctttatttcgatttttccgacaataatcag

SEQ ID NO: 181177 - DNA, 324 bp, Arabidopsis thaliana landsberg
atggctgcctacctcatctccatctgcatcatcgggctgatctacgccctgctggccatcggcctgaacatcgaatacggcgagaccggcctgatcaacttcgggcacgtcgcctacttcgccatcggcgcctacgcctcggccctgctgagcatgcacggctaggcggtgccgctggccatcgtgctggccggcctgctggccgcgtttgccgccattcccatcgggttcgcggcgctgcggctcaaggacgactacttagccatcgacaccctgggcttcgacgacgccgtgcgcatcgtcattcacaggaagagtgtgtga

SEQ ID NO: 181178 - DNA, 110 bp, Arabidopsis thaliana landsberg
ctatgaataacatcagttcatttgattctgtgaaggaacatcattattcggacgtgctctttgggattgacatcctacaagattccggtctaagcgaaccccttcgataa

SEQ ID NO: 181179 - DNA, 150 bp, Arabidopsis thaliana landsberg
acaggggcaactacaccaatgatatcagctttggaactacgacctttggcgagtgatacttacatcgctaaatctggttctttggaactacgaccttttggcgagtggtcacaaagctctattatcttttctttgattaacaggttctga

SEQ ID NO: 181180 - DNA, 188 bp, Arabidopsis thaliana landsberg
cctctacaattcgattgttcagactgtggatgctgtgatcgatgaaacgctatcatctgaccctcaaaactacacacagaccacgttcttggcgcacataaacgtggatgataactcttgttttgcgtttcttgctaatcaaagcatctggagatatgacaaaagggtcagaaacagaacaactcttg

SEQ ID NO: 181181 - DNA, 588 bp, Arabidopsis thaliana landsberg
atggtgtgcgatgttttgagctatcgaggaaacttgctgaagaaaccaacatatacaaaggtatcacactcctcttcaataatcccgtagataatagaaaacccaaagaaagatggagactttatcattttaaggatggtgaaccactgaaagagacactttgcattcattaccaaatttgctacctctttggacgtgagagaaagatccgacattcctactaatcacacattttgtagcaagcaacatgctgttattcagtaccgggaggtggaaaaagagaaacagccatatgatatgatgggaaagaagcaagtgaggccttacatattatggatcttagtagtacctataagacttacatcaatgaaagtctgattgagacacaacggtactatgagctttttgagaaagataccataagatttggcaacagcagccgagagcacgagaattctgccgagtgaatgaaatcagagtcagaaagcaacaagtatatctcaatattaattacatagttgcgttttacagggatttaagcgatgcttgagccagctttgcctgtctgattttggtgacaaaatttga

SEQ ID NO: 181182 - DNA, 664 bp, Arabidopsis thaliana landsberg
atgaatgagtatggagccaacgacgagtatgaaatgctaatgcttatgggaaatgacgaggaagacgagaatggagccatagagaatgagttagagcacgcgattgatcatttaattgccgagtgtgctcaagactttggtccgaatggggaagaaggaggagaaaatgggaacgatgggggtgatttcctcatcggactcatttgagtcattgacgctagagcctaagagtccgagtgtgatcaacatctcatcggacaacattgtgatgatgctgaatcccagcaagccggaatcatgttgggagattgagatgtttaagggagatgagccaagtgaagaagaaggaagaggaaggtgggatccgatgctgcttgaacaggaactaaaccacgagtatttaatgaatcatttaaaacttgatgaagaaaggtcgaaagaaaagatggttgataaggagggagaagacgagaggcgaaagggaaagagaacgaccgaagtaggaatagagtcggagaagtctaaggcccaaaggatcgttggagtaaatctgcatccacttcggatcggatatgggattaattccaaggttaagcccagaatacgggcaacggcgacccagtcagttagaaggaagttacccactccggataagaatccgtga

SEQ ID NO: 181183 - DNA, 287 bp, Arabidopsis thaliana landsberg
gcatctggtgaaagtttagttggatcgaggatcaaagtctggtggcctatggatcaagcgtaagcattttgtattttcttcttaggaattatatttgatttacaagaaggcaatttgcattttctctgttctggacttctatgtttgttcctttagacagcagaatctggactacctgttattgtaattttttgttttctatgctttcaaatgagtaatctgttttttaccgcaggtactataaaggtgtggtcgagtcatatgatgctgcaaagaagaaacatctg

SEQ ID NO: 181184 - DNA, 2136 bp, Arabidopsis thaliana landsberg
gcattggaggttatagttcgcagagatggaatggagtttcagcagaagtattctcgtggaaagcccgtaacaacacttacatgtcatgtcctaccaccagagtcaagggggactcaagggacatgcatccggttctggcctgacaaagaaggttttgcctgttttccgtacttatctattgtaccctcccaaagataggatttgatgactaacttatcttttctgaaacaaactggtaatcagtattcacaactgcaattcaattcgaccataacactattgctggacggatcagggagcttgcttttctcaatccaaaggtataggcagccgtgatatttgatttgtgtgcttcacggagcattcttaacctgctcgttttagtgagttcttatttagcagaagctagtgttcgactgtttcctttgtcataatcaagaggttcatattgaatgcaggttacaatctctctaaaaaaggaggatgatgatccagaaagggacgtgtatagtgaatatttttatgctggagggttaactgaatatgttagctggctaaatactgataaggtgaggcatgtactgtgggtcccttgttatagttgtataaaatctcaatatttgccaatcggtgatgctagacttaaaatagtggcaattaaattggaatgggttttgtgaaacaaaatgcaatggggatggtactaatacttttccttctcagcttacttgatggtaagatgtgttgtctgttcattattctttagggctctatttagcatgagcatggaacctttgtaaacttaatctctattatgttagctcttatgcatttaggtctctggtgttataggtcatccttattacttttcccttccgaaaatatgaatttacaattcgttttgttcagaaaccgcttcatgatgtgctgggtttccggaaagagataaatggctccaccggtgacgtttcacttcagtggtattttactcttccttctacatacgtcgtctaatatctgctcatgtgatgaacagattataatctgggttgcatttagcgtaaaaccacatacttgaacattttggctgactgattttatggtttactttatctaaactggatggaaatatgttgtaccgtatgcggagttgatgactgtatatacagttcttctagacgaatatgtgtatatcatggtagctatccaaaatttatatggatctaagtatataatctcgttattgtaccaggtgctcagatgcctattcagacacgatgctgggatacgcgaatagtattcggaccatagatggtgggacacatatagaaggtgtgaaggcttcattaacaagaactctaaattcccttgcaaaaaagttaaaggttatcaaggtgggatacaacttaccaactgcgttttttccactttatatttccactcttagaggcttagagcctttttccccttctcttttcctcctttttcatggaaactgcaaatgcctaattgcggttagttggtcattattgtggttgaaagagtcttctgagataatgtaggtcaagggttatattatctattcctctccatggattgagactaaatttaaatactcatctgcacttaaaagacatgctttacggacaattaataatgtactaccatgattgaactgtgaaacatgccagttatagaggttgttttttgcttacatttaagcatttatcttgacctgttctgaaaaggttgctaactcatagtgtaacttattgttgttggttatgttttcaggaaaaggatattagcttaagtggggaacatgttagggaaggattgacctgcattgtctcagtcaaggttccgaaccctgagtttgaaggtcaaacaaaggtactagggagcataatgatatgttgaccctcatttttgtcaacaatctctggtcagcaggccataagttttcttggattctgttgatcattttaatttttttgtgtcccaaagacaagactaggaaatccagaggtgagaaaaattgttgaccaatcagtccaggagtacctcacggagtacttggaattgcatccggatgtacttgaaagcattatttccaaatccttgaatgcgtacaag

SEQ ID NO: 181185 - DNA, 456 bp, Arabidopsis thaliana landsberg
gtcaacaaatccactctggtccaatccatcgccgacctggtgaaggacaagatcgttgaagatatttccgaagtgcgggacgagtccgaccgcttcggcgtgcgcgtggtcattgagctgtagcgcggcgcgaatgcggatgtcgtgctcaaccagctctacatgcacaccgcgctgcaaaccgggttcttctacaacatggaggtgctggatggcggcctgcccaagctctacggcgtgccgcagatcctccgcgctttcatcgcccaccgtgaagaggtcgtgacccgacgcaccaaattacggctctacaaggcgcgcgaccgcgcccacatattggtgggtctgggtattgccgtggccaacatcgacgaagtcatcaagatcattcgcatcgcaccaaaccctgacgaggccaatatacagctcatggcgcgcgcctggccagacgacgcc

SEQ ID NO: 181186 - DNA, 433 bp, Arabidopsis thaliana landsberg
atggtgaccagcgtcgatgagcaggacgaccgcaccgcggtggtcacggtcaagctctacttcgacaacaaggggcgcttgggggacaaccccagcgcgaccattcgcccgaccacgctgctcggcggtaactacttcctggacatccagccgggtggggatctgaacaagcagttcacccgggacgagattccgcagaccaacacgcacctgccggaggagctggacaagatcatcaacgccttccagccgaacgcgttggccggtcagcgtggtgcgatcaccaagctcgacgagtcgttgaagggtggcagcgcggcggcgttgcagcggttcctggcctcggcgcccgggtcgttgaagccggccggcaccgttctcgacgcggtgcgcggcgagaacccggcgacggacctgaccgacgtggtctccg

SEQ ID NO: 181187 - DNA, 284 bp, Arabidopsis thaliana landsberg
gtggaagcttgtatccaccctttctttgatgagctaagagacccaaatgctcgtctgccaaacggccggccacttcctccgctattcaattttaaaccacaaggtaaggttctgttatttgcttcttcttttttccgtgttaaattctttataagggaagaaaattagtatgtgttattgataagcgtgtgtcctacagaactctctggtatccctcctgaaactgtggaccgacttgtcccagaacatgcccgtaagcagaaccacttcatggcattacactc

SEQ ID NO: 181188 - DNA, 52 bp, Arabidopsis thaliana landsberg
atgacgtgccaattgacggcacacgcgcggcttaatagcgcgtgggaagagg

SEQ ID NO: 181189 - DNA, 546 bp, Arabidopsis thaliana landsberg
atggtgagactaaatcactaccttccagttaatataatacaaaggttgtttgcggtagtgtcgtgcgagctgtgacaggcataggcgataagttgtcttggcaaggattcctaatggcaagttttcggtacggtagacatattctttattaatagcagataaggaacaatgatcatgtatggcaaattactacaaatagatttggaatgtgttagcaccggagagagtgggtgtttttctctggctggttagccatcaagtactaatgacgaatgtagaacgttttagacgtcatattagggaaacaatgattcatttgttgagagaccttgatggatggtatttggaggaggttggtgcctcaacgacgtctaccatgcatttttttactaaatctcttttggaatggttgtttgaaagtctaggtaccggaggaagcacaagcgaggaaggttggcctacattgttcagtatggcagttttggtggagttggaagtggcggtgtagtgatgtttttggtgaaagacgaacacaccgagtataaa

SEQ ID NO: 181190 - DNA, 212 bp, Arabidopsis thaliana landsberg
atgagattgcacgaagaagataactcctcaatggattcagagaactcggaaatgagatacacaatctcagattccaccatctttaagtactgccttggaaacttaatcgacaaagctctacttctaaaggaaatcacaagcaactcatcagacgatgaagttttggaatttgcaaatcaggtttctctgtactctggatgttcacaccatag

SEQ ID NO: 181191 - DNA, 314 bp, Arabidopsis thaliana landsberg
atggcgtattacaagcacgatggtgccatagcagcaccaccatcaagaagtggacgaggtggtggtcacggtatggttcgcatattcatatctttttatttttacaaatgttctcttttaaattaattgtataccttctcgatattttatattttcttatattgtagttattcattatgtgtaaatattaatgcaccgattattttttagggaagaggatgatgccctaccataagccaaatgctcctatacaaacaccaccatcaagaagtagacgacgtgagggtggtcacaacggtactcataattcataa

SEQ ID NO: 181192 - DNA, 376 bp, Arabidopsis thaliana landsberg
atgagcaaaaatttgcaaatcctaattaatccatcgaaaatcgaaaccctaacagtaagaaatttgttaaatcacagatcttaagcagagatcaaactaatctgagaaaacgaaagatttgaacggaccaattagtgaagactttgaggaactgagcaagagcgaaggcaagaaaagcggagaagattgggagattgtgaggaaacagattatgcgacggaggagatccgtacaacgccctatttccaccacctaacgaaccaacgtccgccgctgtcatcacctcgtccattaggcgatatacaaccgcgaaaaaaatcccgatctcgtcttcttcttcttcttcgatcaaatcagatactgtcaacgtaaaaag

SEQ ID NO: 181193 - DNA, 115 bp, Arabidopsis thaliana landsberg
cttatttggatttgcgaagccgcagaggtggctggtgccgtcagagctctccgatcgctgcaaccaaaatgggaactcaatcaaaacctttgaggctgagctaaaccggttttaa

SEQ ID NO: 181194 - DNA, 229 bp, Arabidopsis thaliana landsberg
aacaaaaaagaagtagattcttaccaattacgatttacgagcttccttcatcgattactctccagaggtcgatatgaatctccgatttgcatcatctctcgcactccgatcgtgacatgcggctctgcaaatgatgaatcctgcccaaacactcagtactaccttcaatcgtcgccagcagcctcagttgtgacctcaatcacaggagaaatcagaagcaatcggcatc

SEQ ID NO: 181195 - DNA, 72 bp, Arabidopsis thaliana landsberg
atgagtgcaatccagtcaatcctaaaatctgcaagagtctcaactactaaaatcctaaagcttgaaggaaag

SEQ ID NO: 181196 - DNA, 2349 bp, Arabidopsis thaliana landsberg
gttcgaaagatgtgaaggatatatactatattttaaaagataatgcagctcaattaactgaaggaaatgacaccataagttctcaggttcatgctagtcctgttcatgacgtagaggcttttgaagttttctttcttccctgcgtattaaatttgaaatgtgttagtttctgataaataattattttctttgttgcagattacttttagtcttctgttttctctcatcatcaccttcgtatcagatgcaatcagcagactatctgataagtcatctatgatatctcaagatgcttcatttaggacagactttcaggatattgtaagacgagttgatacatttttctttcgttcttctccctgtcaccaaagaccttccactactgacacttgcaaacacacttctgtcttgcttacgtcctaatcacctttcaggtcatggcttctggcagtgaccccactgctgatggcttcattggtggcataaggcttgcctgggctgtacatttaatgctgatacatgatggaatatcgggaatggatacaatttccactgcttcaacaacagatatggggcatatatgctcctgcctggagtccatcttctcaaaaaacgtgtttcaatttttgctggataatgttcttcgaactgcagcctaccaggtactttcattataaacatcatcctgaattttatgttctcagttagtgtccatcaaatgcggggtgcctatctggattccctgtgcacttgatatcatttgacgagctagtggaagagttactttgatttcccagctagtggatgacatgtttggctctgttaacttttcttgaagattgagatctgatattgatctctaccttggctagtagaattttatattgaatgagctattttgtaatggttcctatggtgtttatattttccgtcatgacaactgtagtgtatattgtctgtttcatgaaaatggttttatgtgctggcctttatggataccgttttattttttcatgaattatatttttacttgattagtcattcccaaatgtaagagtgttctcatttcgttaagctgatatttctgcttctaaacacgttatatatctataaatgatttcattatttgagatgtgattttattatattggtgtttggcgggtcctctttagatgctttgttcattcttgtttagtctctaggattttgctcgctaagtcagatctcaatttcaagtctctttccaggtttaccttgtgatctttgatttttcctgactcagcccacgttcccccttgtattggtgtatcattgtttgacattttgttagttgctacatgcagaatgatgaggaggacattatctacatatataatgcttatctgcacaagttagcctcttgttttttatctcacccgatcgcaagagataaggtttgttaaatatggagattaacgtatttctacttagcatttgtgtattgattatatgttggtgaccaaagtttgaacgctgcaacttaatcatgtaaagcttgtaattttttctccctacttcatggtctgataattatgatggaaattggtagtatctactttccatttagagggagtaacttgttgatgtatcagtcacagattctgagtatttcagctggatcacttagggaatctgagtggcatataacttcattaatggctgcacgttagatcattgctatttttcttatgttttgatagtgtctaattagttgaatgtatgagccaagatgagaaatacaatagcgtatctacttgtttatctcctgtgtcaagcctgacatcattattgtgcaggtgaaggaatcaaaggatatggctatgagtgttctaaattcttaccgaacttctgatccgcttgatggaagtatgcagactgaagagtctgacaggccactgcccttcatttctcttatggagtttgtaagcaaaatttatcaggttgagaattactaccatataaaaatttatcaagagttctttatctttgtttttttttctgttatatttctcaaaaaatcttggaaaatgagtttgcttggtatcttgaagttgagttctgttcatatgttttttggtaccttattttgcttttcatagcacatagtgagcattcagaatccatctcgatcatatctcatttttatactacattcctggttttgtgttttttgatatttacaaccttttgcagaaggaacctgagctactctccgggaatgatgtcttgtggacttttgtgaattttgctggagaggaccacacaaattttaaaactcttgtggctttcttggaaatgctgtgtaccttg

SEQ ID NO: 181197 - DNA, 90 bp, Arabidopsis thaliana landsberg
tcgccagcgacagacaaacgaacaaggccaattgacattgattccatcttttttgaaacggtcgagatatctgaaggattcatcgaataa

SEQ ID NO: 181198 - DNA, 368 bp, Arabidopsis thaliana landsberg
atgcttttcagatttggctttgagccggatttcttcggatacctgggccgggctgcggtataccgctatagcgactatcaacacgagtgggacggttattatgctgctgtaaaaaacaaacttccatacgcacgttttgccggaccagacgttacgccctttaacctgtactggcttagcgaattcagtaaaaacactaccaaacgcatcgttctgctcgacgggcattattataacaatggccctgcgtccaacccggccatcagcctgactgacgttgtgacgccgaattccaaacatggcgccttatctgcaaggcatgtcggccattgccggggcacatggcgtaccataccgtatatcagagg

SEQ ID NO: 181199 - DNA, 259 bp, Arabidopsis thaliana landsberg
atgggacggccggccgtccttgctcgcactcaacgcgcctcagagccgtcgtggctggtacgcgatgatcccgcagctcggagcgccactcggcttcatgctggctgccgtgttgatcgcatttatctacgccagccttacggaagccgacttttacgactggggttggcgctacccgctttatgtcgcatttgcgatcaacgttgtcgcactgttcgcacggctgcgcttggtcatgacccccgagttcacgcaatag

SEQ ID NO: 181200 - DNA, 63 bp, Arabidopsis thaliana landsberg
atgcacggggagccgtcatgcccatataaacacacgcacactctcaaaccttcaaagcaacag

SEQ ID NO: 181201 - DNA, 146 bp, Arabidopsis thaliana landsberg
agttacctttgaagaagattccagtggtctgtgagtatgcagatgttgttcctaatgaattaccaggaatgccaccagactgggatattgaattcgacatcgagttgcaaccgggaacgacatttatttccaagaggccttactag

SEQ ID NO: 181202 - DNA, 319 bp, Arabidopsis thaliana landsberg
atggtacaagaagcttcctcaagcacagatgcatcatggtctggtgctaagtactatatagctgatgtagccgccttgcctgattcgcagactctctatgcaatgatgcaatgcactcctgatttgtctccggctgagtgtaatctctgtttaacagaaagcgctgttaactatcagagttgttgccttggacgtcaaggcggctctatcgttaggctaagttgcgctttccgggcagagttatatccatttggtggagcttttactgttatgacagcaagacctttgtcacaacctccaccgtcattaatcaagaaag

SEQ ID NO: 181203 - DNA, 132 bp, Arabidopsis thaliana landsberg
atgaagaacttgcatttagttggtgcccaagtcttccaaatcctcttcgaaggcaagaatttgatggagctaataaacatcgagttgcatgctgacctgctgctatactgtccattagaagacaatttccaa

SEQ ID NO: 181204 - DNA, 154 bp, Arabidopsis thaliana landsberg
aacggtgggaagtacggtgaagacccggccgaggagtcagtacccgaccgtaaacggatccgggggtttggatccggatacgagttcgtgtttgactgatcggggattgggagatttcaccggatgcatcgtcgttcagtccgttgttgtgtaa

SEQ ID NO: 181205 - DNA, 516 bp, Arabidopsis thaliana landsberg
gaattctattgggaagcagcagtcaaagaaatcgacttggcttgtcttaaaaccacaaacgcttcttcttcttcgtcatcccatttcactcctttggctaatccaccaattacggcaaatctcactaagccacctgcgaagagacaacctactctcgataaattcatcggcagaaccgaacataaaccggagaatcatcaagttgtttccgagtgtggtgttaacgataacgataatagtcctttagttgggattgatcctgaggcagctaaaacttggatttatccaggtttgttgagattgttaactttatgataaaacttttgtaagtcggtgaccgaataatcgttgtttgtggtgttttagtgaatgggagtgttcctttaagagattatcagtttgctataacgaagactgctttgttttcgaatacattggtggctttgcctacgggacttggtaaaacgcttatagctgcggttgttatgtataattacttcagatggttcccacaag

SEQ ID NO: 181206 - DNA, 60 bp, Arabidopsis thaliana landsberg
gcttcatccaatgcacctcgtgaatgggtagcacctccacagaatccatggcgtgaatga

SEQ ID NO: 181207 - DNA, 504 bp, Arabidopsis thaliana landsberg
atggtaagtgtcattaccacacctttcttttgttgtcagatttttaagacacccttccctaaccgagaagaacattttcggatcttttacagttgataagaagaagatatttctcagatgaattgccagcagcttcaccatggtttatttcgccggttccaacgtcatcatcgcaacggttagacgagattacaagtgatgatgatcaaatttacaagcgaacaaggtaacatcaatgctaaaaagccaagtctttttccttctttgttgggtttggtctttacggttgattgttgcagtttccatggagatccatacaagtacaacaacacaataccaccacttccagcacaacgcaacctaactccgcctcccacgctctatccgcaacaaccagtgtccacccctgataactacaccattccgagatactctctttccagtgtacaagaaacaaccaacaatggcagtgccaggtcaaagcgaatggatattaacgtctga

SEQ ID NO: 181208 - DNA, 791 bp, Arabidopsis thaliana landsberg
atggtgaagttgaaggtattcttcatcgatttttttatttttatagtccagtttaggcgatggttagatactattttttttaatatttacacgtggaaattgaagtatcattgctattggattcttttgactaacaacaaagttctcataaacatggacatctaattaaagttttaattaatactagatatgtttaccaaataagagttgcaaaattggaaataaaggatttttttcgatttaaatgtctatctatatatttcttatcagatttagtggactatgctttatattagatgatgattgacccacgcaaattttctaaaatcattagtccaaatgcttatgtctaaataagtattggatcaaagaaaaatcaaagatgattttatgcttaaaaaaaaaacataatttagtgaccaaaatactattgaataggaacaaaatcgagatctatcattacatgttgctacaggcacggtgccctctttataactttaaaacattttgaaaacaacaaaagattacacagattcagaaacgaaattaatttgatccattatttaaaacctctaaaaccttgatccattttaagtaatagacatcgacccacttaaccactgaaccgtcttattgagtaatttaaccggaaaattttactgaaccagaaccttccaattgaagaagaggctttagtgaatcatcttcgtcatcgatcatcagattcttcagattcgcaagtaaaaactaagaatcgaccaatcgtttattacacgaatacttacttataa

SEQ ID NO: 181209 - DNA, 525 bp, Arabidopsis thaliana landsberg
aatctctccggcattttgttgacagccttgaaaaatcttcggactgatattgtcaaagaatcgccagatttagtcatggcatatcatatattcgggtaagttgacgatccatttaatgatattttcagtttctttctcagatcataagtaatagaaaaatccttgtgtgtttatagcaatgcgacgcttaaagagataagtaaacgacttcccagaaccaaagaggaactccttgatatcaatggtctaggaaagtaagtatcttgaagctttttgaacgctactctctctctttgtataaccaaaggtatgaagaaaactcgggggattttggtgttttaaactctaaacagagccaaggtgagcaaatacggagatcggttattggaaaccatagattcaaccatcaacgaccactacaaaacccgtcccggttcagggaagaggagaagagacgagaacgttaatccgaatgtagcagaagatgatgatcccgattggagtgcgagtcagtctcacaaaaag

SEQ ID NO: 181210 - DNA, 172 bp, Arabidopsis thaliana landsberg
gccaacatttgttcggatagtgaaaaagaagtcagtggaggaatattcaccaataccgtatttagcgactcttataaactgtttggtttgggttctttacggactaccaacggtgcatccggacagcacattggtcattacaataaacggcacagggatcttgatcgaaatc

SEQ ID NO: 181211 - DNA, 320 bp, Arabidopsis thaliana landsberg
gacgattttgcattaggattgcatgtgcattggatgcttctggagttcaaacagaggagaaacagaacaagaagtcagaatgcccaatgacgccttcagcaaaagtactctatcgcagcttcggagccctgccagggcaaatcactctatcacaactccggagaagctaccagctcagtttaactcaatcgcgaagcggaggaatcacaccatcagaaccacttgaccatcacctaatgacatccactcgatcacagggtcgctggaccattcaatctcgacttcactacatctcactcgatggcaaggcggacgcctga

SEQ ID NO: 181212 - DNA, 1298 bp, Arabidopsis thaliana landsberg
ggaaacaccgagaagcagaacatatatcacggacctgccttgaaaaaaacatggagcttgacaccgttggctataatactcttatcaaggcaatgctagaagcaggtacaacagaacatatgatgtatcaattccagttgaagtttatatggtacatggaaccaacactcaaacctctgttgtcacaggtaaactacaatgtgcatctgaaatttatgagcggatgcatacctcaggtgttccttgttcgattcagacatacaacacaatgatcaggtaaaggcatgcgatctggcttccttatgtttaagaatccagtaaagttggtcgttgtggtaattatttccagctatcttggttggttaatgcagtgtgaatggaaggggtctgcagctggacaaagcaattcagatttttagtaacgctcgcagatcagggttgtatctggacgagaaaatttacacaaacatgattatgcattatggcaaggcgggtatgtatctaatcaagaaatttataactatgtttttcgtgtaagttatcaatcacagtttctcgtagacatggaatgttctgtaacattgaccggtcttgattctagttacattaacaaatgaaactttctcttgctgttacaggaaagattagtgaagcattgtctttgtttagtgaaatgcagaagaaagggattaaacctggaacggtaggtcttagccaaattcttcgtaacatctatttagtggcttaacattatgagatatttcttaaaatctaaccatgggtgaaaacaaatctataatactgggaaaatattgcagcctagttacaacatgatggtcaaaatatgtgcaaccagtagactccatcgcgaggttgatgaacttttgcaagcaatggagagaaatggtcgctgtactgactcatccacatacctcaccctgattcaagcctatgccgagagttcacagtttgcagaagcagagaagatgataactctcatgaaagacacaggtatcccgctatctcacagccatttcagttcattgctctctgcttttgctaaagctgggatgatggatgaagccgaaaggatatactgcaagatgtctgaagtcggtacaagtccagacagtgcttgcaagcggacgatcctgaagggatacatgagctgtggtgatgccaagaaagggatattgttctatgagaaaatgataagaagctctgtggaagatgacagatttgttagcagtgtagttgaagatctgtataaagctgttggtaaagaacaagatgtataa

SEQ ID NO: 181213 - DNA, 60 bp, Arabidopsis thaliana landsberg
atgaccatacatgtttgcaatctttggtatggatggtcttttgagcaaaatctcgttttg

SEQ ID NO: 181214 - DNA, 526 bp, Arabidopsis thaliana landsberg
atggaagacgaatattatttgagagtgttacttaacattgtgagaggtccacagagctacgatgatataaaaacagttaacggtgttgtttatccatcttacaaactagcctgttttgcacgtggaattctagatgacgaccaggcttatatcaatggtttgattgaagcatctcagttttgttttggagattatttgagaaattttttctcaatgatgttgctgtctgattctcttgctagaccagaacatgtttggtcagaaacttggcatcttttatcagaagatattttgattaagaagagagacgagttcaaaaaccaaggtacttaattttattacagtttataaaccatggttaaacgattttccacatatacttacattgtatatttcttaaatgcagaacttacactaacagaagctcaaattcagaactatactcttcaagagatagagaaaataatgttgtttaatggagcaactctagaagatattgaacattttcctaagccttcaagagagg

SEQ ID NO: 181215 - DNA, 912 bp, Arabidopsis thaliana landsberg
atggatggattattttcttttgacattggattacggcgatggacccagggaactgacgtcatccgttatggggtccgtagtgtggtcctctaaaaagtattgacgctttttgtcatctctctgttctttaggactcgtcacaaattttacttcctcagattcacatgaccaaatcatgtaaccattttccaaataaaatctttacatttagatttagattcagaggaattgaattagcctcatcataatgtatgatactacatactacactagtgacacggaaattacacgacgaaaataaacaatgtgaagaataacaaaatttcccgggaaaagagagatagagagtgagacacacgcgcgagtgatgcgtgtggtagtaaatagaacactgtttgatgatactgctgcgactacttaactcttattacaaagctctcttttgttgtctctctcttgctctctctgcaaaactccggcgagaagagaacgttgtcgtttcattcgtcaagtaactttcattagtaatgggaaaagcttcacggtggtttaggagtctattcggagttaagaaacccgccccgggttatccggatctatccgtcgagacgccttctcggtcaacttcctctaatccaaaacgccgatggagtttcgtcaaatccaaacgagaaaaagaaagttcaccgattaatcaagttcctcatactccatcgctaccgaattcgacgcctccaccgccgtctcaccaccaatcgtcgccgagacgacggagaaaacaaaagccgatgtgggaggatgagggaagtgaagattcggacaagcatgctattgcggtggctgccgcgactgctgcggttgctgaagctgcagtcgccgccgctaatgctgctgctgcggtcgtcaggctga

SEQ ID NO: 181216 - DNA, 334 bp, Arabidopsis thaliana landsberg
atgagttcggtgtcggacgctgcaacaacggaagaagacgtggccttgagtctcatgttgctgtcgagagacaagtgggagaaggaggaagaggaaagtgatgaagagagatggaagaagaagaggaataagtggttcgagtgcgagacttgcgagaaagtgtttaagtcgtatcaggcgttagggggacacagagcaagccacaagaagaagatagcagaaacagatcaattaggctcagatgagttgaagaagaagaagaagaagagtactagtagtcaccatgaatgtccaatctgtgccaaagtcttcacatctggtcaagctctcggag

SEQ ID NO: 181217 - DNA, 203 bp, Arabidopsis thaliana landsberg
atgcctgtcgaccgaaatgtgctggatgcggatacccgtcaggcggaaggcgatctccgactacggcacgccgccgagaattatatactgccgccgagttgctggaagggcgatgtttcagcatcgtgaagccaagcttcgacgggccgaaacgcttggccttttcgcggatcgacttgcgactgcgccaccaccatgactga

SEQ ID NO: 181218 - DNA, 697 bp, Arabidopsis thaliana landsberg
agcttccgaagaacgacgctgcgacgagagagactaatagcagaggaggaagacgaagacgacaatgaatgcgccaccggagaacgaagtttgttcgatatgccatggccacttcaacgctccttgccaatccaattgctctcactggttctgcggtgcgatctccttcttatttgctttcgtttctccttctctcgaatcgtttcgggatcggttattagtttcagtagtcacagaattcgagtgtagctagcttctctgaatcttcgttagcttcctttatgggatcaaatcgagttgtgacgatcttaatttcgttttcccctgaagcttggttccgttttctagacaattttgctttggacttgtaaattaactattcagagttgttttactggtaacataaatttttagattttgtttgctaagtttcctaagattctgtatgttcacataatatagtgcatgagatataaactctaattctatcattgtagggaactgcattatgctagtttggaggcatggatctacattacggccatgcaaatgtcccttgtgtcgtcgtccgataagtttgttggttccttcagaggaaacaatcagagaccgtaatgacgctacagttaaggaggttcttggtaatcttgaaacttacaaccgactctttggcgggcgttcaagtagtttagttcag

SEQ ID NO: 181219 - DNA, 54 bp, Arabidopsis thaliana landsberg
atgcttcgtcgccgaaggtcctgcagaaagaaacaccctagcctgaagctgctc

SEQ ID NO: 181220 - DNA, 1568 bp, Arabidopsis thaliana landsberg
agtttttcggaaaaagaaattgttctttctcattgattctacatttctacagaacgagagagagataaggatttgtgagagaacaacaatggcgctcgtgaaaacggaaacgcaggcgttaggaaaccaccagcattcttcaaggtttggttcgctttacgtcggtgatcttagcccagacgtgacggagaaagatctcattgataagttctctttgaatgttccggtagtgtccgttcatctttgccgtaactctgtcaccggaaaatccataaattacgcttacatcaacttcgattcacctttcagcggtaaacaagactttcgacttttttactctttcttcgtttccagtctccgattttggtttcaacgtttacggtttttgattttggactctttcaattcttgttaaaaccctggaaatttcgttgtttttctctaagattgtcttgcgattaaccgatttaggtcactaattctgacagatctttgtttctttattgttgattctgtggattagcatcgaatgctatgactcgcttaaaccatagtgatttgaagggaaaggctatgcgaataatgtggtctcagagggatcttgcgtaccgtcgtcgtactcgtactggttttgcaaatctatacgtaaagaatctgaatagctcgattactagcagttgcttagagcgaatgttttgcccctttggttccatactttcttgcaaagtcgttgaagagaatggccaaagtaaaggttttggctttgttcagtttgatacagagcaatctgctgtatctgctcgttctgctctccacggctctatggtttatggcaagaaactgtaagcatacatgattcttagtaactgaaggtaatgatgatgaaatggttgtttatttacttggtctatttttgactttaggtttgttgccaagttcatcaacaaggatgaaagagcagctatggcaggaaatcaagactctacaaacgtttatgtgaagaatctgatcgaaactgttacagatgattgtctacatacactgttttctcaatatggaactgtctctagtgttgtggttatgagggatggtatgggaagatctagaggtttcggatttgttaacttctgcaatccagaaaatgctaagaaagctatggaatctctctgtggactacaacttggtaattcaacttctttgtctgaacctattatttagtatcttgtcattagaccatagttcctgatttaaaaacattcctttgacaacctgcaggatcgaagaaattgtttgttggtaaggcactcaagaaagatgaaaggagggagatgctgaaacagaaattcagtgacaactttattgcaaagcctaacatgagatggtccaatctgtacgtgaagaacttgagtgaatcaatgaatgaaacaagactgcgagaaatctttggatgctatgggcaaatagtttcagctaaagtgatgtgtcatgagaatggcagaagtaaaggattcggctttgtgtgcttctctaactgtgaagagtcaaacaggctaaaagatatctcaatg

SEQ ID NO: 181221 - DNA, 42 bp, Arabidopsis thaliana landsberg
atgacaattaacaagccgcagccgctcaacaagtatcagtag

SEQ ID NO: 181222 - DNA, 358 bp, Arabidopsis thaliana landsberg
atgtgtggaatacaaggtatagaagattctccgactccggcccacattgatggcttcatctggaggaaatatggacaaaagaccatcaaaacctctccgcaccaaaggtaagtagattagaaagacatcgctactgctctcttttcacaaatacagagctattttctagagtgtgtattaagtgatgactaattgtagagtaaaatttacaggtggtactaccgatgtgcctatgcgaaagaccaaaactgcgacgctaccaagcgggtacagaagatccaagacaatcctccagtgtacagaaacacttatgtgggacaacatgcatgtgaagctccagcttatgcagttaataatg

SEQ ID NO: 181223 - DNA, 1168 bp, Arabidopsis thaliana landsberg
gcactcgtaggttcgttagagaaaaaaatcaatgaaagcgggaacaattctacagatgaacaggaggaaggaaagtacattttgaaagaagagagtttgacagaggatgcttcaattgataatgagagggtcaaaaaactcgctgatgaaaacaaagacctgaatgttagttttccgtagatatagagcctttctctgtaattgtttggattttgtctccatctctaccttaatttgataacttttcaacaggatttggtaagttccttggaaaagaaaatagatgaaactgaaaagaaatacgaggaagcaagtagactttgcgaagagaggctgaaacaagctttagacgcagagacagggctaattgatttgaagacatcaatgcaaaggttttgacgatttgcattttttcttctccaaagtgtcaatctttttatcttttctctgaaatacatttgtactcacattagttagtacatatgaattacttgattattttttctctttaggcttgaggaaaaggtttctgacatggaaacagcagaacaaattcgccggcagcaagcgctggttaattctgcttcccggagaatgtctccccaggtgtcatttacaggcgctccggtaaatttacaatctctcatacttacatgtataatattttgaagaaaatgtttgacttcttccctctacctcttgcagcctttggagaatggacatcaggtaagtaatgaagtagatattctgttcagtgatagacttgcatcttgcccatcgcaagtctttctagatagagtttctttgacagttttttttgcattcttacaggaaccacttgctcctataccgtcaagaaggtttgggacagaatcttttagacgatctcgaattgaacgacaaccccatgtatgtgcctaacgaatatattagccctaatttatagtttcgtacttcttttcaccggttagtttgttgtcatatttctatgctgcaggaatttgttgatgttcttctcaaatgtgtatccaaaaacatcggtttcagtcatggaaagcctgttgcagctcttacaatatataaatgtcttatgcgctggaaaatattcgaagcagaaaaaacaagtatctttgatcgaattgttcctgtgtttggttctgcaatagag

SEQ ID NO: 181224 - DNA, 205 bp, Arabidopsis thaliana landsberg
atgccatacgagacagttgaaatagtccggatagacgacggtatcgatatcgaagatcgagacgagtacgtggttgtagcggataccgtgaggatcaaggacctgcgtacgcacctcttcagcagcccaggtcgcattcgatcctttcccggccagctcgccaacgatgtcggcccgatggacagagacgtggaaatagccgaac

SEQ ID NO: 181225 - DNA, 283 bp, Arabidopsis thaliana landsberg
atattacactgggttccaatatgagtttttccggtggagcactccaggctatcggcacacttatcggagtgcaggtattgcagaatcccactactacctatactccaacttccggtactacccggatatctatgtatgttgtaggccccgggggcagggaggtggcggtactgatcggccggcagtggtgggggtggagcaggcggtattgcatttgttccttttctggtgttgccaggtacgggatatacctatacttgttctatcggcaccggcggaacag

SEQ ID NO: 181226 - DNA, 119 bp, Arabidopsis thaliana landsberg
atgctgcaataccatgggccagacgagcgcccatcctgcgaccatgacctcgaccacgaccatgaccacgtggtgtgggagatccgcgaccaggagatggacgcgagggtccggcagca

SEQ ID NO: 181227 - DNA, 493 bp, Arabidopsis thaliana landsberg
aaagcatgcaacttgttctgcccgaaggtctcaaactggtgtttctctaagacgttgcctcttagcaagcttcaagaaaaagggtttctggagaacaacaaacctaaccattgaagtctacattaaagtagctgaagttgtttcatgaagaaaaatcaactgagaattagatgttacatctagttaacattattacatttttttcttgtgcatgcaggttaaatcagtgagttggatcttcgtgaagcatccagacactgcagtacatttcttaccaaagaacaaactggtgaagaaagcacatatgaatactctcctctgcctcatcaagacactgagaaagcctcctctaagtttgtctgagactgagctaagcaatgcttacagcgagttgactaagttaacggaagtaggcttcaagctagactggttaaagtcaaagcttgagaaggcttccttggagaggaagaaatcagtttctgatggttctcag

SEQ ID NO: 181228 - DNA, 74 bp, Arabidopsis thaliana landsberg
atggcagtcctagaggataggccctacatcgacacgagtgacctgcagctagtggcactggacagtggacactg

SEQ ID NO: 181229 - DNA, 385 bp, Arabidopsis thaliana landsberg
attcgtgtgacatttgtgaatgaactcggagttgaggaagctggtattgatggtggtggcattttcaaagacttcatggagaaaattacccgagcagcctttgatgtgcaatacgggttgtttaaggtcatatgtctagttttgctcacccaagtttttgtggatttgataatttaccttactccatcatctttgcatttagtacgtctatctttctctgaatattgtacatgctttctttcaggagaccgctgatcacatgctttatcctaatcctggatcaggaatgatacatgaacagcatctccagttctttcattttctcggcagtctcctcgcaaaagtatggtatttgattggtggccttgatgcggaactcttataa

SEQ ID NO: 181230 - DNA, 368 bp, Arabidopsis thaliana landsberg
atggcgcggtacgagccgcgattatttttctttagtttctaggttggctctaatgataaataaaatagccccagataaagtgattgtagtggagggggttgggctaggagggcgggcagataattttaaatggatggaaccaattgaagcaaataatgtggtttattcgttccacacatacgttccaagagctttcggagatcttggaaaatattctctggataacaaaatcgactatcaatcggctagagataagcattacttagaggaagatgccgcggtggttcatcggtttagtgttcgatatggtgttcctatttttgtcggagaatttggggcgacatactattctgaggaaaaaggtggtg

SEQ ID NO: 181231 - DNA, 1472 bp, Arabidopsis thaliana landsberg
atgggtttatcatgggacagtcttgttgtcgttgttggtactgattctttctgtgactgccaaaaggtataacttgtaagtcatttgttagttaagggtttaactttagctaacttaaggttttataactagatctttttcagggttgcagagaggacagtctctctcgtttagagcaagtgtatcttcttatagagttgctctggtatatgacactgcttagttttagtttaagccaactctgcttttatcttccatctactctgaatgatcttttccttgtagatgcttattacatgcttgtgtatcttggctgttgactttactatctttcccagaaggtatgccaagacagagacttatggtactagcttggtatgtttacaatgtctaatctcattttttttgtctatattaatgttgttccttcttaaagcagttagtaactttgtgtttgtatgtatattacaacttgaaatgaaaacagatggatcttggggttggctcttttgtgttggctaatgctgttgtttctcggcaagctagagacgtctcatcagggtttgtggattcccctttgaaactccattatccattttgtgaagctttgttactagttcagcattatgtaaactcagtccaatttttacttgcatttcttcagaaactggataactggaattaaagcaaccgctccattgctattactcgggtttattcgtcttgttaccacttcaggtgtggattatcaggtaaagaagcttttgcgtttctgccttaaatacttctcgttttacaaaatcttaatatcgttggttatcaactatatgcaggtccacgttacggaatatggagtacactggaatttctttttcacacttgcagccatatcaattctcacatcgtttgttaacataccagccaagtactgtggactcctaggtttcgctgttcttgcaggtatatttcagtttcactttctcttctttcttaattacaagatagtgaaacctaactatcttcaacttccatggttctcagggtaccaaacttggttgcttagtggactgaacacatatttgctttcggacgaaagaggaactgacattatcagcaaaaacaaggaaggagtatatagcattcttggtaagattttgacttggtttatttactactctcttttggttcttcctcatctaactttgttttgatccaggttattggggcatgtaccttcttggcgttcacttaggttatcgtctcttttacggaaaacatacaaatattcgaagcaccacgagctcaatcgctagagtctttctcgtttctcttctcttatggtaaaaacaagcggttatagaacatacgatctcattatgataagatactcatgcgcatatattatgtatgtttgtctcaggattgtaactatactttttgacaactacgttgagaggatctcccgtcgaacg

SEQ ID NO: 181232 - DNA, 81 bp, Arabidopsis thaliana landsberg
atggcggtggcgccgccggacgcggaccctggccccgctggcgtcgacgcggcccaggctgaccacggctccgtgatcggg

SEQ ID NO: 181233 - DNA, 139 bp, Arabidopsis thaliana landsberg
agcaggcaccattgactgcttcttcaacgtctatactatacgagacgagacgagttattgtacgagtcaagcttgctccagaccaagctcactttacacgggcttagaactcaacctgacccaacaagaaaacggatag

SEQ ID NO: 181234 - DNA, 228 bp, Arabidopsis thaliana landsberg
atgccgaagattcttgtagtggatgattccgcgattgatcgcacacgcgcaggccgcttgctcgagaagcaggagggtttgcaggtcgcttacgcggtcgacggccggtccgctcttgatgaaacccgcattcgggttcctgatctcatcgtcacggatctgcaaatgcccgaaatgaacgggctggaactggtcgaggcgatcaagcgggaagctccctcgatcccg

SEQ ID NO: 181235 - DNA, 80 bp, Arabidopsis thaliana landsberg
atggagtggcaacacgagaagggtttcactctcggaggtggtgaatgcgatgcaaggggcgcttcgggttgttcccttgc

SEQ ID NO: 181236 - DNA, 382 bp, Arabidopsis thaliana landsberg
atgcagctctaccccgtagtagtgcgggacgtccgcatgaagcggctcgccggcatcccaaacccccgctcatggaagggggtgaaactgaccacgtaccccggaggcggagtcgggtcggcctctctcccgggggccatccactcaggctgcggcctgccggagagaggatggagcaaaccctcggtaacgagggcctgcaaatcctccgcagtgacggtggagaaaggccatgggtcgcacggtggaatgacgatcgccttatcagccatcgccgaacgggagcggtgggagcagaggggatgaggtgcgcggttttctcttttctgtctactcccttaggttgcgaaaacaaaggcagaaggcaggcgcaaatggcagg

SEQ ID NO: 181237 - DNA, 72 bp, Arabidopsis thaliana landsberg
atgaatgtttcggtacggtgtctccgcatcgaaaaacccctgatccttattcctaagaatacaatcacaatg

SEQ ID NO: 181238 - DNA, 366 bp, Arabidopsis thaliana landsberg
gcgagccgaagctcatgttgagctttacagatgaggagaaggtgaagaatgcagtacccggcgggctggatgaattggttaaggagcgagatcgagcgtttggagtagatacgaaggtgaagagggagaagagggcagacattgaggctacagagaaacatcctggtatgtcctggtttccaagtttgcttcaaacttggccctagccggtgctaattacgcgcagatgcggacgcattgtggaagattcatgagaacgatggtcggaagtgagactgctgggacagatatcagatataacattcagaatgagctgctcaattgtcctgtaataccgactacgagggtcgtaggcgacatatcaag

SEQ ID NO: 181239 - DNA, 44 bp, Arabidopsis thaliana landsberg
atgagaacgaaaggaagtcgtaccgaaaaggaaaacaatcgaat

SEQ ID NO: 181240 - DNA, 184 bp, Arabidopsis thaliana landsberg
ggccctcttcttgaacacactggaacacacttgcacaaggtcttgggtgatgataatgttttaaccgtcaaattcgcggatgtccagaaaagttcatcaacatatagcattgaccattactttacatacaaagggattgccaagaacggtatcatgattggtttacgtcgttatcaattttttg

SEQ ID NO: 181241 - DNA, 116 bp, Arabidopsis thaliana landsberg
gatcagtggccgatggaaccacctcctccttcggtcgacgctgttgtgtgctgcaacacgtgccttttgtggcctgctgcttctcgaaacatcgctctgtaacaatggacacgtga

SEQ ID NO: 181242 - DNA, 35 bp, Arabidopsis thaliana landsberg
acataaaccaacaagaacttgaggagaaacgatga

SEQ ID NO: 181243 - DNA, 73 bp, Arabidopsis thaliana landsberg
atggagcgcaaggattttactagtctaaggcttcaatgcagtaaaaagactgacaaacttttacgaaataaag

SEQ ID NO: 181244 - DNA, 291 bp, Arabidopsis thaliana landsberg
gccaaggtagtagtatcatacccggcaaaactggataaggtaattataaaaatgaaatcttgtaacaaaggtattcaaatatcaacattccatgggtaacatttttcttgacccgttaatctacatggaccactaggtcttatactccaaacacacgggtgatgatgtttacatacaattgtatctctctttcctaagaatatcgaaccatctagactgatttcctcatacaagggtagaggatggagttgcggttcctatcagacagacatgaagagtagtgatggatga

SEQ ID NO: 181245 - DNA, 1610 bp, Arabidopsis thaliana landsberg
  unsure (1)..(1610): unsure at all n locations
actatttttggagctggtaaagaaggaatcattcatatctgggaccttcgtggaggaagaaactcttctgcttttcagagccgcaaagatgtaagtcttacaaggggcgagctggaattggctatggcagtatatttcatctgtaatatctacatgaatttaccttcattcttgtgttctctggctctgatcacgttatgatattggtaacgttcagatgagccaattgcctttagcatctctacatcttgcaccgaagctgcagaaaattgcatctcttaaggtaagctctgtcttttgttttccatttcacttgtttcatcgttcagcaacctttttctgcttctttggttttttttttttaaataaaaatttgcaatgtgggaatcatgttacccccgannnnnnnnnnnnnnnnnnnnactgaaattttggcagcatgagaataagtttccatgaatacttttcaggcacagtcagaaatcgttcccaaggaaatccattccattgatgtaaacccatcctctcctcatcaacttgcatttcaccttgacgacggttggcaagtcattctttcataacaggtcatttcattttgggaaaacgactaaagaatttattactttcatgttttgttttgttgatttgatatcatttatcattttcctttggtggatatctctagtgcaggtccggtgttcttgacatatataaatctgaagttactcatgtacattgccctcctccagcatggttgtaagtttataagcaaacttaggaacttcaagcttattaaattgataaaaggtaaaaaagaagcttgaagtgtaatggattttggttcactagggatggttccaacagttcagctgatttaatcttgcggaagccatcatggctgccaacatcatctgtaagccctacactttgtactaccattaacgttcataagtgaaaaatttctgatcttattttggcttattctataacttatatgattcatatcgcagatttatgtggttgggtccatgagcgagaaagggattcatgttcttgattttcatccaagctccaggtctccttgtcatgttgactacgagtaaggatttcttgaaaaatgaaaactcccgatatatatcctatgtcctctaaacttcatggccacattcctgatattgctaatatatttttgcagtgaggatacacagagaaatgagaagagagacaagtgtaatcacagaaacaagtttgtctcattgtctgaaactgtcacaggttgtgctgcgcatcctctcaacggcatgatcgtagctggaactcaggtattcaagtttgcttaaattatcttaatctattttaggtttttatattagttttagtagttctcggctaacaaaacaaaccagtgaaacaaatgggcttgttgtctggtagtagtagtaatagaatagtgtaattggcattgtgcattatatctggtaaagacaaattgtcaatagtgataagtcactatttgaatggaaatggtgattctgcagaattcgtctttgctgttgatcgctcagatgcattgctcatcttcatcagaaactgcagaaggtgaattgtag

SEQ ID NO: 181246 - DNA, 109 bp, Arabidopsis thaliana landsberg
agtgttatggcacagaaatcgagagttatggcgatcgagaggtcaaacgacgcgaaaacagcgtttggacgagaaatagtgacataggaggtttggaatttgaattaag

SEQ ID NO: 181247 - DNA, 143 bp, Arabidopsis thaliana landsberg
gactgggcggcatccccccagcagatgatgccgtgaccggcgagcatgacaccgcgaagacccggattggcggcgacataatcgcgaagcttcagaccgagatcgaaccccgggcgctgccacggaagccagcccacctttaa

SEQ ID NO: 181248 - DNA, 378 bp, Arabidopsis thaliana landsberg
  unsure (1)..(378): unsure at all n locations
atgacgagtaaaatcagaccttccttggttgaggcttttcagcagaagcgcagagcagagacgaggcgtgaggaagccggaaaacctcgcaagctcgcgggctttctctcacttntcactcctntccactcacttctcgcctagcccgtttcctcgtcgccggtttcttcgctcgtcggtgccggtgtgaccagcagcttgtcgatgcgggcgccgtcgaggtcgacgacttcgaagcggatgccgcgccattcgaagatttcgccagccagcgggatatgccccagcgctgtcatcaccatgccggcggcgggatggaaatcgtgctcgtcctcgccgggcaggctgtccacgcgcagcagttcgcgcaggtcgtcg

SEQ ID NO: 181249 - DNA, 543 bp, Arabidopsis thaliana landsberg
atgttgcgcgccctgttacccgctgttttttacgtgttaagcctggccacgccagccttggcccacaccgtggccacaggccccttgccgttgggggatggtaaaataagcacccacccgcagcgcggctatacctacagctgccagacacattttcacggcggcggtgcattccataacggcccgtggattgtgggcgatgtgtggtaccccaaccggaaaatagccgttgaaggccaggtcagctggccagacagccgcatcagcatcaccgccacaaggcaaagcctcgtcatcaacgcgaatggcctgccccagaacaaaaccggcattttccccattgcctacactgacccggcctatgcctatgaccataaccccaacaccatcagcacccaaaacatacagctggccctgccctctgacccgcagattgcccctgccccggcttgcgtaaacatggggcttatcggcatcaccaccaccggcgttgccctattcaacgcactggatgcccaaggccgcgacgcttccgcccacgag

SEQ ID NO: 181250 - DNA, 49 bp, Arabidopsis thaliana landsberg
atgactcgtcagtcgcaactgcgtttgctcaaccgccttcaacagcaag

SEQ ID NO: 181251 - DNA, 859 bp, Arabidopsis thaliana landsberg
tcgagtgatgctgctaaggtagttgtagccatccttgagttttggtgttgctggaaaaatccagaaggagaaagcttggtaactcgcctttttacgttggcggaaaatgaaagaatgagttgtagaaaatgcagatggattacaaattatccagagaaaagttcttatgccattgttatgcctgcagattcaatcagacaacttaaggtatgtttcattgatttctctctttattgttccttcagaaactggtacctcctcttataaagttgtcttatgcttaaatatatacagtgtgcttttgagagtatgaagtttgtggacatactaaaagtgatccgcatggaatatcaaaagtcatgcaacattaaaacaggaggttgtggagagtcaaactttgttcatcactttataagtagatgcccgcctgtcttcacaattggtaagttttgaccaccatgattgtgttcttatgtacacatttcacttataatgcttataataaaactttgtttgtgttttgtcggtttgcaacattagtcttggaatgggagaagagtgaaactgagaaagaaatatctgaaacaacaaaggctttagacttggagttaggggtcatctggctgtacgaagaaggcttataaacaaacactaactaccggcttgtgtcaatggtaaaacatctgaaacatggtcatatttgtttgtgctatagttcttccgtttttcttagttacagtgtcagaatatctgggatgtgatgcaggttggttgtggtgaaggagaagaagaacacgtatgcctagcttatgaaaagaatcggtgggtcaatctcagacgtgagtgttttgcaggagag

SEQ ID NO: 181252 - DNA, 283 bp, Arabidopsis thaliana landsberg
atggctgtctacgctaagggtttgaggaagctcatgaaatacattaaggacagatacaacagccctgagatcataatcactgagaatggttactaaagaattcaaaatcttcttttattataatataccgtttttctacttttgttgattttcggaatcttatttttataggctacggggaggaccttggcgataaagatacagatcttagcgttgctctcaacgaccacaacaggaaatactatctccagaggcatcttttggcactgaatgaagctatatg

SEQ ID NO: 181253 - DNA, 368 bp, Arabidopsis thaliana landsberg
atgtatgcgggagtttgtgctgatgttgtggtgcatgtttttggtacagctggaatcagtatgttgggcccaaggttcattcatgtatctagttcggctgcatcttctggtattattataagtatatgataatacgtttgctgcatgttccgtgatctctgatggttaggtttacttaatgagttgattcaaccttagagatttatttgtgcatagacccagctcaggagtaatgttagattactcatgattctacttgtcttacaggaaaccatagtgggatgaccatggcgggaagacgaacactaggaaatgccgaaaataagatgttttgcgttgcttctgaaaaattacttgttattatgtaa

SEQ ID NO: 181254 - DNA, 137 bp, Arabidopsis thaliana landsberg
atgggatctcaagacccttgtatatacagagtgccaagccagttgcgtgaagtgaatccagaagcttatagacctcggatgcttctcatcggccctcttactcattccaagaaacctaaagttcatacggattcaag

SEQ ID NO: 181255 - DNA, 288 bp, Arabidopsis thaliana landsberg
gagctcaacttcctggtcgctttttttggtcacatcggttaccgagcccgggcgttcgagtcccatcagcacataatttttggcatttggataaaatacgtgggcaaaaagaaaatcgggcccgccaaagggataaaaacaggtgagggtatcatgagctgatacaatttctttttctgcggttaagcgatcgatgcgggtaatggtgctgtcgtgaacatggttccatactttttccgaaaagcttttatggtccgttataaaacgattttgcctggatttttttga

SEQ ID NO: 181256 - DNA, 32 bp, Arabidopsis thaliana landsberg
cgcaccaagtctgcaagtttttccggacctga

SEQ ID NO: 181257 - DNA, 430 bp, Arabidopsis thaliana landsberg
ccagcggcagctgtaccatttccgctgccgtccctcatggtgacccggttatctacaaggttcagtcgctcagggatcaggggttcaatcgtagcgaggccatcgcccgtttcttgtacaactacaagcctgcgctatgcatgaagtgcgcaggcacccatgctgaagcaggttcgaacagggtcacgttccgccactgccggaatgccttcgcttctgatgccaaagtccgacaggctcttccgcagtgcccgggttgataggggtgcacggggatggtgggaacaattgcagctcagatcggggtaactgtttctcactctgaaccagctctgcagcccgacttagctgagactatacagacagcacctcatggcccttcgaccatgtgcatcgacagtcatggcccttccccatgtgcatcgacact

SEQ ID NO: 181258 - DNA, 345 bp, Arabidopsis thaliana landsberg
ggttttctccctgatcctctaaacggaatcgacgatgttgatctagacggaaaaatggatggctacaacactactcgggagttcatggcagagcttgctaatgtgtgtgttaagaaacacaacgagaccaaggtgagtgagaagttttgttttgtttttttcttaagatatgaattttggtttttggatttatttttgagttttatatatttttcacagggaacgactttagagttggtaaatgttgcgagagttactgaaaggggagcagctacatggaggttgtacatcacttttatggctcgagagtttcctgatgggcctcttgttgagtaccaagccaag

SEQ ID NO: 181259 - DNA, 93 bp, Arabidopsis thaliana landsberg
gtgttcgtactaatatgtgatggaaaatttataaatcgagatggagaagtgttggattcacggattctccgatttcatcttgttggctactga

SEQ ID NO: 181260 - DNA, 131 bp, Arabidopsis thaliana landsberg
acgccttgccatgtcagctccgcgttcgttatcgcgcagaccgaatccttatatggtatcagagcttctccgatcatgatctgctcttcactcgaaatcgtcatcattcgtctctgccaattgctgtctga

SEQ ID NO: 181261 - DNA, 228 bp, Arabidopsis thaliana landsberg
agcgcacggctacggcaggcgatcacctgggtccaggacgtcgccgcgcaggtcaccaccttcgcgcaccgctggggcggcagccagtcgttccgcaaccccaccgcgctcggccgggccacccgcgatgccgccatcgcgacccagcacctcctggtcgacccgatgacgctcgtcgacgccgccggcccgatcatgggcacctacggcgccggccgcgaccgctag

SEQ ID NO: 181262 - DNA, 84 bp, Arabidopsis thaliana landsberg
aaaccgtgcaccgttggcatgaaagtcatcatagataccatagtggagtcagatagaaccatctctggaagcaatcccgggcag

SEQ ID NO: 181263 - DNA, 366 bp, Arabidopsis thaliana landsberg
atgagagtcgttaagggacaatgtttctattctctcactcgattattgttccacgattttccgacaaaaacttctcgtgttttaggcatacattcctccaacaaattcgataatcgaacgacagcagtaaaaccaagacggcaaggcttagtaggtttcttctctcactaatcggtttggtatttggtttgatagcttcttcttggtgatggcaaattttcagtctaggtctttattccgcggcagagttatggtcgtcggcaatgtggagagcatttattccgcgacagttcgtttttgttcagtttaattagactttttgtagattttcgtttcgtttatataactctagcaaaaaaaaattaa

SEQ ID NO: 181264 - DNA, 88 bp, Arabidopsis thaliana landsberg
atcaaacgaagagtaccgtagcgacaacaattacaacagtacataccttgaagactatggtttgaaccacaggaggaacagcggtaaa

SEQ ID NO: 181265 - DNA, 1952 bp, Arabidopsis thaliana landsberg
  unsure (1)..(1952): unsure at all n locations
atgagcaggactagtgacacatttggtgtaaatggtgcttctgactatggagagtatgcatctgaccgagaaatcaaaaggcgtttgtctaaactgaatcgtaaatcgtttagttcggaaagtgacacatcttctgaactttctgacaatggcaagagtgacaactatagctcagcttcggnnnnnnnnnnnnnnnnnnnnnnnnnnnnnnaaggtcgatcacaagacttacgcatcgaaaaatacttcacagcagacgattcttttgattcggtgaccgaagagcgtgaatggggtgcacgcatgaccaaagctagtcttgtgccacctgttactaggaaatatgaagtgattgaaaagtatgcaattgttgcggatgaggaggaagtacaacgaaagatgcgggtttctttgccagaggactatggtgagaagcttaatgcacaaagaaatggcattgaagaattagatatggaactgcctgaagtcaaggagtataaaccaagaaagcttcttggcgatgaggttttagagcaagaggtttatggaatcgatccttacacccataacctcttacttgattcaatgcctggagaattggactggtcactgcaggataaacattcatttatagaagatgtagtcttacggaccctgaacaggcaagttcggctgttcactggatctggaagcacccctatggtattccctttaaggcctgtgattgaagagctcaaagagagtgctcgtgaagagtgtgatatacgaacaatgaagatgtgtcaaggcgtcttaaaggaaatagaaagtcgttctgatgataaatatgtttcttatcggaaggtatagctttcttattctttaacaggaatccatcagtatatttacgatttgtttgttaatctgctctgttactgcttttttgtccaagtagggccttggtgttgtgtgcaacaaagaaggtggttttggagaagaagattttgttgttgaatttcttggagaggtgggtctttagctttgcaattttatgtttgtcagttactcagctgcagcagaaacattttctgaagttcactaggcgcactgtgcttaaatattgaacatttctcttaaaggaggctctgaacagagattctgacttgttttggatattttaggtttatcctgtttggaagtggtttgagaagcaagatgggatccgttccttacaggaaaacaaaactgatcctgcaccagagttctacaatatatatcttgagagaccaaaggtatggagaaaatatgatgtttgggcatgtatttaatatcttagaccattttcttactttttatgatgcacggcagggtgatgctgatggatatgatttagtcgttgttgatgccatgcacatggctaactacgcaagtcgaatttgtcactcttgccgacctaattgtgaagctaagtaagttaaattcttcccctctgcattcattcagaattttggactcagggagcagaaccaaaacagctgttttaattagttttatacatgatgcatgcataaactagcctgcctaagtacgctcagatcaattacacatattaaatgattatttagaaatatttctattgcttataattgtatcttctctgctcattcatacttggtaagtctcatacatttcttatgcatacatacattttcaaaaatgtggagtgaagaactctctgattcttttgctgttttcatatccgttaaattgtaaacaattcactcattttcccctttgttatctggtgcgtccagggttactgcggtggatggacactaccagattggcatctattcagtacgcgctattgaatatggcgaggagataactttcgattataattctgtaactgaggtctgttctttgctctcccttcttttatgcagttctaccgtaggaaagtatttatttcg

SEQ ID NO: 181266 - DNA, 70 bp, Arabidopsis thaliana landsberg
atgagaaatggaaagaagataagggactactcacagctgaaccaacggttttactccatgatcctccaag

SEQ ID NO: 181267 - DNA, 187 bp, Arabidopsis thaliana landsberg
tccaaacctagtccacacagacgagcgagaggcagctgcttttggctcttccttgaagccagagtccaatgagacaatagacacaacacctttcaaacccgtggttgagaatttttacatgacaaactcaatcacaagagcctcaaagatcatggctcagtgcagtgctttgctcctcaagaagtga

SEQ ID NO: 181268 - DNA, 775 bp, Arabidopsis thaliana landsberg
gaagatccactggagtgggacctgaacttaattaagtctgtcaagctattgggatctgatatctgcaatcagatcattgatcaagccggtcttgcaatccgtcttagacatatgctgttggctcagggctatattcgcatgaaagaccagtcaaagattgatacacatcttgctcgatgtgaatctattaggtttctgctaggatgtgtgtgtgcaacacagttctatgtttatcagatggtactccagaaagggatcttgagtagtggaccccagagggaatggtttgagagtcatccaagagcattcggtgttccgggacatccatactcggctcatagattgaaaacagctgtctactgcttaaagcagcttccggagacatactatgagcgtttgcccatgtttcttgaagaaagaggttatctccaaagtggtcgtgacaagaggttgtttgttttgtcaaataacaggggagtgttgttggtacaactgtatggagaaaatgtgttgtatggctcgacaaatcaaacacttgtacaagcttttgttgaacttattaccagagagtttgaagtaagtatgtacggagttctgaggtacatgcagggcatacagattaagtaaactgatgagggcatatctatgtcgcagaatatatacgcaagaacaatgattgagaagttcaaactggatgcacaagagattgtcacaacaccgatgaagatctcgacaagacttactgcagatgagagaggaggagatgtaaatgtta

SEQ ID NO: 181269 - DNA, 481 bp, Arabidopsis thaliana landsberg
atgagtcattttctcactttctgcttcctctcactccttctcctcctccacggtgccaacgccgtcaccgaaacggagctccgatctctactcgagttccgtaaagggatccgtgacgagacctcacaccaacgaatctcatggtcagatacaagcagcctcactgatccatctacttgccctaatgactggcctggtatctcttgcgaccctgaaaccggttcaatcatcgccattaatctcgaccgtcgtggtctctccggcgaactcaaattcagcactctctctggtcttactcgtcttcgtaacctctctttatccggaaacagcttctcgggtcgggtcgttccttcattgggtggaatctcgtcgcttcaacacttagatctgtcggataacggtttctacggacctataccgggtcggatctcggagctttggagtttgaatcatctcaatttgtcttccaacaagttcgaaa

SEQ ID NO: 181270 - DNA, 1056 bp, Arabidopsis thaliana landsberg
gacgaggaagtttttgaggattataatgtttcatctgcaaagcggtttgaagaggtacagttcaatatatgacctcgtccttatgcttagagatgttttaagatagttttgttctggcctaccgtaagttgtctatatgtttcttatgtgttaaaacctttttttcccttgagacaaacgaacaaacatggtttctctgctcttgtggtaatctgctaatcttgccttcataaatttaataaatacttagatactaagcacttctccatcttcctggaagccagccaattattttttgttttttgttttttactttcatagatttattcatgagttattatttttacaagtccttccttttatacaggccaataaaattggaaagattaatctcgctgctactgggaaggatcttatggaagatgagaagcaaggagatgtcacagtagatctctttgctgctttagacatggaaagtgaagctgttactgagcgattaccagagcttgaaaataatcagactctgggcctacttaatggtttcctctctgtggacgattggtatgaacaccgaatcatatctttttacttaacaaatccactgtcgtcaaaccagtccatttggttaacaggtttcttgaaccagtgcatgttaaattttaagttttattattcttcatgagcatgagatttcttcgtggagtactctatatatgattgttatttttttgataattgcatcaccttctgtaacttgaaaattgaacttgagggcatattggatgactgttactggtgtcttctgccgaattcacatctcaggatccatactatcctagaaaatttgtttacatacaaagctattttgtatatttaacttatattaaaagcttgctaattaatcttcccctttctgctcaactgaggtgaaagctctttttcttattatttttatattaactcacttcttttcaggtatcatgcaaatatcttgttcgagcgtcttgcacctcttaatccagtggcacacgatcagatctgtagtgggttgtttag

SEQ ID NO: 181271 - DNA, 134 bp, Arabidopsis thaliana landsberg
ctgtcagagaagacgatgagtgcattgatacagaacaagttccctactcaagtgcagtaggcagcatcatgtacgccatgataggtactcgtcctgatttggcctatgtcgtttgtcttgttgtagatacatga

SEQ ID NO: 181272 - DNA, 91 bp, Arabidopsis thaliana landsberg
gcggatatcgaagcttgagatgttgaaacgtcgtgacaaaggaccaccaaagaagggtcatggaaaacgtgctgcgaagcgtaacaagtag

SEQ ID NO: 181273 - DNA, 2735 bp, Arabidopsis thaliana landsberg
atgactcatgcaatactagaagttgtggcaggtggaattgttcacactgccaaagatattcatcgctattttaggcgtacacttctgaattctacaaagccctttcaagatgtggtcaaatcagctcaggattctcttcggtggctgtgccacaggaaatttcttgagtggaatgaagagacaaagttatacactacaacaccccttggacgtggatcttttggcagttcactctgcccagaggagtcacttgtaatctaatctgactttctatatttgaaattgcattttacatattgttatgtaagcatgcttgacgtcaatgtttgttgttgctgcagatagtgctggatgatcttctacgagcacgtgaaggactagttatggcttctgatttgcatctggtctacttagtcacaccaattaatgttggtgttgagccaaactgggaattgtattatgaacggttcatggaactgtctcctttagagcaggtaattttgtactctctgataatatatggcataactatgtgttgataaacaagaagtatgttgttagttcttcctctaaattgactgttattatggtttaaataaatgtttttcttcgtattaaacttttagtgttctacaaaatagttatgcattctctttctcctttacttccgttgtgggaagctgaattgcaaccttcaagtgttttgcagtgccttttgaataaaactatagaagttaggtcttgatatttggggatgtagttttttctcagaaaatctttatacgctgatgctgttacttttaatctttcgatttcagtctgttggcaatagagttggagtggtcgaacctttcctgatgcgcatggcacatggtgcaacagttcgcactctaaacagaccacaggatgtaaaaaaaaatttgcgtggagaatatgacagtcggcatggttcgacaagcatgaagatgctttcagatgaacaaatgcttcgagtgtgcaaaagattttttgttgctctcatcttgtcaaaattagttcaggttgccccactacactgctttttttttgtttcttgtatattatctttgctaaagcttcttagtttggttcatatatatgtaaacccctagcagcttgcatgatcacctacacttcatgatattttgttaaactgattacttaacttacatgtccgacttgttttggcccttaaagattttggtttgtatcaaaattcctatttcaaaaattgctgacaatgcttgcttttgcatcagaaggcatggtgatgatcgacttctctaatagctgacttgtttctttttgttcttgaactgtgtaatgcaggaagcttctgtgactgaggtctgtgaagcctttaaagtggctagaggtatggttcaagcgctacaggagaacgctggaaggttttcttccatggtttcggtattctgtgagaggcttggatggcatgatttggaaggattagttgccaagttccagaaccgtgtttcatttggtgtcagggctgagattgttgaacttactagcattccatatataaaggtgcttgcagcttccaggaacttatagcgaggatatgaagagtgatgttaataaagatggtttttggtgttgaataaatagggttcaagagctagagcgctgtataaagctggcttgcgtacatctcaggcgatagctgaagcgtccatccctgaaattgtcaaagctcttttagaatcttcagcgtgggctgcagaaggtaaattagttttcttagacagtttaaattgatgtatttgttgccttattgagatctctcaagcttatataaacatcgataagttaaatgtttgtcagaaagaatattgtatcatctttcatctaatgtgctcagagttaatatggtgtatcaggtactggacaaagaaggatacacttgggattagccaagaaaatcaagaatggggctcgcaaaattgttcttgagaaagcagaagaggcgagggctgctgcattttctgcttttaagtcacttggtttggatgttaatgagctttcaaagcccttgccgttggctcctgctagtagtctcaatggacaagaaactactgaaagagacatttccagaggctttgttggtcccgatggattacaacaaagcatagaggggcacatggaatgtgaaaactttgatatggataatcacagagaaaagccaagtgaagtattaggtgatgctaccttaggggtttcatcagaaattaacttgaccagtcgtcttcctaattttagacctataggaactgcagtcggcactaatgggcctagtgctgttagtattctttccagtgatactttccctatccctgtttacgataacagagagataaaacctaaggacaatgttgagcagcatttgactaggaatgaccatattcctctgagtagtaataaggatggtacaggtgaaaagggtccagtaactgcaggaaatattagtggcggatttgattctttcttggaactttggggatctgctggcgaatttttcttcgatcttcactataataaactacaagatttgaattcacgcatctcttatgagatacatggaattgctatctgctggaattgctcccctgtatactatgtcaatcttaataaggatcttcccaacctggaatgtgtagaaaaacaaaagcttatcgaggatgcagttattggcaaga

SEQ ID NO: 181274 - DNA, 288 bp, Arabidopsis thaliana landsberg
atgaatccagctgtgcttggcttgatcgcatcctcgatcggcggaatcgtcatcggcctcaaggccatggggatcatcacagcgctaatccctgccgtgaagtctttcactgcctccctggggttgatggatgccgcggccgacgccaatcccgtaggcgcgattgttgttgggctgaccgcgctcacggcagccttcgtctacgcatggaccaagtcggagaacttccgcaagatagtggtggctggcattgaggccctcgccaacacctttctgaccgtcgcctcg

SEQ ID NO: 181275 - DNA, 345 bp, Arabidopsis thaliana landsberg
atgggggccggcacaaatgtacagcgcaaacttgttgcagagcatcacttggatgcgccttggcgcccttcggatctggaacagcgtgagggccgtattattcggcaaggtaatgaattttatgaaactgatcctgatggctttgaagttgagattttaagatatgccacggaaaaaacttatgacggtcgtatgtggcaaacaatcgaagttaaggcgactggtattgagcaattccgtagaggggatgcattgcagcgtgtgattgaagatgtgtcgagcgaagcggctaatgcagcagaaatgaaagcagcggccaccggcaatccacttatttttatgcaa

SEQ ID NO: 181276 - DNA, 1429 bp, Arabidopsis thaliana landsberg
atggcggaccagaaagatcaagagccaaatcctcccgccggtacgtcagaacaaaacttccgatgagttgttttgtattgaattctcccattgtagcatttcgaaagcaatcttcagtaactagggtttccgagtatgaaataattagcttgggtttttggattcctctgtttttcgttttctttcttccattgatggcaacagctgctgataaagccagagattctcgtgatcttgattctgttatttctcgatcgtgatgcagcaaagccagagtgtctcccattaaagaagagagcaatggctgcaaagtcactcgttgacatagcatatgagtctgactccagcagcgatagcagtgacgaaggagatgtgccgtgtttacccaaggatgaggtcaatgaaaggaaactccaaaatctccagagaaaagctttctacaatcttctccaaactttcgctttcgaaaactccacaatgtcaaacgtaacaataacctttctcttggttaaatctttcttcttctttgctaaattattcgctctgtttctgaggcttgtggtcatgtctttaattgttttccagaagaggactgagatcataggaaaactgatgaacgagtgggggattgctaacgaaactcatatctcctttgcggatcagattcagaagaaacttctgactctaaaacaaacgtatgtatatcctcttgtcaaagctggaagatatgatctcttccttgtttaaaaatcatctttgtcttctcaggaagcattctggtgtgaaggaaacgcagataccagcgacgccattgaccaacactgtaaggcagagaatttgacatctctgatttggctttaattaccgcagagttttaactgtgtttacctttttctctgttttaaggcaacgccgagtacgttttttgttcctaaacctgtcaaaagctggggcagtgttaatccagagtctcttattggaaaatgggtcagtataaggcttcctgataaagctaagttcactgaatacatcatcaaagcatatgatgcggaaaaggtactaaaccctttcttatatctcatgccttgttccatcagactcaagccgttctaagactttgcaatatatctctccaggaaatgcatagcctattgaccgaaacctcgaacccaatggaggttgattgcattgacccgtttagatggatagatatcagagatgtaatacacaaactcttatcatctccatttcatcaaatcttcaaagtctttaatatcagaatgctgaaacatttgatctcaaacgaacttattgtagatttcgcctaacgatatcatgtgggaaggtggacaaaagccaaactttgctgctcccaaccaatctgctgcagctacaggtcaatgagcccttttctgaaaacattgacaag

SEQ ID NO: 181277 - DNA, 382 bp, Arabidopsis thaliana landsberg
atgacgaagtcagttggaacccgcacctcagcgcgaaacaaaaagcccgatcaagcatcaccccgccaagcaccaacccaacaaaaaaccggcggcgcccttgaggacgccgccggtcgaatcaccgctttcgtcgtgtacggcttaccgcgcgcagctcgtcgaacccggatacgccgtctcgtcggccttcacgacgttctggatccactgctggatcagcgcgtggccttcctcgtcgacgacgctgcgcgccagcggcggcatgcgtgcggccggcgtggtctcagtcggcccgatgcggaattccatgatcgagtcggcgacgtcggccgggtggatgtcgtagcggcggccgccattgccttcctcgccggtcgcg

SEQ ID NO: 181278 - DNA, 1411 bp, Arabidopsis thaliana landsberg
atggtggtggagtcgtcgtcgtctccgatcatacctggcttgacggatgacgtggcagagctctgtgtctcgaaaatcccgaggtctagctttcagatcacttctcaggtgtgccggcgatggaggtcattcctcaggagccagcattttgcagctgttcgaaagttgaccggaacggtggaggagttcctgtgtgttctaatggaaagcgagtgtggaagagacgtgtactgggaagtttttgacgcctccgggaacaagttaggccagatccctcctgtccctgggcccttgaagcgcggtttcggcgttgcagtgcttgatggcgggaagattgtgttcttcggaggatatacggaggtggaaggctctggcatcaatagcaccactgtctctgcctctgctgatgtttacgagtttgatcctgctaataacaggtctcaatctcaatctctctttcattaattctcatacaatctggtcaaatgtggcattccatgatgatttttttttttttttgaattttgaggaatcaatgaatgaatgagtgagtgaagattctttttgattttaagtttctgcatgattgttagacaaagcaattcaagaatgaaattcttattcagtttgggattctataactaagaaaagacctaagcttctctgaaaccataattggtattagaactgtccagtctggttgtattctgatactatgtcgaaatatatttgcagctggagaaaacttgcgggaatgaacataccacgttacaactttgcatttgctgaagtgaacggtcttttgtatgtgattagaggctattccacagatacttatagcctttccaacgcggaagtatacaacccgaaaactaaccaatggagtcttatgcattgtccaaatcgccctgtttggcgcggctttgcattcgcattcagttccaaactctacgctgtaggtaggagacaagggactcatattagattccaaggtacattgggttaaactaagtttgatgatatatttttaggcaatggttcgaggttcatcgacatatatgacccgaaaacgcagacatgggaagagttaaactcggagcaatcagtgtcggtgtattcctacacagttgtgaggaacaaagtgtatttcatggacaggaacatgccgggacgtctgggagtatttgatccagaggagaattcgtggagttcagtgtttgtgcctccgagagaagggggtttctgggtgagactaggagtatggaacaataaggttctactgttttcacgggtttgtggacatgagaccttaatgtacgaccttgataaagagaaaggttccaaatggagagtgtgtgatcagattaaaccatctgcttctcaattgcccagcgttctcatcaacttctga

SEQ ID NO: 181279 - DNA, 107 bp, Arabidopsis thaliana landsberg
cgtcgcaatctgtgaagaagattattgaaattaatccttatatgcttggtacaatggctggtggtgctgctgattgtcaattctggcacagaaatctgggaattaag

SEQ ID NO: 181280 - DNA, 1364 bp, Arabidopsis thaliana landsberg
atggcgacggatatgcataaactgcttggaactagtgaagaggatgatgacgaagaaatggacatggatgtgaaggaagaagatgatggagaccgacgaaatagagacaaacacgcagcttcaggcagtagtagtaatgacgagtttatgtttcagcagtcaatgcaagatcaagtgggcactcctgggggaggaggaagtcgcagaagtagaccgcttgaagagaaggagcgaactaagttgagagagcgccatcgaagggctataactgcaaggatactaggcgggttacgaaggcatgggaattataacctgagagttagagctgatattaacgatgttatcgcggctttggcaagggaagctggatgggttgttcttcctgatggaactacttttccatccaaatctcaggtacttatataccctgtccctgtgttatgtcttttgttgtatgctgcaaaattcttctactcttagttgtcagaaatcattagcagtaaccttgatcctcggttggggaaaaactcctgacatatccattaccagtgaaagctaaatcatcttcttgatctgctcaaccttttaggggacaaagcctactggtggttcttctgcggttgcggcaggttcatcagcttctcacattgcatcacagcaaacctcacctcctgctcttagagtggtatcatctgggcttagaagcccagtggaactcagctcttgccgtatgaaaggtgttttcacacccgctccatcaccgtatgatatgctcccaatccaatctccagaactggttggcagtgtaaataaggctgaggggcttgttggttgttcagtcgatgttatcaactctaaacaagtaacgacactttactagtacatagaaaataaatcttgtaacagttcagtcctttgcatttacatagcttatttgaaattaatgaatttgatagtttcctcaacttgagaaaaacattttcaaaatctgaaaatctcataagaacctgtcagattttcactgcatggttgatttacgtgcatacacatatctgggttcaattgtgatgactctcttccacttttggtatttggtagattctcgagattcctccaaatctgacggagcaagatttctctggcactccttatgttccggtttatgtgatgttaccagtaagccactttaatcttagcatttaccaataatatcctgaaattcatccttactaactacatatcctgttctgtcaacagcttggggttatcaatatgaagtgtgaattggctgatcgagatggactgctaaagcacttacgaatattgaaatcaatccatgttgatggggttaaagtggattgttg

SEQ ID NO: 181281 - DNA, 262 bp, Arabidopsis thaliana landsberg
gatatttgtgttaaaagatagtgttgcaacgttagaacacaatatttctattgttctttgtaatttggagaagatatttccaccatcctcttttgatgtcatggaacatttgcttatacatttgccacacgaacctcgacttggggaacctgtacaatttagacggatgtatccttttgaacgatacatggaccatttaaagaaaaaagtgaagaataaggcaaaagtagaaggctcgattgtggaacaatacatcaattaa

SEQ ID NO: 181282 - DNA, 1015 bp, Arabidopsis thaliana landsberg
atggtcgacaaaatttccgaaggtccaaccaccgtaatccttctcggatcccacaccaattttgcactcttcttgatgtcaaatgctcacttgaaacacaacatccaacacatctacatcatgggcggtggtgtccgatcacaaaaccccaccggctgttgtccggcgaactccacggtggcggaatgtcaaccacgacagtgcgggaaccgtgaaaacttgttcacagattatacaagtaatccttactctgaattcaacatcttcgctgatcctttcgctgcttaccaggttcattctcctactcttttatcttctctcaactctcaaggatttgtttggttaataaactatcttttttttaagtctaaataatgttttataaaaataaatatgacatttgtcttaggtctttcaaaacaagacatgacatgtgttttattacaggtgtttcattcaggtgttccagtgactctggttcctctagatgcaaccaacactattccgatcaaccagaagttctttgagacattcgagaataattaccagagaacatacgaagctcaatacgttttcttatctctgaaaatcgccagagacacttggttcgacgatgaattctacaaggtaacttttatgaatccatttccccaaacttaaaataaatcaagaatgtttcttttcttttttgattttttttggtgatattcttcagagctacttcatgtgggattctttcacggctggtgttgcagtctcaatcatgagaaactctgctaataagaacaacaaaaatggtgagaacgatttcgcggagatggagtatatgaacataaccgttgttacttcaaacaaaccttatggaagatcagatggctcaaatccattctttgataatagaagaactccaaaatttaacctagcccttggaggagttcacagtggtcatgttcagacgggtttgcgagatccaacttgcttaccgaaaagcggaataggaagaggaaagtgtaag

SEQ ID NO: 181283 - DNA, 600 bp, Arabidopsis thaliana landsberg
gtctctcaccttctgtcaccttttacaggatgttgttttggctagagtactagatgatgctattgttgcaaacttgaattctgtaatccatgcgaacaatgccatagtaagttttccatataaatcctatcacatacataacatcgaaagcctgcattccatattctttctttaactgaagtgtcttctccaggtagtttcattgctgaaggacgatagcacttttattcaagagttatttgcaaggttgaggtcgccttctacttctatggaatccaagaaaaatttggtatttcccggctcaagaggcatttgttatttattttaagcctcaatggttttgtattcgtgaatgacatttataaaaattattttgagagtaagagatttctttgggataaactttctctagccccaatgttgagatgatctacatgtgacaacagatggaaacaataggtctccttagtatgatatggctgttcaattgagctagtcaggctgatgtgttttcattctctttaaataggtatatttcttgcacgaattttgtagtttaagcaagagcctccaggtggtgcagcagctgcgactttttag

SEQ ID NO: 181284 - DNA, 775 bp, Arabidopsis thaliana landsberg
atggcttctaatcttctcctcatcgtcctcctcgtactcgtgtccctctctttagcttctggatattctttttccacgagagatgctgtctcaaagtaagaacacctcaaaaccctactttttcacttgtgttacgttcttaaagctgcaactaagtataaacatattgttctgctttctctctgttttagacaagacgatgaatcctatattatgactacgagtgatcaagaatcttcaatggtcgttcttgaagatgtagtaaaaggtcgtcgtcttctaaccagagtcgttcgctcgggagcggttgtgaataaatcaagttcaaagagctctccaagcaaaagtaaaaaaaaaggttttctaaactataaagaaagatcgcttaatttattatgttacgaccagttattattaagccttttcagtacattagttttgatacagtatacaaacttaaattgcagattcgaagaagaaagaaaaggataagaaaataggatcactggctggagagctaattcatgttattatgtttggaccatgtactcttgtaggtacattaattttgatataataaacaaacttggacaaaattgcaggtgcgaaaaagaaacttaagagctttaaaataggagcattgactgttggacttggagccttgatcgggatcatcatcgcaacagatgtgggtatcattgtgatcgtcgttgttatatgccttttattagtttgctgtcttaagcacaaagcaaaaaaggctaaaagttactga

SEQ ID NO: 181285 - DNA, 812 bp, Arabidopsis thaliana landsberg
atgaatatggtgtttccgaagttgtttcaggcgatgatggtgaataatgttacggaacgacagtgtttagatagattggcgtttggatttgcattactcgaaaacattgttgaaggcgatggtgtttccgacgttgcgcgatacccatgtctcttgaacttttcgggtatggccatgtctgggaatctcacagatgaagtttctagtgaggaaagaagtcagagcaaatgatataacttgtcataaagaagaacaaaagggttttcagattggtgggattaagccaaagggttttgctcatggaagtgtttgagaaagactgcttcttgtgaagatgcttcttgcgacatagctaatgagggtgaggtttctttggatctgatattgattcggagtatctggttttagaaatgtttgtgatagagactaaatgagccattgttggccaaattaagaattgaatcgtctatagaagacatgagacatgacttgtataaagagtgtttcagtttccgaatcatcttctgcttcaaagtaaactgttattaatcactttgagtaggtggctctttttcttttctcttcaggttaagattgatgacttttgtgttttgtgttgtttctttctgatttttggaattcttttggtcagctgcactgtttaatctgaagcaagcaaccactcgctttctgtcaattcggtggaagtgtatgctgaaacttccgggaagacttgacagttgcagagacattttaaagcagtcaatgtataaaacaactgttctccgcttctcaaatcactactttgctcg

SEQ ID NO: 181286 - DNA, 203 bp, Arabidopsis thaliana landsberg
taacaccatcttaccattacctgctcatattaatgatgaaatgcatacatcatcatcacatcatgatacaactgatcattctcatgcatcatcatctgcatcacaatcatctacacactctagtgtcataccggttttgccagagacagttccaacagagactgcagtggtttcactacctattgctaggccaaaacgcaacg

SEQ ID NO: 181287 - DNA, 116 bp, Arabidopsis thaliana landsberg
aatatcccatctctctgattccaattcctcctctctctctttcgtctctctacttcgaattgattgttttaaccgccggtgatcggagcaaactctctgacggtgaccgccggtga

SEQ ID NO: 181288 - DNA, 1355 bp, Arabidopsis thaliana landsberg
gagagtaagataaacgaagagaagctgagttcactaaagaaaaccgtaagaggattgttaatggcttcaaaagaagagccgatagagaacatcaaattcattgatgctctttgtcgccttggtgtttcctaccgctttgaagtacacatcttcacgcagttacagacgatgtttggtgtcatggttttatgcagatgataagaggcaatgagttcgatttatacaccgtctctctcgtcttccaaatttttagacaatttggctataaacttggtgtcggtaagtcactctaatgttagaattatcgagcgtaatatgttaattaatttatcagtatgaataagtttcttatttatgtttccatattttttgggttaaaaaaaatttgaattgatattactaagaaaaaagtcatgaaagagaatgttgctaattgttagtagtattttgtttttggtctaagaactatattacattttggttaatgtgaaaactgacataagtatagcgagcgtattttttcttctttttcaacttcacctaattcgatcatattaatactgtgaaagcgcaaggtatattcactttgtactctctgtgcataatgattagtatatctaccaagtcaatgttaattattaaacttgattactaccaaaaaattatatgtgtaagatgtgtttaacaacttcaagaataaggatggaaagttcaaggagcacctagctgaggatgcaagaggtcttttatgcctttatgaagctgcacattggagcacccatggtgaagacattctcgatgaagctcttgctttctctaggtctcatttggaaggactggctgatcaatctagtccacctatgtccatccgcattaaaaatgccctcaaacatgcataccctaggggtatatcaaggatagagacacgacaatatatctcatactatgaagaagaagatctgcacgaccaaaccttgctagaatttgctaagatagatttcaatcttctgcaaattttgcaccgcaaagagctttgccaagtcttcaggtgccattatgagctagcaagatagattatatatacattttaaaactcttatatatggagagactaccataatgattgtcgattcttctttttttgtaggtggtactcaaatctagagctcgacttgaaagtaccatatgcaaggaataggactgtcgaaagctacttgtgggctgttggagcatactttgagccccgatattctcaagcaaggattagattggccattgttgttatcttattgactcttgttgatgatacgtacgatgcatttggcacgattgaggaactcgaaccatttcattga

SEQ ID NO: 181289 - DNA, 300 bp, Arabidopsis thaliana landsberg
atgaaaaataccgtacaaaagacatctttggaagcataccgcaatcttaaccccgatagcgtagcagccatcaaaaacctaattatcgaaacactaaaggtaattggttccggctcttcccaacagatagcagactattgtggtaagtcagaagataagatacgcaaaagattatcggaattggaacgggaagatgtaatatggaaaccgggacatagagtagcaacaaaaagcggtaatacggcgtttgtgtggacgttacgtggcgacaaccaaccaaaaacagacaaagaagaaaag

SEQ ID NO: 181290 - DNA, 558 bp, Arabidopsis thaliana landsberg
atggttcgtaccattcaaaccactcggatcaacaccaactacattcctccgccacgacaagttcctgtctacccagtggtagtagaggaaatcctgtggatctccctcccattcgggtggagaacggagtcattctggtggatagcttggaggagtttctgcctacgcccaccccattggcagaatcactagccttcgcagctgggtcatcgacgtcagcaccgcctgcaccagccttccaagcacctgcacccggaggcgacgaccccgacgactccggagacgatgatgaagatgatgacgacgacgaagaaggtggagacgaacacgtccacgaggaagctgactacgcccagcaggacaacttcatggggtttggtcctgttgtcgaacattacacatcaatgttcgagacggggcacttcgccaacctgctacaagaagtgttgcacgcgctaggcacctacgtctgccccctatacgaaacaaggcgagtgagcgagccttcccgggcttgctattacatcactcgcatccacgtcagggtgatggatgcag

SEQ ID NO: 181291 - DNA, 68 bp, Arabidopsis thaliana landsberg
atgcaagcgcacaatctctttgaaaaagaggttagcaatatgaacgacatcatccgttttatgacaag

SEQ ID NO: 181292 - DNA, 753 bp, Arabidopsis thaliana landsberg
atgtcctatggctggtccgcgacccctggatatcgtaggcatccgtggggtgatctcatagtacgtacgggtggagacgattaggtcggtctcgatgaatccgagtggaactcaaaaaaacaatgtgagtcacaaatgcagacagaatctaatggaggaaaagagatgtgagctttttcggttttttcttcctccattgatgaaaaagaaaaaatgggcaacaagagcgttttacatgtgttccactttaagagaaaagacgaatatacaaatccgatgcatagaagatgaaaagggtacctctgcaaagtttataaatcaacagcagaagaaagcaaaaacttcaagagttcaacgaaatgacttgtcattcaaaagagatcttaatggacagaaaaaagatacacatatttatgaatagattcatattttaagctactagtttacttactaccacagctatgtgaagaaagaaagaatcattcaatggtacacattcaacaacagacttcttctgttaaagccaaaggctcaggctcggtttcgatttcgatatcgtctacggtgtttcacgtcgcaaacagagaaggatttgctgtcgcggtacttacttgcacctccagcatttccaagcgacgttccaacagatccaacttctcattcaaagaagccaacttgctatttgtggtagattatgaaacgcgcagagaaattgcaaactcacagacatcaatgacttcgataatcagatga

SEQ ID NO: 181293 - DNA, 198 bp, Arabidopsis thaliana landsberg
attttggaaattgttggtgaactagagaacaccaggttcatgcttgatccatcggagaaggaagtcggtgatcagattattgcattgcttcaacacgggaagaaatttgacaactgtaatgacaacaccgagcttgaaattttccaccgtgctgctactagactaagtatcacttcttctagagtggctctggcataa

SEQ ID NO: 181294 - DNA, 1927 bp, Arabidopsis thaliana landsberg
attgtattggttcggctttcaatgcaaagggagtgatgcaatgccccaactgtcggaaagtagaaaaaggccagtggctttatgcaaacggttgtcgttcatatcccgaattcaatgtcgaggattgggttcacgaagaagatatttatgatattggagcatactctgaaatggtaagaaactgataacacaatccttctcatattccattgcgcttctgcattacttttcacttctttgtctcatgtgctgagtttttaatttttgaaagattgctgttcattttatttgattgcttcaattatgttccatctcgaaaataccttgtgtttatgtatatttgtagtcttttggagttcactggtgcccatttggaagctcagcccgtcttccttctttcgagtaagcaactgcataacatccatttaactctcttttctgctacttttggcaatcaaaactggcatcctcttcccttctttgctgatgaatctctttcaaactttgtagggatggagaattttcaccgagttcatgtaagactatttgtcagatcggttattccatttttgtcctcattatcttcttcttatgttctggaattcgggtttatcgatctattaattctaatgttgtggtacagatcacgatcttttgggacagcaaggttactatactgaaccagcagcgccaaccgcaggtcatccatgtccatatgtaacctattttggcccggttcactcgccttcctcaagcagtggtggtgctgcaggcgtttcagacagttcaagtttcagtagtcactggaacactggctcttcggtttctggtgaagtcccaactccttatggtttccctgtggatccgcactatcacggctgggattatcatccgcctccacccccaccgccacagcatttctctgcttctggcgctcatgtgggcagtccaactcagcccacgcctccaccagccgctgcgaggacttctcgagccaacggctcagatatgatcagacccagaccgccacatttcacgcgtccatttcatggtcacaggtaaacattttctgtcttggtagaggtatatcactaatgaacataaaatatgaccttaattacaaatgtgttgagaatttcttcacataaagaaactaaagtgctcacagaattcaaatttggttttgtgcaaagatttctcaaaattgaagcactgaattgttatattggtaactacactcttgatttgtggaaataaattagttttgcggaatggaatggtggaattgaaataagtaggaaaaagtcaattttcgtgaaaacttgtgtaatggcatatttagtttgcattttagacatcttgcggaataaattaatgaacaaatctgcaaataaacgtgactaacaaaagcccgttatttcgtgataccacaggtttaccaattagaccttttatcaactatcatatttttttgtttgttaaaacacatcttatggcttgtttgtgcagttccagtggtagagcgggtagctcggtggcatctgttccgaggacaccaccatttccaggaagcaacgctcggacccgagacagaatgcaggctcttcaagcctattaccaacagtcttctgcacagtcacaccagccggattcgcctatagtctctcgagggcctgtattcccatctggccggaggcccgctagaggaatagcttcagggatgggatcaacgtcatcttcttcagatcaggcaggtgggagtggttttatccggtttaacatatgggagagagatccttatatgcaatcacaacaagcctactcggttaatcagatggacagagaaccaaacatttggacatcttcatttaatgaaggatcaggaagcttccatcagaggcacggtggcggaggaggatcatcttaa

SEQ ID NO: 181295 - DNA, 133 bp, Arabidopsis thaliana landsberg
atggtgacagggtcctttgttacacattctcatcgtcgagttctccttgtgatcgagtatctagtgatgaatttgaatttttgtgagcaaaaccgcaaatactcgaccccatactcgatcacaaggtctccag

SEQ ID NO: 181296 - DNA, 124 bp, Arabidopsis thaliana landsberg
cacccgggccatcagcccactcacacaggcaaaggatgcattggttgtggataattctgaaatgaccgaaacagaacagttggaatatgtgatgaatcttgttaaaaatcatacgcgtgcataa

SEQ ID NO: 181297 - DNA, 1253 bp, Arabidopsis thaliana landsberg
  unsure (1)..(1253): unsure at all n locations
atgctgtcctctccaaatcaagtgactgacacacctccctggaaaacttaccgcatgatggacaagttgagtcaacggtatgctcagtaaataatgttttctttttctcttgttttggattcaaatcttatatcacagtatacctgagatcatgactacttttgtttgtataggagaataagataaacgatggatctggcccgacattgcttttttgggatgatggattaacaagcctaagtattggtggcttgctttcagaagtatcattgaagggaaactttggaaatcattgtaaaaattcaaacgcagggaatgcaaatgcaactctctgggaagacaatcnnnnnnnnnnnnnnnnnnnnnnnnnnnnnnnnnnnnnnnnnnnnnaagacagatggcatatgaacaatgaacgagaaccagctcataatggtcagtctattggaagtataggaggcttactatctgaagcatcaattctaggagaaggaaggattagtgactgtaacaaaacatgggaaacaaggagagctatcaaacaaccaccattacctctaatctctgattcattagatgctttcctcgtgaaccaaacagataaccgtcgagctccttgccctgcccctcttcctgagtcgtcacattcgtctatactcgatgcagaagatacgtgccatgcattttcatttcgaaagcgtaccacaataacaccaaaggttcacgatcaggttaaatgtttctcaagttatgctgcgtgtttattttattttatcactaaacatttccgatattgctattgtcagaagtttagaacttgcaactcatggttatgggatatgaaaatttggcaggtaagtggagaagttgagaaggagaaacagattgatgaatcgaaccccgcaaaaccattattgggttcctcggtgtttaatcaagacagcagcctcggattatcaggaatcaagtgggtaagtgagagttcttctaactgtgtggtctctgcttcacatttctctaagactatatatttgctgtaacaaaatacacgagttgggcaaataagttgagatatgttttaccatttggatttgaatctgacaacgcaggctgaatcacggggtccatttgatttcggcttatcttcatcgcgaaagtttgctaatggagacagcgtaagctttggtgctgtagtaaaagatttgcaggaaatggagcctttagaaaagaaaataaagcttcaaaagcattga

SEQ ID NO: 181298 - DNA, 1449 bp, Arabidopsis thaliana landsberg
atgcgtttggagtcaattgaagctgtcaataaaattctggaagaggctaataaacgtatccaaccaactggaactggtatgaagtcagaaatttcccccataattctctcattctctgttattttagatttatcataccaatgttaagtcacgattccttattgtttatatgaacccttcctgtataataggagaattatttggtggtcttcgaggacgtctgttggatagtaacaaaaatcttgttatgcaaacattgactactattggaggtgttgcagcagctatgggaccagctgtcgagaaggcgagcaaggttggttatacatgtcatgcattgaaaatagtatgtacactgtaatcatagtatcactgtctgccatttttaccaagtacttgagttatctacctcagggaattctgtctgatgttctgaaatgcctcggtgacaacaagaagcacatgagagagtgtaccttggctgctcttgacttgtggcttggtgctgtgcatcttgacaaaatggttggtgataatctttttgagccatgtcttcgcttgttgatataatttcgttgacttaaaatattttttattctgttaatgcagattccttacattataatagccctaacagatgggaaaatgggagcagaaggtcgtaaagatctttttgattggttgacaaaacaacttactggattaagtgactttgtggatgccatacatttactaaaacctgcgagcactgcaatgacggtgactcatctaaaaatgttataccgtcttatcagtttccaacagtgattacgactgtttgtaatgatttcaatttgttatgcttcaatgtatctttccaggacaaatcagcagatgtgagaaaagcagccgaaggatgcatttctgagatcttgagagtcagtggacaagaaatggtagatatccttgggttaacttgttctattcagggctagaattcaatatctgattagatgtctgtatttgtctcagattgaaaagaatcttaaagatatccaaggcccagcattagctcttgtgcttgaaaaagtaagaccaggattcgttcaaggtacctctccatgatctggttgtctgattagcatgttttctcctcgttgtttgctttttctgttcatgctaatgatgttgttttcagaaccatttgaatcatcaaaagctatggcggggccagtgtcaaaaggtgttacaaagatttcaaaatcaacttctaatggtaccttaaagcaaggaaacagatcagtaagtttctgtctcctaacatttttttctgttttcaatttatattatctgacttgttttgtgtttctgaagagagccgtaccaacaaagggctcaagtcaaattacgtctgtccatgatatagctatccagtcacaggctttgctaaatactaaggactccaataag

SEQ ID NO: 181299 - DNA, 484 bp, Arabidopsis thaliana landsberg
aaatatctacctggagacagcctctagtagtctctccttcagcctgaaaattatctaccagttcagaggcaagaagtacattctcacacaaaagacgacccttaataaaaccaacttgattggcctgaaccgcttgatcaatgaaaagtttcaagcggctagaaataagacgagtaatcactttataaatcgtggtacaacaagcgacaggacgaaattgagagagactatcagctccggtcaccttgggaatgagagtaatagctgtcgaattaaaaccccttggaaggatgcccgtttgaaagaattccctaatggcagcaacaacactgtccttcacaataatccaagcttccaaaaagaattcatccggaaaaccatccggtcccggagctttgtttcttggcatagagaagaaaacctgagtaatttcttcttcagacgggataagagaaagttgagaagcaagagaggagtcacacct

SEQ ID NO: 181300 - DNA, 793 bp, Arabidopsis thaliana landsberg
atgaagatcacttgcaagctgttaaagctagaagagaaaatctcatcacttgagctaaacatcaaggtgcttactctttcgtattgtgtaggttcacaatagcattgcatattgtccgtctttgtttcattgattggcctattcatgtattaccaggtccggggagaatgtgggtatctgtctggattgctttactctggaaacaatgacgaaagcagtgaacatacattatctaagctcaaaactgagcataaaagattgcaaagaaaggtatgtagcagccaccataggtttttcacctcttcgctgtgtgataattattatctgacctatcccattttcatgctcacctttttttcttaccttctgaaacaggttatttttagatctgatccaaaaaagtaccaggatttacgaagggcgctggatgaatttgctggatttctcacacgtcccataagtctggtcaacgatattgaagtgcttgattggaatcaggttgttgagcaggttttcaactggcaggtatgtttatctcatgactgtcattagtattctttttgctttagccatcaagcttcattttcaaatatcaattccttggattctgcaggagacagcaatatcttttattgatcggatgtcaagtgactattctgaatatgtcgatataactcagccaattcaagtttcagtgtacgagatgaaattgggtttatcactctttgtatctggtgctctcttgggaaaacttctcaacagatttgacatagacatggttgactcagtcatg

SEQ ID NO: 181301 - DNA, 381 bp, Arabidopsis thaliana landsberg
atgcactacaccgcgcacgtcgatctcgccttcaagtcggtcgagctgatcatgcgcgacgtcaactacggttggctgttgcgctatatgcacgcctacggcgcctcgatgttcttcctcgccgtctacgtccacatgttccgcggcatctattacgggtcctacaaggcgccgcgcgaggtgctgtggatcctcggcgtcatcatctatctcctgatgatggccacgggcttcatgggctatgtgctggtctggggccagatgagcttctgggccgccaccgtcatcaccaatctgttctcggcgctgacccggcataggcgagacgctcgtcacctggctgtggggcggatacgccgtcggcaatccgacgctcaaccg

SEQ ID NO: 181302 - DNA, 119 bp, Arabidopsis thaliana landsberg
gctatcggcgggggtttgatttcgccaaagaacgatacaaagatatcgcgttgtatggcgagggatgtcgaatacgcacgcgggacaggcctaaattcggaaaagatgtgaatgaataa

SEQ ID NO: 181303 - DNA, 78 bp, Arabidopsis thaliana landsberg
atgagtaacgctgccactttaaagtgtatgtctagcactgctcagaatcgttgtcttaaatactcgactactcctatc

SEQ ID NO: 181304 - DNA, 437 bp, Arabidopsis thaliana landsberg
  unsure (1)..(437): unsure at all n locations
atggtccctgtcgagttgacatcgatccaggcggaatattatcgtgcaatgctaactaagaactatcagatactacgaaatatcggaaaaggggtagcgcaacaatcaatgcttaacatagtgatgcagttgagaaaggtttgcaatcacccatnnnnnnnnnnnnnnnnnnnnnnnnnnnnnnnnnnattggagtttcttcacgatatgagaataaaagcgtcagccaagttgactctgttgcactctatgcttaaggtgctacataaggaaggccatagagttctgatattttcacagatgacaaagcttctagacattctggaggactacctgaacatagaatttgggcctaaaacatttgaaagggtagatggttctgttgctgtagctgatcgtcaggcagctatagcacgtttcaaccaagacaaaaatcg

SEQ ID NO: 181305 - DNA, 70 bp, Arabidopsis thaliana landsberg
atgcaccgacgcacgtgcatgtctctgagagagaaagaagaaaagttcctttacgaggcgatgagtgaaa

SEQ ID NO: 181306 - DNA, 446 bp, Arabidopsis thaliana landsberg
gtctcgctgcgaagttccggcgcgcccgcgggtgacgacggagcgttccaggtcgtcggcgaggtcgaggagtcgatctacctcggcaccggccaccggatccacgtccgcctggacgacggaacgccgctcatcgcgctgcagtcgagtggggacggctcggagcgggcccgcggcgaccgcgtcgtggccacgtggacggcacaggacctggtcgaactggcctgagattcaccaacagtcacattcactcaggggaggagcacgacatgcacgtgacagggaaagccgctgcggcggtcggattgacgctgctgttggcagcctgtggtggcgggggtggcggcgtcgccaccggtccgctcgacaagctaagcaagaccgagggcacggtgtcgatcctcgcgtggaaaggctacgtggagaacggctcgaacgaccccaag

SEQ ID NO: 181307 - DNA, 525 bp, Arabidopsis thaliana landsberg
atggagaacttatctgaaaccggacaagcttggcacgaacaggtcagtggctacattgtgtgaagtccagcgagtgatctaagcttctcgcatagtatgaacgtgatcatcgtttgtggcccgagccgtgcgaaaattgcaaagcctctgtgtcaagtaagaaaacataatacatttttattaatttatgtactacgaattatataaatatatcttcatgaacaagacggtttttttttcttcaccctttgtaaagtgccagaggaccttctttgcgaacaacctgaaatatcatactcgttaacgatcaacgcaagcaaacaagcaatgctcagtgagaatgtattaatagaagggcttgaaaacattaccttgtaaccgcaatgaaacccgtttctgtaggttttggtgctttcagaaccttgctgcaacatcaagcgggttttaatcatgtccatgggtgcggttatcagtgtgcttactaaacctgcaaccacacttgagcttcattcctcaagtgctaaa

SEQ ID NO: 181308 - DNA, 181 bp, Arabidopsis thaliana landsberg
cgatcaacttcgaatcctcaatgaaaacagagaaagagaatcttgcgcgaagagcaaagcaagaaagcaacagcttcaagatctactgagtgacgccggatatttatcggcgatagagataatcggacggcgaaatcaagcgaaagaggagaataaggaagaaaaaaagatttcagcataa

SEQ ID NO: 181309 - DNA, 146 bp, Arabidopsis thaliana landsberg
gggtgaaatctaaatggaacgatatcaacgctagaatacggcgatatggaaaactgcctatgaaactgaagcactatcagtgggcagaaagaagcaacggccagtattacttaggaggaatgatactctatagagaggagagacgg

SEQ ID NO: 181310 - DNA, 83 bp, Arabidopsis thaliana landsberg
atgaaagaacccacagctttctccttctgccacgcagccaaaatagaagagataaaatctggatgcctcgataagaaagaaaa

SEQ ID NO: 181311 - DNA, 113 bp, Arabidopsis thaliana landsberg
ccgggttacgcgaatactcggtgccatccggcttgcgggccggccactcagacctcgtccggtctcgaaccggcccgttgtgtccaccgggaaggcgctggtagcggttgctg

SEQ ID NO: 181312 - DNA, 93 bp, Arabidopsis thaliana landsberg
atgtcaccggtcgctacatcgtctccgtcgttgccattaggacccccacactcagaccttcgcctcccatcgcagtcaacaacatcatctcag

SEQ ID NO: 181313 - DNA, 847 bp, Arabidopsis thaliana landsberg
ataagatcagtccaagagctgagtggacagacatgttttatctgcagagatgagatcgaattgagtgtcgagggagaaccgtttgtggcgtgtaacgaatgtgcattccctgtgtgtagaccttgctatgagtacgaaagacgagaaggcaatcaagcttgtccacagtgcaaaacccgttcaaacgtcttaaaggtttcttgttccttagaccaaatttctttggttttacagttttgtgaatgtagaagattttctgatttgttctgcctattgtttaggaagtccaagggttgaaggtgatgaagaggaagatgacattgatgatttagacaatgagtttgagtatgggaacactgggattggatttgatcaggtttctgaaggtatgtcaatctctcgtcgcaactccggcttaccacaatctgatttggattcagctccacctggctctcaaattccattgctgacttatggtgacgaggtaaacatctcataatttatccacattgtatataactcatcttcagtaattggctctctcagatttctcttttgttttataacaggacgttgagatttcttctgatagacatgctcttattgttcctccttcacttggtggtcatggcaatagagttcatcctgtttctctttctgacccgaccgtggctgcacatccaaggcctatggtacctcagaaagatcttgcggtttatggttatggaagtgttgcttggaaagatcggatggaagaatggaagagaaagcagaatgagaaacttcaggttgttaggcatgaaggagatcctgattttgaagatggcgatgatgctgatttcccaat

SEQ ID NO: 181314 - DNA, 271 bp, Arabidopsis thaliana landsberg
atgaatggggatgctgcccgtaacagcctggacatgatatctttcaacaaagaggctgatgaatgcatacaaaaggcgcctgctagagcaatgtataatgtggctatcaagaagcggtgctggcgaccttcatcgaatgatctgaaaagcgtgcgatccccgctcactgtggggatggctcattgtaggcaacccgccgtctttatacaatgcccttgacaaatactgcgactttggcaaagctgaggaggcacctgctgtgctggcctga

SEQ ID NO: 181315 - DNA, 156 bp, Arabidopsis thaliana landsberg
atggcaaagaacatttgctctgtgtttgcattggcaagctacattgatttggattataaagttgaaggaagaacatacaatgtgaagggtgagaaaaggctcaagcacaattacttagctgatcagatgaagctgtactatgcaagccatgtgaca

SEQ ID NO: 181316 - DNA, 82 bp, Arabidopsis thaliana landsberg
atgcaaaacaattgtcccatccttggtcccaaatgtgacatctgtgaatgctcaggcagtggatgcgaatctcgcttcccag

SEQ ID NO: 181317 - DNA, 73 bp, Arabidopsis thaliana landsberg
atgattgtaaatgggaaactgctaaaagcatacccggagttggagcttgtggacaaactcttagtcacagaga

SEQ ID NO: 181318 - DNA, 20 bp, Arabidopsis thaliana landsberg
atggcgggtatcttgagaag

SEQ ID NO: 181319 - DNA, 180 bp, Arabidopsis thaliana landsberg
aaaaagaatcaagctttagaggcaagcaaggactcactcacccacaagtatcctcaccccatctactcatggacacagcattgacctcagaatcaggctgtgccgttatagccgataagggattcaatgtggatccttttttggtcgaggctcttcaaaaccctcgacatcgtctaacga

SEQ ID NO: 181320 - DNA, 303 bp, Arabidopsis thaliana landsberg
atggtgtggtgtaaacattgtgggaagaacgttcccggaatacgcccctatgatgctgcattgtaagtcttgttcactcatctgtttctttctgttggatttaggagctttcttattctgaatttcgtgttgcaggtcatgtgatttatgtggcaggattttggagaatttcaatttttctactgaagttacattcgttaagaatgctgctggacaggtgggttttactgttacctcgctcctcttactttagagctaccaattgattgattctaatcaaatggctgcagagccaagcttctg

SEQ ID NO: 181321 - DNA, 264 bp, Arabidopsis thaliana landsberg
atgggtacgaaaaccctaagtacgaagtgtacttttgcaagtcttacccgtctaaggaaaaagactctcaaggatatgctggcttttgggaatcaaggtaaagcatatcaagattcaaagactctttttgtagaaaagcttactatgagtggatccttaagaattcattttacttgtcaggttgagtagttacctgcatctagagtttgttctgttttagagcaaccatgtgacacccctggtgttactagaactaaaacttga

SEQ ID NO: 181322 - DNA, 288 bp, Arabidopsis thaliana landsberg
atgaagtcaccagcgaagatcggagagagtcggttcttaggaaacatttcgacttcttctattcgaaatctgcttcccagatccatctacgctaagcagaaatcgattcaaaatgcagatactaaaaagagtttcagatccaacgacgagaactctcctccttgtgacccaaacatacaaacaaatcatcatctcaacaacgacgacgatcttcacttgaagaaaaagtcgcctcagaaagtgtttccatctgcgactcaacagattctccctaaagaatctactcag

SEQ ID NO: 181323 - DNA, 145 bp, Arabidopsis thaliana landsberg
ggtcgatcgtggggaaccgcttttcgaagtggaggtcgcagtaccgtgcgcagtgcactacagtaaacgagaaaatttccgacggctaaaaccctcggacataagaactaaaccgtcggagataagctatgtccgacggcagtaa

SEQ ID NO: 181324 - DNA, 656 bp, Arabidopsis thaliana landsberg
aaaacatgaaattgttgttcttgagactgaaactgagcatagttatactgaaaatgctttgcaggttggagctgttgtggttggatttgatcgctatttcaactactacaaaattcagtaggtctctccaattatttgtttccttccacacttcaggaatgatattcttgatagtttatggttgagctatacgttatagatgtttttgttctgcgtttggtgatctaacagcttctttttaatggaaggtatggaacactctgtatccgtgaaaacccggggtgtcttttcatcgctacaaaccgagatgctgtcactcaccttactgatgctcaagaatgggcaggttggcttcttatgtgcatttttaaaactgttttcatttagctttagtttgagcatttggattttattcctctcctataagagaaaaggctaggataaaaaaaaaaaaaagtagtgcctaagtaagtttggtcatggaccgttattttgttgtctatgttcaccatatttttcatccttgaccaattaagatgtgattacgcggtctcaggtggtggctctatggttggtgctcttgttggatccactcaacgtgagcctcttgttgttggaaaaccctcaacttttatgatggactatttagcagacaa

SEQ ID NO: 181325 - DNA, 424 bp, Arabidopsis thaliana landsberg
gtagtcaacatcgggaaaggctgatgatgagtgagtgggacgatcttgagaaggaagcgcggtcgctctctgcgaaccgcggtccgcgttgtggggtggctgtcctgcttgaggacatcgccgaggagttcggcacggaagcgcatgacgcggttatccggacgatggccaatcatcggctgacaaccaccagcatccgcaaggcccttggtctgcgaatgactgagttcatggatctcccgtccagctactctattcagaggcaccgttcaaaccggtgcggatgtaagggagatcggtcatgactgagcgcgtaacgaacgaagacggcgactggcacgagctggacgatgatgcctcacttgaggatcgcgtagtaaagctcaagtccgaacgggacaagctagcacggcagttgtacgag

SEQ ID NO: 181326 - DNA, 644 bp, Arabidopsis thaliana landsberg
atggtgttcgaagaagcattcgttcccgctcttttcggtgctactcgatttttcttgtataaagacaagaaacttaattgcacatcccaagaaaaccgaagaagaaaacaaaagacttttacaagagttgagactataatgtgagtgagtgagagaccaaagtcagtaaactacgatattggtccaaggtcttctcttccaccaaatacttacggcaaaagaaaaaagaaaaaggcaaaaactatagcaatatatatgaagaagatacgcccacttaaatttttttaatatcgtttaatgtacaagaactaaacttgaaacgaatgtataagaatgattgaaaaaagacatgaactatagttatatttttgaaacgttttagtacgtttagggacataatttgtctgctctgctgttcataaaattatattttgacattgtaagttaacattactttgaagttttgtgagatattttgttctttaaataatattctaaatagtttgcgcgttgtaaattataaagtggggttagttgaaataatgttgcaagatatgatacaatcatgtggcatcattttatatttcttttaatttcttagttattcgattaaattattgaaaactcgaaagagagctacctga

SEQ ID NO: 181327 - DNA, 194 bp, Arabidopsis thaliana landsberg
tttccccaaaattatgattgatggtccgtacggcgcaccagctcaagactacaagaagtacgaggtggtcctgctgataggtcttggcattggagccaccccgatgatcagcattatcaaggacattattaacaatacggagaccaaggaacaactcagccaaatggagaagggatcgccacaagagcaacaag

SEQ ID NO: 181328 - DNA, 304 bp, Arabidopsis thaliana landsberg
atgagatcgccgcggcggcggttgtctcgcgccatacctttctatgcacacttgcccttgcgcgaggcacttgtcaccgcgatcgtgaacgcgcaacgagccgacgggctggccaccctcgaggccgccggactcgaggacctgtcaccggtcgatgcggtgcaccggttcctcgacatcagctgggagatcgccgagcggttcccactcgtgctcgatccctccgtcgccaagacacccgggcccgacggcagcgatccgcacgacccggtcggccgacacctcgagcggatcatcgtgcgcg

SEQ ID NO: 181329 - DNA, 503 bp, Arabidopsis thaliana landsberg
gtcattggagaatgtcatgcaagcaagatcagtgatgatgtgtctgcgaagtatagatctttgattacttctcaggataaagacttgtttctggatttttgccttcatatgcttttgtatcaaccatcttctcaagggtatggaatccattttgagcattgtttgaccgtcttttgttattatttcatctaataagagttgctcgaccttataattcagaggtggatcttctcctgggctttcagtttttcaagttaatcgtataatcggaaagcaagcattaaaaggggacacgcttacaagacgaaaggtctgtcatttaactccaatttgatctctttatgggttctatagctgccaagcaatacattcctcactaagaactaccattttctaaaaattaatcaatttcttaagcagttggggatcttgaatgtcattggaaacatggacctacctggtgaatctgtatatccattgtacattgctgcatcagtggatag

SEQ ID NO: 181330 - DNA, 43 bp, Arabidopsis thaliana landsberg
atggagctttctgaagatcctgaaggagcaaatcagtatcaag

SEQ ID NO: 181331 - DNA, 1100 bp, Arabidopsis thaliana landsberg
atgcatgctaatgatttagttgtgtcttgttttggtttgtatagatatccgagggatttggataaggtaatgcttgccaaacagactggccttactaagagtcaggtaattgatttcgattatcagaagttggacatacttaagtttcttaatgttagatgtctcatacatagtacatatacaatttcatgacatcatctaacaccgactatcaagaataaataatctacaggtaaaaccgaatatatatatagattcaaacaaattttattccgatcaaaaaaatatttttagaaagatatctctttatttctattttttttttcttttcgagtctgaaaacaaaaacgtacccaagaattctaagaaaagcaggtaaaccaaatatattttggtaaatttatttagatagatgatgtatatttattttattataattattttaatgaaaatagcgatgatagcatacgagaaatatcatatatgtgatcctttgtaaagtaaatcaaatttattttggttaaattagtaattatatatattatggaatactttcttttagcacccatgattatatataatcaaaataagtattgttaatagtatcttgtgtaaaatggatgtaggtgtcaaattggttcattaatgctcgagttcgaatgtggaagccactggtggaggaactttattcggaagaaatggatattgaagaaagcagaaaaggaagtgaccggtatagtaccaaaggttcatcttcaaagcaaccgtacaataatacaacttcaaatgaatcttcgaacacgatcctacccgcctttcgtcaaggattcactgaaactgaaacccctaggcaaaattcatcctcaagttgcagcgtagtcatgaggttcacgaagcaacacatgaatcaagcgaacttcatcaatttcaacggagggttcgaaaactatcacacaatggatggaaacagcgtctccctttccctcggcctgcctcattcttgtgaccaaacctttaataacattcattttgagtcaacaagtcatggaactgagaactcggccatatattcatcttcaacttatcaaatcatggattag

SEQ ID NO: 181332 - DNA, 151 bp, Arabidopsis thaliana landsberg
ccaattcgttaagtctctggaacgtttgatcgagaaatacaagaatctttttgtacggttggtagaaattgcctacggtgataaagaagatgaggctgtaactagggttaaagtagatgatgataacccgcaagaaacagagacgaattag

SEQ ID NO: 181333 - DNA, 115 bp, Arabidopsis thaliana landsberg
actttgtgctctttcctccgaaagactatatgtccataacttctcgactcaccagcgagttatggagaaactcagagaaatcggtagtgcaacaagggcaagtcatgatgtttaa

SEQ ID NO: 181334 - DNA, 992 bp, Arabidopsis thaliana landsberg
ggcgcagcgacgacatgttacgtggcattgagcaacgaaaccaaagggttaagtggaaagtattttgcagactgcaatgagaccaattgctcagatttggcaaatgatgagtctatggctctcaagctctgcacccaaagccgtgccttaatccacggttatttggatgaatctcaaaaacattaccttcctaacgtatgtcttatgtaaatcatcttaatagttccgttttttgtaaaaagaccatttgtcattttacttctgtaaagcagtgttttattaacaagaccgatctgattatgtgtagttgccgagaaaccatacatacataaataatgatttctattaagtctaattaatacagaatttgctttctcatcttagctttggcgtgtcttactatttctccatctctttatcagcccttccgtctctctctatctcggattagtttttttttctatagaaactagaaaacgtacctcactgccttgactcctcttcccatatatacgagcatactttatgtagatccttaggattttcccttttacttatatgattcattttcctttccaaattgaattaagaaaactttaggtgaaacttttggcgaaagaaaagaaaaagtaggtgaaagtgaacccatagcccttggactctttttagtttatgtacgagagctaaatgaggccatgacccaaccaaaactcgcggcccatcccgaacctttatccaaagtttcaaacccaccgttatcgtccctagtttataccgacacttccgaatcaccaattccccaagtcattttcatctctgtctcacttccttggtttgagtccgatttataaccgctctttaacattcatgtgtttttttcttatgtttctatattcccatgtctatttctaccttttactcttttataatcttcatgtctttactagaaccgtcggaataacaacggtaaaaagaccatgtttcctaattag

SEQ ID NO: 181335 - DNA, 151 bp, Arabidopsis thaliana landsberg
agttttccctcaagaggagcttgatcagtttcatagccaaaacgctaagcctgaggatcctccggtaccgggaaatgaggtctcaatcggttttggtgtaataaacacactttgttctatgcagatgaaaaagcttacatccaggatatga

SEQ ID NO: 181336 - DNA, 1111 bp, Arabidopsis thaliana landsberg
atgtatggagatgacgcttctaaaattgaggctgcggcagaaaatcactgcatactcagtgttgcccttgatgtgatgcatgaacttttcgagcctgtaaaagacctcatggtggaagagatcttgctgaagatgttatttttagcagatggtaagagacaaacaattactaccataaagtatttcatgtaaaagccttctgttagattctttcgcatcaggcttcctaactctaaaactgcaggtcaaaattcaaacgtttgaacttcagtggattttacacggtacttctagaaaggaacaacgaactggtttctgtggctactgttaggtaaacttcataaagcttaaattacagaaactccagaatttcgtggcctgtataaaacctctattgaattgttagcctgacttgctctgttcgttctcttttcagaattttggggaaaaaggttgcagaaatgccctttattggtactagatcccatcatcttcatgcgcgggacgcgccgggtttggattaatgaactcgaaaaggcgtttagtttactattgaaaacttaactttcccctttggctcaagaagctttgtttgcttatcatgaagacctcttaactgttctcttgaaaatgttgtgttctccaggtgctcattgacttgggagtagagaggttggtcctgcctgcagttccatgcgtgctgaacacatggatcaactcatttggatttacaaagatgacaatctccgaaagaaaaaactttctgaaatttaccttgttggagttcggacgaacaatattgtgcgagaagatcttgatcaagagcggcgtagcagatccaattccaagtataggttagtgcccatgttttgctttgtttttttttccaatgaggttagtctccatgtttgttatgttttcattacagactgtaagctttcaaactcaaacatcttgtaataacgttttaaacttatcatgcagcatctctaggtgaacaacagtgtgacatcctcaggattgaagacaattctgcttctgatgatggatcagaagtacatcaggcagaacagcacctcgaggagtctaggtccactaaaaatccaccaga

SEQ ID NO: 181337 - DNA, 301 bp, Arabidopsis thaliana landsberg
ttccagggccaggcggcgtcgaccatcctcaacgaggtgatcagccgcaatgcttccttgatcgaaggcccgcaggagatcttcgggcgccgcgccgactacatcctggccaatcccaatggcatcaccctcaacggcggtagcttcatcaacaccacccgagctggactgctggtcggcagccctgaactgcaggaggcacaactcaagcaccttagtacgctcgaagcccatggctgcctgaaggtgaccggcgccggcgggcacaatcccgaaggcgccctggacctgatcgccccac

SEQ ID NO: 181338 - DNA, 141 bp, Arabidopsis thaliana landsberg
cgtcccggacccgccggaaatcgcgatgatgacatcgcacgaatttacgagtacgagctcgcgaccgcctccgcgctcattgccggagacaatgattatgtctgtattaccctctgtgtcccagatatccttacctctttg

SEQ ID NO: 181339 - DNA, 1353 bp, Arabidopsis thaliana landsberg
agagagcctatatttgatgcaaaaggtattgaaactgttcgaagagacacttgtgaagctgttgcgaaaactatggagcaatcgttgagactcttttttgaacagaagaacatctctaaggtacaaatttgatttcttgcactctttcgaattatcagctgaaactgcagtgtcttacatctgcttttctctattcattgtgcaggttaagtcgtacttgtatagacagtggaagcggatactatcagggagagtgtctcttcaagattttatctttgcaaaagaagttcggttgggtacttacagcacaagagactcttcactccttcctccagcagctattgtggcaaccaaatcaatgaaagcagaccctcggacagagccacgctatgctgaacgagtgccttatgttgtgattcatggggagccaggagctcgacttgttgatatggttgttgatccactggttcttttggacgtcgatacaccctaccgactgaatgacttatactacatcaacaaacaaattataccagctttgcaaagggtatttggactcgtgggtgcagacttaaaccagtggtttttggagatgccccgtctcaccagaagctcccttggtcaacgtcccttaaactctaaaaactcacacaaaacaaggattgattatttttatctatcgaaacattgcatcttgtgtggggaagttgttcaagaatctgctcaactatgcaaccggtgccttcaaaataaaagtgctgctgctgcaaccattgtttggaagacttcaaagttggagagagagatgcaacacctagccacggtaagtactccaaaatctaacgtttatgaactgttacagaacttggtaacgtttacaaccatcatcttactgtctttactttccaagagatcgtgtgcttcatagaaacttgtacactttctgatgtgagcatttgcatttaatcttgcacacactttgaattcaaagagacagtttcatctcatggtagtcgcaaaacaatttatgctaaaaagtggagacttattagtttcagattatctttcagaaatgtttgctattttataacaagaacgagtgtagacctctttccatgtgtgcttaagttgtgaccttggtgaatctctgtagatgcattcagttccaactttgttggtccattaattgatttttctttatattatcttatttgcagatatgcagacactgtggtgggggagactgggtggtgcaaagcggagtgaaatgcaattcccttgcgtgctcagtcttttacgagagacggaaagttcagaaagagcttcgtggcctctcctccattgctactgaga

SEQ ID NO: 181340 - DNA, 462 bp, Arabidopsis thaliana landsberg
atgagtatggatttttcacctttgttaacggtacttgagggagatttcaacaaggataatgcttcttctgcaacagaaattgatactttagagaacttagatgacactaggcagataagtaaaggaaaacctccgaggcacctcacaagcagtgctactaggctgcagcttgcagccaatgcggtaatatacttgaccctgctttttctttttccttttctttgttacaatgggattcgaatgatgtaactggtttctgtttgtgcgcaggatgtggatgtttgtaacttggttatgaagtcacttgatgacaaatcagagtttctacctgtataccgatcaggaagttgtgctgagcaaggggcaaaacagttcatggaagatgaacacatttgcatcgatgatcttgttaatcatcttggtgcagctattcaatgctcttctcttggagccttctatggg

SEQ ID NO: 181341 - DNA, 1815 bp, Arabidopsis thaliana landsberg
agcgcaccttgtggaggtcttccggcagaagcaggtgttatacctagagctgtgaaacaaatatttgatacgcttgagggtcagcaagctgagtacagtgttaaagtcacgtttttggaactctacaatgaagagattaccgatttgcttgctcctgaagatctatccagagttgctgctgaagaaaaacaaaagaagccgttgcctctcatggaggacggcaaaggtggtgttcttgttagaggattggaagaggaaatcgtgacaagtgccaatgaaatctttactttgcttgagagaggttcctctaaacggagaactgcagaaacattcttgaataaacaatcaaggtaatgcatttgatgcttttgttcgttgctcattagtcgagatttcacttaaataatgaaatccttcacttgcagtcggtcacattctctcttctcaataacaatacatatcaaagaagctactccagaaggtgaagaactaatcaagtgtggcaagctcaacttggttgacttagcagggtcagaaaatatatcacgttctggtgctagggatgtaagtagtttctcactgttcaatcaagtttggaatgtctttcttctatgtttctagatttcatttctggccatgtcagatttactcaatagcgtttctctattagggccgggctgagaagctggtgaaataaacaaaagtcttcttacattaggacgagtgatcagcgctttggttgaacatcttggacacgttccttacaggtttaacttctattttttctttttcttacgttagcgatcacatagcagtctttcaagttatgctgaatcctataattgtttactgcaatgaaatttagggatagtaagctcacccgtttactacgtgattcacttggtgggagaacaaagacatgtatcatagccacagtttcacctgccgttcattgtctggaggaaacattaagtactcttgattatgcacacagggctaagaatattagaaacaaaccagaggtattatctctcgattccatttttcttgtttccattcaggccaaccattgaaaagtactcttgtacatttttttttggcaggttaaccagaaaatgatgaaatctactttgataaaggacctttatggtgaaatagaacgacttaaggcgggtaagaggatttttctctgtagcagtgaatagaatcattgtagacggatgactgatggagtactttcacttagcttaacaaaattactcgctacaaagtctcctgctctgactcctttgtttatctattactcatatgctttcttttttgtctatttagaggtatacgcttcccgtgagaaaaatggtgtttatatgccaaaagagagatactaccaagaggagagtgagagaaaggtattgagtttattggttgaagaaactaaattttcatctgaccttagtgtaactgaataatctctttgcctcctccttactttttactaatattatcttctttttttgctttttttaggtaatggctgagcagattgaacagatgggtggtcagatagagaattaccaaaaagttagtttcttcttactctgtagatcaaaattttacacttatatgtgggaattacatgtgaacaatggttatttacatatttgttgtgaccagcaacttgaggagttgcaagataagtatgtcggtcaagtgcgggagtgctctgatctgactaccaagcttgatatcaccgaggtatatgatactttgtttggattgaatgttgggctttatgactatatcaatatgctctga

SEQ ID NO: 181342 - DNA, 121 bp, Arabidopsis thaliana landsberg
atgtgcgccatcgcgtcgagaatctgctgcattgccgcctccatgcgtgcaatcttccaggatgcgagtagtatgataccaaatgttagcgactctgatcccacaaactccaatcaacaac

SEQ ID NO: 181343 - DNA, 3464 bp, Arabidopsis thaliana landsberg
atggtggttataaccgaaataaccgacgatcgttatgtcaggacggtgagtggctcctgggcaatcggagctgatggaacatggttattcatatccaatcacaataatgcagtgaggaggttgagcattggggaaggggagaagttagcatctgtgcgccagcttgttagagaagcgtacggacaggaatacgttgaaggcccactacacctgacttaccaatggcctgattggatggacatggaaactacctttggtgggcgcacgaagccagtaagcataacttcagatgagacaatgggagtgtttctagctatgcgttttgagttggaggacttgagtttgtttgtctccaagcaaacggtggatgatggttccgaagatggtggaacaagtcagacttcaagttacggatttgcagataaaggcaaatcacctttatacgtcaacgctgaacgatcacctaactacgagtccgttgtgtggaaaaggcttatggatgacgaggcggtcctccgctggatgcgttcaacggaaacagaaggtcaaaacgttggagactcttctaccaacgtacaacaacaccctgtgagaccagctgttgaggcagcttctccgatgttaacgactgaaagtatggacacagcgactgaagatggagatcaggtaaaatattctgcgtttattaaattcagccactcgaatataccattacagtactaagacatctatttacgcaggaagaagactcaactgttgttgaggcagatttacttaaaaatctggggttaccgtcaattaatttagccactgaatcttacgactctctcagtgaagaggaagcgtacaacgacgaaaacgactatcccgggagcgagacaattaaggagtgcaatttttttgggccttccgcaactaacttggtggaacctctaggtgtacacttggatctcgcggtacctctgcatgaggctcttgaagacatgtgccttaacttcgcatctttcaacagggatgcagcgccaaccctagacgaacaaggggaagaaggtaccaattacatagcatgttgtttttaagaacaacacatattgcaagagtgttctaataataaccgtcatatagagaaacatgttattcgtataaataccatgcaataaaaaatttaatttcgctgaattcctgattagtcatacgaatacaatcttaatatccacatcatatttgtttagtttaaataacaaatctaatttaatataatctaatataatgatatgtttacaaaccaacacatggtttcaatttacgttgatatccctgagatatccctaatcaaaatatagagtaacatgctttaatattagacatcatgggatatagatattatgttggtcaaagtgttactatttagtcatacaaatacatgctttctacattcacaacatgtgtacagtgtaaataacacacgaactttattgttgtgtaggccgcgtcggaatggaattagcaattcgggatgtggtctacgaaggtgatgaactgtttgttggccgggtattcaaaaacaaacaggattgcaatgtcaaattagcagttcacgcacttaatagacggttccatttccgtcgtgatcgttcctgcaagaaactaatgactttaacctgcatttctgaaacatgcccttggcgtgtatacatcgtcaagctggaggattctgacaattaccaaattcgaagtgctaatctcgagcacacttgcactgtagaagaaaggagtaattaccacagagcagcaacaacgcgggtcataggcagcataattcagtctaagtatgcgggcaacagtcgggggccaagggctattgaccttcaacgcatcctattgaccgattactcagttagaatttcctattggaaggcatggaaatcaagagaaattgcaatggatagtgcacaaggatcagctgtgaatagtttcactctgttgccagcctacctacatgtgctgcgcgaggctaatccaagttcaattgttgatctaaagacagaggttgatggaaagggtaatcaccggtttaagtacatgttcttagcattcgccgcatcaattcaaggtttctcttgcatgaaacgggtcattgttattgacggtgcccacctgaaaggcaaatacggtggatgcctcctaaccgccagcggccaagacgctaatttccaggtttttcccatagcgtttggcgtggtcgatagcgaaaacgatgacgcatgggaatggtttttccgtgttttgagcaccgctataccggatagagataacctgaccttcgtctcagacagacattcctccatttacaccggtcttcgaagggtaatccttaaaattgataattttaaatgttacatgttatatacacatatggctcttatttattttagaacacatgctatctaccaatatgccctgctatatacgtataacacatgttaacatgcaggtctacccaaaggctaagcacggggcatgtattgttcatctgcaacaaaacatagcgacctcatataagaagaaacacttgctgttccacgtgtcaagagctgcgagggctttccgaatctgtgaatttcatacatatttcaatgaggtgataagactagatccggcttgcgcacgatacttggaatctgttggtttttgccattggacacgcgcttatttccttggggaaagatacaacgtcatgactagcaatgtggcgcagtctttgaacgcagtcttgaaagaagcccgtgaactaccaatcatttccttgttagagttcattcggaccacattaatttcctggtttgctatgaggcgtgaggcagctagaaccgaagcatcgcctctaccaccaaagatgagagaagttgttcatcgaaactttgaaaaatcagtccgatttgctgttcatcgccttgacaggtacgattacgagataagggaggaaggcgcaagtgtctaccacgtgaagcttatggaacgcacatgctcctgtagagcatttgatttgcttcacttgccttgcccccacgcaatagcggctgcagtggctgaaggcgttccaatacaaggactgatggcgccggaatattctgttgaaagctggagaatgtcttacctaggtaccataaaacctgtacccgaggttggtgacgttttcgctttacctgaaccaatagcctctctccgcctcttcccgccagccacgcgccgtccatcgggacggccgaaaaagaaaagaattacttcaaggggggaattcacggtaaacgttatacatttggaatttactgtaacacccttagtgttttaaattcctaacacttgctcaatcttcatctcagggtccccagcgacaagtaacacgttgttctcgttgcacaggcgccggccataatcgcgccacgcgcaaaatgcccatataa

SEQ ID NO: 181344 - DNA, 69 bp, Arabidopsis thaliana landsberg
acgtcgaggccggagtataatcggattcttgtggagaaacccggtggatctgacatctggccgttttaa

SEQ ID NO: 181345 - DNA, 49 bp, Arabidopsis thaliana landsberg
atggtgcagtacacgggctcctcagactatggggtgcgtggctttgaag

SEQ ID NO: 181346 - DNA, 532 bp, Arabidopsis thaliana landsberg
gtatgggccttcgttccaatatgctggtgattacacagacaacaaggacttagacattttcaggaggcgaaaaacaagagtcatagctatagatgccatgcctgacccaggaatgggacagtacaaacttgatgccctcattcggtaatcaaaacttgtctttcagccagtttttcattctttccttttttttattttgtttgtgaattactcaattgctccttttgtttctgtagagaggttaataaggcttttagcggatacatgcatcaatgtaaatataatatcgatgttaagcatgatcctgaggcatcatcttcggtaagaccacaattatgctccatacatgaatttagcatacatgttaagcattttgtttttcttgactagaccaagattaaatttgttttcgcaaagcagcatgttcctcttacatcagattctgcgagccaagttatagaaagctctcatagatggtgtatcgatcatgaagagaaaaagattggtgtagctacagggaactggggctgcg

SEQ ID NO: 181347 - DNA, 3329 bp, Arabidopsis thaliana landsberg
  unsure (1)..(3329): unsure at all n locations
atggtgtttctctctcgcaaaaagcctccaccgcctccgtcgtcatcctcagctgctccgtctctcaaaatcccccagccgcaaaaggaatccgttgagcccgacgcggtggagaagatgactgccattctagccgaagttggatgcacactgatgaatccgtacggtccgccgtgtcttccttccgatctacacgctttccgccgcaatctcactggtcgcttatcgtctttctccgccaattccggcgagagagataacgtcggtgctctttgctcagttttcgtagctggattttcattgtatattcaatctccgagtaatcttcgaaggtcagtaaattccaactcgagttttccattattaaacctgagatttcatcactttgtaatcggatttgttcatatatcgttgtagaatgctttcttcttcttcaacaactaagagagacgagagtttagttcgaaatctcctgcttgtatctccgattcaactcgatattcaggaaatgctactcgagaagcttccggagtactttgatgtagttacaggatgttctttggaggaagatgttgctcgccttatcatcaaccattttcgttggctcgatttcattgttaatccccatgtgttcaccgttaagttaatgcaagttctatctatttgtcctttgcacttaaagaaggaaattattggatcgttgccagagattattggggatcacaactgtcaagctgtggttgattctttagaaaagatgcttcaggaagattctgctgttgttgttgcagtgcttgattctttctccaaccttaatttagatgatcaattgcaagaacaggtgagattttgcttcattattggtttaaggttctgtattatacattgtgttgatggaatgccattattattttttttactttcttaaaggcgattacagtagcgatatcatgtattagaacaatcgacggagagcatatgccgtatctacttaggtttttgcttcttgctgcaactcctgtaaatgttagaaggataatctcccagataagggaacagttgaaattcaccggaatgtcacaaccttgtgcttctcaaaataaactcaaaggaaaagtacctgcatataatgcagaaggttctattctccatgctttaagatcaagccttcgatttaagaatgtaagtttgtttcattacagttgcttaagaatgtttgtcattttgtggcatcactttcattttctgtatatagatactctgtcaagaaattataaaggagctgaatagtctggagaaacctcgagatttcaaggtaatcgatgtatggctgcttattctcatgtacnnnnnnnnnnnnnnnnnnnnnnnnnnnnnnnnnnnnnnnnnnnngaagaaagtggttgatgaatgcatacaagaggccttgcttgatcaatgtataggtggtaataaagagtttgtgaaggtgatcttcataagaaattttgaaaagtgtctgatacatgcactatgtgggaatgttcttttgtagaattaacccgactcactcattgttctaggataattttgcgtcatttgtttctttggctgaacacctcttgtcatccaaagaagaaaaggcaagggaaattggctctcatatctatagtcgtctttttgaagagtttactgacaattattcaagacaagaggtaagaacataattaacatttcatctcttagtataataaattttgcataactagtccacttttgttctaattcgaattggttgcagattctaggtgccctagtgacacatgtgggatctgataacaaatttgaggtcagttctgtcttggagatgatgacagctctggtgaaaaaatatgcacagcaactcctccccttttcttcccacataaatggtatctctggaacttgtttggatatattactcactaatgctgatccatttactgttcttcttctaatattctggctgttttatgtcgtataggtattttggactacttagagggatttactattgataatttgcaaaaggtgggcatttatctttgcaatctgcttggtatgacaatctattgtatataaagtagacatactcgcaggtctatgaggttttcagcctcctcgcactatcagctcgtgcaagtggtgattcttttcgatcttcaatctcaaatgaacttatgatgatagtaaggaagcaggtaatatgaatgatcttgccttcgatttggtttcttaagtgatggcagctcactcccagttgtttggttttatattggcaggttagtcatccagacctcaagtacaaaaagatgggcttagttggaagtcttaggattgtttcgtcacttggggatgcaaagagtgttcctgacttttcatcatcgcaggtaacattcagcaattcttagttgttgattaaaattattttcgacctcttttgtttcctatgggaagtatggggaatcactcttatgcccattaaaattttcatttagcaggtttcagagtgtggggagattttgcagctcttaaagacatctgttgaatcttgcagacagtcgaacttagccctaattatgttctatgatgaattcgctaccattcttagccataaattacttcaaccagaaattatggagtggtgaagatttcagtaacagtttattgctagcttgtttagtagtttttaaggctacacagtaatcttaagctttatccagcgtaaattttatactgcttttcaggattgggaagcatctgggagaatttgagtcgctttttctagccgatcttgaaaacgaaaagatggccgaaaagggttcatattctggactagaaggtatctcttgatcctacttaaattaattgaatctcttctgagcattgcatggatttgatctccgtttcttttcttctcatcgcttaggggatctttggatgaacttggatggtagtatatcaccaatctgtttgaatattttggccctggcatcttcatcctcagagttggttctctgagattatccctgctttcagttactgttgaagatttctctctgacaactgtgacttaattaagagaatcatatttcccgcaggtcctgttgtctgcagattcttccttcaaattttcttttgctatcaactgtaagactttctttcacttgaaactgggaggttattcaagatatcataactaacctgaattgttttttgtttacattcaggttgagaggttgacaaatgatggatcccttgccggggttgatgctctgctcggatgccctttgcaccttccttcttcaaag

SEQ ID NO: 181348 - DNA, 119 bp, Arabidopsis thaliana landsberg
ctttgtcaactatttcattctccgtgaacgaggaagtggagaagagtagagcgttcctcgccttccaaaaccagcaagtccacaagaagagagatactattgagtgtatatttgtctaa

SEQ ID NO: 181349 - DNA, 159 bp, Arabidopsis thaliana landsberg
agcctgtacgtggccgtggccttggccgtggacgcgggcatggacttaaacgtggttgtggtcctccaagtctttggcctccgcatgttagagatggaggggttgcaatttgccctcttactggttcttctactgaagattgaatgtggtatcagatag

SEQ ID NO: 181350 - DNA, 296 bp, Arabidopsis thaliana landsberg
atccgttatactggccaacatttgtggtagcggtggcagcatcaatcatcgcgagccaagctatgatatcgggcgccttttcagtcatctcgcaatctctacgtatgggttgtttccctcgagtgaaggtggttcacacctcggctaagtacgagggacaagtctatatcccggagatcaactacttgctcatgcttgcatgcatcgctgttacccttgcctttagaactactgagaagattggtcacgcttatgggatcgccgttgtaaccgtcatggtcatcacaaccttaatg

SEQ ID NO: 181351 - DNA, 922 bp, Arabidopsis thaliana landsberg
cttgtgtaagtcccgctgatacaaatgctgaggaaactttaaatacgctcaaatacgcaaatcgtgctcgcaatattcaaaacaaagcagtggtacttatatgttagttcttgcttttaattatgaattctcaactatagatatcatttgtggcctaacattcttgtcatttcttctaatacttagatcaatcgagacccagcaaccgcacaaatgcaaagaatgcggagccaaattgagcaactgcaaacagaactcttgttctataggggtgatagtggtgcttttgatgagctccaggtattcaatctgatctgagacaaatagtgacagtttttctagtaacattttcttatacttaaactactataaaacctgttagattctcaagcataagatatcactacttgaggcaagcaatcgtgagctacacaatgaacttcaagaacggagagtcgcgtctgagcatttctcaaagcgtgcttatgatgctcaggtttttcttctactcattcttttttgatggatcaaacttttatggcatctagcactttacacttattttccatctattttaggttgaaaaggacaaacttataatgataattgaatctgttcgtaatggtaaatccttggatgagattgaatcctgccaaaatgaggtgagatttcctttatgattccttagttgaagtttatgagcgagtgtattttttcgctgaaatgtctaattttccaggatgttggtttggtgaacaagtatgtctcgaaaattcaagagctagaaggagaactgttgcatatcaaaaacttgaagaaaaccagtaaccaccaatattcggatgattcctatgacgatgggcctcgttcgaacaatgtcttgtttccctcatccaatgagtcgtcagattgtgaagacaaa

SEQ ID NO: 181352 - DNA, 408 bp, Arabidopsis thaliana landsberg
gtatgtcttccaatcgacgatttactgcatttggagggaaagaaacgcaaggcgatatggggaaataaaatcaactcacaaccggctactcaagctcatcgacaagaacatagaaatcgactcaactcaatacgtgaaacaatggacagaaactacgactacggacggatggagtggctcaccctcagctccattccgtaaggcagtcatcaagttttttttatcacttcaagattctttcaaaaatgtaattcaaaaacagatgcattcattgtaaaaacattttttggtttaatacaattttacattcaatttttttaaaaataaaaatcttacctttcttaaaaatattttttaaatttcaactttttctttataggtttttaaaccttcgtattttagtaaaag

SEQ ID NO: 181353 - DNA, 66 bp, Arabidopsis thaliana landsberg
tttatagataatttgggaataaagctgacaatgactgtgtcggatatcgtcattcgccgaagctaa

SEQ ID NO: 181354 - DNA, 456 bp, Arabidopsis thaliana landsberg
gacttgttcggtagcagaatccctcgtccgagcgtgagttacttttcgcggaaaggtgatgagtgaggtatccgtatcccggaggcgtaggagtccctcggctcggtcggcctcgtcgcttacgtgtactcttactcatctgtaggattctgttatcgatgtagtcgaaacggcacgaaaaatcgttctggcagaaaagttttcgagcgttaggacttgtccggtcagcggaatcgcttatccgagcatgagttacttatcgcagacggtgatgagtgaggtatccgtatcccggaggcgtgggagtccctcggctcggtcgaccttgccgttcaaggtctctctccatcgtttttaggattctgttatcgaagcagtcgaaaagcacgaaagtcgttttggtggaagactcttttcgaggaaaattttggcgcagagggggttccccccttctag

SEQ ID NO: 181355 - DNA, 107 bp, Arabidopsis thaliana landsberg
atgcttcgaagaagaaaaaagctacaactccgaagcagaaggcaattgacgaagaagaagaaactgctgcaacaccctctaccaccggcgtggaggaaattttaaag

SEQ ID NO: 181356 - DNA, 437 bp, Arabidopsis thaliana landsberg
  unsure (1)..(437): unsure at all n locations
atgtaccaggcgaaggccgcgggccgccgcacgttctcgcgctacacgnaggcgatggatgtttccgcgcgccaccgcgccaccgtgtcgggcgcgctgcgcaaggtcatcgaccgcggcgaattacgcctcgtgtaccagccgcgcctgcacatcgcgacatcgcgcatcgtcggcgtcgaggcgctgctgcgctggcacggcccggagggcgacatcccgccggtcgaattcatcccgctcgccgaggaaagcggcacgatcctcgaaatcggcgaatgggtgctgcgcgaagcctgccacaaggtcgccaagtggcagcggctgggcctgccggcgctcgcggtgtcggtgaacgtgtcggcgctgcagctgctgcgcggcgacttccccggcgtcgtcggccgcgtgctcgaggaaaccgggctgccgcccgc

SEQ ID NO: 181357 - DNA, 149 bp, Arabidopsis thaliana landsberg
aagcagaattcgtcgtgcgagagagcaaaggggaaggatatcgcttactagacctcagtatcacagacgaagaagacgaagtcgaagtagatgtagcagtggtcgtcgtcgtcgtcgtcgtggaatgtgaaggagaaggggataagtag

SEQ ID NO: 181358 - DNA, 411 bp, Arabidopsis thaliana landsberg
atgctgaagggatacaaaccatacttcattttactggcctcggttatgctgctgttcagcagttatagcgtgaaagccatgcgcatggctaaagatagtaccgaggaggaacaggtactttttgaagtgaatgccaaaaacaagaatggtattttcagcgatgataatactgttggctacaaggtaaagctgaaaagtacctataaagaaacacaggaaggtacgcttacctatgatgtacttacggatgatggtaaaccgctttcaacgaataagttccccatcaggctgaagtatcattcaggtgaagattataatctgaccatccctaaaaagccggcaggtttctacaagcttatcgtcaagatcaataccacctctaacgatgataccctgaaacgggtgtttggg

SEQ ID NO: 181359 - DNA, 55 bp, Arabidopsis thaliana landsberg
atggctgagaagttagtggtcggtaacgttataagaagtagctctgataacagag

SEQ ID NO: 181360 - DNA, 1311 bp, Arabidopsis thaliana landsberg
atgacggaggagatcaaattcagcgtactggtatctctctttaactggattcaaaaaagcaaaacctcatctcagaaacgatccaaattccgcaagtttctcgacacttactgcaaaccctccgactacttcgtcgccgtccgtttaatcattccgtcgcttgatcgagaacgaggtagctacggccttaaagagtcagtgctcgccacgtgtctgatcgacgcacttggtatctcgcgtgatgctcctgatgctgttcgtcttctcaattggcgtaaaggaggaactgctaaagctggagccaatgctggaaacttctccttaattgctgctgaggttttaggatttgtttgactttctttctgggttttggtttttgggggatttagggtttttgaacagttttgtgctcataggtattgcaacgtagacaaggaatggcttctggcggtttgactattaaggaattgaatgatttgcttgatcgtttggcttcaagtgagaacaggtgcttctctaatcataaagaatcaattttgtttctgtttactctcttatcttgttttcttttgggatctagagcggagaaaactttggttctttctacattgattcagaagacaaatgctcaggagatgaagtgggtcattaggattattctaaaaggtaggaactttgcagtttcttcacataaagtttccatcttttttctttaaagttattgagatcaatctgattttgttgggaaatggtttacagatttgaaactgggaatgagtgagaagagcatttttcaggagttccatccagatgctgaggacttgtttaatgtcacatgtgatttgaaactagtctgtgaaaagttgagggatcgacaccaacggcacaagcgccaggttttgtatttagaaattcttgaatgacaacttacaaactactgtttcatttcctcgagatacaatcgatttattgaaatcatcttaaactgataagcataaaaactgtgcttctcttgtaggatatagttgttgtaaaagccgtacgaccccagttagctatgcgtattggtgacgtaaatgctgcttggaagaaggtaaattccatcaactctattgtcagcttactccatttccatgtgcagtattttgtttgtttgttaatgttgttgtattggtgttttatttcattaaccaatgcatgagtctcttcctcgacacagctgcatgggaaagatgtagttgctgaatgcaaatttgatggggatcgcatacaaatacacaaaaatgggactgacatacattacttctctag

SEQ ID NO: 181361 - DNA, 402 bp, Arabidopsis thaliana landsberg
atgctgccgccgacggcctctccggtggtaacggaggagatctcggcgtcagggaaaggattagtcactggccagtttcaggctgggttccaagatgaggttctaaacgaatcgcagagagaatcagagcagactccagtgcttatcgatgatcaagtttcagagatttctttagtacctagccagaaagaaccaacggcgactcaagcaaaagagataccggttaccaaaaaatcgtatgttcaagtggcccaaaagcatactttcactaagcagaagtttgtggtggatgtagtagatggaaaggagagagtagttgtcccgaaagatgttttcgttggtgccaaaccaatgtgggaagattttgtgattggaaagtttttaagcacaaaagcacctcat

SEQ ID NO: 181362 - DNA, 281 bp, Arabidopsis thaliana landsberg
aaaactcgatttgcaggatcgtctaaagactaaagtaatgaaaggaagttttgtttccagcatcgatgatcaaattttgaggatcaatcagattttctatctcttatgtggggttcaattctctgtttttgtatcctctctctctgtcttagcagcctctggtgagaaacaaccaaaaatcgatgtctgctgttagtccggcgtcgatttcgatcaccggatcggagttcttgacggcaaaggatgaaggaatgtttcatcgttctcttgcaacacgttga

SEQ ID NO: 181363 - DNA, 505 bp, Arabidopsis thaliana landsberg
atgaaaacacatcctcaagcacttctcttatgtgtgttattcttcatcacgtttggtcttttacatgtcgttgaagctggaaatcaagaaggtatatatctactagctacatacacatttttttgtttgtttttaatacatttaattacgttgttatgtacgttacaattcatatttcttactaggattcatcagtttagattgtgggttatcccccaatgaacctccttacgtcgatgctgcaaccgacttaacatacacaacggacaatgatttcgtgcagagcggtaaaactggtacaatcgataaggaattggagtcaacctacaacaaaccaattttacagcttaggtacttccccgaaggagtccgaaactgttataccttgaacgtcacgctcggcacaaactacctgatcagagctagtttcgtgtatggtaactacgatggtcttaataaagaactcgagtttgacctttacattggtcctaatctatgggcaaac

SEQ ID NO: 181364 - DNA, 189 bp, Arabidopsis thaliana landsberg
atgggtcttctccttttggagaaaaacgaattgtcttcgaagtatgaagagattaaggcctctgtggatgagtctgacctaacacatatgcgagagaaatcagcatatgtctcggctctagctcaagcaaagaaacgagaacagagtttgaagaaggatgtagggattgcgaaggagtgcatttctagt

SEQ ID NO: 181365 - DNA, 800 bp, Arabidopsis thaliana landsberg
agggctttgaacaggaaggaaaagaagagaaagtttataagctcaacaaagctctatatggccttagacaagcaccaagagcgtggaacaacaaattaaatcacattcttttggaacttggctattcaaaatgttcaaaagagccatccgtgtatcgaaagaaggttagtgatcatgttatgatagtagctgtgtatgttgatgatctattcctcacagggacaagtttagagctcatcattagattcaagaaagaaatgtcttcaaagagtgagatgagtgatcttggtctatagtcatactatcttggaatagaagtagtacaacacggtgaaggagtaactttgaaccagagtcgttatgcgcttaagattctggaagaagctaggatgaaagactgcaatccagttcatacacctatcgatattagttttcaaccatcaaagtctaaatctgaaaaagaagttgatactaaactttacagaaggaatgtaggttgcctcatgtatcttcttcatacaagaccagatatgtcatattgtgtaggagttttaagtaggtacatgcaaagtcctagagaatctcatgatgtggcaatgaagcaatgcttacgatatctgaaaggggcgactacacttggcttaaactacaatcgatgtactgaaattaagttaaatggctttagtgacagcagtcacagtgttgatgcagactatggaagaatgttagagttcctgtgttttcaaacctctcccacgggttcggcttttgtgttttgcttgagggcaatcaaaagctaa

SEQ ID NO: 181366 - DNA, 673 bp, Arabidopsis thaliana landsberg
attaatggatgttgcaggtgagaggggtgttattgatatgggaattagtaaagaggcaacgttggcagaggcttggactgaaagacaaccaagaagacatcgtctagatcacctaaatgaaatcgaaaaggagatgttaatctctctgcagaacagaacggacgttgatgatatagctaagtggaaaggtaaaaatgatgcgtacacaacttctttctctaccaaacatacatggagccatatcagagctctctctcccatagttccatggcttagaggggtatggttcaatcacgctactcctaagtactcgttttgtacttggcttgcggttcatgataggctttcaacaggggaacgcatggttaaatgtaatagaggagcgtcgggggtttgtgtcttctgcacgaacactatggaaactagggatcatttgttcttctcctgtacttatgtttcaataatttgggttgaggtagctaagaagttatggcgttccagattcactacggtatggccacagattttggcttatatctctgataactcgctgaaccaagtcgatggttttttaatcagatatgtcttccaagctacaatccacgcagtttggagagagagaaatgggcgttaccatggggaatctccaactacccaatctcagctgatataa

SEQ ID NO: 181367 - DNA, 548 bp, Arabidopsis thaliana landsberg
atggcccgcgcccgcgcctatgtaacgcccagtgacctcgaccgtacccctccgcacatgctcaacctcaccggagctcaaactcactgtcggttgctcgtgcatggcgtgtccgcggccacctgagcccctgccgccgtagaccggccagccaagcctttcccaaccccgtccgaccctcggagacgactgagcacacctcggtgaagctccctgagcgaggaatcgaagtctgcttcaccggagaggccagtccatggtcgccggactccctccgaccgccggcgagcgtagaccgggtaagccactgcgccatttttcgattcaatacacagatagcttctacatcaccccgtgaagctcaccgtgcccttggattgaaccagttcgctgtagtttggccggtacactcgccgccgacgagcacacccgcctgcgctcgtagaccgggcgattccggccatccccgacgtcaagccgtacctcgacgtgaccgccagagtctccccgagccaaccctacccttcaccggacctccctcgccgccg

SEQ ID NO: 181368 - DNA, 448 bp, Arabidopsis thaliana landsberg
atgtccaaggcgaccggaactgctgtcaactgggtgcagatggttgggatgaaggtgatgtacttgttttcttacatcgtgtagtacttgtatacaatgcaatatcgtggcgaaaactatgctgatatctctgacctgattccaaacgcggtgctgattacagcctggtccggattccgttggaatcatcgctgtttcgcacaactgcagcggcgtagcagcacgagcttgcggccttgtgagcctcgagcccacaaaggtttgctgattcttcttggtcttgctgtttttttatcttctgcagctgtgcgacacctaattaatttccatttaggttgccgagatccttaaggatcgcgcatcgtggtatcgcgattgtcggcgtgttgatatcctccatgttactcctacgggtaacggtggaacgattgagctgatctatatgcag

SEQ ID NO: 181369 - DNA, 701 bp, Arabidopsis thaliana landsberg
gtattgcgagaggttggaagattgttggagaagtataaggacgaagaagttagtataactatatgtggtcatagtcttggagctgcactcgcgacgcttagtgccactgatattgtggctaatggttataaccgaccaaagagccgttctgacaagtcttgtcctgttactgcctttgtctttgctagtcctcgtgttggggattcagactttaggaaactcttttccgggtacgtccaaataaatactatatataatacgatccatttcaaattgaaaatgacatataatgaaataaaaacagattggaagatatccgagtgttacggacaaggaatctaccggacgtaattccgatctatccaccgataggttactccgaggtaggagatgagtttccaatagacacaagaaagtcaccatacatgaaatctcctggaaacctcgcaacctttcactgcttagagggttacttgcatggcgttgccgggactcaaggaacgaacaaagctgacttattcagactcgatgtggaaagagccatcggattggtcaataaatcagtggatgggttaaaagacgagtgtatggtcccagggaaatggagggttcttaaaaacaaaggtatggcccaacaagacgatggatcttgggagttagtggaccatgagattgatgataatgaagatttggatttctga

SEQ ID NO: 181370 - DNA, 92 bp, Arabidopsis thaliana landsberg
aacactcgcaagaagatgtagaaaatcaaacagaaacactaaaacactcgaccaacacagctctttgcagagcactgggtgtggtcgagtga

SEQ ID NO: 181371 - DNA, 368 bp, Arabidopsis thaliana landsberg
  unsure (1)..(368): unsure at all n locations
atgagcaacagtcaggcgctggccaatcctgcgctgctcgatcagggcgtattcccatgcgcggggggtgtgcccgtttccctcannnnnnnnnnnnnnnnnnnnnnnnnnnnnnnnttccatggcgctggcctgtcgacccgtcatgttattgccgataccgaccctgcgttgacgtaccatacagggcaatttgcaattggtgcgtactgcaaaagacatgaacatgggcgtattttcattacgcacgacatgggttggtggctaagtgccgaccgggtctggtcatgtgcgcgcgaccgcgtgaagccgccctgcccgcagatattcgatcatccggaaatgcaaaaacgcgcgcacgctgcacg

SEQ ID NO: 181372 - DNA, 864 bp, Arabidopsis thaliana landsberg
acctattccctcaccgtcgaaggcaccgcgacggcaaatctcggagttaccgtaatcgctcgaaaacgacgattactagtgctgcgttttcttcaagttctaataccggcgggcagaatcattacgctgttttgggcatcgctcgaaacgccacacaaggtgacatcaagagagcttatcgtttgctagctcgaaaggtaaagaactaaggaaatgctcgtttagtaaatttctctagttttgcatcgtttggtttgattgattgttgcgttaaagatgtgaaatttgcaaccagtatcagaagtagttgagaacacgaccaatttcttctagcaacatgatttgggtaatagaaaagtttaaatcttgtgtttgtataagttagcaacatgtgtctggagtttggtggaacctgttctctgtattcttatatttcaatttagctcttgctcacttggatactgaatgaataacctgttctctgtatcccttagctttgtttgggttatgtttgtgactgtatccttgtgttactattgcagtttcatcctgatgttaataaggactctaaagccggagagctattcaagagtgtccgttgttcctacgaagtcagtattccttctcaagtgtctttttttccttctatgagagtgttgttgttcttggaattcaatgtaacatcaatagatgaaatcttactcactttacctgtattgtttttcaaaaggtactatctaatgaagctacaaggactcagtacgacagagcacttaaacttcaagaaaattcccggttccatagagtgaaaaggcacagctacacccctgaggttgaagatgccatgaagtattactacacctg

SEQ ID NO: 181373 - DNA, 105 bp, Arabidopsis thaliana landsberg
gcgaatggaaaactgatgaccgtttatgcccctgtatatgataaacaggcagtcctggacatcaacatgccgccatacctcgcttctcggcaaaagagaaaataa

SEQ ID NO: 181374 - DNA, 1155 bp, Arabidopsis thaliana landsberg
atgtctctaacccagatcgtgaatccaatcctatatccatctaggagtgagtcctcggcgtttcacggcgatctcgccttgtcacaccctaagtccccaattttcccgccacccacctcacgcactgctcgtagactcttccttccttctgttcctctatatgggtgccataaccggcggcggagattcgaaccctcgtgaggccatcgcagcggttcgacgcggaaatgcagctcttcagacaggtaaattggaaattccgacaaacagaacttttctaacataagagactctttttttaattttggatccttgaatctgaccatcctattcgagatgctttttgttaaagggtgatgttgctggatcggtggcagagttcgatagagcaatcattttggatcccaggcaaaaggcatgtacgttttatctcataacacgatctctctataaagctttgaaatttcagtcgaatctttattgtttttgcttcatgggaacactaacatttgcttcatgacagatctttggcaacgcgggctttctctttactatgtagataggtacaagctcctactcactgactcttgttaggatttgagtttcttcttagaagactgtgaatccactgtcgaaaattttaaaaagtgcttgtttctattgtggactttggtctcatattaagtgatgaaatatccaacaggtttgaagaaggtgcagagcagttccggatagatgttgctcagaatcctaatgacacagaggagtccatttggtgctttatctgcgaggcgaggctccatggtgttgatgttgcacgaacacagtttctcgaggtttgtttttccttatgttaaagcttaccattccatgatcagtaataaagccggatatgagattttagaaagaattctttgtaggttggtagagattctcggcctgtgatgcgagaagcttataatctattcaagaatggtggtgatcctgaaaaggttttgagacatgtttcttgataattgatatcattgatttatttccatcaaacgatcttaatactctgattttgaaatacagttagtaaatgacttctctagcggtcaagcaagcgaatacttctatgcttctctgtacgcagggctctactatgaagctgag

SEQ ID NO: 181375 - DNA, 670 bp, Arabidopsis thaliana landsberg
aagggactactgatccgtgaaagtgtgtccgcattgaacatagatgtcattaacaagctggtggaagcatttatgatgcaccctgctgattatattcagtggcttactgtcagttgccgagattccaccttgtcaaagacactgttttatatgattttgatgcattccctgcagaagatgaattcttcatctggtaagcttctgtccatagtactgcgttaacatacatgctgatgttaaagtcttttttttcatttctaagcaccgtagaaaacttggtcttacatgattttaaccacgatatgatgctgatggctgtgttttcctttgatttagaccctagtcaacttttggatcttttcgaactttgctttcctgttttgaagactgagtgggaagaacttgaggtcgaggttgatgtttctctgaaagaggtatagaattctaccagctgatgtaatattttcatatgatggttgatacatatattatcttgttagttgatatatttgtgtattacttgcagctgtcgaaaagcaactgccaagaactcctatatcaactccttgatacctctgattttactgctctgaattcgaaggttctgatatgcatgttttggaagttgggcgagtcattcattaaacttgaacctgcccacgatgcttcg

SEQ ID NO: 181376 - DNA, 568 bp, Arabidopsis thaliana landsberg
atggtgctgtcgacgctcggctcgatgggtttcgacatccaagcgacgatcgacaaggtcgtcgccgagggcagcatcatcctgctcgtcgacttccagaccaaagacttctcgaacacgacggccgccggtatccaggtcttcctcggttccggcccgagcacgcccgcctgcatgacgggcgagacgtacgacgagacggcgaagaccggctgcggtcaccacctcacgccgggcacgatgttctcgagcgcgacgggcaccaatgcggcgctcggcggcaagatcatcaacggcacgttcaacggcggcccgggcaacctgtcgatccagatcgccctcggcggtacggaagcgatcaacctcgacctgatcggcgcgcgcgcgaagggctcgggcatctcggccgataagatcgacggcgtgatcctcggtggcgctgtcacgaaggaagacatcgacacgaaggtcatcccggcgattcagaagcagctcggcccgatcatcacgcgcgactgcccgatggcgacgatggcgaacaactgcatgtgcatggatccgtcgacgg

SEQ ID NO: 181377 - DNA, 601 bp, Arabidopsis thaliana landsberg
atgcctttccaggcagcatcactgatcggagattttaataactggaatgcgaaatctgatgttatggctcgggtatgctcacacactctaatttgtgatctattgtttaatcttccgtcttagcttataatttggctagaagttaaatttttacttgaaccttaaatgatacttgttggcgcatgctttgctctgttattattctgttcctttctggaattctgatctaagactgtcttaaaactgatatttgagcagaacgactttggtgtgtgggaaatatttctgccaaataatgctgatggctcaccagcaattccccatggctcccgtgtgaaggttacatgttcatagttaacccttatgaaaacacatgcaaagctttgtaacacttatcgtacttttgattgtatgtcatgcattggtagatccgcatggataccccatctggtattaaagactccattccagcttggatcaagtattctgtccagccacctggcgagatcccatataatggagtatattatgaccctcctgaggaggtacaaaccagtactcattttacattctcatttgttttggtgttttctagagataa

SEQ ID NO: 181378 - DNA, 536 bp, Arabidopsis thaliana landsberg
atgtccatggcccaccgcataaacgggtatggcgccgtaaccgaaggcaatgtttcaggtggcacattcttcatcgggccaggtcgctgacatggttcgcacttcgctgcgtaagcctcgcagtccgccagcataattggccagtaatgactgtccttttttagtttgagggccagggctcatccgccggaatgattacctccgtttccatcgtgcgtttccttcatgattgtacaggcttctttttggttcaagcaagtgaggaaagcttttgttgcgcttcatctgtataattcgccatccatcatcatgtagttcgccgcttttgctttgagacggcgggcttcccatcgatctgccaaaacttcgccgtctgtgatgtaagcttttatgggatccctccaatccgaaggctccgggtcgattgcatcgacgtctgcgtccatggccgttatggggtctataatcacgcagctcgaactgggcaatccgatacttggcttggctatgctctcaacgggaattgttcatcttaa

SEQ ID NO: 181379 - DNA, 106 bp, Arabidopsis thaliana landsberg
atgaagagtgaaattgttttttttggaggaagaaggtccgaagttgaggagggcgtgtggaggcgcgtggagagcacagaagaaggtggtgcgtttaagtggacac

SEQ ID NO: 181380 - DNA, 415 bp, Arabidopsis thaliana landsberg
atggaacgggtcgcgttcggcaaccgaacgagtgagcgtgttgtcggtcgcccatgccgccgtcgcacccgcagcagcgccgagaccgagttcaccgaccgagccagtcgtcatcgagtcgagggtcaacgcggagcctccggcggccatacatgcaacggctaatcgcgacgcgacgcccgattggctggtgaaagaacgcgcgtgcgagcagacccgtgaaggcggccatcgaggttgagcagcaacgcgccgtccgttgcgcccgcccgctgaagcccccacgcgagcagcgccggtgcgatcgcgcccccgacaagtgcgatcccgacgatccggggcgagtcggtgcgccgaatgctagcttccccgagatgcccccacagccgcaacacgagcgcaaccgcggcggacc

SEQ ID NO: 181381 - DNA, 36 bp, Arabidopsis thaliana landsberg
gaaaatgctcttgatcattatggtgtgctgaagtag

SEQ ID NO: 181382 - DNA, 48 bp, Arabidopsis thaliana landsberg
atggtggtggaagaaggaagaggagaagaagaagaggaagataagtag

SEQ ID NO: 181383 - DNA, 284 bp, Arabidopsis thaliana landsberg
agctgattgacctaattctccccaaatcctatgaatttatccccaatcatcacaatttgagcgaaattaataagaatgatgaaagagacagagaagttgaagaagagaaagagagttgggaggagaaagagtgcaccttagctgacgatcatacttggttttgggttccgccattgttggttcgtgctcgagtctttcgcgggtttttcagtggttcgtgttctcaacttcagacagagagaaagagaaagacgcagagagagagagagagagagaggttgtga

SEQ ID NO: 181384 - DNA, 865 bp, Arabidopsis thaliana landsberg
ctggagaagttgttgtgcttgaaatacttgggcaagagcaccttcgagaactccggggcactccagacgacgaagctgttgttcccgctgctccacgaaacgacctcattggtcaacggatcatcaaccatgtcgtaggttttactcaagaaaggcggtacggagttcaccggcggtggtattgacggtgtattcgagttcggcgatggtacggattcgggaaccgattccataacttcgaatgaaaaatcaagagttagttcactaaagttgatcgattgattgatcctggaagtttcttctgttcttctcaagctcaaatatcttttacagagacagagactctctcaagtgttgaagacccaatctttgatcttttcccttaaagctgaagaaaagcaggcatggccatttcggttcaattcagttcggttttgtacgattagttttggtagacactctgactgtcacctaaattaaacggtttcatttcgtgtattttgatttggttcggattaattcggtttaaaagtacacgtagcatcgatagcagctttttctgtttttctcggtgagtttcatacgtggcataatatacaccgttaaaatttaataagattatctcagatatttatctatacgacgcacgattatatcatttaattatgtatattaaaagccacgtaagacacagagaaaactttcctggctcttatctctctctctcttatactgacactgacactcgttaaatcctggaaagtaatttgaagtgaagcgacgaaacacaaacaaaagcgatgaatctggtcgctattcatcgcgtttccttcgaatgcgtttcgcgtttctctttgaaacatag

SEQ ID NO: 181385 - DNA, 594 bp, Arabidopsis thaliana landsberg
atgttggatgcatcagcggtcttcttgcatgcaatgaaatgtgtcatcttggaaaatctgtcaactaccacaaacagagaatccacaagccgtagtgtacatggcaatcctaacacaaaatccatagctaaatcttgccaaataccatcaagaagaggtaaaagcatacaaagaccaatattttgagattgaccttttgacttcagacatgtataacaccttttgacaatagctccatcgtctcttctcaaatatagccaaaatatctctctcccatattagcaatgtttctacgtaaatgcccactaataccacccccatgagaatcttggatcaacttctctcttagtgatgagcaagaaatgcacaatcgatctcctttgaacaagtagccttctcggacatgaaaatatgcagaaggatgcttctcgttgcacttggcccaaagttccttgaattcaacatcattttcatacaactccttcataaactcaaagcccaaaatatcttgtgttaaagtaagtagcactgacgctctcctactcaatgcatgtgtcaccttattaagtgcgcctgacttatgctcgattataa

SEQ ID NO: 181386 - DNA, 934 bp, Arabidopsis thaliana landsberg
atggacaaaatgcgagagcagttgctcacagaatttatgccagatgatgcatgtccacttggtacccggtttttagaagatacccacaaaacctatcagattgattctggtgatgttaaacctcgaaaggaggtaacttccttcttttgcttcccataatattctctgaaaacctcgagctgaacataagattgaaatatgttgcatctgtgtcttcaggacgcggaggatcaagagtttggagatggcaccgaaaccgttacaaagaacaatcatgtaacattttctgaaatcccagacctcctgaccgtcaatcaaattctagaatctgtaagttacatttttcagcttcctagaaactagattacaaagtcttcatcaaaagtaacagcacactataaactatacttattttgtattgtttgaaggtcgtagagacaacacgtcaagtgggtagaatttccttccatactgcagccgatgcttcatacaaagagatgacgctgcattgtgagaatctgttaatgggaaaacagcagaagatctcgagtcttttaaattctcagctacgacatgagagttctgttaactgctctccacgacaacatgatgaagagatcaagattgcatcttttcatcctatgatcaattcagcatttcatactggggtatgtatgccttcgctatgaattcctgtggatagcctccggtttcatattccaagataactgtttaaccatttttgtattgattactgaaatttgtttaggtcgaagtccctttactgtcgaaagaattcgacatgaaatcgccaagaacaccagtgggaactattcagtcaccgtgctatgcagaactacaaaataacccacaagcatttagactaccagcctcaagcccttacgacaacttccttaaagctgctggctgttga

SEQ ID NO: 181387 - DNA, 1032 bp, Arabidopsis thaliana landsberg
gaagaggatatcaaaacacatccatcgaatggaacgacacagcaaaatccgccggaaacactgctgatagcttctcctttgtagtgtttgcagctaacttcacagcttacaacattagtttcaaggtaaggatatcgaggtcacaacaattaaacctaattagctaacgcatataatgatatgagttttcatgtgtgtatgtgttttgaatggagtaagaacaatgcaccagaaccagatcctggtgaagctgatgcacaagcagtagctctaaggattgaaggagaccaagctgccttttatggttgtggattctatggggctcaagatacacttctagatgataaaggaagacatttcttcaaagagtgcttcattcaagggtccatagattttatatttggcaatggaagatcactctaccaggttaaagataaaacacattcatgcatgaccttttccaaacatgaccataatactctaaaatcgcaaacaggattgtactatcaattcaatagcaaaggggaatacatccggagttaccggatctatcacagctcaaggaagacaatcagaagatgaacagtcaggattctcttttgtgaattgtaagatcgatggcagtggagaaatattgcttggaagagcttggggagcctatgctacagtcgtgttctcaaatacttacatgtctggaatcattactccagaaggatggaataactggggagactcgaccaaagaaaagtaagagactatatatatacacatctcaacatacataaaagatcttacttatgtcttgtatgggttttattttttaggacggtgacttttggagagcataaatgctatggaccgggagcagattacaaagagagggttttgtttgggaaacaactcacagattcagaagcatcttctttcatagatgtatcttttatagatggtgatgaatggctccgtcacactaacatagtctctgagcatacatctaaagacattggagatgatcttataggattttactaa

SEQ ID NO: 181388 - DNA, 27 bp, Arabidopsis thaliana landsberg
atggattcttctgtgttctatgtgatg

SEQ ID NO: 181389 - DNA, 159 bp, Arabidopsis thaliana landsberg
agctttgaccaaaaacaacaccgtccgtatttctacgttagagagacaagcaaggcggcggtacggcggagattgaacgttgagcggcggaagcagcggaggatgggcgatgactcgattggattatctctccttattcctcgcaacgcttatatcatc

SEQ ID NO: 181390 - DNA, 243 bp, Arabidopsis thaliana landsberg
atgaacacgaacacacaaacagaacaacagatcatcagagaagaaactagaattgacaaaattattaaaaagcgaaaaaagaaaatgagagctcaggttttattatgtccaacaataacagcttatggtcgtctctattgtgcgccacgtagacttcaccgctacaattcatcatcatcatcatctcagtttctgaatctcaatctctctcgcttctccggtgctctcttcttccacatggag

SEQ ID NO: 181391 - DNA, 49 bp, Arabidopsis thaliana landsberg
atgtctgtcgaagcaatttctgctgcttcttttatgattgtatttgttg

SEQ ID NO: 181392 - DNA, 133 bp, Arabidopsis thaliana landsberg
atggcacgaaacctaaagaacatgatgctttgtgggtatggtctcgtgtgttttcttatgatcgttgaccgagcctacgctagagagttacggtcggtggtgcacaggttggaccgcccttctggttccaagt

SEQ ID NO: 181393 - DNA, 200 bp, Arabidopsis thaliana landsberg
ggcgcccggaaaaaaccggtctgcggcagacggttcatacacttcgcgcacagaaactgcccgcgccctatgactgtcaaccgcacaccccgcacaattatgcggatacaccaaatgcagtaacccatgcagtataccagccatcttcatactgcaagttggtgaagaaagaaatagggagattacgtgactgcgacagg

SEQ ID NO: 181394 - DNA, 521 bp, Arabidopsis thaliana landsberg
ggcttgatccttagcaatgccctcagagcacagaaaaatatcgaagatgaagggtgtacaatggctctgaacaaccttcgttcagaagtgattgaactaaggaacgaaggccttgaaaaggataaaatattgatttcattggtaaaaaaataaaagaagacgaagctagtttcaaagctcaagctgaggcccaaaagagtgaaattgaagacttcggagacagttagctgaggccaaagaaaaatgcgctgttgctgaagctaatcgagatgccagcgaatattggaaaaattatttagagaggacagttgcagagcttcacgcctccaaagaaagatgttttgaaaaatctgtggagtgcgtgaaaaagatgaaaactagctttgccaacgtgggcgcctattcaaacaaagacaacttcatacgaggcgaccctgaggacgttatcgagtggatcaatggtgaagccgaagcttttgaggaaattttaagtgatcgtggggacgtctgcgcattctctg

SEQ ID NO: 181395 - DNA, 165 bp, Arabidopsis thaliana landsberg
gtgggtgtatcagataggaataggccaaggaaaaggcagagaacgaacacgaaagtgaaaggaagagaatgggttctgaggaagaaagagcaaagtagaagaaaaggaaaaaatgttcctgctgactccaagttcaccagtagaaaacgcaggacgcgtttctag

SEQ ID NO: 181396 - DNA, 240 bp, Arabidopsis thaliana landsberg
atgtcaaaagtaagggtatagaatcaacaaaggaaagtgattgcaactataatcaggaagtaataataagcttatgtaccttgacatgtacagacattagagaagagtagtgactcacgagagctttttcgaaggatcagaagaaagacagaggtcggaggacgaagacggaagagacagcagctaacgctttgctccggtttagggtttagaacgaataggcttttcaaaaacctttaa

SEQ ID NO: 181397 - DNA, 729 bp, Arabidopsis thaliana landsberg
gttgacaaggctttgcaaagcatggaggaagaggctgagcgtatatataatgacgagcggaaatcacttctggacgatgaagcagcatcaactagagatgcaatgtgagaactatttgcatcattacctttctgcttcatattattctgatgaataatgaaagaaaacccacagacacggaaacaaatatgatttgatctatgcttagaagaattagctctatcatgcgcatcccatcctgattctatgctttcttacaatatactttgttttttcatcccaggtatgaacagtctgagctagtagaaagagaactggagcatatgactgaacaaatcagatcgattatacaatccgtaaatgcaaaccaggtaacgcagtaacttatcatatactattcgtttgcttttgctgggaacatacatcataaacatgtttgtgtggaaacagggtggagaacttgaagcgatagatgggatgagtccacttgatgtagttgtcagaatcttgaacaatcaactcagttccttaatgtggattgatgagaaagtaagttttttaaatttgtcttctacgcattgttacaataactacaattgtgttttaacttgcaacatttatttgaacattgaacaggcagaggaattctcttctcggattcaaaaaatcgcattgcaaggttcgggtggagatcgtgaattgatggctccaaagcactggatgtcttga

SEQ ID NO: 181398 - DNA, 730 bp, Arabidopsis thaliana landsberg
atgaggaggatccgaacacgctttgatagctcaacaagtcatgtaatttggtcacccttgctcgagtaaatgggtcgagtagaggatcgagtaggaggggcgagtaaatcaatctactgcttcatttgaggctgccttgatcgagtaagagggtcgagtaaactgtagcctcctctgtagctgcctggattgagtagagaggtcgagtgaattgatgcctcttctatagctgcctggatcgagtgaatggatcgagtaaagtcctttttagctccttctgcaactgaaaacacacaaaaacatgcaatgcgaatgcaaaataagctaaaatggtgcaaaatgatatgatacaatgagcaaatgcaaagctaaatgatgataaatacatgcataaaataagtagaatacagtgttatgagacatatttcaaatatttaaggttcaaggaagaattatgagttttcaagcaaaaatgagtagtagttgatcaaattccgtttgagaacagtttctgtgcttaaggtgtttggcatcaagccaaggtctttccgatcacggcatcaaggtatcccggtgtcattggaaagctagaagagtcaagattaacgtcgaagtcttattgaaacaatccatcaagccgtttagaagtgatggcccgaagagtgaagacatgttccagaatcgcggtttggaaataatcaatctaaaaccgccgaccatggagacttga

SEQ ID NO: 181399 - DNA, 200 bp, Arabidopsis thaliana landsberg
tgaaaaaactctcgactgtatctcgaccgtctgaattggagagacaaacacacgcacaaacaaaaagaaatagaacaggaaaactctcaaaaatctacgagttcatagcagtaaatgtgaccaaatcctacgtcttggacaaaatctttccagcaatccgttacagaacgttacaatatacgtcgaaatcaagctcgtga

SEQ ID NO: 181400 - DNA, 520 bp, Arabidopsis thaliana landsberg
gatggagaagatgaaaacctggatgacgaatatgaagaagaagaagaagaagaagaactcgatatggtaatattactgttaaaggaaagttttgttgttttcttcattcgctaggattcacaccgtttgtctgctcctcttcttttgcaggctgcaggagacaatgagatatctcttgattcccatggatgtatccttcaaagtttagcgttttcttgcattgcaggaattaagaccgagaaattaagctgtgtgtttggttctaacacccttttgcactctgtttcgtttaaattttcctatacaatgataagatcttgatactgagaacagctcgaggacgtaccttcaaggcttgtttgatagttttccatcgagtgaacctaatttatatggagactttgctgttgatgatgggagtgatggagagtttcagatatacgaggaagaatctgggggattgtattccattgatgatgaccacaatgatgacgatgaagaagaggatgatgatgattag

SEQ ID NO: 181401 - DNA, 1677 bp, Arabidopsis thaliana landsberg
ggaaaatgagcagctttcaaaatatggagacactaaaactgcccggggcataatgctaggcgaactcaaaaaactgattgaagcgaatcctctttttcgtgataaattgatattccctactttgagatcttcgagactgcggactcttattaatcaaaggtgtgtttcttttttctttcctcatgaccattctgtatgttgcagatgaggtttggatgactttgttgttggatgattcattgtgcatatgttctcttgcagcctcaattggcagcaccagttgtgcaagaatcctaggccaaacccagatattaaaactctattcacagaccacacttgcacacttccgaatggtcctctcgctccttcagcagtcaatcagcctgttacaactttgacgaagccagcagcttatccgtcacttggacctcatgttgtaagaaacctcgatgtttgactgctttaatcatgttttttgaatctaaattaatcttaatgtttgtggaatctatattacatgtagccctttccacctggtcctgctgctgctaatgctggtgctttagctagttggatggctgctgcctctggtgcttctgctgtccaagctgccgttgttacacctgccttgatgcctcaacctcagaatcaaagttagtttttgacgatcctctagatttctaatcctcgacttatcaataactatcatttcagtttccatcaaaaacttattatttttcttccaaaaagtgtcaatcttgaagcgaccgagaacaccaccagcaactccaggtatagtagattatcagaatcctgatcatgaactaatgaagcgtctccgccctgctccatctgtagaggaggtaacgcgaattcttttctttttctggaaagctgtttatataattcttgcatcttctcaaaattctaagcatttatcattttccaggtgacatatcctgctcctaggcagcaagctccatggtcgctggaagatttgccaacaaaggcagctctggcgctgcatcaagggtccactgtgacaagcatggagttctaccctatgcaaaacacgttacttcttggtatgggggtttgaaaaaaagaatacaaattctaaactgtgtttgaagttatatttctgttatctcttatttggctttctgaatgaccgtttgaatgccatcagttggatctgcgacgggagaaatcacattgtgggaacttgccgctcgagagaggctggtttcaaggccattcaagatatgggatatgtctaattgctcacatcagtttcaggtttgtctttacagctaagaagtttttagtttatgtgtttgatgtataaagtcggaattcaaccaaatggctatgagaagtgttggagataaaacgtatcagcaaactagttgctgtgcaagattcttatacttgcctttcttttggcatcattcaggctttgatagctaaagaaacaccgatatctgtcactcgcgttgcatggagtccggatggaaatttcattggtaagcttccgtcatgcattgttggattttaattgtatgttgtctatggtctctggtctcagtctcttattgtgcaggggttgcgtttacaaaacatctaattcagttgtacgctttctctggacctaatgatcaaagccaacatactgag

SEQ ID NO: 181402 - DNA, 1081 bp, Arabidopsis thaliana landsberg
atgtacgaagaagaggaaaagcattactctagttgctgcaactacgtcaacaaagaaatgcaagacgtggcaaatctggtttgcaactggaatcttgttgagttggatgattgcactccacaagctaaggtggcttatacttcacctgtttctcaagacaacaacgcatggtacttcgacatcgggtgttctcgtcacatgactagtgaacaatttgttctaaattattttactgtcatcaccaatgggaaggtcacctttggagatggtggaaaaggaagcattaaagtgaaagggaagatcgagatagatgatcaaccgcacgtgtcaaatgtgtattttgttgagggacccactgctaatctgataagcatcagtcaagtgtgtgatgatgacttaactgttacgtttacaaagactgtatgtgttgcacttgatattcctggaaccaatgttctatctggagttcgttcaggcaacaactgctatatgtggaaagattatgaaatctgtttgtctccaatcacatccaagctagatctgtggcatcaacgacttggacacatgaatactcagagcttagtcaagattgtgaatgctgaagttgtcagaggaattccaaaacaggaatctatccgcctacttcttggaatctcgtgcttgctgaaaattaaattgtttcagatggatgtcaagagtgcttttctgaatgcagttatttagcaagaagtgtttgtgtctcaacctaaaggatttgaagattctgcttttccagatcatgtttacaagcttaaaaaggctctttatggttcgaagcaagcacctagggcattggtatgagcgtctcactctgttcctaatagaaaagggtttcaaacgtggaagtgtggacaaaactttgttcatctttgtagatgaaaaagacatcctcattgtgcaaatttatgtggatgatattgtgtttggaagcacaaaacagaagcttgtcacggactttgtggaatccatgaccaaaaagtttgagatgagtatggttggagagatgaactactttcttggtctacagatcaaacagacttga

SEQ ID NO: 181403 - DNA, 79 bp, Arabidopsis thaliana landsberg
gttgcaatgtataagcggttatatgaagaggaacagaaacttcattcatctgattctcgttcttcagatttgtctccag

SEQ ID NO: 181404 - DNA, 82 bp, Arabidopsis thaliana landsberg
atgaacagaaaatcatccaacgattgtgaccatattcttgcttttgttccagaagaagatgaaacaaacttcatggttctcg

SEQ ID NO: 181405 - DNA, 393 bp, Arabidopsis thaliana landsberg
cacgcaccttgccgccaacgccaccatcaaaccgacgcatcgcccgcttgatcgccccgtgcaagacaagaacgccatctacggcagcgatctcggccatcaagtcaaacgttttgccgactacgcactgaccgtctccgaccgcgcccgtgccgatctcgtccacgcgcacgactggatgaccttcccggccgccgtcgccgttgccgagcgccatcacctgccgctgtttttgcacgtgcattcgaccgaattcgaccgcagcggcgacggcgccaatccggccatcggcgccatcgagcgccacgcctgccagcgcgccacgcacgttttcggcgtcagcgactacacgcgccacgtgctgatcacgcattacgacgttcctgccgacag

SEQ ID NO: 181406 - DNA, 186 bp, Arabidopsis thaliana landsberg
gagagagatgacaatgaagatttcaggacttctactagacttggtattgagactttgaatgaagaagaagatcgtgagaatcagaatgaatccatggctctaactccaattggatctaacaggattgaagaagatattgaactttttaatactgagataggagatggtggcaggactgaaacatga

SEQ ID NO: 181407 - DNA, 646 bp, Arabidopsis thaliana landsberg
atgacggatttaccctttgccctgaacccatttctagtcccctttgcccttttgatcgaattgatcggagaaggccggaaaagctcaaggtccgtcgtcaatgggtagctatgtggagcaagctcgtgaaaatcacgtgaagaagaaggtcgaagaaggtaatttgacaatgtcgtgacttcttcatctcgctatgttttaaaaccctaaacccccaaatggtttttttattgcctcgaaaatgagatcaaccatatcgatactatttaagcctggtttcttatcatagacgcagattcttttgctagattgaggattagggttctcataaacccttggtagtaactccatattttgcatctgatctagcaagctctcattgagtgtgtcaaattgcttctatgaattgagcttatagattgtgttgaagttgaaatggtgatgttttttttttgttaaatggttgtttgattgattatgtatatactttgttattagcgctgcgtacaatgatgaaggcaaaggcattaatggaatgtgatcagtacgtctccaagtatgctcaatgcgcaacaggaagaactttttctgtggtatggacatgtcgtaagcaagctagggagctcaacacttgcctccatcaatt

SEQ ID NO: 181408 - DNA, 198 bp, Arabidopsis thaliana landsberg
atggaggtcacaatagcagagaagaagcctcgactcgcggaacggtgcgttgtgattgacaggctccccgaggtgctcctggtggaggtgctggcccgtgtcgatgtcgacggtgcctgctccgccgccgcgtcctgccgctcgctctactccgccgccaacgccgttctagggagcgtcacgtccatcgacctctcc

SEQ ID NO: 181409 - DNA, 1850 bp, Arabidopsis thaliana landsberg
aggacacgttcaagtaaagtaggatctttagcatttcatggaaatcaaactgatgatggttttcaaaaaggaaactcgtttgtgtcagttatatcagccaacagagtgaactctagtggaagtgacgaacaaattgacgaagttatctcaatatacgctctaacagaagcaggtattcgctccacacagttacaactgttaatatgagcttttgtacactcgctctgatgaaaattaggaaatttattctgaggtgtaggtgttctaatgctcatgagttatgggatgttaatcaagaagtcggtggatctgaaggtacaataacttcatttcaatctttttctttgctaaactaagaaccataactggatcaccccatcattgagacatgcataacaatcattttcccatagtccagaagcattgtattttccttgtgagcgtaggcaataagttttgttaacttgtatgcgttgactttaggtccacagacatcaataatttttcatgttagcttgtggaacattcagatacaaagcttccacagccgagcttatttttcatctaacaagagcttcttcgaatggcttgcaatgaaatgtcaggttcaaaaatgttttgctctatctgcatccacgtcgattgatagcctgcgcttgcagcaagggaatggtccagctatttacgcctgaaactttagattatgctggcacaatccagttttcagatgctaaaagcagcaacactgaaaatctgtctcaatcaccagaacccaaaaatatagaatcttcgcctggtatcttcccggacgcagttgcttgtcagttttctaccacagataagctcggtgagtgtagaagaaccttaaaatagcagtacattgcttagctatcttccttttgacaaaaggtggtattttggcttcacagttgtcatctatgggaatcgtagtctctatgtttgggatgtggatgatgtgaacaaggtaactgtaaacgtacttcagtattttccacataaaattagttgattctgaattctttctctgaagtgttctgttgaagcttagagcatcaactgcatatggtgaaacttttcttccttattccagcctactaggtgctccatgatgatatcacactctgccggaatttgggatatcaaaaacctctcttgtggaaatatgcacagtccaacagctgcatgtgtagccaggggatgcagtgaaggggtttccttcactacatgttctgaagatggaaccatcaggttgtgggatcttgctttccaagtgaatccgttagaagccaatgcaagcagcaatccctcagaatcttcaacacaggggattatgcatttaggtaattataaaatgttgtagtatttttctattctagatacttatgttcattgtttgttttcaactcgtccactcaatattttaaaaatgcagctagcgctggcatttttgaacgtgatctcgttgagacatgtggtagcaaatttgggtttcgggcactggctgtaagtgaagatggaaagtacttagcagctggtgactgtggagggaaccttcatatatatgatctgcaagaatcagaatatacatgctttatggtaatactagccaccagtgttttaaattggctctatgtcttcactgggtggtgtccagacatccaattcataagcctcttattgataaccatcttgcaggatgctcatgaagcagaaattcagtcattgagctttagctttcctgtactgacaaacgttgattctgaaaatgcctcaagcttgcttgcttctggtggaaagggccgcgcaattcacatttatgatgtcaaaag

SEQ ID NO: 181410 - DNA, 768 bp, Arabidopsis thaliana landsberg
tactatacagaggcaaggacttcctttctgatgaggtcgcggatttggttgaggacagagagagattactcagcagataccaacattttgaagaaactaaacgcgagagcgatataggactcttggaggtggtaacaaatggtaaacagttgaaggaaacaagcaaaagtggaactttattagagtttcaagaactgcaaagaaaattcggagaaatggacccgagaaacctagagactgaagctgagaaagcaagactagagaaggaactcaaaagccaagaacacaagctttccatagtaagtcttttttagcttcattgcatcttttaaaatttcgctaaggtaatataagttccatggatttgttattttcgggttttgtttgcagctaaaatcaaagatagagaaatcaaatatggagttgtttaaattaaattctttgtggaaaccatcggagggagatgatgacatcgagatattgactaatgaagaaagagaatgcttgagaagaatagggctgaagatgaacagcagcttagttcttggtaagcgccaccggatccattcttgtcttcttcttattctgcatccattgtctataagattatattacacaaatctcaatttggtatttgtttcatttgtaggtagaagaggagtcttttttggtgtaatggaaggtctacatcagcattggaagcacagggaagtagcaaaagtgatcacgatgcagaagcttttctccagagttgtctacacagcataa

SEQ ID NO: 181411 - DNA, 279 bp, Arabidopsis thaliana landsberg
atgaggttcctcggagactacaagttcgctttacttacttgctccgttatcgctctcagcatctacttcgcgattaacgtcgaatttcgtttcgcgaacgattcaccgggaactcgtaccggagttaaggtttccgagaaatctcccttcaacgacgaattcatgtacatgtcaatcgctgaagatatcgatcgatcttacctccactacgattactaccgtgaatcttgccctaccgccgagaaaatcatcgcgaaagctatcagagatatctacaat

SEQ ID NO: 181412 - DNA, 287 bp, Arabidopsis thaliana landsberg
cactgcgcagttacttcttcgaccgtgctcttcctaagaagaggttccacgtaggagtcatcaattacgcgttccatttcacctccaaatttaaatccccaaatgggttcaaccaagtgataacgaatgcgcattttgatatggactcactctcaggaaccgggaactccagcactttagtatcatctgcctggaggaagttgttcctggaagagagtgttgaaatcgttgtcgttgaagaggttggaactcgattttatccaccgggttttggtcggtttatctaa

SEQ ID NO: 181413 - DNA, 775 bp, Arabidopsis thaliana landsberg
atggttgtaaaggagctgaggcagatctctgaggacaatcagcagctgaactactttaagaacaagctctcaaaacagaacaagcacgccaaggtgcttgaggaatctctggaaattatgagcgagaagctgcgtagaactgcagaggataatcggatcgtgagacagagaactaagatgcagcatgaacagaacagggaagaggtatgatttttcctagaaaatcacaaacttgacattttgtattacctactgattcacatttttgattatattgtccaacaaaaaacctgtggtggtttgaagatggatgcacacgacaggtttttcatggattcaatcaaacagatccatgaaagaagagacgcaaaggaggagaatttcgagatgttgcagcagcaggaacgtgccaaggttgttggccagcagcagcagaacattaatccctctagcaatgacgattgccgaaagaggtatatgtactaactaacataatccctctggcgtttttgtttttcaaacctaagagtaactgaattattccggttttgattctttcagcagagctgaggaagtgtcaagcttcatcgagtttcaagagaaagagatggaggagtttgtggaagagagggagatgctgataaaagatcaagagaagaagatggaagacatgaagaagaggcatcacgaggagatatttgatctggagaaagaatttgatgaggctttggaacagctcatgtacaagcatggccttcacaatgaagatgattga

SEQ ID NO: 181414 - DNA, 104 bp, Arabidopsis thaliana landsberg
cgccgaagctgctctgcttggctccgctgtggaaagaagaagccataccagtgagaacagctcctgagaaagacatcgccatgagagagatctttaagatgtga

SEQ ID NO: 181415 - DNA, 223 bp, Arabidopsis thaliana landsberg
ggcaatttttggcataatgtccggtgttgccacaagtgaaacacctgttgtcattggcttgacgatgttgctgctgttgattgttcctctgaactggatactgggtgcggttgggtgcctactgctgctgctgctgcggtcggatcacccaacgtccttgctgctgctgcggtcccctgttctgagtgtcagacataatcctgaagcgctgtggctgagctga

SEQ ID NO: 181416 - DNA, 254 bp, Arabidopsis thaliana landsberg
atggagtctatccgagattccctggctgaagaactagtcaaaatgacagcagaggtatgtatagcgctgagagtttagagttgatattatgctcagtgttatgatgatatttcgtctatatctggtaactgtggatgtagtgtgagaagctacggggggaggcagatagggtcccgggcataaaggcagagctggaagcactaaggcaaagacacgcggctgctctggaattgatgggtgaacgagatgaggag

SEQ ID NO: 181417 - DNA, 742 bp, Arabidopsis thaliana landsberg
attttgatcagacgaggtcaacagaggtgattgttataagggacacaaaagaaaatccgaaccttatcgtcgtcagttttaggggaaccgatcctttcaacgccgatgattggtgtacagactttgatctctcttggtaatatactgaatacttaggtttaggttggtttttattcggttaggttcaacgttagcttctactaatcaaagtaatgctgatttcaaaaataggtacgagattattatggataaaaataggcacaacgttatgaatgtgggaaagatccacggcggattcatgaaagctttaggccttccgaaagaaggttggtatgaagaaaaaaactctgaccaacccaaaataaaacaagacaacttcgcatactacacaactttacgtcagttaaaagaaatcctcgaacaaaacccaacatgtaaatttatattgaccggacatagcctaggtggggctttagcgatcctattcacggctgtgttggtgatgcatgatgaggagcaaatgctagagaggctagaaggagtttacacatttggacagccacgcgtaggcgacgaggagtttggaaatttcatgaaagattcactaaagaagtttgacgtgaagtatgaaagatatgtttattgcaacgacatggttcctaggctgcctttcgacgacaaaacactcatgttcaaacactttggggcatgcctttactatgacagtttctataaaggaaag

SEQ ID NO: 181418 - DNA, 76 bp, Arabidopsis thaliana landsberg
atgattttaaatatagataatgtggccgtcgaaaaagataatcatgatttcaacaatcgttacttattaggtcctg

SEQ ID NO: 181419 - DNA, 1716 bp, Arabidopsis thaliana landsberg
gttatcgactacatatttacatcctattatatttgcgcagatcctttccaagaaaaagatgaagcatggaacatataccagtgatgttgctgaattcaatatggttatggaggtatatggctttagcaatcttgctcactggaacgtcaaccagctttatggatcttcactttgacttagattatgacacccaattctctattttttgtattagactaccaaagctggaacacacaattcggaggcttgtttgcaggagggaacttgcctcccattgggcggatataggtaaagatttaggtctttattactgtctgatctaatgacatatgaaaaccttttaaaggatacgtttcgttttctaacaactttgttatgaaggacagtgtttggtcctcgcttccaccaatcagtgtttcgtcttccaacaatcgcaaaccagttgtgctgactgtggcctccatggatactgcatcatttttccgtgacaaaagttttggtgcagattcaccaatatctgtgagaacttgctattttctgcttttgggttgatctagaatacatttatttactattcttatttttcttttcccgatttattgctcaacacgttctccttctttcagggtctggtagctcttctaggagcagttgatgctctttctcgagttgatggtattagtaatctcaaaaaacaggtgccagtgtaccatgtgatttagtgttatttcacgctttttgttgtttgcaagctttaatacatgtaaatcgtaaatgaatgcagcttgtgtttttggttctgaccggagagacatggggttaccttggcagcaggaggttcttacacgaattagatctgcattcagatgctgtcgcaggccttagcaatacttcgattgaaacggtaatcattattgttttggtctgacaaagttgatagagacagctagtcttatgcatgaaatccctgtggaaaaagttgcctgtgtttcatcgttgctgcaacttatttgtttcttagtagcgcagaaagcaagtttaagtgttccttgtgaaattgaatgttcacaattttctaaatctaaagatcgaattcagattgcttcttctattatctaacaggtgcttgaaataggatctgttggaaaaggtttaagtggagggataaacaccttctttgctcataaaacaagggtgagaaattcctgatatcctgaaactcttgcataattcgaattcgttcgataatgtgaaaactgtcataggcgacttaacctccacttttggtgttctgctttaggtttcttcagttacaaacatgacactggatgctttaaagatagctcaggattcacttgcatcaaaaaacatcaaaattctttcagcagatactgcaaaccctggaatacccccatcctccttgatggctttcatgagaaaggtacaatatatattccaagtaaatagatgggaagacaattcaaatgtgtattcgcactatactctttgcatatacttcaccttcagttgatcatgaatatgacaggagaagtatacttgcttactattatgtgattctgaaccagattgcctagagtgaaaaaggtataacatcatattcattgttgcagaaccctcagacttcagctgttgtacttgaagactttgataccaactttgtgaataagttctaccatagtcacctcgatgacttgt

SEQ ID NO: 181420 - DNA, 459 bp, Arabidopsis thaliana landsberg
atggagctacaatctcagattccgattctccgtccaagcatccacgcaagacgagccaacatcgtcgttaaattccaggacttgtacgggttcacggtggaaggaaatgtcgacgacgttaatgtgttgaacgaggttagagagaaagtcaggaatcaaggacgagtttggtgggctcttgaagctagcaaaggagctaattggtatcttcagccggagattctcttgatcggtgacggtatcgctttgaaaacttctctcaagctctccactttgactaatgcgattacgttgaagagattgattcggaaagggatccctcctgtgcttagacctaaggtttggttttctctttctggtgctgctaagaagaaatccaccgtcccagagagttattatagtgatttgaccaaagccgtcgaagggatggtcacgccggctacgaggcagattgatcat

SEQ ID NO: 181421 - DNA, 397 bp, Arabidopsis thaliana landsberg
cttggcatgcacaggagcaggactggggacgacggagctcggcggagttaacggcggagatgctgatactggagccggaggtggtggtgggattggtatatccgttgaaggcggaggaggtgcggtggttgtatctaaatccggcggaggaggtgaaaattccggcggaggattcggagtggatggaggaggcggattcggatttacgatcggagccggcggatttggggaaattggagtagatgatgatgaatcaggtggagatggaggagaagatccgagaacaggcgggttcgggtttggattcgggtttgggtttgggaatggagttatgaaaggagaagttgaagaagaagaagaagaagaagaagagggatcggtggaagatgagcaatag

SEQ ID NO: 181422 - DNA, 716 bp, Arabidopsis thaliana landsberg
atggagttaccgaccatagaagtgaggtacgagagtttaaaagtggtggccgagtgcgaggttgtcgaagggaaggcacttccaacactgtggaacactgctaagcgtgttttatctgtgagtactcagcaatttctgcgaattacaaagttgttattgtcttgatcctaaattgaatgctcttgtgtttttctatttctccaggaactggtgaagctcactggtgcaaaaccacatgaagccaagataaacattattaatgatgttaatggcattataaagccaggaaggttagtagttgtctcctaactagttttgatcaaagttttataccttcaagtgtgcttattcttcttgctgttgcaggttaacactgttgcttggtcctcctagctgcggaaaaacaactttgttaaaggccttgtctggaaatttagaaaacaatctaaaggttctaatgatgaaagcagttatatcattttcttgtgaagatttttttgctgcagctgtgtgaagtttgtaccttttctcttgtttttcctttttgtttccacagtgttcaggtgaaatatcttacaatggacacagactggatgagtttgttcctcagaaaacttcagcgtacataagtcaatatgatctgcacattgcagagatgacagtgagggagacagttgacttctcagctcgttgtcagggcgttggtagccgaacag

SEQ ID NO: 181423 - DNA, 181 bp, Arabidopsis thaliana landsberg
atctcatgaatacaaactgatcagagcaacaagtttcacaaaagcagaagacatgagagacaatggagataccgagttatcgagaagtcgatccgatgttgcacagattcagccatgggagaagagaaacaagccgtcaagagaagaagcaaaagtcttgaaagtccaccggcaaagatga

SEQ ID NO: 181424 - DNA, 219 bp, Arabidopsis thaliana landsberg
ggccagctgcatatctcgctgaactgggaacaggcacaggccttcagcgcgcgggtcacggacctgcagggccgcgtgtaccgccaatggaaccatactgtcacagacctgtaccagggcacaatcccgacagcagagatgagcagcggcatctactttatcgaatgccggggcagcaaaggcggcagcctgaaacagtcattcgtagtgcagcactaa

SEQ ID NO: 181425 - DNA, 282 bp, Arabidopsis thaliana landsberg
agaggagctacaatcgtgtatgcaactcacatattcgacgggctagagacatgggcgacacatttggcctacattcaggacggtgagctgaatcgtttatcgaaaatgacagatattgaggagctgaaaacttcacccaacctcctctccgtggtagaatcttggctccgttctgaaatcaaactcgtgaagaagaagaagaagcctgtggcgccatggaaaccatctccattcgataactctccttttagatcatcgagacacatggcttattaccgatga

SEQ ID NO: 181426 - DNA, 414 bp, Arabidopsis thaliana landsberg
ctaatcggatcacgcaccgaggctcgcccaaatgatatctcgacgttgtctgaagactcaattctaaaggaaagcaccagagccacgacaccgcagactgctcccaagtggtccgacgaggtagctgccgaagaagaggaaagcagggtgtcagagggcggatacaagaaggcttcctcgccaaaagaatatcctgaagaggactccaaccatcaagactcgtcaacaataaagaatgaggggagacacaaagccttcgaacacgttattgaccgcgctctgaagaaggaagagcatgtctgccggacaaaggaaagtagcgtcagcaattctcaggtttcggatgtgggtggtgattgtaaaatcgccacgtccacctccaaggactgtgtcagacaagtaggacgcgtctga

SEQ ID NO: 181427 - DNA, 132 bp, Arabidopsis thaliana landsberg
gaattgaggagttttgaagaggaagaagtagtggcgggtgatgaaatggcaattgatggagaggaggaattagggcttcttggtgaatttgggggaaattttgagagtcaagagagtgtttatgtcatgtga

SEQ ID NO: 181428 - DNA, 421 bp, Arabidopsis thaliana landsberg
gtagatactatcggaactcaaatcctatggacccaatgataccgtactcaccatcctatggatggaggagtgtagtatgtgctcgatctttggttaataaaggaattataaaaagtaagtttaggagtgtcaatttcggtatggaatgacccttggatacctgctcaattctccaggccagctttaagcaatggttacaattataaaccctcacttgtgaatgatttgattgattatcattcaaattcatgggatatggatttgattaggagtattatggatctaaaaaggatattcctttggtatttgcattacatttgggatcaccaaatagacttgatgtcatgggatgacactttacaaaatgcggaaaatatacggtcaaagtctggatactatacaaaacaaatgatggtgcaag

SEQ ID NO: 181429 - DNA, 1108 bp, Arabidopsis thaliana landsberg
attcttcgcacagaagtcagccacctgaccgttgcaaatgggattatagcagatattagtcgcacacatatatcagtaagcacatacatcctggattttcttttaacagtctgtagatttagctatgtttgtctggtacaatatatcttgatgttcttatgtctaaagagtttgggattatccttttgctatgtcaatccttaggtttctttatccaagcgattacgtcttccttggagcgaaccttcttctgaggtatcaaatctctctcatgagttatggagaatttacaaggatgaattcatgacatcattttcggttatgaggtgattttgtaatttattgttttccatttattgatcctacctacatgggctgtcatgatattgattcacgatcttcatattgttcaaggttcaatctcatgcagcttttcgtacaaaatggacataacatcaggaaaatgattgtggatctcgaggtagattgtcttgttcatctgttttcagatttctcctagacgagatgatgcatttgtttcttatacccttcttcacatggttgttttctcttcgtttctttttccatgtctctgtagcctcctagatttgacaatggatctatactgagccaggatcctgcaatatcatatatttggtcagaaaagagtctgaataatgatcagcgccaagctatacttaaggtcattgcatgattattttccatcaaatctcatgttgaacgtgctatacttaggacactctttgttctttgacagagctcataaaagacttgctttcttgctttattttcagatactcactgcaaaggactatgctttgatattaggaatgcctggaacaggaaaaacctccacaatggttcatgctgtgaaagctttgttgatcagaggctcatctattctgcttgcatcgtacacaaactctgctgttgataatctacttatcaaactaaaagcacaggtccttatctcgtagccaaccttttttttttctgaattaaattttcattcagctctaaaaggataggaagaatttatcggaaaatcaactgataaactgcatgtgttgttctttagaaaaagtga

SEQ ID NO: 181430 - DNA, 1423 bp, Arabidopsis thaliana landsberg
tgcaatagaacttgatgtaccagaaatagagacccttttctctgttggggcaaaaccaagaccaaaaccaaaacctgaaaaagttccactggtaggtcatgtagctataaacaagtagtattactttctggtggaaactgtaaaatattttgttttttaagttgtactaagctactctccagcatctctttcccttagactttcttctactccgaagcctattgcatgtctgtatacttttgtgaattcattttggagatttgtttgtcttatggtcttccagattgaccttaagagagccaataacacgatagttaacttaaatatattaaagatgccgctgcctgatatgatggtaagctccaaaaccttaattacctgagtaaaagtcaattactggttaatctttcatagcttaatgataattatccacatttttctttgcatcgtccaggctgcagtcatggcaatggatgagtctgtactagatgttgatcaaatagagaatcttataaagttttgcccaaccaaggaggagatggagctacttaaggttatgtcttgacttttgagtagcattatctatttctgtctttactttggagatcatttgtgaaatatgtcaattattggttatcattattcacttgttattgacatgagtccttgttcttggtcgtaattgtctggtttgttctagaactacactggtgacaagacgaccttgggaaagtgtgagcaggtctgtttaagtcttcagattaccaaccaatctcgcactgttttggcttctactataaaatggttagcaattagcttactgagttaatacattttttgtcatccattttgcagtacttcctagagctaatgaaggtgccacgagttgaggcaaagcttagagtcttttcttttaaatttcaattcggcactcaggtctggtggtattacttataccgttattttctgtctatttgattctttggaggacaaaatataattttattagactattgataatgatgttttttgtgcagataacagaattcaaaaaaagtttaaatgctgtaaattctgcgtgcgaggaggtaagatgcttgcaatagttaactctagtttttgggcagtccatatgcatttctctttgttagaattttctacttattgcttattcatcaggtccgctcttcacaaaagctaaaagaaattatgaaaaagattctttacctggggaacacattgaaccaaggaactgcaaggggtaagtattatttatgttattcttgttctacatctttttgcacaagacattgctagttgttttgtctgtacggataacctttgtggttgatatgatccttgctttgctttctgcaggcgctgctgttggattcaagttggacagtttatcgaaattaagtga

SEQ ID NO: 181431 - DNA, 1199 bp, Arabidopsis thaliana landsberg
ctactccacaaaagttcgacgtctttctgagtttcagaggcaaggacactcgcaggaccttcattagctttctttacaaagaactcattgaaatgggtattcgaactttcaaagacgacgttgaactccagagtggtcgtcggattgcttcagatctcctcgccgcgatcgaaaactccaaaatcgccgttgtgattatctcaaagaattactctgcgtctccctggtgtctccaagagctagtgatgatcatggatgtcgaaaagaagggttccatcatcgttatgccaatcttttacaacgtcgagcctgctcatgtgagaagacaaatcgaacaggtcgctaaacagtttaggaaacatgaaggaagggaaaattatgagactgtggtgtcatggagacaagctctgaccaatttggccagtatctccggccattgttctcgtgattggtacttttctatctttgttttattatcacaatttgaatcctaagtggttttgttgaatcaagttcgttctttcctctgttatagcgaagatgactcgaagctactcgatgagataaccaagagaatttctgacatgttattctcggtaacaccaccaagtgagagcatcaataaccaacttggatttgatgcacgcatgaaagagttgtatccattgttggatttggattctaatgaaggtgtgagagtggttggaatttgggcaagaggaggtaatggaagatcagctctagctagatacgtttatcaaaagatctttaagaaattccaaagtcattgttttctcgaaaacgtcaaagggatccctcacgattgtcaaatgtcgaatctaatagacgagtttcttatcaggattcaaggagggtactcgaggatgaagacctcagggttgataaaaaaaaggctcatgagtcagaaagttctacttgtggctaacaatgtcgacaaactcgaacagttagatgctcttgcagaatattttaactgttttggtccagggagcatagtgctcataactacacaagacaaacaacttcttgttgcgtttgggataaaggttgtgtatgaagttgagtgcttgagatgctttgaagttcgtcaactgtttcgtcaaatcggctttagggaaagagatcttaatgtcggttccgagttgtcttcacctatatccgggactgaatcttcttga

SEQ ID NO: 181432 - DNA, 1038 bp, Arabidopsis thaliana landsberg
atggatgagatgctggcctgcgaagtgagggaggagtcgaagtcaaggatacccggatcggagaggccgagtgggccgaaaggtgaagtcaagaaggcccgaagtggattcaaattcgtacgttcaaataattaattcgaagattagaaacggatgcgtctctaatagaatgattgaaattaaataagaattaaatgaattctttggatatatattgtgggtcaaagaccatgtaaagacacacgcattttttggtgcaaattagctatacacattcttttacaatactcatagttttctctatgatcatctatctattttctagtatatttgtcctcaagaataatccttcccactaaataaataaatacttgagtgtgtgaatccgacattcacattttggcgccgtctgtggggacggatgatttttgagtcattagattttttatgtgtgttacatacccgaagtgatccgcaatgtcaggagaggatactaccaacgcttcgatagccgaaaccctaaagaccaagcaacaaacaatggccgatatggcgcagaagttttcaaacgtggaaaaaactgtctaaacactgcaaacaacccaggtatcgcttagccaaaatgttagtactatttagtctcgtgtccgttctttaaatgcagaaaattctagagttcgaagaactatcttcggatccccaaattcccttccgcgaaatgcaaaaagtgatcaaacgaccccggagggtacaaacgcggagaatcaaccagaagacggagaaacgcatcccgaggacgatgaccagttcggtgatcaacacgagcaggaaaacttcgaccagctcgaaaccatgaaagaagtaagccgagagttgaaagaaatgaggtcgaaattccaccaagctacaagctcggagccggatatcaaccgggttatcgaggaggctaggcgaacaccgttcaccctgcaaattgcgagtttgagaatcagaggttctcgaaaactcaacttttctgatagccgctgggcgagttga

SEQ ID NO: 181433 - DNA, 746 bp, Arabidopsis thaliana landsberg
  unsure (1)..(746): unsure at all n locations
cagacttttgatcttgagggtgatagtggaagccttattctgttggctgcgagcaatgagaagaatgagaaaccgcgacctgttggaattatttggggaggaacagcaaacaggggacggttgaagctaaaagtgggggaacaacctgagaattggacaagtggagttgatcttggcagagttcttaatcttcttgagcttgatctcattacttccaatgagggtcttcaaggtctgtgtcatttcttagagtctttttgcagtactaatagtatacactgtctcctacaaagtctcttttgctgagtgctactgcggagctggaacagaaaaacggttttatgtgtgctgcggttgattccaccgtcgtggaatcatctcctggtgtgtgcaatatttccaggtgtaaaacgggtgannnnnnnnnnnnnnnnnnnnnnnnnnnnnnnnnnnntcttatagaagacgacaactcaaacattcatccagagttccaaatagaagacgtgttagaatcagtggctgtgatcgaagaacaccagttcattccaagttcaagcaacaacggatccccactccatcagaaacttaatggaccagagaatctcgaatccaagaacctgtctttgcttaagactagtagctcaggtgatgagactggcttttctttgcagttaggtgagtcagatacaaagaaaagaaagcgaactgattcaccgaatggttctcaagaacatgaagagtga

SEQ ID NO: 181434 - DNA, 1015 bp, Arabidopsis thaliana landsberg
agtctcaccccaaccacaatccaactccctcgctcaccgaacacctttcgatctccgcaaatgggatccagaaacccatctccctcctccttctccgccgtcacattccacggtgatctccgccgcctccgagcgtctatctccaatcgcgagattcgtcctcgacgcattccgtaagaaccgtaaccattggggtccctcagtggtctccgagctaaacaaactccgccgcgtcacaccaagtatcgtcgccgaggttttgaaactaggtaacgatgctgcagtcgcggctaagttctttcattgggctggtaaactaaaagggtataaacacgatttcgctgcttacaatgcttttgcttattgccttaatcgaaacggacattttcgtgctgcggatcagttacctgagcttatggattctcagggaagaccaccgtcggagaaacaatttgagattttgattagaatgcacgctgataatagaagaggtttaagggtttattacgtttacgagaagatgaagaagtttgggtttaagcctagggtgttcttgtataataggattatggatgctttggttaaaaatggttactttgatttagctttggctgtttatgaggattttaaggaagatgggttggtggaggagagtactacttttatgatcttggttaaagggttgtgtaaagcaggtaggatcgaggaaatgcttgagattttgcagagaatgagggagaatttgtgtaagcctgatgtttttgcttacacggctatgatcaagactttggtttctgaagggaacttggatgcaagtttacgagtttgggatgagatgagacgggatgagataaaaccggatgtgatggcgtatggaacacttgttgtgggtttgtgcaaggacggtagagttgaaagaggctatgagttgtttatggagatgaaggggaaacagattttgattgatagggagatctacagggttttgattgaaggatttgtagcggatgggaag

SEQ ID NO: 181435 - DNA, 151 bp, Arabidopsis thaliana landsberg
ggtggattcggatcggatacgcatggaaacggattcgaatgtcactatttaccatattttaatccgaatacggatacgaatacgaatactgtcgaatactaatacaaaacggatagttcgaattcggatttatattcggatacttacttga

SEQ ID NO: 181436 - DNA, 901 bp, Arabidopsis thaliana landsberg
ccaaactcggtgttactcgattctttaagacatcttaagttgatgtctttgaatgtggatattcttaaggttggttatcttggtggatagtgtatgaagttgttgttgatgatccttgagattcttaaggtttgcggttattctcgcagagtactgagattggaaaggctgttaatggcctcaggaaacatggttctgataagattcgacaactcgctaagactcttatcgcgtatgagtttgatctttcacaagtttgattgacacttgctatgcttttccacttttgaatctcacattgagtttttgatgtgtttatgcagagagtggaaggagttggtggatcaatgggtgaataccacaaaggaaatcactggtaactgcgctttctctgtctcgcttttcgatcttttatgactggcttcgtgtcttacagtttggtttcttgaattagatccatagtctttggttctaattttgtgtttaaaacaggtgctgaaggtacaccagagtctgcaaacccgtctgtccttgatgaagaagaggcgtttccatcgcttccatatgatgttgatatctttacacctgaaccaaacggatttgaaatctcacacttctttgattccttggactttgatggaagtgagttttaaaactatgtcttgtttgtttgagaacatgttcttagctacgtgttgattgattttcttggggatgtttgtttcagatcctcgtaactctgaagaacacaacacaagccgagagcatgaaagaaggccacaaaatatcgccaagagaaaacctgagggaacacaaatgaggatacaagatgctccttttagatctaaaaagccaacatcagctactgattttgatgggactagaagacctgtaaagcaaa

SEQ ID NO: 181437 - DNA, 24 bp, Arabidopsis thaliana landsberg
accatccccatcggacaaatttag

SEQ ID NO: 181438 - DNA, 300 bp, Arabidopsis thaliana landsberg
ttgctggtgattccggaactgcagatctcgcccgcgcaggacacgccgcgcgccaaagcgctgctcgaagccaactattcatgggtactgatcgactgcgatgaacaggcctatctgaaatggccagcattcacgatgctggtgcgccgttcggcgctgttcggctggctggcgccgctgctgcgcctcgcggcgctggtcggccccggcaacgccgcatatgccttcgtcggccgtcatcgcgagcgcttcggcgtcctcacggcggcgatgctgccgatgcgcgacacggcattcgaa

SEQ ID NO: 181439 - DNA, 303 bp, Arabidopsis thaliana landsberg
atgatcaagaacaaagacatcgtcgattaccatcatcatgatgcttcaaacccttcatcatcaaactcaacgtttacacaagatcatcatcacccatggtgtgacactattgatgatggagcaagtgattctttttggaaagagataatagagtaagtcctatcagtactctcccacatagattgaattttatagttaccacatgaatgcattcagtgaatatggacgatttggctagtctaatgttataattctccgttttgcaggcaaacttgttcggaaccatggccatttcctgaatag

SEQ ID NO: 181440 - DNA, 1437 bp, Arabidopsis thaliana landsberg
ctacaacattagaccgcgcacatgccgaggatgctttgctgccaatcgcaagagttgctgatctgcacgagaaaaagagtgtacaactacactcatctgataaggatacttatatggttgaccaaagtcatgctggcgagttttacatcacggttctgaagtctaaccgtactgatgcagataacttgattttggctattttagtaaacatatgcagatgcttcagtacaaaaactgctctggccttttcttcattcttttctatttcaaaatttcagatcatgtagaaacatttagcatggaggataagttgagatcgttagggatactgggaggtacagatgaacataaaaatctttcctatgcttcaataattgatggaactgatctcaaggcttatctaccaccaaagaaggtatatttgctttctggatgctcagttctttggcgtgtgttacaacccactgatgcatttctttagagtttttcctttgaatatatcaatcgtagtattcatataaatttttgtattggcagttaaagtctgctgttttgtcaatggaaccctccactgcattcaagactctagaagctttggctgctatgtggttgacaaggttggttctctgatttccttggttcctgttcgcaagttgtctcatctattcttattattgaaaataaagtcgactctttaaacttcattgttcttctctagagtagcaaatttttttttttttgtttaatctttggctataatgatataacccaaaacatgtttgattcgctggtcttaacacagttgcatttacttcaacagggcttgtggtgggaggcatcttcttccatggatatacagcataatggtgaatcatagtcattacatcatgtcccaagaaccaaaagaccagcagcttcataatacattggttaaggtaagagataagagtagagccaaggaatttgttaattctgtaatatttgcttggtttaattatgttatactgttcttccagattaccaagtcccgaggaacggctcttcaacagttactacagttatctgggcgcttacaacttgttacagctcaggtaatacccatcaccttctaatcaattctcaaggcggatgcaagcttatcgttgtctagttttaataaacccttctttgatggcagatcaataaagctgcaggaagtcaaacgcaaataacagcccatgatcaagagattgatgaaagtgaggatgaggaagaagatgtagaagaccatttctatggtgagaatgataatgaatccgatttaagcagtgacgatggaaaggataaaggtaaatgattttagattcatttctcgcaatattggtttgtggagcaaatgttatatctaaatcttgcctactgtctttactttcagatgattccttgatggagacgtaa

SEQ ID NO: 181441 - DNA, 188 bp, Arabidopsis thaliana landsberg
atgagaaagggcaccaaggtggagaagtttttccttagggccgtggccgatctacagttgtgcaaaacatttccgtggggaaaatatgcatttgctgaaaatctgaaaaatattttctatttgatggacaaatgcaatggaaaagttagtccacaaaaggtgtttcctagtattgttctgccttggag

SEQ ID NO: 181442 - DNA, 429 bp, Arabidopsis thaliana landsberg
ggctggacaacgtggtgctgaccccccacgtcagctggtacaccgccgactccatgcggcgctacctgaccgcggccgtcgacatctgccgccggctgcgagacggtcggcccccgaccaacgtagtcaaccaaccggctggttgttagattcactagacgtactcaccgaaaggccgtacccatgccgatagcgatcacctccgagcatcaggacctcgccgattcggtgcggtccctgctggcgcgcgcggtgccctccgagttgctgcacgccgcgatggactccccgatcgagaatccgccgccgtattggcgggccgccgccgagcagggcctggccggggtgcacctggccgagcaggtccccgggcagggtttcggcatcctggagctgaagattgtgctggccgagttcggctaccgcgcg

SEQ ID NO: 181443 - DNA, 98 bp, Arabidopsis thaliana landsberg
ctataaaatcgaagaatggtacgataacagtaaatcaagcatatgattcgagagattatacattgcaacgacttcgaatctctgtgtcactcagataa

SEQ ID NO: 181444 - DNA, 258 bp, Arabidopsis thaliana landsberg
  unsure (1)..(258): unsure at all n locations
atgatacatgatgccccggtgctggtgttggtggtggtggtgnaagaacgtgaggtggaggcggtggctgatggggatgaggatatggtgatggtggtggcgcatgaggatgaggatatggtgatgccggtggctgatgaggaggagaataatgtggtggtggtgggtgatcaggaggagaaaatggaggtggtggaggggaaatgtgggaaggagggggtggaactggagaagggagaggatgttgatgggagggtg

SEQ ID NO: 181445 - DNA, 1929 bp, Arabidopsis thaliana landsberg
atgagtaattgtgaagttaatgtaagtccagaatacataacgctcgtgacgtttgtttggcctttttccttttctgctcaataacctaagtatattctcaaggacttgttctcttcttaatggggtatatataatgcacgcatctatatggatatttattgcatacatgattcttttgaaaatgaacttaacgttatgaatcatatatgtatccaaaagttggtaacttatttcgtgaaggattttagtatttgttcctgattttcaaaaactactaaatcatgtttagtaaacaatttcatagttaattaagttacataaatcataatgaaaagtagatgaaacgtgtcgggtgtcgcacggaaacttatctaaacataaggaagaagaatataagatcgcatggcatgaaaatgttaaatccatgtgagaaaactaaaatcagcaatctcaaccgaaaccgcaatcttataatagacagaaagtgataagaaatgtgaatgatgatatataatcttctttttcattttctgcagacggtagttactacattaggaaacaacgatgtgatggtgatattagacaaccacctaactaaaccagggtggtgctgcgccaacgacgatggtaacggtttcttcggtgaccagttcttcgatcctaccgtatgggttgccgctttaaagaaaatggctgcgactttcaacggtgtctctaatgttgttggcatgagtctaaggaatgaacttagagggcctaaacaaaacgttaacgattggttcaagtatggtaacgttattatttagtctataatgcgcatatatacatgcatatattttagtcatagagtttaatgtacgtaggtatatgcaacaaggagcggaagcagttcattcagcaaacaacaaggtacttgtaatcctctccggtctcagcttcgacgctgatctctcctttgttaggtctcgacccgtaaagctatccttcaccggaaaactcgtcttcgagctccattggtattctttcagtgacggaaactcgtgggctgccaataaccctaacgatatatgtggtcgagttctaaaccggattggaaacggtggcggttatctccttaaccaaggctttccgttgttcctaagcgaattcggtatagatgaaagaggagtaaacaccaatgataaccggtattttgggtgtttaaccggttgggccgcggaaaatgacgttgattggtcgctatgggctcttactggaagctattacttaagacaaggcaaagtcggtatgaatgagtattacggtgtgttggattcggattggataagtgttcggaattcgagtttcttgcaaaagatctcttttcttcaatctccgcttcaaggtacatatctcgcaaaattactaaaagttgcaaacaacaattttgttaaagtttctaaagttttgaattgatttggtttactaggaccgggccctcgaactgatgcttacaatctggtttttcatcccttaaccggactctgcatagtacgatctcttgatgacccaaaaatgcttactcttggtccatgcaatagctccgaaccatggagctatactaagaaagccttaagaatcaaagaccagcaattgtgtttacagagcaacggaccaaaaaacccggttacgatgactcggactagttgttcgacatccggatcaaaatggcagaccatctcggcctcaaggatgcacttggcttcgacaacaagtaacaagacttctctttgccttgacgtggacacagcgaacaatgtcgtggctaatgcttgcaagtgtctgagcaaagacaaatcgtgtgagccgagccaatggtttaagattatcaaagccacaaggccattgaagagctcgagattgtataaagagatctcgtctatgctgtaa

SEQ ID NO: 181446 - DNA, 307 bp, Arabidopsis thaliana landsberg
catggggcagctccaccggagacgcgatcgagttcccgcagatccccctgtacaagtgcatcgagcgcctgggcgggtggcatgaggtcagagtcgccatactggagcacttcggcacctgttcctcgaacctggagaagcgccagcgggagcggctgtggtttgatgccctccgccccagcatgaacggtcgccgcccggcggtcacaggggaggagcggctgcagcagtgagtgtctctagaccggccctacaggctccgggagaaaaaccgcgccaaaaggcgcagtctgtacctgcggcgcag

SEQ ID NO: 181447 - DNA, 418 bp, Arabidopsis thaliana landsberg
atgccttatcgcgccgacgagagccacgaagacctgatcggcgagaagcaagcgtggatcaccttcgggcacctcagcgagtcgctgtcgccggagctgaccgccgccatgcgcgaagagctgcgggcctacttcaccactcaccgcctgatcagccgcaccatgatgctgttgatggcggtcgatcgcaaagacggcctggaatacgtcggcgcgcagtgacgagggccagctcgatgcctagtccggatgacagccgtgaacggtgccccagctgcgacgagtacgtcgacgtcgacggattgtgggccggagactgcgcggcgaacggatggccacgccacgcgtgcgaggagtgtttcgcatgttgctgaaacgaaagctgctgacgatcgcagctgcacgctccggcggctag

SEQ ID NO: 181448 - DNA, 712 bp, Arabidopsis thaliana landsberg
atgatctatgaccgtcctaaaatgggtagacgaaaaaggctagagctgcgtaaaagctttttgctttttgtggatagagttatggctttgcaagggaatgctccgttaaaaaagttctctcttaggtgcaaaattggttctgatccatctcgtgtcaatggttgggtactcaaagtgttggaccgtggtgttgaagaacttgatctgtacattgcttcggaatacgaatatccgctgcctccaaaggtcttgatgaccaagacattggttagcctgaaagtgtcaggaacagatgagttcaccattgatgttggtgagttttttcttccaaagcttaagactttgcatttgagtgctatttcgttcggtgatgagggtggtcctccatttgccaagctgatttctgcttgtcacgcccttgaggagctagttatgattaaaatgatgtgggattactgggaattttgctctgtgtccagcccatccctcaagagagtatcaattgattgtgagaacattgatgagaatccaaagagtgtatcctttgatactccaaatcttgaaaaattagaatttactgatactgttgcggtcaagtatccaaaagtgaattttgattcgcttgttgaagctagcataggccttcgaatgacacatgatcaggtctttgacgcaagagatttagtgaataggcatcatggttataaaagat

SEQ ID NO: 181449 - DNA, 1089 bp, Arabidopsis thaliana landsberg
atgttgctgctgagatttcgtattttgcttttggagattgaactttatgttgatgaggttgttgttgctatagttgtagcgttccgtgatgacaatactatttgtctgtctccaagcttgaagaataatgaactctcaagacagacaaattcatgggtttcaccattttgcttgcaacgcagagcgtgagttcttgatcatgctgaataatttgcagatacacaacctatcgagatttcaggatgttttattgggataaaaaaattttgggattgggtttgcaggtattcgacgggtttcaccagcgtacatggtggaatacctacggcagagtatgcaaagttgcggagagaatcccttgaaactgaatttggacatgctctaggagcatatagctcgaaaagtttttctgcagtgtatcgttttggaccctttttggctttgtatagagctgcaatcatttcgtatcatgtggtgaagcttgccttttggcagctgtttgttcaggatatgaggaaacgggctgtcaaggtcagtaaattcgcaatctatggtgatttgttgtttgccaatacttgtttaataagttaacatgaagagtactttttggatacaaggcctggacaaatttatttaatagtactttatcacattttggatgcagttccgtgagactcttatcagcttggggcctttctacattaaggcatgttacttatttgctaatccattactcccctaaatatactaatcttagtcttttcttttaattcctggttatatcatacatcatttgacttgcagctgggacaggcactgagcacgagaccagacatattaccatctatatactgtcaggaactttcaaaattgcaggtgggaaatctttctttctttctttcaagttaattatatggctatgctcgaattattagataaagtattttttcttgatgattataggaccagattcctccatttccaactactgttgccatgcgatgtattgaagagcaactgggtgctccagtgtcaaaactttttgcagatattagtcttaaacctgttgctgctgcatccctgggtcag

SEQ ID NO: 181450 - DNA, 65 bp, Arabidopsis thaliana landsberg
atgactaggggcttggagaagttctccttgaccatttacgaaaagaataaagatattggtggaac

SEQ ID NO: 181451 - DNA, 739 bp, Arabidopsis thaliana landsberg
atgtcgaatcactccagagatgagcctagtactgccccgaagacagatcaatggtatgatcttgtccttggttcctctgccaaagatgactcctcccataaattctgcactttgcgatgtgagtttctgattatgttaccattcttaattttgggttaattcgacctaaattggaatacatagaataagatgtttgataattgtgtacttgcagatgaatttaagccggcttcaatcgataagaacaggtcaggatcaatgcacaagaagaaggataacagagtttcagttgagtttcagaataaccaaccaggtaaacccaaggtgacatttgaaggtagtagtgaggattacaaagaaagcgatgcggtgttgtttttcgatggggagaagtttcgtttagagaggttgcatcgggctgttacgcagctgcgacatgttaggacacctggtgaatctgctgcggcttctcaatctgcggtgcctgtggagcatcggttatctcctgttggtcgtgctgctaaatctccacaagtcaatagaagtttgcttcctgatgtgcctgtgagtttccaaatgccttttactttttccttatccaatttgatgtgttcaggttttgtatttattgaatgcttgatggtataaaatgttgctgctactggtttaagtttacattttctgtaatgtatgcaggttgaggtggaaagaatcgaaattgggaagccagagaactcag

SEQ ID NO: 181452 - DNA, 673 bp, Arabidopsis thaliana landsberg
atgcatcgtttacaactcatcaactgttcccaagagatgcgtcatgcttattatggtggcaaagctgctgttacagagaccttaaccgtctgcatgggccatctacgcatcattcagctcgtttgctatccctttcccagtgagttactaaaacctagcccattcaaacaaatctagacactaataataataataattaattttctccttttttatgtttctagatgatcatcaccatctttctatttggacactcgtggattacgaacaatccttgtggaaaaaagagcacgattctgtctatttcagagacatggtttctggtattccgtggatacaagattacatgcggcaatataatctggagacaactaaacaaatgtccttcctcatggcagttttcatggataaaagggcacctccagaaacgagaaagcggatcattttcccacaccctttactttgccatccgaacaatcctcttctagtttacttgtatttacctgaaagcatcgtctctcttgatgttgcaacaaaaaagctgcagttaattaccaaagacatcaaaagaggcacgtgtcctaaagttggtagatacgaatcaggatatgacatggtgataacaaaaacacttcacttagagccatctttgctctcggaccatgagcgtgtg

SEQ ID NO: 181453 - DNA, 187 bp, Arabidopsis thaliana landsberg
  unsure (1)..(187): unsure at all n locations
atgaaccagaccctgggcgtcaccctcgnggagggcggcagcctgcttggcggcgacgtgggccccaccgcgaaggtgccccgagacgcggtggacgagggcaaacggctgctgcgtgcggcgttggagaagtcccgcactgccggcaacactggcgccgcgtcagccaaggccgcgttcggcggcg

SEQ ID NO: 181454 - DNA, 738 bp, Arabidopsis thaliana landsberg
gtcagcaagccgttaaatcaagttctttcttcactagttgatcaagaagctggccagcagcttgacaaccacaatatgagctcagatgatcttcaacggacatacaccgtagaggaatttgaaatccaaattttggaaccagaaagatctggtggcccctgggaaactaaagccaaaatcccaatgcagacctcagaacatgcactgactgtgcgagttgtcacgcttctggtaagttagctactaacccgcctaatgtcatatttggatcagatctctctgttttaattgcaataaccaagccacattctcttactccctggggtgtttcagaatgcaagcacaggggagaatgaaacacttcttgctgttgggactgcgtatgtccaaggggaggatgttgctgcaaggggccgtgtgcttcttttctcttttggaaaaaatggcgacaattctcaaaacgtggtatgtttaattgggttctacaacctggggaatctttttctttcttttcattttcaccttggatgttcgatttattgtgaagccacttttctataggttactgaagtctactcaagggagctaaaaggtgctatatcagctgtagcctccattcagggtcatcttctaatatcatctggtcctaaaatcatcttgcacaaatggaatggcaccgaattaaatggtgttgccttctttgatgctccaccgctctatgtagtcagcatgaatgtt

SEQ ID NO: 181455 - DNA, 36 bp, Arabidopsis thaliana landsberg
atgttgagggtggtggtggatgttgcgctgatgacg

SEQ ID NO: 181456 - DNA, 223 bp, Arabidopsis thaliana landsberg
atgctgctggccgtgctggcgacgtttttcctgcccggcatgcggtatctggggctgatggtggcggcgatcgtggtcggcgtggccatcgcgtggatcaccggccggcgcgtggcgatgacggcgatgccgcaaatggtggccatctacaacggacttggtggcggtgcggcggctggcatcggcgccaatgaactgctcggatttgtggcatggccggctg

SEQ ID NO: 181457 - DNA, 364 bp, Arabidopsis thaliana landsberg
atggacctgctgatccgctgcgccaaggccctcgacgccagatacatccgcgtcgcgctcacccccatcctatgcggcgaccgcgcggcggccgggcagaagtggcacgaactcgtcgcctcggtaaacgagaagctcgaggcggtggtgcccaagctcgaggccgccggcgtcacgctgctgatcgagaaccaccaggatttcacctcgcgcgaactggtcgccctctgcgacgagtacggcccgaacgtccgcatcgtcttcgacatggccaacactttcccggtggccgagagcccgctcgatttcacccgcgtcatcgcgccctacgtgcgccactgccacgtcaaggaactaccgcgtg

SEQ ID NO: 181458 - DNA, 130 bp, Arabidopsis thaliana landsberg
aactcgggacttagtttacggatttgaaagaaatagaaagaacgcaaacaaagaacaccgatattttacgagttcaggttccagtgtagaaccctacgtctcgccggagattgactccgaaatccactag

SEQ ID NO: 181459 - DNA, 41 bp, Arabidopsis thaliana landsberg
atgcgtcatgttgtaccacgttttggtcgatacacgacccg

SEQ ID NO: 181460 - DNA, 349 bp, Arabidopsis thaliana landsberg
atatggatgcagctctgaagataagctgcaggagcaagacaatgaagcagtggtatgtaattacttatgtactcatatatctatctctttgtatgttatacctgtgtttttgcttacattcaacttctctccttgcagctgcggaaagaagtcgagagattacggcttttgatcaagtatgcctgcgtgcgtttcccactttcttgttctgcatattcattttggttgatgagttttctttcatgattccaggagaatgactgggaaggaagatattgacagcttcaccgagctgctagctcttcaaagtcaccttatggatgtccgatccattgtgctggagcacaag

SEQ ID NO: 181461 - DNA, 362 bp, Arabidopsis thaliana landsberg
atggttttccggtttgacgtttacatcttttgccgaggttcaactagcacacgtttcgcttcttctttattagcggctctactcagtcggaatatagaagtctttgaagatatcgactatgtcagacaatttgagcatagagacattctggcaatagaagaatcgaaagttttagtggttgtcctcagtgctaatgaattaagacggaggtggactttgagcaagcttgaaaagatcataaacgcggaaagaaccgaacaagttatcataccggttttccttgacacagagccttacgatgtgataagcgataacgtgttagctatattaacaactttagaggacaagaaagaggcgaatag

SEQ ID NO: 181462 - DNA, 526 bp, Arabidopsis thaliana landsberg
atgcagaccatatgcacaatccgcatattacgcccatgcgagactgcggtggcgggcctctggcggcaccgcccgcaaggggaaaacgacaccgtctatttcgtccgaaaatccggctgcaccttccaccgcggcctgcggctggacgatatcgcccgcttcaaggtcaccgtcacgtgcatcggtgcgacctcgctcaccttcgccgtcgcgatcacctcggaaggtgcgccggtcgcggacctgaagatcgtatgggtcgccgtcgatcccgcaacgcgccagcccgtcaacgtgccgcagcaggtgcgcgactggctgagggccttcctttcttgacgcctcacacgcgccggaagagcgcggcgatccccatgccgccgccgatgcccatcagcgcaagcccttccgtgcccgccggagcctcccgcatctgcgcgaaaagccgcgtgacgaggatcgcgccccacgcgccatccggatggccgagcgccagcgaaccgccgtaaaagttgaccgtgtcggg

SEQ ID NO: 181463 - DNA, 535 bp, Arabidopsis thaliana landsberg
atggtggccagcgacgtcagtcatgtcgccggcggcaagcacgacacgccagccagcggcccgatgacgctggcctccggcagcaagatgacgctacaggtcggcggcgccggcatcgagatcgtcggcagctccatcgtgatcagcgcggccgggtcgacgatcaagatcgacggcggcggcgtcagcatcaccggcgccaagatcagcctgaattgatcgcagggacgcgaccatgactgccacacggaatccggtcgagaaggccatcgacaccttgctcgaacgctggctggaaaccagcgccgacccggccatgcgattggccgtatggcgcgttcccggcaatgcgctgagcctggtgtccgccttcatcgaagcgcaacaacagcccgaaaccgccggcacacccgacttgttcgtgcagttttcgacgagcttcgagaccggctatcgctacagccgcgcgctgaaggacgaactgctcgacggctacctgcgcagccgcgacacgctcacggagctggcgctgaag

SEQ ID NO: 181464 - DNA, 291 bp, Arabidopsis thaliana landsberg
  unsure (1)..(291): unsure at all n locations
atggtgctggccatcggcctgngcatcggtgcgtcgatgacgatgctggcggtgttgcacgtgatgactgacgacccgatgccggggcgcagtgcgcacttgtacacgccacatctggatcccttgccgcgggactacaagctgcgggacggcagtccgaaccccaccgacgacatgacctggcccgatgcgatggcgctgctcaaggcgcatcgcggtgtgcggcaggcggcgatgtcgggcggctcgttgctgctgcgtccggcgcgcgcggatctgcgcccgttctac

SEQ ID NO: 181465 - DNA, 407 bp, Arabidopsis thaliana landsberg
atgccgcgtcgtatcgttgcccaccgttcccccatccacggcaacggcgtgttcgccgtggcgccgctggctgccggtgaaaccgtcattcaatacaagggacggctcatcacgcacgcgcaggccgaccgcgagtacggcgatggtgccgataccggccacacgtttttgttcacgctgaacgacaagtacatcgtcgacgccaacgtcggtggcaattcggcacgctggatcaatcacagttgcgaacccaactgcgaggcgtacgtcgaggaagccgcagacggcgatccgcggcacgacaaggtgatgatccgggctttgcgcgacatcgcgccgggtgaggagctgacctacaactacggcatcgtgctggaagtgccgcacacggcgcggctgaaaaaact

SEQ ID NO: 181466 - DNA, 412 bp, Arabidopsis thaliana landsberg
  unsure (1)..(412): unsure at all n locations
atgcaatcaatcgacgggttcatggatgactcctccttgatgcccatgatcggcgcgtcgaacaacgattttcagtcccgtccatcacgccgcggatgtgacaatcgtcactcccgcagggggttacgccgcgttatgcctcgtgctaatatcgaaagtgttttccctttacagataaacacttacggcacaaaaccattcccggtacgtgccacccgaaatgttggaggacgccatgggaccnnnnnnnnnnnnnnnnnnnnnnnnnnnnnnnnnnnnnnnnnnnnnnnnnnnnnnnnnnnntgacgccacgattgaacgctttgccgccagcgaccccaagctgggccaggccatcgagtcggcgctggcgcgccaccgcgcgctgcgcgacgaattaaagattttctga

SEQ ID NO: 181467 - DNA, 131 bp, Arabidopsis thaliana landsberg
atgggtgatctttatgtcgtcgcatatgtgtgcctcgacgaaggtgtgaccatgcttggcactatagtctccgtcgacatagaaaaattgcgtatcgggattcggatcaagatggtgtttatcgtattaag

SEQ ID NO: 181468 - DNA, 360 bp, Arabidopsis thaliana landsberg
agcatctagagcaagtgggtggcgtggatcagtatggcaaatttttaaatccattgcctgttcaagtactgtgcctgggtggcgcgccagttttctcctccgagctcgatatcatgcgtcgtggcgtgaaaggtgtatcatttattttctatggagctagcgaggccgagccaatctccaagatcagagtggaagagcgaattctactggaagctaactcttcgaataccgccccagcgaaccaagattcaaagatctcgaaaagaatctcaaggttggatttcagcagcttagaaaccgattcaggctttgagggtggaaacatgaacgccatttgtgttggacacgtcaacctcgatg

SEQ ID NO: 181469 - DNA, 207 bp, Arabidopsis thaliana landsberg
gctgatgaagtgaatagagaggtgaattcatgggttgaaaagcagacaaatggactcatcactaatcttcttccatcaaaccctaaatctgctcctttgactgatcacatatttgctaatgtcttgttcttcaacggaagatgggatagtcaattcgatccatctctaacaaaagattccgactttcaccttcttgatggaaccaaa

SEQ ID NO: 181470 - DNA, 2208 bp, Arabidopsis thaliana landsberg
  unsure (1)..(2208): unsure at all n locations
atgaactcccaagctgaagtagaccaatgggaagctcttgatctcggcgattctgaactcccgtcttttctccgcccttgtaaacgcaaatctccgacgaggtctctgcaaccgcatgcgcaacaacagaatccaaaggcgggttttaatagtaacactaatcaccgtcccactcttcggcgctgctcctcgccggataagtttcttgaggagagttattctcgctccttgattccaggacctgctggagttgttcaagttgcaatccgtagaaagatgaataaggatcctaaatcgtttaatgagcatggagaaccaattccaactcaagagttcttacgtaaggcagcagaagagcctgattgggaagacaaggatttctctgaggacccctgggtctctactgttgattacattcgaagtgaaggtagaccttttctcttagaattttacattgtcaaatctctaggggttgtggtttaccattttcaatttttgtttggcaggtttgttgagcaatggtggaaatgctatagggacaccagtgagcgagattaagagaagatgtgacagttggggtaaagttgatcaggtatgattaacctactcagtttagctgtatcctctagtccattcccattacaccaagatatctagtgaccatccagttagagtattaatggaaatctacaccctataatagtctgctggtattggctttcgctttgtgtttgtgaggagaaaggtggaatattctgaaagaatgtcttcacccaattttttgctatttggccacaagttatttgtatatgttgtagaataattggggtagtggaaagccaaatgctggatttttttgccaagccacgtgctgatgatctcataatgctccacatcttatctttgcagctaataagtgaaatgtagtgacatacttgaaatgtggctggtcatttgtaggtcgtggcaattgtcaaaacttgcactccgaatggtctaggtgatgtcatggtgactcttaaggtaaaaaaatgaacagtcaagaactcttaacaatgtgaatggtttccacttttttgtttttgtcacgcaccaattgtcatgagtctcaaatctgtgtattgctggtaggatcccactggaacaattgatgccagtgtgcacagaaaagttatctccgagagtgagtttggtagagatatacgagttggcgcagtggtgatacttaagcaggtttgctgtttttcattaaggagacaaaacaaatcgcatggttttgacattaccactttgtttctcagtcacttttggtaaatcatggactaagatatagtgtttttcaggttgcagtctgcgcaccctcacgttcatcaacctatcttaacataacactgaagaacatctccaaggtagtatttctctggcagtttttcttaggatatcaagttccaccttcttatattcattggaatatatgaaaatttcttaaggctagagagtnnnnnnnnnnnnnnnnnnnnnnnnnnnnntcctgttttaccaaaccagaacgattctgagatgagtgccaagaatcatgtttctgtgaatggtttaccaaagcagaacgattctgaaatgagtggcaagaatcttgttccggtgaatggtaagtgatcaaattttctttcgatttttttttcacagtttgatagagactcgaacctttgacttggtctaacagaaaacgaggaatatttgcgactgcaacccaatgtgtttagtgttgagcaaagcactactcaaggcatcatgaacaatctcagacaaaatgctaaaggaagcagtgaagcactgcatgacatagaaatggtagatattaatcctgcagagggaagcaaatcctctcctaaaaagggtgtgacaaagaatcactgtgaagttagaatggagcagactctcttgggaaaacatgattcaatcagccaaacagagcagcaactgtacgaagatgtagctactgagactgatatagctgattgcattagacccgcgaaacagatcagaagaagttctcaatcgcagattgatgagcaagagagtgtaatggggaaccctgatgaagtcacaactcgaactacaatccacaaatctcaatcgatggcgtcaacaatctcgttgccacaatggacggacgagcaacttgaagaactctttgcttttgactga

SEQ ID NO: 181471 - DNA, 1414 bp, Arabidopsis thaliana landsberg
atggagagacacagcattggcaaacatgcaactatacagagcggaaaaacaattgacttttatgttaatccagacatgatatactttagagttactctcactacttcccaagcgagctgcaaaccagtcaatagtggtcagtgggtcaagaagttacagaaacagaagaatgatgcacaatgtttggatgttgatcttgatttttccggcggaaaatactgtgcttccttgagattgtctttagggaaaagaggcatactggaggtcgtgattttatcttatcatctgtttccttcttggttgctttctcttaacaaatatctttctggttggtacaggcagctgttttcacatcgtacattcttaaaaacgactcagactgcaccttgtttttctttccccctgatcagaagcctctatccaggtatttgacaagaaatcaaaatatcctttaaattggtgatggctatttacatttacagtaaacaatgcagagaggatatggagaaacttgatcacattgtcccacctgagtttggattgtatttacccccaaagacagaggggtcgtggtttttaaggtatgctatccgtgctcagtacatagttattttcacccaatatcttttcagaaattattcagcatcttgtttggccagatctcgcaaggttggtgtcatattggctgatggtcatggggcaactgaagcagtgttggatttggatgctttatcaggacttaccgaaattagtttgggaacaaaagatgagtctgggtttcggtatgtaacaaggtttggtttgtcagttagatcaatctcaagtaaaatgctagttccatcacggattgtgacttttgttccgagacatcttgtaatcaatgaatcagaagagactatcaacatccgtcagcactattttcaggttcgttttgtgtcctttatttatttgctttcctctcataaacatgatttatttacttttctttctatcacttttctgttttattgggaaggatgactctgtgggcataatcaccatcaaaagcaagcagagagcagccttgcggttgcaggaagaaaccattcagaagaaagaactccatctgttcgaaaactttatcaaaaagcacggaagtgacagtgcaaattcattgatattcattcagttccggttgaacaaagcaaactggagttggtcaggcccattatgcatcacttcaattgggtgttttttcattaagttcagaaagcagtcaggtgaagcaggcagaggcgcaattgaatttgcatctgttaatgttactgaagaaagttcaactcttgctgtgcacttccaaaaaccaccaaataccccaccaccatatcgcattgagaatttcttgcattctgcatttctcacgtactaccaaaag

SEQ ID NO: 181472 - DNA, 438 bp, Arabidopsis thaliana landsberg
atgagattatccaagcttcgaatggctagcaacgacatcggagcggtctggactcctgggacgaccatttgcttcgagagtctggattttgtcgtcaacgaagaaagagagatgacgagggcctcggaagcctcgtctcccatggcaagcgacttgcccaatgtaacaggaagtctcggtgacctccaactcaacccacctgaggagaaccatgagtcgcagggcttgccacgacccgatcgcactgaggttgtgggagtacaggaccatgtccgggactcgttcctggacatcctcttgtgaggcttggaagatggactcatgtccctgcctagcgtggcaagttgcgaccctggtcatgaatgccttgcagccaacaccatagaggatcgtttctctcacgtggggagcatgagcgaggcctcgcccagtatcatg

SEQ ID NO: 181473 - DNA, 37 bp, Arabidopsis thaliana landsberg
atgaactataaggcgcaggctccacgacagaagacac

SEQ ID NO: 181474 - DNA, 293 bp, Arabidopsis thaliana landsberg
atgtcaacttcggtaatagacacgcgtgaaagcgaccggtcgaggggaccataccggaccgacagagacacgtgtcatgagataattgaattgtaaccagaacaaagccatgcaatctggtcgccgacttggcagacgcccttatgaacacatccgttcccgtgttttccgttcctggtcttcctcttgccactgtctctattaaaaacgtcaccgtttctgtggtccccaatcgaaccagactgatttcagccatttatttaacccggtttgcgaaaaaccaaagcttataa

SEQ ID NO: 181475 - DNA, 481 bp, Arabidopsis thaliana landsberg
tgtcgatgaacaaaacatttgtcactcacgttcatgtcgggacgggaacagaatcatggtgccaatagttgtatccacattagtgattattctcattgccgccttggctatcatatgcatcatgcgaagggaaagcaaaataagtaagtacagagtgtcttttacttagatttaaatttaataaggtagaattaatgctgaaagaaaacgagtgtttaatttcctagtgtattcaggagcatattcaggaccacttctgccttcgggaaagagaaggttcacatatagtgaagtctctagtattacaaacaacttcaataaagtgattggtaaaggagggtttggtattgtgtaccttggttcccttgaagatggaactgaaattgctgtaaagatgatcaacgattcttcttttggaaaatctaaaggatcttcatcatcatcatcatcatcccaggtctccaaagaattccaagtcgag

SEQ ID NO: 181476 - DNA, 465 bp, Arabidopsis thaliana landsberg
atggtcggctctcactctcgagatcggacggctgagaagagaagagaagagaaggagaggatgcgtttcttacggggagagagaaataaggccaaacaggtagagcccacaagatgactaatctccaccgtccaactcaaaaacaacatcaacaacaacacatcacaccaaatattattcggtttctctcttcaggtccgactcaatactgtcatacaccacatccactactctactactacagactttttggtgctcttccccctgtggagtccaaatcctttgacacgtgtcgttttctcaagagattcactgtcccactctctgcgtgattcccccccacatctgacggctgcagttcgccgccggtctactcatccgtcaaacgccggttactgctcagactttggtttgatcaaaataaataaaaaaagatcaacggctggaagaggaagtagaggttga

SEQ ID NO: 181477 - DNA, 1364 bp, Arabidopsis thaliana landsberg
atgaatggtgccttcgacgtcacgtacgagcagcttcagctgaagctgtctctttcggcaggaccttcggcgacgaagcatggtcccaacagtagccccttcgcggtgctagatcgtttttcgtaacgagcttgatccgtgaaaaaagtctcttaggcttcaggaagccaaaggtccgaaaaacaccttccctgagctcgttgtcgagaaacgatacagtttccgagcgcgtagcggtcccaccatgcaggttcactattttggtccctgcggcccagcgtgcagcgggtgcgagcagctgtttgcctggtgtaaaaatcctggcgattcaccttcttacctgcagcactatataaacagtcaggtaggtgtgaagttaccacagcattcattgctattgcactgttttgctgccaaaaattttaaccatagccgaagcttgcttactgcatcgtcaaccgacgctattcattttgctcaagcttcgtaataagaaagagctcggcaaagttacaaaattttcaatttcatcaaaaaacaagaaattcaatcatcagatggctagggtacgctcaatagttagggttactcgcgacggagaggaagccgaaggtgccgaaaccgctccaatctctgaagtgatgcaacggtcagggctggtagtatcggaggatgcccctgccgctgaagctgagcaggtcgatgctgaagaatttgaatctgaagatgattacagcgctgtgctaactaaacccagccacttggagtttgggaaatccaccgttaccgaaggtgatatgtctaagatgatgaatttgggatattttagtgaaggaaagaaggagctggttcattttggcagggaggaaattaccccgaagctaggaaaggatgaagtagtggtcttcaaaagcttctttaaagctggattaagatttcctttaaatgggatgattgctgatgttttgaagaagtttgggatctaccttcatcatctaactcctaacgctatcgttaggcttagcgtttatatctgggccctccgaagccagggggtggaaccatttgtcgaaggcttctgccgagtgcacgagcttcattatcaaacaaaagctagaggagatgggctgcatgaaaactttggctgctacaattttgcatatcgcaagaatacaaaatttccagttatcagctatcgtagcaagtggccagctggctggaagtctgaatggttttacgtcaaagttgatgaagaaaaggagaagctggtccaaagtccgctagaattaatcttcggagaaaccagaccccagtgcaacatgacaccagggagtccaagccaaattgctctggctgaattttga

SEQ ID NO: 181478 - DNA, 311 bp, Arabidopsis thaliana landsberg
  unsure (1)..(311): unsure at all n locations
atgatctacaacggcgtgctcgattccggcctgaacacgctgtccgaccagggcttgaacatcgtgccggtcaacgtctannnnnnnnnnnnnnnnnnnnnnnnnnnncccaaggcgttcggcttcagcaacgtgaccacgccggcttgttcgacgggaccggcgaccggccccgccagcggcctcacttcggtcgaatgcggccctgccgggttgggctcgccgtacacctacgccaagggcgcggaccagacctacctggtcgccgacggcgtgcataccaccacggtcgcgcacaagatgctggggca

SEQ ID NO: 181479 - DNA, 626 bp, Arabidopsis thaliana landsberg
gatgctgatgtgatgtggttcaggaacccttttcgacggttttacgaagatggtgatttccagattgcttgtgaccattacataggaaggccaaatgattttaggaatagaccaaatggaggatttacctttgtgagagccaataaccgaagtataggcttctacaagttctggtatgattcaaggctcaagtaccccaaaaaccacgatcaggatgttctaaacttcatcaagacagatcctttcctttggaaactaaggattaggattaggttcttgaacacagtgtattttggtggattctgtgaaccaagcaaagatttgaatcttgtttgtacaatgcatgcgaattgctgctttggtttggatagtaagcttcatgatcttagaatcatgcttcaagactggagagatttcaagtctttaccacttcatagtaaccaatcctctggtttcacctggagcgtcccacagaattgcaggttcttttcttgtcattttttattatctttgagattgttagagaggatcaatgacgtttttgtttttgcagtcttgattcacttaggcctgttgattctaaggatgaagaagagagtgaaccaccaggagaatctacacagtga

SEQ ID NO: 181480 - DNA, 1563 bp, Arabidopsis thaliana landsberg
atttttcaccgaaattgaaagctcacgaagagttttttcatttgaagcttgtaagtaaatctcttttataatctacagtttcaatggatgctccggttccactctctttatctacactgttagaactctgcaccaatctcttgcaaaaatctgtaaacaagtccaatggtcgtttcacagcgcaattggttcattgccgtgttatcaaatcgggtcttatgttcagcgtctacctgatgaataatctcatgaacgtctactcaaaaactggttatgctcttcacgcacgcaagctgttcgacgaaatgcctctgagaacagctttttcatggaacacggttctttcggcttattctaaacgaggagatatggattcgacttgtgagttctttgatcagttgcctcaaagggattcggtttcgtggactacgatgattgttgggtataagaacattggtcaatatcataaggctataagagttatgggggatatggtcaaggaagggattgagccgacgcagtttacgcttacgaatgtgcttgcatcggtggctgcaacgcggtgtatggaaacaggtaaaaaggttcattctttcatcgttaagcttggtcttcgcggtaacgtttctgtgtcgaattcactgcttaatatgtatgcaaaatgtggtgatccaatgatggcaaaatttgttttcgatagaatggttgttagagatatctcaagctggaatgctatgattgcgttacatatgcaggtcggtcaaatggatcttgctatggcgcagttcgagcaaatggctgagcgagatatagtcacttggaattctatgatttctggtttcaatcagagagggtatgatctcagagctctagatatcttttcgaagatgctgagggattctctgttgtcgccggatagattcactctggcgagtgtgttatctgcttgtgccaatcttgagaaactttgtattgggaagcagattcattcgcacattgttactacagggtttgatatttccggaatcgtgttaaatgcattgatctcgatgtattcgaggtgtggaggggtcgagactgcccggagactgatagaacaaagaggaaccaaagatctcaagattgaaggttttacagctttacttgatgggtacattaagcttggagatatgaatcaagctaagaatatatttgtttcgttgaaagatcgtgatgtagtcgcatggaccgccatgattgtaggatatgagcaacacggttcgtatggtgaagctataaaccttttcagatcaatggttggaggagggcagagaccaaacagttacactcttgcagcaatgttaagtgtagcttcaagtttggcatcattgagccatggcaagcaaatccatgggagtgctgtaaagtcaggggaaatttattcagtttctgtcagcaatgcattgataacaatgtatgcaaaggcgggtaacattacatcggcaagccgggcatttgatttgatacgctgtgagagggatacagtatcgtggacatccatgattatcgcgttggcacagcacg

SEQ ID NO: 181481 - DNA, 334 bp, Arabidopsis thaliana landsberg
caacacgtgtccgctccgagcgaagtgaaatcggcgtcactgacgacaacaacaacaacaacgatacttcttcgtcttctttctccggtacatgacccgatttatgcttgttcattcttggtttttagtggaatttgccaaattgggtcttcactgaacttaggaattgagaaaaaagtttcgatctttttgcgtgatttctatgtagaaatgtgaaagtttcatcttttgagttctgattaccatcgaattcgtttccttgtaggttcttcgtcttcttcatcagtacgcacacaactagatctccttgagcagctaacttcaacaagtgatg

SEQ ID NO: 181482 - DNA, 441 bp, Arabidopsis thaliana landsberg
  unsure (1)..(441): unsure at all n locations
atggcctcgctagttcatcccgagcgtttccagtccgaggggcactcaacctggtgcgcaacctgctcagatggagcgcngcggttcgccggaaggagccggccggcgccactcccctcggtgatctcgctgccagggagttcgtgctcttcgtctcctacctctcctgcgggttggcactaccgatctcacctttcttcctgctgctgctggaggagctcggcctccagcttcagcacctcatgccccactccatcctccaggcgaccatcttcgcccaactctgtgagatgttcgtggggtggcccccagcacctccatcttccgccatttcttcatgctggtgaagtctgggaaggctaaggaccacctcggcgcctactacttccagacgaggtcggattcagccatggcctacatccccacccttggcggcacaag

SEQ ID NO: 181483 - DNA, 205 bp, Arabidopsis thaliana landsberg
atgtggcggccaacaccgctcgtaggatacctgacctctctccttctgctgcggccagcactgtggtcgcgtaaacttcgagattatagaagtcttcttatcctggtgctagatcgagtgagcgtggtcctcctctttctcccagattcatgaggctcgaatgatgaatgcctcgcaggcacatgcggaacctcttgctcactag

SEQ ID NO: 181484 - DNA, 1384 bp, Arabidopsis thaliana landsberg
  unsure (1)..(1384): unsure at all n locations
atggggcatgtcccatttgtgatcaagtactctccaagaggtaaaactttcctagcctagcttcagtttagctctagtcgccttattctccatttgacagttagtctttatctttccatcttagtttaatgaaacctgtggatatcaatccaaatgaagaatggataaatgtaagtggttaagctgaaatacgcaaggatactatagcttttcttcttttccagttttcaatattcccatcttacatctcctcgttgnnnnnnnnnnnnnnnnnnnnnnnnnnnnnnnnnnnnntccacaaatacgtatccttttcatagatgtgctcttggtagaattttcaagttgtaactatggtttttcaattgaaaattgtcccgctgtatctcaaatctaaactcaagtggtataactttatctcttttgcctttgtaagagttggtaaaacaacagtttaaggttcaaaaacctcctgtttttcttaactgaatctagtgatgaagagtgcataccgaagtgtaatgttttacattgcccaaagagacttagagatgcagtacaagatgaatagagttgttgcacagtgtcgtcagaaatgtgagggtatgcaagcaaagtttagcgagaaaatggagcaggtccatacagcatatcagaagatgggcaagaggtgtcagatgatggagcaagaggtagaaaacttgaccaaggataagcaagagctccaagagaagttctctgagaaatcaaggtcagtcacttaagatatgttttcctggttctgttccctatattaatctcaactacaataacaatgtaccttaattgtttttaaattaccagacagaagaggaagcttgatgagatgtatgaccagctaagaagtgagtatgagtcagttaaacgtacagccatccaaccagcaaacaacttctacccgcgacaccaagaacccgactttttctcaaacccagcagttaatatgatggagaacagagagaccattcgcaaaggttgatttaactacactatttctgtgtcttaagcttagtgcttcatatgatcctgagtctattttggttaaatatctccaaatcaagttgacttatttggtgcagaccggtcgtttttctctcctgcaacaccaggacctaaagatgagatatggccagcaagacagaacagttcaaactcgggtccattcgacatctccaccgactcacctgcgattccatccgatcttggaaacagaagagctggcggaggacatcctgtatacggtggtggtggcactgctaatccccagtcaactctacgaaaccttattctctcccctattaaacgttctcagctctctcgttcccgccctcagctgttcacgtaa

SEQ ID NO: 181485 - DNA, 1313 bp, Arabidopsis thaliana landsberg
atgtcggaaaaggcttattctagatcattcaatagtctccaaaacgttattgggatcaagtgagtttccttttcaagtccttcttctttacttgtttaatgaatctgttggttgttggagttaatcatgattgatgtgtgattaattgtgcattttcaggattaagcttaatgtaagagaattggcggttcaatttggctgtgttagggtaatcaaatccgtgcaaaatgtgttatcctcgtaagccctcttctattgtgtactttgaagatttgcataccatatgtttgttaaaatgccttaaagtcttgtttgtttcggtgtttgttgctctttaggtataaggagaggtttcttgcgtcactaccagcgtcgagacgggctaatgctgattttactagacctgtatttacagctgctgctttctatttgtgtgctaagaagcagaaggtaatactttaactctctttcctttttcagggatgtatgcttgacgtttctgagtttttggatttgttattattttgcagcttaaggtagataagcctaggttgattgaggtttgtggtacatcagagtctgaattctcttgtgtaagtgactttgttgtttcattcagagaatgatttatataatatgtgactagatatccaaagtactgactaggaactacaaacaggtctcgacctccatgacagatctttgttttgactgtgttgggatctctaaggaaaagaaagatgcaaaagacgttaaaggaaacagaggtatggttattcagttctctctcgacaaagtcattcttcttgtcttatattaactactagtctatacatatgtcctgctttagttcaattcaatgaaggcttatcttcaattcaataagtgattatgggcaaaaatttcctcagacttgcttgatgtgttacctggaaagaggagactagaggatggtggatattcatctggtgatgaggtactttcatggcaaccgacctcttcccatctgtttagaatcattctttgtgatttatcaaatgtacatacgtctcaaacttgtgactatttctgattcacactacatgtgatttgcttcttcagtcttcatgttacaaaagacacaagaagatggaggaggctaagtatgaggactggaaatctacagtcgttaatttccatttagaagaatccatagaaaggttcttaaacttttgtaaattgatttgatcaccaaaagaaatgattcatttgtatgttttctcctgctgctgatggtcctggatcttgtgttttcttttcaggaactacgaaag

SEQ ID NO: 181486 - DNA, 328 bp, Arabidopsis thaliana landsberg
atgttgccctcaatcttgttggtgctctttcaagtatccttagcaatatacactggattggtcctggatcttcttgttgtaggcagtattgcgaggaagatgtacatcaacgggcatggtatgataggcctctgatggatatctttggtctgtgtggttcctgacctacatgtctgtatgattcaggaacatcagatccaattaacatctgcagagaagtggcacgagattggatgtccctttgtatgggagtgaccttagctgtgacacactattttggggatatggaatctgaagaaactaattcctatatccagaaacaaccctg

SEQ ID NO: 181487 - DNA, 299 bp, Arabidopsis thaliana landsberg
acgcttttggcacgctcgtgaacttgaccaaactgaacttggaccaaaacccgcttgttgtcccgcctgatgaagtcgtgaaacaaggtgtggatgcggttaaaatgtatatgggtaagagatgggtcagcatgttggaagaggaagagaagatggcgaatatgaaggatgagatggatcagacatacaccgattggctcacccgaaccacctcgaagctgaaaacgtatgttactgaggtctcggagtatcttggctcgaatccgcctagagatccttaccttgaccagcagctatga

SEQ ID NO: 181488 - DNA, 115 bp, Arabidopsis thaliana landsberg
cattagtcggaaagcattcaaactcgggacagacagtgtggtgatcattctggaagaagtccactctaaagtatttcggtgcatttctaccagggctgaccgaatcagccgatag

SEQ ID NO: 181489 - DNA, 149 bp, Arabidopsis thaliana landsberg
agggtagaatggaatctatgcttgagcggattcttgaaagccagaccaagcttcttgttgagtttaatggcaagtttgatgctatcgaaacagatattaatgggaagatcgacaatctgagctctcacatgaagaagctagatgtatag

SEQ ID NO: 181490 - DNA, 815 bp, Arabidopsis thaliana landsberg
atgtcaacgacgtcaggaaccggaggtgtcagttacagaaatggaactcaaagaagctcactcagaactcagtcctctgcttctacttcctccggtggccagaaagcttctgtcaaatccaagtcagtccttagaaaaagcagccccgccgcacttggtggtggtagctctaagtctggaggcggtggcgacgccggtggtaaaaacaaaaatcctctgttcatctttttttttacctataaattttcactgtttagtttttttctccccaaagatagaaactttatgattgatgtgtttgagattataaattggttttcttattgttgttgattgtgattttgtttttttgaagttcctggaagagttcgagtagctgttagattaaggccacgtaatggtgaagaattgattgctgatgcagattttgctgattgtgttgagttacaaccagaggtacagtgttatttatatactaaagtctggtttttgaaatgtggagagagctcaattttgtgactttcttgtttgattctttagcttaagaggttgaaactccggaaaaataattgggacactgatacatttgagtttgatgaagtgcttaccgagtatgcttctcagaagcgagtttacgaagttgtggctaaacctgttgtggaggtatatagaagttgtactagaccttcatcagtatccagttttttttattgttgttgaaaacattctatgaatttgagtctttcttttttggtatagggtgttttggatggttataatggaacaattatggcctatggtcagactggtgtctg

SEQ ID NO: 181491 - DNA, 138 bp, Arabidopsis thaliana landsberg
cgagggagaggaaacgaagaagtaatataaggcctccttccagatttaaagacggagattttgtagcttatgcattggcaacagaagaagacttggaaatagaagagcctaagtcttatgaagaagctatgaaacgta

SEQ ID NO: 181492 - DNA, 87 bp, Arabidopsis thaliana landsberg
gacacaatcttgcggttgaagatgtctgtgcgacaaaagaagaatgcagaatcagctgtcaatgtgatgcagcgtattgagacttaa

SEQ ID NO: 181493 - DNA, 93 bp, Arabidopsis thaliana landsberg
ggatcaatgtgtgaaattcaagaagcggctataaaaatttcggaagttagtgtagacgttgttttcggattccggtcatcattaaacaaatga

SEQ ID NO: 181494 - DNA, 307 bp, Arabidopsis thaliana landsberg
atgaatccagacaacttccggcggcggcaaaagcataccctccgtcatattctcaaaaaaggtaggcatccccaaaagcgcctcatcatccatataaaacacaccaccattctgctcctcagccctcctctgcccctccctaaccccctcccctgcctgctgctctggctaccgcgcagttttagatgcctacgtcgcagtctcattctgaagcgccattgcagcttcagacgcagctttctgaatctccttaggacagagggttcacaagaatacgaaatccgccaagcagaaacagcgaaattga

SEQ ID NO: 181495 - DNA, 80 bp, Arabidopsis thaliana landsberg
agattttacgagcatttaatgcgcagtcttcccaccggcgcaatcttcccatgtttatgaacggcaaaagagagaaataa

SEQ ID NO: 181496 - DNA, 96 bp, Arabidopsis thaliana landsberg
atgattgctctttcatttgttcgctttggttcagatcttgttaatgtccggaaagtccttggatcacattccaagagtataatgttgatgtcgaag

SEQ ID NO: 181497 - DNA, 993 bp, Arabidopsis thaliana landsberg
atgtggagactaagaattggagctaaggccggaaatgatactcacttgttcacgaccaacaactatgttgggaggcagatttgggagtttgatgccaacgcaggctcccctcaagaacttgccgaggtcgaggaggctcgtcggaatttctctaacaataggtcacattacaaggccagtgctgatctcttatggaggatgcaggtgaaacgtataacacaatacgtttgttagagaattgttttattattatttttcttgttttttccctttttgataaaaaaaaaatttattttctttgttatgtggacttaatagtttcttagggaaaaaggttttgaacagaagattccacgtgtgagagtagaggatgcagcgaaaataaggtatgaagatgcaaaaaccgcattgaaaagaggattacattatttcacggccttgcaggcagatgatggacactggcctgcagataactctggtccaaatttcttcatcgctcctttagtgagttacttcacatactataaactaacttttatagttaagcataatcagttatacaagtgattaaaaaaaaaaaaaaaaattaaacttcatgttgcataggttatatgcttgtacattactggacatctggagaaaatctttacagttgagcatcgtatagagttaatacgttacatgtataaccatcaggtaaatttgtatatttaattactatatatatgtatatcagtatatgttattaaatatagcaagaattactgacttagcaaaattggtttgtagaacgaagatggtgggtggggattacatgtagaaagccctagtattatgttttgtacagtcatcaactacatttgtttacgaatcgtgggagtagaagccggtcatgatgatgatcaaggaagtacttgtacaaaggctcgtaagtggatactcgaccacggtggtgctacctatacaccattgatcggaaaagcttgcctatcg

SEQ ID NO: 181498 - DNA, 39 bp, Arabidopsis thaliana landsberg
atgcagagcacagaagttattggttcactctctgaacag

SEQ ID NO: 181499 - DNA, 9 bp, Arabidopsis thaliana landsberg
atggcgcgt

SEQ ID NO: 181500 - DNA, 128 bp, Arabidopsis thaliana landsberg
gaattatcacctgcgagaactccgacttagcaccacatgaattacatatcacaactgagatttcccacgaaaccgtacgatactacggcatgagcccggatatgagtgaaaggaaagagatctactga

SEQ ID NO: 181501 - DNA, 1141 bp, Arabidopsis thaliana landsberg
atgatgattgatagaccaaacgaagatgctagtgctatggatagcgagcttgttccttcctctctcgcttctattgccccgattcttcgcgttgctaatgaaattgagaaggacaatcctcgagtggcttatctatgtgagtctgaatttgtttccaatagtcatgtttgctttagccagtttctatttaaggacgttgtatagatgggttcttaacatagacatagttctgtaatgagtatggttctgtttttgatgacatcaggccggtttcatgcgtttgagaaagctcataggatggatgctacatccagtggacgaggtgttcgtcagtttaagacctatctgttacatagacttgagaaggtacatactttcttggtgaaatggtttctctaagtgggcagagatttccactttgcttgatcattttgagctgatgtgtctaaatttgttctaggaagaagaggaaaccaagcctcagctggcgaaaaacgatcctagagaaattcaggcatattaccagaacttctatgagaaatatattaaagaaggagaaacatcaagaaaaccgtgaggccactttcctaactcatgccaaagtttcaataagctaagtgtagtgatattgagccgtactcttatgtttttatttgctacagggaggaaatggcaaggctttaccaaattgcatcggtattgtacgatgtactgaagactgtagtaccttcacctaaagtggattacgaggttcggtttgtatgcgtagtaaattcctgtaatggtaatttgattaaatttctctgtgaagcctcacttttcatatgtcttctgttattatagacccgtagatatgccgaagaagttgaaaggaaaagggatagatatgagcactacaacattcttcctttatatgctgtagggactaaaccagcaattgtggaacttcctgaggtgcgtttgaacacagggtgactgctacgaatagtatgctagagaaatatttacactcttttgtttttcttgtcatgttatgtgctgtgacaaaaataggtcaaggctgcattcagtgctgtccgtaatgtgcgcaatcttccacgacgaagaattcatttgccatctaatacccctaatgaaatgc

SEQ ID NO: 181502 - DNA, 409 bp, Arabidopsis thaliana landsberg
atctcgtgggtgctgttgttgaagttggaattctgtctcattctggtgatcccgacgtcggcgttgaggggatgatcgttcctttcaaattaatggacagatagtaagttttctggctaaaattcaataaaatatgataatttcgtgtgtttaaaattgttaaatgttttccttctacagcaaagaggttctagactgtgaggccactgggagaaaggcattggaatttgatacctgttaccggcgctatggccatccaaaatttgttttagcactggcttggtggagggtggttagggagcctgaactagttggtgggcgcaaaaacaaggttaaaatcgtgagctatggtgcagtttcatctgtttacccggaaccatcgattgaagaagttgaagaaatcaaaatg

SEQ ID NO: 181503 - DNA, 693 bp, Arabidopsis thaliana landsberg
gaagaagggtgggtggtttgtagagcgttcaagaaaaagccaatgaccgggcaagccaagaacacagaaacttggagctcaagttacttttacgacgaattaccgagtggagtacgctcagttacggagcctcttaactacgtatctaagcagaaacaaaacgtttttgcacaagatttaatgttcaagcaagaactagaaggatcagatatcggtttaaacttcatccactgcgatcaattcattcaacttccgcagcttgaaagcccttcactccctcttaccaaaagaccagtgagcttgacgtcaattacatcattggagaagaataaaaatatctacaaaagacatttaatagaagaggatgtgagcttcaatgcgctaataagtagtggaaataaagataagaagaagaagaaaacatcagtgatgacgacggattggagagcactcgataaatttgttgcttctcaacttatgagccaagaagatggagtttcgggttttggaggtcatcatgaagaagataacaataaaatcggtcattacaataacgaagagagcaataacaagggatcagtagagactgcttcttccacgttattgagtgatagagaagaagagaacagattcatcagtggattattgtgttccaacttggactatgacttatatagggatttacatgtttga

SEQ ID NO: 181504 - DNA, 59 bp, Arabidopsis thaliana landsberg
atgcgtgtttctgttggggggattggattcgaattcgaattacggtttttcgtgagtat

SEQ ID NO: 181505 - DNA, 306 bp, Arabidopsis thaliana landsberg
atgagtacaagaattactgggaaaccacaatgttcttccagaatcaagaactcgaatttgacaggtgcttactagaatcttggtccatttttttttttttttgtttctttagtttttttttccgataaagattaatcttgctttagttggtaattaatgaaaattgttataaattataaaatttaagttggccgatggaggaagccgttttcgggttccggcgagtcgagttcgcagacggagcggcaacgtcggcggcttcttcgaagaacgttgtttccagagaaacagacggcaaaagcttaa

SEQ ID NO: 181506 - DNA, 131 bp, Arabidopsis thaliana landsberg
gagcggcggtggcggctgccaggtcgttccccacatcggcaagcggcggcagcaccgccggaggcaaaggcaagatgttcgggcgcgcgccaaataagagcgacaacaccaaggactacgaaaacctcagg

SEQ ID NO: 181507 - DNA, 1302 bp, Arabidopsis thaliana landsberg
atgggttcaagtaagctaaaacgtgccataggagccgtgaaagatcaaacaagcgtaggattagccaaagtcggtggtcgaagcagttctttaacggaactcgaaatagctgtcgtgaaagcgacgcgacatgatgactatccagcggaggacaagtacattagagagattttatgcctaacttcttactcacgcaattacgtaagcgcttgtgtggcaactctctcgcgacggctcaacaagaccaagaactggtcggttgctctcaaaaccttgattttgatccaacggttgctaacagatggagatagagcctacgagcaagagatcttcttcgcgacgagacgaggaacgagattgcttaacatgtctgatttcagagatgcgagtcagtctgattcgtgggattactctgcttttgttcggacttatgctttgtatttggatgaacgtcttgattaccggatgcaaggaagacgagggaaaaaaaaaagtggtggtggtggtggcggtgatggtgattccggcgaggaagatgatcatcgagggacaagcaccgatattcggtcgaaagctattgtggttaaatctaaaccagtcgcagagatgaaaacagagaaaatcttcaacagagtacaacatttacaacagcttcttgatcggttcttggcttgtcgtccaacaggtaataattaatttccttggaacacacgtttttccactttcggatttcttggttaataagttaggtcttttgcaacaggtaatgcgaagaacaacagagtggtgattgtggctatgtatccgatagtaaaagagagttttcagttatactacaacataacagagatcatgggagtattaatagagcgattcatggaattagacattcatgattccatcaaagtctatgaaatcttctgtcgagtttctaaacagtttgacgagttagatccgttttacggatggtgtaagaacatgggagttgcaagatcttcagagtatccagaattggaaaagattacacagaagaaacttgatctcatggatgagtttataagagataaatcagctttagctgcacaaacaacaaaatcatcatcaaaaaggtctaacaaatctgaggaggaggagagcaaaacagagtatattcaagaaaatcaagaagatttaaactccatcaaagcattaccagcaccggaacagaaagaagaagaggaagaagaagagaaaatggaaacaaagaaagatgttgaagaagtggtttcaagcaagatcaagagggtgatttgctggatttaa

SEQ ID NO: 181508 - DNA, 210 bp, Arabidopsis thaliana landsberg
gtgattcacagactttgaatcaaagactcaccagtcttcctaggaactacacattcacgtcggtgaaccctcaagccccatatctagagtctcatcgaaatcatgtcccaatcggccatcctccaacgatccctacttacaaagactattcacctccaaggatttatagtcggcgaggagcactcccatattggagcctggaaccacttg

SEQ ID NO: 181509 - DNA, 143 bp, Arabidopsis thaliana landsberg
atgagacaattaactattggttgtggtccatccctgtcgctgatccaacaattcgacgagctgtccctgtgtattcttcagacaccagcgtgtatatatggatgtactaggtcccgtgtggcttccaccttcgtcatcttcca

SEQ ID NO: 181510 - DNA, 132 bp, Arabidopsis thaliana landsberg
gttttcctagccgccattctgcgatctgcatggctgttcgcctgttctgcttctgccttctgcgatctgcgcttccgcgatcggccctcaggttacggcacacaacgacgacggcgtctgtcgtccgcttga

SEQ ID NO: 181511 - DNA, 132 bp, Arabidopsis thaliana landsberg
atggagaaaataagctgctttgagacacaaatccgcaggccttattttcatgtaaagccattggatactaatcagctcgacaattggcatgcatatttgagcttcggtgaaacatatggggactttgactgg

SEQ ID NO: 181512 - DNA, 133 bp, Arabidopsis thaliana landsberg
atgaagacaaatggtgcgtacaaagaacccaagctatatataaaatccaattccagaagatgagatcgtagaagaagaaaacgatagtgcagctgaacccgaagaacatgtgtctaatcctagggattcaacg

SEQ ID NO: 181513 - DNA, 300 bp, Arabidopsis thaliana landsberg
agcttgtgcccggcaggctgcaatccgtccggttaacacgtcctgtgctatcgatcatcctggcggatcctctctcgtcccgtcttttgacaacgtatcgatcgattccgtaagagcacatgaggtgaaagaggagtccaagtggaaaatccctcggcttcttccgagatctgtgtccttgtccttagttggcacagactgagggtggcttgagccctagctaccacctctgtgtcacagtcaccagattgttcagaaacaaagattatcagatcacgacattatcagaggacccaatct

SEQ ID NO: 181514 - DNA, 132 bp, Arabidopsis thaliana landsberg
attataagtaaaggacttatgttcagcacaaaattaaaaatgatgcaaccagatttgaatgaaaaagttcgcacaacattaagagcggtgtctgatgatggcagaagactcgctagtaggaaccaaaaatga

SEQ ID NO: 181515 - DNA, 78 bp, Arabidopsis thaliana landsberg
aaaaaatgtgaaatcacgttttggcgggaaaaaacgggaccacgtttttcgcggaaaaatgatgtaatcgcgttttga

SEQ ID NO: 181516 - DNA, 88 bp, Arabidopsis thaliana landsberg
atgatcgacagcccagcgaacggcgaaagcgctttcttcggaaaggtcaacggcgactccgatcttacggcgagcaccggcggttggg

SEQ ID NO: 181517 - DNA, 604 bp, Arabidopsis thaliana landsberg
atggatacgaaggtaaaagtgatgagtactccctatgttacacctccaccacaactctatgcgatctctgaagaaaacgaagcctctttgggagatggaattgttgaatttgatcccactgttattaatattcttggttagtactgagaatttctttatcttgcattgtgatataatcccgaaccagctctgttgaatctatggcttcctcttctttcaatgttaggtgacatggatccatggttgcttccctttaaaccaccagaagatccggattgctacagaaagattgtcaatgattcttattataaggaagcagtgaaatatatgcggcaaactcttcagtccccgccccatgtatctttggctgcattacatccacttgtacaggtaaaacctgagattactatttttgccttcgtggctcataatgtcatcatgttcctcccttaaagctttaatgtctcacactaattagatgtttgttttttccttatcttctgttaattcccttctagattctgttaatcggaggtcatgtagatgaagcgatgaaagtggtcgaggagatgtgcaacaaaatacatgacgtaaaacctttcag

SEQ ID NO: 181518 - DNA, 229 bp, Arabidopsis thaliana landsberg
gtcattttgcgtggtcatccacgacccgctggacgagtcgcggtgggcgcccgggtcgctggtgctcggcatcggcgtctccaagcccggcgacatcgtccggctcctggaggagtgcggccggcggggctgcaccggcctggtgctccgcgcgccggtgcccggcgccccgctgatcgccgaggccgcgcgcaccgccggggtggccagcttcggcttcgcccagggg

SEQ ID NO: 181519 - DNA, 81 bp, Arabidopsis thaliana landsberg
gtcgtagtgattgaggattcgcaacgtgcagatacacagacacgtgatcgtagttattgtcttttatcggataaactttaa

SEQ ID NO: 181520 - DNA, 187 bp, Arabidopsis thaliana landsberg
atcatcaagcaaacaagaacgtgatcagagtccacttggtgtgaattatgataaacaagagtttgatccgttgaagaagaacggtgttgaagttggactcaccatagtagccgttgatgattcgtcgtcctcaggcaaaggtgttcttcaggcaacaaccactcgtgttgctgcagtatcaatgtaa

SEQ ID NO: 181521 - DNA, 334 bp, Arabidopsis thaliana landsberg
atgaccaacttctttcgtcgtcctggggcgcaggacaacgctatatttgataccagctctcttaccccttcagaagctttctatctacagcgggcgcccaccggtagtgcccggccggctacacgctcaagccgcttttcttttaccaggtcgtctaatgtcactacccgatctaattcgcccacacctccatccccagggactacttccatagataaactgtctattcaagatgaaaatacactcaatggggaggccagcctcaagaagaagaaccgtgcgtcaaccggattcagcctgcggggccgtgcagctggatttgttggcacaacag

SEQ ID NO: 181522 - DNA, 147 bp, Arabidopsis thaliana landsberg
gttcgaggtgctttagaaactcttcttggtgctctaacgccaatcgatcatgcaagggcacagaagactgaagtccatgcagctcttatgaactctgacttgctatcccgtgaagctgaaaatatcactcttcttttgagtttgctg

SEQ ID NO: 181523 - DNA, 1063 bp, Arabidopsis thaliana landsberg
atgggcttgcatgaattagagcaatggtgcctaaaggcagatgacgaggtaggctataaagcattaataaccaaatcatgcaaagatgaaaaataagacaaaagagattaacttacataattctgttcttttttgtctcctacaggcaacacgatcaccatgggatgaacttcaacacataaggcaagcagtgatgtttctggtatagcatcgaaccatatctgttggttaaagtacaaaactagtgaacaaaattcgatatttgatatacactatcactctacaggtctcacatcaaaagacacagaaatcattggacgaaatcgcaaaagagatatgcccggtaaagaccttaaaccaaaaatttctgcagagcatatagaaggatcttaatatgacacaattatctattagtggttactcctgaaacactatacagttggatacatgagcaaacgggtgaacgatcttatgaaagtaaaagcatctagagaatgacaagatggcataactaaaccatcctacatttctacttccagtcactgtcccctgatttgttgatttgttgctcaggtactaagcattccacaagtatatcgaatcgggactatgttttgggacgacaaatacggaactcaaggactctcccccgaggtaagtaatggatcaacctaactaactccagaaattctcttcaaacaccatgaaccaggattgtatccaaattacacaaaactaagattgggctcatgatccaacgatttgtgccgataataggtgatcaatcagatgaggaaactaatgacggaagattcagcgaacatgacttacccttctttcttgctagacgtcgattcaaggtacgcaaaaaacaaaattctcgctttcttctcagtttctctccctaattactctcaatgcatgtttcagcattcctttctcagtggaagatgtttcgcaatccttccacggcggtaacattagcctctccgacgtcgatccatcgccgcttctccgccagcgatctgattttcacttcttattccagacattgccggaataa

SEQ ID NO: 181524 - DNA, 466 bp, Arabidopsis thaliana landsberg
atgacgagtcatttcgagtccatggccgaaaaaggcaaagattccgacacacacaggcatcaaacagaaggtggtgggacacagttcgtgtctctctcagacaaggggagtaacatgccggtttctgatgaaggagagggagagacgaagatgaagaggactcagatgcctcactccgttggaaaattcgttactagcagcgattcaggaacagggaagaagaaggatgagaaagaggagcatgagaaggcgtcgctagaggatattcatgggtatagagccaatgctcagcagaagtcaatggatactataaaagcagcagaggaaaggtataacaaggctaaggagagtttgagccatagtggacaagaagctcgtggaggaagaggtgaagaaatggtgggaaaagggcgggacagtggtgtccgtgtttctcacgttggggctgttggtggcggtggtggag

SEQ ID NO: 181525 - DNA, 262 bp, Arabidopsis thaliana landsberg
attggtggtgctggtttgacgaaaggtcttgtagcggcagtggaagaaaggtttgctcgtttcctttaccaaacatttcgttttctaacatccagaaggcacatccaactaaacagagtattttgttcaactaatgtttatgtccctctctcctttgcgtttcagagttcttcacgcgatacctccaactgaagccattgatacagtgcaggttctgccatcaagaacggagccacaattcgtaacttggaaaggaggagcg

SEQ ID NO: 181526 - DNA, 2470 bp, Arabidopsis thaliana landsberg
atgctggcagatcctagagaggtagagatgtttctctaacatgaactctcttttataagactatcaccttcttagaagtttttctcatacaaaggttgtttatctgtaggcacgtgcaaacattagagaaatccatttcttaccattcaatcctgtggacaaacgtactgcaataacgtatattgattccgatggaaaatggtatcgtgctaccaaaggtgctcctgaacaggtatgtattcttagcactaccaaactgactctagttgtaaaaatttagtgaatttttttgtactgtttccatgaaagaaataccatcactaatacaactgcactatattataggttctaaacttgtgtcagcagaaaaatgagattgcgcaaagagtttatgccatcattgatagatttgcagaaaaaggtttgaggtctcttgcggttgcttatcaggtaacatcattgtcctctccctttctctcttgagctggttttatcataagtgtacttttgaagaagaacgttatgatgacattaattactccaattcattgcatcatttaaataattgtttctaggaaattccagagaaaagcaacaacagtcctggaggaccatggaggttctgtggtctgttgccactgtttgatcccccaaggcatgatagcggtgaaaccatccttagagctcttagcctgggagtttgcgttaagatgatcactggtaaatcttaacctttagcttggtaggcttggcccgacagagaaacacatatacccttgtgagtaaacggtaaaactctgggaaaatgaatgataagtttggaaccacatgtaggtgatcaattggcgattgcaaaggagacaggcagacgtcttggaatgggaaccaacatgtatccttcttcctctttgttaggccacaacaatgatgagcatgaagccattccagtggatgagctaattgaaatggcagatggatttgctggagttttccctggtcatattcataacacaaccttagtacctacgaaatttaagatttgctctcatttctaatcccaaaatttttttgtctctcatgttacagaacataagtatgagattgtaaagattttacaagaaatgaagcatgtggttggaatgaccggagatggtgtgaatgatgctcctgctctcaaaaaagctgacatcggaatagctgtcgcagatgcaacagatgctgcaagaagttctgctgacatagtactaactgatcccggcttaagtgtaattatcagtgctgtcttgaccagcagagccattttccagcggatgaggaactatacagtaagtactaaagttatagttatactactatcatatgatacctgatagctaaagaaatgaaaaatcatataatataggatatggatttcaagtagcctgaggacattctcaactagcttatgtttttctctgaattaccgactaatcagtacgaatctgcaggtatatgcagtctctatcaccatacgcatagtggtaaggagcttcatgatacatgatctaactcatgttagttaagttacatcaacttacttgaactttctcttcttgtcattgtttcatgcagcttggttttacacttttagcgttgatatgggaatacgacttcccacctttcatggttctgataatcgcaatactcaatgacggtaatctcttaatcaatagcttcatattgatgtaacctaatttttatcactttcaaacgctatgtttatctcctacgcatcagggactatcatgactatttctaaagatcgagttaggccatctcctacacccgagagttggaagctcaaccagatatttgcgacaggaattgtcattggaacatatctagcattggtcaccgtcctgttttactggatcattgtttctaccaccttcttcgaggtatcttcctatcactcaaagtaagttagattttgcttaccgagaagaatgcataccggtgaccaatctttaatggctgcagaaacacttccatgtaaaatcaattgccaacaacagtgaacaagtgtcatccgcgatgtatctccaagtgagcatcatcagtcaggcactcatatttgtaacacgtagtcgaggctggtcattttttgaacgtcccgggactctcctgatttttgccttcattcttgctcaacttgtacgaattccccatacttcgcattttttccatcacagaatgctatatagcacacataggtcgtgatattgacttgtccatttcatgtacacaggcggctacattaattgctgtgtatgccaacatcagctttgctaaaatcaccggcattggatggagatgggcaggtgttatatggttatacagtctgatattttacatacctctagatgttataaagtttgtctttcactacgcattgagtggagaagcttggaatctcgtattggaccgtaag

SEQ ID NO: 181527 - DNA, 334 bp, Arabidopsis thaliana landsberg
  unsure (1)..(334): unsure at all n locations
atgaaaatggnnnnnnnnnnnnnnnnnnnnnnnnnncacgaattgtcgcgtaccgtcgatcgcaaagtcggagatctgacaaaggatctgaccaagacagtcgatagcaaggtcggagatctgacgcgcaccgtcgaccacaagatcagtgagtcttcgaagtcagtgcaggagtccatgcgcgcccagctttcagaatcttcgaaacttatcagggaagtgactcaaggccttactaagctcgacgaaacaaacagacaagtcgtgtcatttgccgatcaactacaaaatttacaggatatcctgaaaaatccgaagcaccgaaatataatgg

SEQ ID NO: 181528 - DNA, 132 bp, Arabidopsis thaliana landsberg
gcgggcgttgtaataatagtcttccggagtcttcggcttctcgatggccgccgaattcttatccatcgactccaggcgcttgttcagcaaagccagcgcttctttgatttcggcgttgccggcttcgatgcg

SEQ ID NO: 181529 - DNA, 123 bp, Arabidopsis thaliana landsberg
cccggtgggtgcggacctcggaaacagcctcttccagtttcagttcgccaaggaacctaatctactcaaagctttggagaaccaactcttccatttctccaaatcgatggttatcctccgaag

SEQ ID NO: 181530 - DNA, 36 bp, Arabidopsis thaliana landsberg
atgatcggatacttctctgacgttgattaccggtga

SEQ ID NO: 181531 - DNA, 578 bp, Arabidopsis thaliana landsberg
catctgcaacaacaaacttcaacaagcagacacatctatgtactgtaacaagtgcaaagagtataataacgtggggcttatcaggtttgggaactctgaccctccgtcatcaaaatatatgctcataataaattacacagactaaccaaatcattgattccatagctaccgttttgaaatgagagtacgtgatagaaacggagacgtcggaacttttgttgtcctcaacggggaagccaccaaaatagctggaaaaaatgctcgtgatgttttaaatgaatgcattgaggtatacttctctttactacttttcttccttttaaaaactcacacatacaacttcaattatattcactcactctcaggctgcgggtaaagataattacgaaggaataaagaccacaattccagaatgtttaaagcatatcattggctgctcctgcaaattccagatcaaactcacaaaatacaacttcaacacttctcgccaaactatcaccatctcccggatcattgatacccaaatcgcctctcttagtgaattaggtgaagaaaactccgaagatgaaagatgttga

SEQ ID NO: 181532 - DNA, 46 bp, Arabidopsis thaliana landsberg
atggtgcggcgcgagttgacgtcggtgctcatcgcaacccatactc

SEQ ID NO: 181533 - DNA, 2717 bp, Arabidopsis thaliana landsberg
  unsure (1)..(2717): unsure at all n locations
actcctaatcgagaatttcttctgcgtatttcctacatggaaatatataatgaggtgctattatttacctacttttcttctctgctccgttgtctatagtcaattttcaacagtagtggagtgataagaatacgctgctttttaattttccttaaagattactatccttaaggttcaccttatttcaggttgtcaatgatttgttgaatccagcaggacacaatttgaggatcagagaagacaagcaggtgcgtttcagcttcaggttctctttgttgcttttctgttgaaaacatgcgtagtgctactctcactgacttgtaatatctttgttatgattacagtggtcatagaatcccaaaaccttcgcatcatatttttatatattaggaaaccatttttgagctgcctgaaaaaaatacctactccatttttcttgcgaaattttatctctatggggactctgatattacaatgttaatatgtgatccttcgtttagttgatccttttaataatcatttgaactgagtattttataatgagcttgtcatgacttctattgctacaagtgtctttctccaagttaatcacttgaacttatcttttttattgactctagggaacctttgtcgaagggattaaagaagaagttgttttatcccctgctcatgcgctttctcttattgcagctggagaaggtatgtggtgcttccactttcccttttattcaaaggaaaaggtttactttacaaccatacaactccagcaaagactgtttcagtcgttgtatatttattacaaaattgtttatcagaaagtgtactcctccacatgcttgaggctatactgaacgttgaaaagtgtgtttttgtttttctttattgtgatagagtaattctctctcttttttttccagtaaatccctttcattcttaaaccttgtcatgatctagttaattctcgtcatcgtttgcttatcagttaatgcatattgatagagatcttgtcctcatgacagagcaacgacatgttggatccacaaattttaatttgctcagcagccggagccatacaatatttacgttggtatgttaatattctctttgaaatattaaaaactggtatctttgtgcagttgctatatcatttcatcacgtgattacatttatgatattgatggatatacaaaaaatctgagtttattttgtattactattaggttaaaaggtaaaagtcagtagttcttttattcatacaatcgccttattgcttaaaaatggaatactgaagaattatacgtcttttttcagcacaagttgtgtatcatgttcttcttccatatgatttcttctgtttaaggaattactgttctcctttactctaatcgtagttgtttagtcacattaactcatgtagctgtattgtttctgaaaaatgatcaactaatttggatgcagacgatagaaagtagtcccttaggtgacaagagtaaaggtgaagctgtacacctctcacaactggtaagttcatcttgtatccagtgatgatcaatccttttaatatgtttattagttgcattttctgaaaatttaaaaggtgaacatctgatattaactactacccataatttctctcatatctgcagaacctcgttgatctggcaggttccgagagttcaaaggttgaaaccagtggtgtaagacgcaaagaaggatcatatataaataaaagtttgctgacgttagggactgtaagttttttcgtaccacagttttcacttagttaacaataagttttggggtgcagttaaaatccaaggacttctttgacatgtccttttaaagcaggtctgataagaaaattgctttcttttatgttgtatacatattagagcctaaatattaagcacactttctacccctctatattttgagacttgcagattaaacatatagttacatacattactttaggtcttttacattttagatttttagtacttagccagttcaactgtagaatcaccttttcgcatttgcatcattttgcttgctactcttatttccaaattgttcttgaccaaaccttacagttaaaccttacaagtattctcctttgggctgaattttattagttctattgtgaggttataggtgatatcaaagcttacagatgtgagggcttcacatgtaccatacagagactctaagttaaccaggatccttcagtcctcattgagtggtcatgaccgagtatctgtaagtcttgtttaagctgctctcaatcctcgnggtacaataaatataaaatgcacaacatgatctttatagtagtatactttactgattagcatttctctctggatatgatagctcatatgtacagtgacacctgcatcaagcaactctgaagaaacacacaacacattgaagtttgcccatcgtgcaaagcatattgagattcaagccgcacagaacaaggtcttagtttacatctatccttttagcttagtgcatgtctgtactgaagattcattctggatttctaaccttataaaactacagataatcgatgagaaatcattgatcaagaagtaccaatacgagattcgccaactcaaggaggagctggaacagcttanacaaggaattaaaccagtttctcagctaaaggatatcagtggagatgatatcgacattgttctcctgagcagaaa

SEQ ID NO: 181534 - DNA, 314 bp, Arabidopsis thaliana landsberg
atgtgcaagagatcaaaaacaaccttcgtccttgacacaactcatacaacccatctggccattgcaaaggtggggccttgacttgttgggtccattaccaccggcccaagggaacttaagatatgttgtagtggctgtggaatatttttccaaatggattgaggcaaagccttcagccacaataacttcggccaccattcaaaagtttttctggcagaatattgtttgtcgtttcggggtaccaaaggccatcactgtggataatggaacacagttcgaatccgaagctttcagagatttttgtgagcaaattg

SEQ ID NO: 181535 - DNA, 619 bp, Arabidopsis thaliana landsberg
accatgtcgattaatctgccttcgaatcgaacaattggtccgtcaacgcacgcatcttccccaacctctcctttgttactcgctctgtctccgaaaccctagtcttgattccgattctgccctggtgtcggatctaggttttggccctttctctacggtagttgttaatgtccctctaatcggtggagcggctccgcctcagccccgcttcaatttaatgcctccgtcaaactatatcgctggtttgggtcgtggggctgcagggtttactacccgctccgatattggtcctgctcgtgctaatggcgatggagacgctgacgtgaatcacaagtttgatgattttgaagggcatgatgccggattgttcgctaatgccgagagtgatgaccaagacaaagaggctgatgctatttgggacgcaattgataggaggatggattcgaggaggaaagacagaagagaagcgaagctcaagcaagaaatcgagaattacagagcctccaaccctaaagtttctgggcagtttgtggatttgacgagaaagttgcatactttgtctgaggatgaatgggatagtattccagagattgggaattactcgcatagattgtattag

SEQ ID NO: 181536 - DNA, 154 bp, Arabidopsis thaliana landsberg
atgcataagtcatatgagctaataaggacattagagcctcatggcccatttaaaaacaatcaaatcaaggacagttgttctaatttgactcatgtaattcgaaatttcaaattaactcgattaccaacagggaagttgagtatccgtggagacg

SEQ ID NO: 181537 - DNA, 251 bp, Arabidopsis thaliana landsberg
gctcaccctaaggatgttgaactacttaataaacccatagagaactacaagcaaatggaggtcatctttggcaatggcctggccactggcaagtttgccatgggctccagtgagccactgggttctccttcagactttgctgagagctcatttaagtctgatgagaatgttaagggggcagaggatggcagcaagaaggaggtgcctgttagtggtggttctggaagtgggtctgggaaaaaaaggaagag

SEQ ID NO: 181538 - DNA, 606 bp, Arabidopsis thaliana landsberg
atgaattcagtcgtgtcctatacatggtcgaagtcgctggacaacagcagtgggtggtttgagtccgagaatgtaaccggtggaggatcagtcgtgcaaaacttcttcgacccgcgcaatgcctacggagtttcctcctacgacatcaaacattacttctcgtggagcacggtctactcgtttccctttggaaaggggcagaagtggctccagacaggatttgcttcttatattcttggtggatggaaggctaactaccttttccagaagcgctcaggccaacccttcaacctcaatgtaggcggcgatccggcattcatctccggcaataccggatccgtcgcaaactactccaggccaaatgtggtcggcaatcctctacaagggagttgcggttctaccccggttgggcagcgtgggacaaagggctaatgcgtgatcaatccatctgcattcgcagttcctgtggggtcttacggaaacatgggcaagatgccattccgcgtatctgggtacaataacctggacttttcgcaaataaaagagacgtcgctctatgaggacgtacgtcttgaactccgcgccgagtcgttcgatacctataaa

SEQ ID NO: 181539 - DNA, 1056 bp, Arabidopsis thaliana landsberg
tgtctagagattccttataaaccacagtacaatggagggatcatcgtgaatcctgatatgcaaaatggttcccaaggctggtcacagttcgaaaatgcaaaagtcgatttcagagaatttggaggcaataagtttgttgttgccacacagagaaatcaatcttctgacagcgtctcacagaaggtttacttggaaaaaggaattctctacacattctctggtaaaaataattccgtgtttttgtttcttggagcacactctctaaaactatcatctgatgtattttatgttatacttgtagcttggttacaagtaagcacaggaaaagctcctgtgagtgccgttttcaagaagaatggtgaatataagcatgccggttcggttgttgctgaatccaaatgttggtccatgctgaaaggtggcctcactgttgatgaatctggtcctgctgaactcttcgtcgaggtatatctatacacaaacatacgcattttctccattgtttgtctacatgtctgcattttgcaagctgctctttctcaacatatatatgatgattcatatttcattgttcatgtgtagagcgaggacacaacagttgagatttgggttgatagtgtctctttgcaaccattcacacaagacgaatggaacgctcaccaggagcagagcattgacaattcaagaaaaggtcctgtcagaatcagagtcgtcaataacaaaggcgagaagataccaaacgcatccattaccatagaacagaagcgactcggattcccattcgggagcgctgtagcacagaacatacttgggaatcaagcataccaaaactggttcactcaaagattcaccgtgactacattcgaaaacgagatgaaatggtacagcacagaatctgtaagaggcatagagaattacacagtcgcggacgcaatgttgagattcttcaaccagcatggcattgctgtacgtggacacaatgttgtatgggaccacctaagtatcaatctaaatgggttacttctctgtcacgtaacgatctatacaatgcagtaa

SEQ ID NO: 181540 - DNA, 98 bp, Arabidopsis thaliana landsberg
atgggttcaaaaaccctgagtacggagtgtactttcgcaagtcttacccgacaaaggaaaaagacttctcaaggatatgctggcttgtgggattcaag

SEQ ID NO: 181541 - DNA, 76 bp, Arabidopsis thaliana landsberg
gctttttgcacagattccggtgctaaacttccaagatccccccatttggctctcttgcgcgcttccacctcgccgg

SEQ ID NO: 181542 - DNA, 754 bp, Arabidopsis thaliana landsberg
ttgtattttgtggaaccgttgtattgtatcaggaatatggcggtaacgattgttataccagcgacggtcgtgaccctattaagagattttatgaacaggttaatgtgtaactacacatcgtatgttattatttccataagtttttttatcggtaactctcatatttcaactgttttgacaggatgttggcaggggcgccccctcagttgtgtcttctatcctcgaggtgtctggggttttgtttcctactaatattttaattatctcctaattgctataactatctaattcttactttttgttcaattgactcgttctgcacaggattcagatgaggtatatcccctaattgtatatctaatataatattggttacaagttaagttttactttaatatgcttaatcatttaggattttaccactccccctccttcaaaagaggctaagatcttaacccagacatatctcgtcaactgtaattttttttggtaacctaaatatgatttgtcaccttttattaataatgccagttagtatgcaggatgatatgaatgctaacaacgttgatggaatttataggagaagaagtaagcgtctccgtactctatctaccaagctagatggtcgcttcgcgtaggataagaaaaccaaggttttagtgggtcatccatcccttgttgtcaataaaggcaacgaccttgtcgacacagaagaacgatttcaaaactccatgaagaaacttaaggcgataag

SEQ ID NO: 181543 - DNA, 255 bp, Arabidopsis thaliana landsberg
gctgcaaaatcaaggccttgtggcaaaaagggtataatcaacaacttggtcgtgattatacagacactttcagtcctgtgatcaagtcgaccaccttacgtcttgttcttgatgttgcggtaacccgatcgtggccaatccaacaattagacgtcaacaacgcctttcttcaaggcaccttgaaagaagaagtttacatggagcaacctcctgggtttattgatcccgacaatccatcattcgtttgtcgactac

SEQ ID NO: 181544 - DNA, 297 bp, Arabidopsis thaliana landsberg
atgggttatgagagtttacatgagaaagaccaagttctatttctcctcattggagtcttcttgaattatgcacatgttgatcatgtgacatccatgctggcaaaaactaacttggacgttagtcttgggttgaaaaacctagcgaaaaaatatctcatacaacgtgaaagtagtatagtggtaatgcaccatttgcttcaagtaatggctacacaagtcatttccaaacaagaacgttccaaacgccagattttagtcgatgccaatgaaattcgttatgtgctagaaatggcagaa

SEQ ID NO: 181545 - DNA, 183 bp, Arabidopsis thaliana landsberg
atgggcacaggtctggacagcctgttccagagaattcaagagtcaaagattgcgattgtggtcatttcaagcaggtacatggagtcacaatggtgcttacatgagctgctaaagatcaaagagtgtgtggaggcaggaactttggtggtatttccagtgttctacaaggtggccgttaaaatg

SEQ ID NO: 181546 - DNA, 265 bp, Arabidopsis thaliana landsberg
atgctgcaaagagacgccgtgatcgatgttgatgaatctgagataccgcccattccgttcgtccttgctttcaacgacctcacctataacgtcactcttcaacagcgttttggtcttcgtttcggacatagccctgctaagataaagaaactgctcaatggtatcactggagaggctaaagaaggagagatcctagccattcttggtgcaagcggagctggaaaatcaacgcttattgatgcattagcaggacaaatagccgaag

SEQ ID NO: 181547 - DNA, 1280 bp, Arabidopsis thaliana landsberg
atggcaaagtgggtatggattcttggatcgtttgcagcttctttagatcttaaagcaaagatctttgtggtcagaagaggaaccagtttctcaggtgtctacatggaatctgtagtgggtgatgaaaaagaagatggaagaggcgatttaagcgttgagttcgtcacaatgccggggtttaaaatcggagattctgtatttaaatctcaggtttatctttctaaaatataagagtaaaaacaccactctcactctgcagatttgattatttcaatagtttcatgtaaagagctctctgctttttaacaagttttgtaggtaagtaaaagaattctttgttcaaggatcatttggtttgtattattgttcacattcaagttttggtctatagttaataaatccaagtttcttcgttatgtgaaactaaaaaacatacaatcttttatagttttcacacatgagctctccataaaatctgtagacaagttcagtgaagacttgaatgtgtatttataaataaatcgtcataattatccttcataattttacttttatttgatctaaaaaaaaacacatattcactatataatttagaatttatacgcaagagatttaaaattataaaaaagcaaaaattccatatttatcaaatccatacgattttagtctactttgcatccccgtaccaggctgggtcaacgttttgaacccttgcaccggagaattcttaagattcccttccggcccaaatccagtagataccagtcgctatgataatcatcgcgtaattgaaggagcatcttggttggcttattaccctggatattgggccatgggatttggtaaagacaaagttaatggaacctataaaatagtgaggatgttttatgatactaaccaattcgaaatccatgatttaacaattggtgaatggcggacaatgccgaatccgcctccttactatgtccaaccaaatcatcattcggccttttgtgaatgggtccatctactggtacgacctagttactggttacaagattctagctttggatcttcacactgaacagttccgtgatgtcccaagaccgcatggatcacctacactcgccccactagccaaccttgaagatcgtctagccatggtctgtgactatgagccatctcctcattggaaagtagccatatggaccatggatacacaagaagagacgtggactaaaagtctaaaacttacaaaatacgtttactccctggatatctttgccccaactattcgatga

SEQ ID NO: 181548 - DNA, 320 bp, Arabidopsis thaliana landsberg
tcatatcggagcttatgcatttagaaggattgcagacaaaatccgttgtctttcgaagaccaggaagagcaacgggaatgaagcggttgaaacaggacgtgaataaaatagagagacatcatttgtatctcctgactctccaaatcattttattttcttcggaaggtaatcacaaattcttaactcttcttttacaattgcagttctgtctatttgactttgtatacattgatcacattttttgttttcgtgattcagttatcagatatgtccaagctccaagcttacgatatagcttccatcaaaatggagtccataag

SEQ ID NO: 181549 - DNA, 273 bp, Arabidopsis thaliana landsberg
atgccgctagccccagtaaggccaaagtgatccgaggatggcgcgccggcgaatgtttagaatatcggccgccataaacggcaaatctccctctccattcggatctgtatctcggcccgttatgtacaatccgccgcgcaacacgagattcgtgaacagacggccatcgtgaagctttacgtccacccaatgcacgtccatcttcatttccggtccgagcttcggagtcaaatgcctgggaacttcgatcttagccataagagaattcactga

SEQ ID NO: 181550 - DNA, 748 bp, Arabidopsis thaliana landsberg
atggccggaccatcagggtacaaccctgaacacttcggccccatcacggaccgtccggtacatcacgccggaccgtccggatatgttgcggactgtccgccgtcgtacgccggaccgtccagatatggcatgaaccgaccaacgtattacgctggaccatccgactctacacgagtccacgcgcagactgcccaagtcgcgccatatatggtcgatccgtccgggtacagccctggaccattcggcccgatcacggaccgtccagttctttatgacagacggtctgggtatgagactacccaggtagcaccatatacggctggacaatctggatatacttcggaccatttggccaggtcacggaccatccgccttttacgccggaccgtctggatatgcgtacgcagagccgagacgtgcgcagtacgcacaatttccacattcatcgcaacaacattatgtgccccaccagcaacacattataatcataccataccacctcatggacatagggctgaatactgttcggccacaagagagcctgagaggtatagggcaggagctggtgacattaataggacacctaacacacacatcaaacatccctgggaggaaagtcgacagagtgatgtcaggcaacctgagatttccacccacaaactcaatggatggtcgccagacatggcggagaggatcagagacgaggtagccgggatgttcagggacaaactcggtgttagtgtgtcag

SEQ ID NO: 181551 - DNA, 78 bp, Arabidopsis thaliana landsberg
attgctaatgatgctattgacgaagctgtcgacaagctgctgaacaaagctaccgacaaagtcctaaaggaagaatga

SEQ ID NO: 181552 - DNA, 1891 bp, Arabidopsis thaliana landsberg
atgttatctcttcgaaacctcactactagcttcgtcgctcttccatctcgatctaagccgtcgtcgtcgccgtctttgcgtcgtcggttagttcgttgtcgacttacggaggcggcaactttttcacctattgatgtagtttctggagaatcggaaagagcggttggtagcttaactgagcttaaaaacggcggtggctggaaggtggaagatgagcttccctcggcggaagatggaggtgaaggaggagtagaagatgacgattcggaggaggaggaggggatttcgagtattcatgttcctcgtgagaaatacatcaatgtctccaagtctgatctcgttaatggtattgtaacgaagcttctcgattctcaagacggaggagacgctgatatcttcctcctcctttcctcgtaagctaattataaatctcctaaactaacgtgaatttgtttattggagtctctcttgagctgtttttggaactctttaggtgcttagactctatccttcacgcggagcataagaggattttagagcagatgagagccgatttcgtcgctactcagtccctagaggaggtaaagactggtggtgattcatcgggtgatgaagaaagttcaacttcagatggagaaattgactcagaggaggaacttaagaactctgaacctaggagtgttaatggatacgaaggtttatcattccctttggctgatggtttcgacatttggaactttttaatttcctctggcaaacatgcaaagaaacgttccgctgaaaggtattagaacctatcactgaagtctttcattgatagaagatttgagattggtgttttgaaaatctgaatataacttgacaatactctaatgcagtgtaatggctgcaacccggttccagcgttctttcattcagctcctagacaatgccggttttgaagagctttcagctagggatttggcattgacctcggctcttaacacggattaccttcttactttgcctgtatatgttgattggaagaaggcgtcagagtccaatgctattgttttcaggtaatttttatatcttttgatgcactactaaaatgtgctatctagttctgtacggaaaatctgcttacgaatttcatcttctttacaggcgtggatttgcaactgagaaggagaagggtttgttacttgtggagaagctagactatatccagtctaaagttctacaagtaatcttctctactattgcaaaacccttgagaaaagttggaaaattgataaacaaggtatgatccctatttagtgaggcaaatactatgttatatgaccattgcatacatgcagttaagtgtaataaaggtaacgtacagacaatcaaattctcggataatcaaatctatctcgttcatctgaataacattttttcttcaaatttgataaacaggcgttaagtgaggcttctcaaactcaagaaattcaagatttatcagagggaatgaaagtttggctcaaggacctatccctttttaaggaatcatatcttgaccaaacttctgataatttcttgaaagatggcttccttccagattctgtcctccccatgcagttagcagcacaaagggcggtcagtcgatatgaggggcttctgacacctgttggtcctcgcgcaaagctcttcagaaagttgcttggatggattggtttcatttctcgtgattatgaaacaccatctcagctagctaatgatagtagttcatctgaaccttatttaaggtgcgtggcctttttctcactcatcattgccgttgtgttttagtctctatttgttgaaggtgaagaatctctatgtcaatatcagatatgtttttcatggatttgattgcccgaacgaacct

SEQ ID NO: 181553 - DNA, 125 bp, Arabidopsis thaliana landsberg
ccacgaacgaagccgctgccgccgtagacattgagattgaaactaactaccgtggaatcacaaagtttctggattttgaaatggagaaacacgatttgaagaagaagaagaagaagaaggaataa

SEQ ID NO: 181554 - DNA, 125 bp, Arabidopsis thaliana landsberg
cattccctgaaggtagatatgtacaaggcgatggtatctcaaacctcctccttgacacaaggcgatggactcgaatcataaccagaagtggccataggagctgttgtaggatctacgacaagtga

SEQ ID NO: 181555 - DNA, 388 bp, Arabidopsis thaliana landsberg
atgggcgttaccagcaatattgcagttaaggccaacggaagcttttttattccatcgggtaaagacagtgtgaataatggttcgggtaaaataatagaaattggcggcggttattttatgccgattaaccaagattttgtttttgaaacttatgctattataggcttcggaaatatgaaaaaccatttcgagccggatgggaaaaccaatccgcaaaccattggaaatatttctgcaaatatgataagatatggcatacagcccacttttggttataaatcaaaattttttgaagcagcaatttcctcgagatttgtaaatttaaattacagtaatatcaacggcgatctgatctacgaaggcgataatcagattgattatttacagc

SEQ ID NO: 181556 - DNA, 124 bp, Arabidopsis thaliana landsberg
aagaggcttatttgttgctttttctgccctcgtcttcgacataactggtcttcacgatttgaccgtgacagcttattaaacgtctttgagaataacgacgatttaaatgcaatgtttttatttg

SEQ ID NO: 181557 - DNA, 255 bp, Arabidopsis thaliana landsberg
aaaaagcattgaagctccttatcgaaaaatctgcaaaccgtgacaaaggtacttaaaaattcatgtttttggatatgttgcatgttttttgcatttataaatccaaagtttttagattctcttctttcatcttattttgagtgttgggatttgctttctgaaacatattcagactctcaagaactgaaacctggcaccgtgattactgggatcatcgatgggaaattcgaaagtggttatcttataagcacaaag

SEQ ID NO: 181558 - DNA, 1481 bp, Arabidopsis thaliana landsberg
  unsure (1)..(1481): unsure at all n locations
ttaacttggctgagccatcactccgggagaatgatcttgacttaggaaatgagtcccttgatgatggctctcttctgacagctttagaaaagaacaggcaatgggagcaagcaagaaactgggccaagcaacttgaaaccattggtgccacttggacatcctctgtacatcatgttactgaaacacaggtaagaaaacttcttgacgcttatcttatacttgaactgccagaaagtttctggcaatttggattctgaaggcctagcaactttaagaaaatcatggtcttgagaccattgaccagtttaggtatttctgggtaatttcccacgctgtttttctttgtctcttgctgacgagttctctttcactgcatgttggttatacactgtcacatgtgaattgctttgtagaggttcttagattgcagttgtgtaggaaatatgtgatatttacgttttctttgtatttaaaaattatctgcttctttattgagcccgaagactagcttccttgaatgcccaatcttaataaatatatgtatctgctttacctgtaggcagaatccatggttgcagaatggaaagaattcctttgggatgttccagaagagagaatcgcattgtggggtcactgccaaactctgttcatcagatactctttccctgctttacaggtgacttttctgtttgcctcacttgtaaccagtttatgtgaaagcctgttattgatacnnnnnnnnnnnnnnnnnnttcttttgcaggcaggtttatttttccttaggcatgcagaagtggtggagaaagatcttcctgcaagagagatctatgagctgttactgctatcccttcagtggctaagtgggctaacaactctgtcgcacccgtaagtgatcttgcaccacaatatgtaatcatttttactaggtttatgacttttattttaccaataccagggtttatcctttgcatcttctccgagaaatcgagactagggtatggttactggctgtagaagcagaatcacatgtgaaaaatgtcggagcatttagtccgagtagtatcggaaaagacatggtgaatggatatagttcaaatcttatagatcgaactgcaagtatcataacaaaaatggacagccatatttcttcagcaacgaaaaatagaattggagaaaaacatgacgccagggccgctggccaaggaaatcaaaggaaccaagacacgagcacttcaatatttggtgctagcactaagcccaagaggagagcaaaaggaaatgtcccacaaataagacattttgtggattcttcagataggaatactgactttgaagattcttcatctcttataaacatcaaaagcgagttccagcttcaagaggagagcacgggtttggaaatatccttatcgaagtgggaagaaagtatagaacctgcagagttggaaagagctgttctgtccttactggagttcggacaa

SEQ ID NO: 181559 - DNA, 562 bp, Arabidopsis thaliana landsberg
atgtctcatccaatgccaagtctcgtcgttcaaaaacatctgaacgaacatgtagcccgggaaaaattttctcgatttggtctgtttttgacctttgacgagctcgaccacgttttcagaggggatcaggatgtcgccgaagaggttttccatcttcgaagtcttgatcttctcttcgatggcttttttcgccgtcgcttcgcaaccggtttggacattcacgatgtaccatttcttatccatgttcatggtctacctcagaatatgattgatgaagaaggccgagaaaaggtcgaaagacgcaatgatcgcgctggagacgagaaccatgatcacaacgacaatcgtcatggcggtcacatctttgcgcgaggggaaaacgactttacgcacttcagacacaacctcttcgccccagacgagaatcttaggattgaactgaaggagggcaaaagtgaccagcgcaaacgcgatgggcagtccatggcgagccagatccgagtccgtcgctcgcgcgataacaccaaaagcaccggcaaaagccttgatcaacaaatgcatg

SEQ ID NO: 181560 - DNA, 221 bp, Arabidopsis thaliana landsberg
atgccccactccgtcctccaggtggccatcttcgtccacctctgcgagatgttcgtaggtgtgccccctgcacttctctcttccgctacttcttcgtgctggtctagtccgggaagactagggacaacattggtgcctactacttccgtcgtctacatccccacttcggcggcgcgaggtgggaaaattggcgcaacgaatgggtgattgccagctgttga

SEQ ID NO: 181561 - DNA, 3927 bp, Arabidopsis thaliana landsberg
atgaaatgggcaacattgcttagggacatcaaggagaaggttggattagctcaatcctctgactccgacccctttcccgttggcctaactgctccgccctgttcttcttcttcttcctcttctccttcttttacttacccctgctcttcttctcttcatcacttcaacttctctccttcaaggtaatttcttcttcttttctcttctgcttttgcttcatcttgttccgatgttgcgcatcgttgctgctagttatagctttgcttttttatgtttgtttggggaccagagtttagattgctttattagtgatcgacaccaaccaagtttcttttagattgctttattgcaacatttgtggtgctacgttttttgtgataagattgataaatgagagtcaaaggctgctgctaactcaattgaaacaaaaatatagtctttgaagctgcaacacttttcaattggattctctaattttgttgactgatcgctcttgttgttgttgtaaaactattgttgatcctctctttactcctctccaaagcagagataaccatgagttggagctggacttcaagagattatgggaagagtttcgttcatctagttctgaaaaggtacttactttgataatccatactcttgcacatgcgttagtgaacgccttacctttattcttggaacaatatctcttcttgtattttctacactggatgggcttacaaaaggctagaaatttattagtgctaatcgttcatatgtcatgcaggagaaggaggccgccttgaatttgaccgtcgatatattttgtagattagtgaagcggcacgctaatgtagatcagttagttactatgtaagctattcctaactcgttttccctttttggttggatatacattgaattggcgtttgttgtcacatgatttgaatttttatggtggaaaatgcgtttctcaacctgtatgttctcccctgtctagctagtcttcttccatacctcatattttatccttgtaggtcagacatggtataatcaccaatttgagaaatttattttaatcgcaggttagtagaaacacatatattctcctttgtcattgggagagcatttgtgacagatattgaaaagttgaagatcggcagcaagacaaggtcactgaatgtagagaaagtattaaggttcttttcagatgtcaccaaggtttgccttttctttctgaatgtgcatcttgacatgtcaccctctcttctctatttttaatccatgatttcttcctacaggagggatttagtcctggtgcaaacctcttaactgctgttgaagtacttgtatctggggtacattttcgactttttcctgtgtctttcatcttactcactccataaaatcttgcaaagctcaatttcttatcgtccaggatccttactctttgatggttttatgccttatattgtgttgcctcttatgtgttcttttcagcctatcgacaaacaatcactactggattctgggatattctgttgtctaatacacgttctcattgcacttctagcatatgatgaactaagcaaaagtaaaataactggtgacttagaagttgtatcagcggaaaaagatgctggatacatagttctccagactagacgacttgaggttctgtttcaattgttttttttccaaatcataatacgattagatatgttattcgacattgttttgagctacatatgacaaccaagtttatattacacaaatgctttatcagcttaataaataataaatactttgtgccccttcattcgtgtaggtggagggtagtgttgttcatatcatgaaagcattagcaagcaatccttctgctgctcagagtttgattgaagatgactctcttgagtcgcttttcaatatggttgccaatggctccattacagttttttctcagtataaagaaggtctagttcccctccataacatacaacttcacagacatgcaatgcaagtaatttttgcgcatctattttagagcatcatgctatgaaatggaaatattccgtgaacggctttctagatggacaaattaaaactaggattgaataacctgatgcttatactttcatttggcaccctatcgtgtctcttccagatccttggacttctactagtcaatgacaatgggagcacagcaagatacatacgcaagcaccatctggtacgccagtgaattatgcagactgcctgagtgtagtatattgagtctcatgcatacttttaagctgaccgtgggtatagtttattctttttgctaatgttgaaactatgtgagatttccgtgataaagaacgtggttatcaggaaacttatgttgatttcaggatagaagcaaattataattaaatgttgtatgcttatgttttagtttcatcagaagcatagtgttgcaaaatgataattgcaacaagtcattgaaaaatatattctaaatttttgagttctcgtgcagataaaggtgctcttgatggctgtcaaagaatttgatccaagttgtggtgactcagcctacactatgggcattgtggacttgttacttgaatgtgtagaactatcgtacagacctggtaaatgtagtctacatagctctaaatatgttatgtccgtatgaaagaatgctgcgtgagagtagaacattcagtagtcacattatatatgtggacatgtaagctaaagctgttctgattatggctactaatctttttcatatttgactttgtagaggctggtggtgttaggctccgggaggacatacgtaatgcacacggttaccactttcttgttcagtttgccctggttctatcttccttgccaaaaaatccgatttttgtgtccagtaatcatgatagtggttccgatgaccctgaagtgtttcatgatggagaaaatacaaacagtacggaaaatgctgatttttcatcacaaaactttgctccatcgttgtcaagattgcttgatgtcctcgtcaccctggctcagactggtccagctgagccatctgtagggagggcctcacggtcatcccaaacgaagccaactgggcatagcagaagtcgaacttcatctgttgacagtatatacgatgagacatgggaacagggaagtggtaaagttaaagacctggaagctgttcaaatgctgcaagatatcttcctgaaggcagagaataaggatcttcaggcagaagtattaaatagaatgttcaagatattctcgagccacgtggaaaactatagattatgtcaggaattaagaaccgttccattgcttgtcctcaatatggctggttttccttcctcgctgcaagatataattctcaaaattcttgaatatgctgtcacagttgtgaattgtgttccagagcaagaattgttgtcactttgttgcttattgcaacagccaattacatctcagttgaagcataccatactttctttctttgtgaagctcatatcttttgatcaacaatataagaaagtcctacgtgaagttggtgttttggaagtcttacaggatgatttgaagcagcacaagcttcttattggtccagatcagtatagtggagtctctagtcattcagatcggaagcctagctcaggtagcttcagaaagaacttagatactaaagatgccatcatctcatcaccaaagttgatggaatctgggtcaggaaagttacctgtttttgaagttgacaacactattactgttggttgggattgtttgatctctttgttaaagaaagctgaggctaatcagtcatcttttcgtgcggccaatggagtggcgattattcttcctttcttgatatctgatgcccatcgaagtggcgttttgaggatcttatcatgtctaatcacagaagacactaaacag

SEQ ID NO: 181562 - DNA, 853 bp, Arabidopsis thaliana landsberg
atgtctttgtgcaagcttatcagaaaacgtgaagatgtttaccggattatcaaaatttatgctgcaaagggagaatcgatttctccagaagctaaatgttacctacagtgtctggtaaggaaaattgaatcatgtgcttctcttatgctcttaaggtttttcactgtctcagacattactatatcacattctttctgcttatgcaatctagtgccttaaccataaacacattctaacaactgagattatttagttcatctatcttccttagcatatttgttatcatttctaatttctccaccacaattctagattttgttaggtccatggctttgtactattgattttctttacttgtgcaatggaaagtgatttaccagcctcaaattctttaataacatgtccacttgcgaatgagatcattacttttttttctacgtatataacaagtctttaaaggtatcctcatggactatcaattagcactcttataagagttggaccagataattttgctttattagcttcattcagttactctagaagaaagcagttgggataatgagcttctttttcgtagctcatttgaaagagtggttttgcagacttctgttcactttactaagcagtgtgaattgaaccgaattattgatttctgttttatcagtgacaggttagagactttgaggacaacggtctgaaccttactgcaataaaaagagaggaagttgagagactaaaatatgaaattgatgagcttagcttgcgatacattcacaatttaaatgaagatagttcttgtgtcttttttactgaggatgagcttgctggtttgcctctagaattccttcag

SEQ ID NO: 181563 - DNA, 780 bp, Arabidopsis thaliana landsberg
atgatattgaatctggaatcttggcttgtcattgatcctgtgatgtatagggtatgtgttcttaggattggaaactttgcttgcaaatgatggtcttgatcaagttttatgtaattggttctctttggtattaagaactatgatatagtagaggagtatttagactttgaatcagtaaaactttttatatgttacttgttctagcccctaggatgtagtaagtatcagtaggttctgctagtgttcacctaatacaaattttaacatcagccttgttggattttgagttctagaacttgatatctctctagtgaaagcaaaacatcatggattttagacttgatggtagttttgcttctatcttatgctctagtgattctctttgatgagctttagtgttgttctcttgttatgtcgagtgaactttgtgtatgtttctttgcagttcctaacaaaggtaatggaactgatcttgagaactactcatggatccagaatctccaggaggttacagttaacattccagtgcctactgggactaaagcacggactgttgtatgtgagattaagaaaaaccgtctcaaggttggtctcaaaggccaggatccaatcgtcgatgtaagtttgttcctctgctattgtatcataaatctattccatttccatcctaatacccttctagtagtcttactaaaatttgttaacttctcataattatagggggagctctaccgatctgtgaagccgatgactgctactggaatatcggtatatgcctaa

SEQ ID NO: 181564 - DNA, 786 bp, Arabidopsis thaliana landsberg
atgccagatctgacagaagaagataccacctttggcatgtacagcatcaacgattggcttccatgcctccacatgctctttagtccatatcccaggagtatcttaatatcttcaagatcaattcacacacatgtggtaaggatcagatcaaaaacccacaaataaaaacgtaaactttaatcaaaagaaagggtttttgagttacccttgagctgtatctgaaactccagtggcttcagtgatgagaaaacctcctggagtcgttctctgagagtaatatatggcagcgtgaggctgaggaacgtttccgtacgatctctgtctcgtcaatggtgctagaacaaccctatgggaaagattgaatcttcccatcttatagggagtgagaagaggtacactctgttttgcttctccgttttccatttcttttgtaaaaaactgttgatgaatttagatttctctgcaaacactttgaagattttccctgaattgtggaggataatggatatatctgcgcatatttatacacattgattgatcagagaatttaggaaggcaagtgtttatttcgccttaagggacgtggtcgtcattgacgacgtatgtgtggacctccccaagtccatccacttggaaattatttatttcttcatgatgacgtattcattgacgacattagagagcttaaccactttgaacttaacctatattcctttctttgttccttcctatcatctacagttccgattcgactttgtgattcattggcgcttatacagaacataa

SEQ ID NO: 181565 - DNA, 358 bp, Arabidopsis thaliana landsberg
ttttcgattgcagcgatcaatgatacggagtccacagagaagtgggaacctttagctcctagcaaagaagctcaggttttcttctgattcagggcttctttcttctcaatttggtataaagaagttagattagctcattgttgaaaaatatattgaactgttttttttttaaaattgccctcttcaggagtttcatctgtcacaaacatatcatgatggtcttctcaagctgcaagctaaagactatgacaaggctcgggagctgctagaatctatccttaaagatcctattataaccaactccaaagtaaaatcatcttcttcacttactctgatgatttctttggatgatgaatga

SEQ ID NO: 181566 - DNA, 327 bp, Arabidopsis thaliana landsberg
atgaagttcaagaaagctcgaatggatttctctgagaatgaagatgaagatatagggaaatgggagtctgaaatgactcaagaacgtgaactgtcagattatgatggttgggatgatgatgatggagaaacagataaggttgcgctaagctcaaatccttcgtttagcggggaagacaatgattatgaaagctatgaagagactggtgataacaaagcaggtgatgatatgttggacaaaactaaagatgcagatgttgagtttgaaagcatggtttatgagaaaactggttgcgaaaccgcaaaacaagaaagctcgttcatggag

SEQ ID NO: 181567 - DNA, 198 bp, Arabidopsis thaliana landsberg
atgggtcggcctgtcgcgctcgatcgcatcgaggatcgcgcccgcgtcgaagccgtcgtgcagcaggatggtcgcgcctttcgccatcagcatcagcccgaaggccccggcggcatgggttatcggcggcgccgcgagatagcgggcatggtcctcgaccggcagcgcgctatgaaacaggcgaccatcgtcgtccag

SEQ ID NO: 181568 - DNA, 1975 bp, Arabidopsis thaliana landsberg
atggctacgggtatggcggtagatacggtaggcgagttaggctttccgtactggaacccaatccgacgaagatttcctccggattcgccgttctttgcatctggaaatgtcgagcgcgagctacttgctaaacaggtactccttatggaatctgaatcgatcgaatctgacgtaatgcttttcttagggaataaacaatctacatgatcaattttcagtaaaatcggtttcttgtctagacactctcgttaatggtccacttgaatacttgatgatgatattcgtgttagcatagctcaaatcgaagcggttctgagattttgaggtcgaattatttctttgtggtagtatccagaaacgatttttggggaattcattttcttagtgatgataactgttcggttgctttcgatctgtttggttattctgtaacagcggatttttcattttgaagaagtcttgtaattaggtctgctttgtcaatttggattaaacgattgtttcattctccttctccatgtagttatatgatgcttagtaatcgttttataagtattatgctgtagattgtttatcatctacaaatatttatgctcgcaagagttgagtcataaaggaggattttaatttacaggtgacattggacttcacagaagatgaaatcaaccatctgcatttatttgtggacattgacaccaggtatttgtccttcttcacggatgagattttttttttgttgcggactgttttctgatagtaaatgaaaacaattcagtcaactatggcaatgattataatttttagattagattattgcttacaagagtttcatgtgttttacattggtttttgatgtgttattctcttgattggtatactgaagctaagaatctgtactgttatttttgtttttttgtcttggtgaatctggtttggtgtcaatgccatttatcctatttctgattgtttactgtgcagttcacatatgtgttggtagtgcgtgtaagaattctagctaatagtaaccaaatggctatgaatttgatcactattatctatgtagttttctttcaatatccacatttttaagtggcaatcagtaatatggcattgtgtcactgatcaaatttatgtagactagtttcaattccaaatttggtccacaattatctacgaaatttgatggtcatgagtttgactattttgagcagaagaatctcgtgtcccattgttggctgtcctgaacgcctgaaatctttggaccattttgaagatcactataatgcacggcacactgcctcttgttcagtgtgctcaagggtctaccctacttctcgcttactaagtattcacatatccgaagcacacgactctttctttcaagctaaagtttctcggggttatgacatggtatgctttatatactctttatctctttgtccaaatattaagtgcgttttgaggcagagctcttactgttagctagtgactgtgataccactcctgccatggatctctttaaagtcacatcatatgctaattcttccttctttctgctctcattaacatctttatgcagtatgagtgccttgtggaagggtgtggattgaagttcaagacctacaaagcccggcatcgacacttgattgacaaacacaagttcccaacgacatttgaattcttcaagaagacccaactctcaaagaagcgtagagagaaacttcaaaggcaacatgtatcaaagctgaaacatgaagaagacaaagaagctgcttcgtcagatgccatggaagtagaagacaaaggcagcttagacggtcttgtttcagcactgtcctcgctaactacctcagacacaactccttcgaatgtcagcttcggtcgacgccatggtcgtgggctgacctttgttccacggtctgttcatagagagaaacggaccgaatcttcgtctgcaccaggaccaactaattag

SEQ ID NO: 181569 - DNA, 418 bp, Arabidopsis thaliana landsberg
ttttaccgaaaccgttaaagagaaaaacacggacgtgcaaactctcttgtcgatcggtggtaaagatgcagacaaagctgtgttagcgtccatggcaagtaacaccaaaaaccggaaagcgttcattgattcctcgatcgatatcgctaggaagaaggatttctacggcctcgacctagcttgggagtatccaagcaatgacgtggagatgaccaactttgggaaactcctggaagaatggcgagcggcggttgtggaagagtctgacaaaactaatcaactgcctttgctcttgacggctgcggtttactactccccgcaatacgatggtgtggagtacccggtaaaagccattgccgacaatttggattttgttaacataatggcctacgatttttatggaccggattggtcgccg

SEQ ID NO: 181570 - DNA, 434 bp, Arabidopsis thaliana landsberg
  unsure (1)..(434): unsure at all n locations
atgttcgtcgataaccttttcggcatcggttatagctacgtggacacgggcagctacgtgcgcgagctggacgagatggccgcgcaattcgtcgtgttcctagagaagtggtacgccatgttcccggaatacgaacatgacgatgtaagaaacgccagagatccttggagacgcctacagactaaacggctgaccnnnnnnnnnnnnnnnnnnnnnnnnnnnnnnnnnnnnnnnnnnnnnnnnnnnnnnnnnnnnnnnnnnnnnnnnnnnnnnnncggaacaagctgccagcgaccaagcaccagtggaatttgaagggcctgctgatcggcaacggctggatctctcccccggaacaatacgacgcgtacctcgcgctggcctacgagaagggcctcatcaccaagggatccgaggtagccaatgcactcgag

SEQ ID NO: 181571 - DNA, 385 bp, Arabidopsis thaliana landsberg
atggcgactttcgccggaaaggccttccacacggcacgttgggactacggatacaccggcggcgctcccggcgcccctctcaccgcgctcgccgacaaggctgtcgcactgatcggcaccggcgccagcggactgcaggtcctccccccgctggccgaggctgcgcggcaggtattcgtgttccagcgcaccccctcggcgatcggagcacgagacaatcggccgaccgaccccgattttcggcacggtctggcgcccggttggcagaagcggcggatggacaattttcaatcaatcatgctgggccggccggtggatacggacctgaccggcgacggatggacgaaacactatgccgcggtgcagaatccaccgcggatcccgg

SEQ ID NO: 181572 - DNA, 809 bp, Arabidopsis thaliana landsberg
atggtggttttgccacagccagtcactttagataaccacatctccctaatccccacatacaaaccggttccggttctcacttcccattcaatccccgtcgtcaacctagccgatccggaagcgaaaacccgaatcgtaaaagcctgcgaggagttcgggttcttcaaggtcgtaaaccacggagtccgacccgaactcatgactcggttagagcaggaggctattggcttcttcggcttgcctcagtctcttaaaaaccgggccggtccacctgaaccgtacggttatggtaataaacggattggaccaaacggtgacgttggttggattgagtatctcctcctcaatgctaatcctcagctctcctctcctaaaacctccgccgttttccgtcaaacccctcaaattttccggtaatctcaaaaaacaacgttacatcacttattttcacttaagatactgttaaaaacaaatctttgttctaaataaatcatcactccttttctttatacatttcaagaaacagagcactctgttttgtttttttcatcttctagctagtactacttttttcttcattgaaacaatctgacagttgtgagtaaacaaatataaacagtgagtcggtggaggagtacatgaaggagattaaggaagtgtcgtacaaggtgttggagatggttgccgaagaactagggatagagccaagggacactctgagtaaaatgctgagagatgagaagagtgactcgtgcctgagactaaaccattatccggcggcggaggaagaggcggagaagatggtgaag

SEQ ID NO: 181573 - DNA, 727 bp, Arabidopsis thaliana landsberg
  unsure (1)..(727): unsure at all n locations
atggaggatgtgatcgaggatctaaaatcaaaagttttgaaggctgaaaacagggccgacattaccgaagagaagttgatcatggtatctgagtctaacgcagaggtcaacgaagaactgaaattctttaagggtagattgaaagaaggggagaaatatttacagcaagcagaagaaagaaaattgcgaaccgccaaagatatcggggtacataacaagatcatgaaaaaactggtcatgcaactagctgctgaacgagaacgacttcataaacaggtattaccatattcgnnnnnnnnnnnnnnnnnnnnnnnnnnnnnncttgtagcttcatcatcatcacagtggattcttagatatagtgacttatttgcagataactaacctgtcaagagagaattgtgtgttgatggtgaagttgaaaaaggttggaaaaactggttatatggaaagtggcaatggaagtgaagtttcaccaaagtcggaccagaatgcttcttcttgccatcaaggaagtagacttcaagccaccttcatttcattaactaatccagaggtaacataattctaccttacaaaaaatctgatcttttgctggcatctaagtgagttataccattaagctttagtccaacaatcgaatattatgaatctaagcttgacgttagtaaccgtggtcacctttttgtaggaggaagaaacaggttcaaaatcagatattggaagt

SEQ ID NO: 181574 - DNA, 2805 bp, Arabidopsis thaliana landsberg
atgacgagcgaggataatagagttattgtcaccgccaaaccaacggagatgcaacgacgaacgatatctccttacgacctaacctcgaacgacaaccccggaagtatcatctctcgccctctgttgcgaagtgataactatgaggagtgggcaatcaacttggagactgccctctactcgcgaaagaaatttggtttccttgatggatccataaaacccccgaccgaagattcaccggactatgaggattggaagccaatcaatgcactcatagtctcttggattaagatgacgatcgaaccaaagttgctgtccaacatatcacacaagccaattgctcgagatttgtgggagcacattcgaaagagatatcgagtctctaacggcccaagaatccaacagttgagaagagaaattgcgaactgtcaacaagttggattgagcatcgagacttactatgggaagctcacaaaattgtgggatagctacaattgctatcgacctccactatgttgtacatgtggaaagtgtacctgtgatctgagttctaaaagcgagaagcaaagggaagaagacaaggtacacgactttctaatgggtttagatgaagacacgtttggtatagtgagatcgaatttgatgtcacaagaacctctgccaacacttgaacatgcatatctgaaagtaactcaagatgaagatgctagagtcaagcggaaaacacaagaaaacaagtctgaaaacatggcgtttcttgctcaacaatcacagagatctcgccccagtcaatatgaaaacaaagacgctggtgtaatgtgtacgaactgtaatcgtatggggcacagagctgaaagctgttttcagattttgggtttcccagaatggtggggagacaggccaagaaaccgcatgagtcgaggcagaggatcatcttcatctgcgggaagttcgcgtggtcgtggcagtgtaggaaaagcaaacgttgcaagaatcgttgatcaacatgaaattggagttgctaacgtggccgtaacagatagtgatcgggctgcagtatgtaacttgacagatgagcaatggctaagtgtgaagcgggctatgaatgcagcatccaacgacacgaatgaacaatcatctggtaagatctcttctccttcttggattttggatacaggagctacacatcacatgacatgtagaaaagagatacttagagatataagaaaatcgacaccgacttatatcattctagcagatggtagaacagtgatgagtgatgttgtaggcacagtggttttaaactcacatcttagtttgatcgaagtgttctacatagagaatttgggatttgatctgatatcagttacacagttaatggcagaaaatgactgtgtgatgcaattgtctgttccgttttgtgttcttcaggaccgttctacgaggatgctgattggcgtcggtaaaccaatcggtgggctggtctactttcggaatacggaggttgtggcgattgcgaaaggtactgcaaatcaatctctggagttgtggcatcgacgtttgggccatccatcactgaaagtagtagagctgttaccggattttagctttagtagaagtagtagtgcttttatgaataaagcttgtgagacttgtattcaagctaagcaaactcgttgttcttttcccttgagtaataataagactacggatacttttgaaatgattcattgcgatatatggggaccatatagagtaccatcacattcaggagctagatactttctaacgattgttgatgatttttctcgtggtacttggatatatctcatgaatgctaagagcgagacatcaactaaacttcgttatttcctggctatggtggatcgacaatttggaaagaaagtgagaactatacgtagtgataatgggagtgagtttatctcactaagcacttattttttggagaatggaattcgtcatgaaacctcctgtgtcggaaccccgcaacaaaacggacgggtggaacgaaaacatcgacatcttcttaatgttgctagagccatcatgttcgaaggacatcttcctattgaattttggggagagtgtgctctcgcggctgcgtacttgatcaatcgaacaccttctatgattttgagtggaaaaacaccgtacgaggttctttatggtgtaacaccatcctatgatcatttgcgtgtaataggatgtgtgtgtcatattcgaaatcgagatcacaacggagacaagtttgctagtcgaagtcgaaaatgtattttcattggctatccatatgggcagaaagggtggcgagtttatgacatagaaaaaggaattttttgtgtctcacgggatgtgatttttcgtgaagacatcttagcttacactggtgaagaaggatcagagactttagtagacgacaccaacccctttgtgactgaaccagagcctgctttagctcagattttgacaacgcactcacccccaatacggaatcaatctcagagatcaaagaaggcttcaaaagaaaacccgactatcacttccactgagataagtcaagaatctgatattattgaacacgatgaagtcgaaacaaatgacaacgatcatggagacaatgtcatagaaacagaagaattgcgaaacgatgaagaagctgacatcgaaacagaacacgtagtcaccatcgaaacagaacacaatcaagatactctacctattgctctccgacaaagcgttagaccaaggactcaaccggcttatcttaaggattatgatacaacgttg

SEQ ID NO: 181575 - DNA, 52 bp, Arabidopsis thaliana landsberg
atgacttatatgtatgatcatgaccatattcctaaacatatcactgcaacaa

SEQ ID NO: 181576 - DNA, 783 bp, Arabidopsis thaliana landsberg
gtagaaacggttgagggatcaatggatcttcggattccgccaggaactcaacctggcgacaccgtaaaattatctaggaaaggagttccagacacggatagaccttcaatccggggagaccattgctttgtagtgaaaatttcgatccccaaaaaactgaggtttgtctcacatcacttccctttttttccctttatgtcgttattctatactaaaaaactgcttgaaacatcgaatatggtagcgagagggagcgcaagttggtagaggaattctcgtcgctcagaagatctagtagtagtactggacctactggtacaatgctatcccaatctaattgaaactcataatttttaatacacaatgttaaaatcttataatccccacttgtagaaactcgtcaagaggagcagagttttggctcagagcccagaaaagaaccatctttgtggcataaaatgaagaatttcataaggtaatctcatggaaacctttttctcagtagttcatcaaaagacacaacattgttgtcttggtctgatacatagtttttaatgtcacgtgttatatagaccagaagattcaagaacgaaatttgggactatgagcttaaacccatcattaccattacgaagaatgaaagtgtcagagacttcaattgctttttcagtcttggctctgtgcgttataacctcggctgttgcattggtacagaagaagggtaatcgccttgaaacaaaaagaaagaaacttaatttcgtcaaaaaccctgaaaccctacag

SEQ ID NO: 181577 - DNA, 1205 bp, Arabidopsis thaliana landsberg
atgactacaaatgatcttgagttttttgccaaacataaatctccccgaaacgttagagtagccaagtcttcctttacgataataacaccaaatctaaaagaagacgagagggagaaactcaagtaagaatttgaattttagtatcaagaacctttctcgaccagccccactaaaacgagagagaagatgatcgaaaaacatttgttctccaaactggttttgggccaactttctatgatttaaaattgggctcataacttttatcaatgaaaggtaaaatgatacatttgggctccaaactagttttaggccagctttctatgaggtaaagtcccatacaaattattattttttgttgttggggttgattattcaatgtagacatcaatgtacaaactacccaactacaaagcatctttactttaaactcaactactctctcttatttaactaaaactactaaattaattgattagtatatcatagcttacaaaacatgtttttaggttttatattcccgagcaaaacacttgtctaatctagtgtgtgttattatggttacaacttacaacgagttaatctgatgaaaaataagagaaggcaagtgaaagctagacataaccattcgtaattaataattgcaacatagagcaatcgcggccgcatgggggcaaatgtatcgagtggataacataaatagatagaaaacgccaaggaccctacacaacacgtaatttagtgatgtgtttattctattattcagctgatagccacatgcattcgctgactataacaagcctatagtcatgatattgcacatgcctctgattttgtatagatagagatattcgtttaaaatgccaattattattggaaccagccaaaggcagaattgccaacgccttctcttcctccataattacctttgcatctgccgcaattcccgttattacgatcaacaaaaaaagagccaacaatctgatgatatcttgtgcaattcttatacgatcttgtcaagcataaacaatatgaaaaagaatctgattttgaatctgcaattaactttatgccaaagtaaatgatactttaataactcggtaatcgttattaataatatacgtgtgttttatagatgctgccgcctgccgcctatatgtgacttggttgttcattaccgatgttttgagatttataaactaagttag

SEQ ID NO: 181578 - DNA, 90 bp, Arabidopsis thaliana landsberg
gtccgtgttcagtcagaccctgcagggcggctagttatagcaggccaacctgagcaacgacaatccttggggatcacacccttcaaaaag

SEQ ID NO: 181579 - DNA, 311 bp, Arabidopsis thaliana landsberg
gatgggtcctatgtatagtgaaatgaaacaaaggaaaagtagagtgggcaacagaaaacgtacaaagcctggtgctggtgttaagccagaggaggttgatgatacagaagctgaaaagaaaagtgatacagacaataacatggcagtaatgtttaacatcttgcggaaaaacaaacgtgtcaagattgagaatttggtgctcaataggaaatcatttgctcagacagcagagaatatgttcgcactttcattcctggtgaaagatggacgtgttgagataactgttgataacaatggttctcattttgttg

SEQ ID NO: 181580 - DNA, 259 bp, Arabidopsis thaliana landsberg
attctacaggcgagcatcagaccacgcgcgtctactgggacaccaagatcaccgactttgatgacgacaagttctcagccgaggctgagtacacgaacgtccctcccattcccgacaatgtctactttcctgacaacaaacgctacgacgtccgcaccagccagtacttcaccctcagcgacgtttgcgcgtacaaccaaaccacccgctccacgttgggtccccccataccgcccagcgtcatccccaagggcaacaa

SEQ ID NO: 181581 - DNA, 262 bp, Arabidopsis thaliana landsberg
atggagttggacatcctccaccgatgtgtttcgccgttcattatcgacttatacggtgccttcttccaggaaggtgctgtgtacatttgcgttgaattcatggatggcggctccgttgacaagctttacggcgatggtatacccgagaacattcttcgcaaagtggcgctttctactgttatggggttaaagtctctcaaggatgatcataacatcatccacagagatgtgaaacccacgaacattcttgttaacacacgag

SEQ ID NO: 181582 - DNA, 58 bp, Arabidopsis thaliana landsberg
atggcttttccttctctgaagcaacggtttgtatcctcggcaaatcatactctcgaga

SEQ ID NO: 181583 - DNA, 406 bp, Arabidopsis thaliana landsberg
gaagctgaaaaagaagtatatttggtatctgcagagagggataaggcacagcaagatcttcagagtgctttggctagccttgagaaagaacttgaagagaggtatatattgacactgaatctttttcatgtttgattccggaggttggctgctcattctcctcaatttgccagagaaaacaactgagaaatggtgttctcaggggactggttatggagttcttcagacatatattggtcgtctgagctatttttgtttcatatatatttcagagctggagcacttaaagatgccagcgagcagatcaaaagtcttgaagtgaagcttgactccactgttgctcgcaatcaggcggagaaacaagcttgggaagaagaccttcgggttttagaagaaacatggcgac

SEQ ID NO: 181584 - DNA, 1730 bp, Arabidopsis thaliana landsberg
gaatgttcagttagcacagttggatgctatgaaaacaaagttggatgaaggtgatgagcgcggtgcagctgatcgcattcgttatcttcaccttgattatggagtagagaaagagaactatcagtaagtgcttgatttatatacattccgcaaatacatgagtttattccgttctatttcctgcttcaatttgtcttcctgttccttagcatttgtttcttgcatatttaagaatagagaacttacttcaattattctgttttcttatttatgatagtgctgttctaaaagctctcctttcaagagttatggagaaaaaggatgaatatggtgattcctggcacatggtgcgccagaacttgctgtttatgtataaagaagctctgtcatcgaattgtggagatcttgctcagatgatccaggttggtaatttttttataaaagctgatataatggatcgttctcattaaaaacaaggtttcacatgtaagatacaactatttttggtacatattgctgaactgagaaagaacagtggtttacggaacctgctaatatgtaaatgtagtatagcttatatttgttgcgattaagaacttagaccgtgtttgtcaatcttgattatactggaatttgaagctggtatagccagttggcatttttcttctatatactttgtgaacatttacactggtgatagttgagttcagtggttggtctgagttgatgggtttgcttatatgtggatattgaaatatgtgtatgtgtggctttgagtaagttatcttgtactataagctgttatctgattacaacgttttcctcggcagggtattcaagatgatatgctcctcccacatagccaactacatttatctctcgacaatgaacaaattccactccctcttgaatgtttccggcgatatcttgtagacttgaaaactgagagaaatatagaggacaaaagttctcctatgagcagggcaattaattcttgtctcagagatatgtatcattatgctcgtatttctggatcacatgttcttgagtgtgtgatgtgtgctgctttgtcttctgtaaagaaagagaagcttcaggaggctaatgatgtaggtggaatagaataaagttacatatcttcgtactcattatcttactgcagtattgttgattggctgctaccccatttgacttccctttttctattgggatctgaatccctcttctgctcatatgtttcaggttcttactttgtttccccgacttcgccctttagtagcctccatgggttgggatctattgccgggcaaaactgcaacccgtagaaaattgatgcggctactttggactagtgactcgcaagcacttcggctagaagaatcttctctttatggaaaccagacagatgaagtaactttttttttccttcacataaactactatttggatctattatttttagaagatgacagtgaaagtctaacaggacacaatgatctgggcagaaatcttgtgtggaacacctctgcgatacgttatgttatcagctggaacttgcatctttcgctgcttgtgtcaattctggtaaatcatggactccaaaggcatctttcttgatgcatggtaatgtgtcatccgcgcatgatgatgcggaggtggatccttttgttgaaaatcttgtattggaaaggctttcagcgcaaagtccacttcgggtaggacattcttaa

SEQ ID NO: 181585 - DNA, 332 bp, Arabidopsis thaliana landsberg
atgcgccggctggccttcgccggactgatcggcacgctggcgctgaacacgttgttcaccctgaccctgtggcaccgctacgacttgcgtccgacggcgcaattgctgggcgccgctggcgcgaaacaccacgccatcggctacgtgggcagttacgacggcgaattccatttcgcgggccggctcacccaaccgatcgccgagctgtacgacaccaaggccatcctggccttcagccaggtccatccggacggcctgatcgtgacgcatccgggcaagctgacgccggatatccttcgctacgccctgctggcgcagcccttccgttcgtc

SEQ ID NO: 181586 - DNA, 1521 bp, Arabidopsis thaliana landsberg
ggttatcagttttcgctaagtgatttggatgagcttggatgtggaagtgaagctaagaggaggttcactcttgtcatcatcatcgtcaacgtcgttgtcattgtgtccttcatggcacagcaacaatcttcccgactcaatcgtctccttactttgttggacagtatcctttatttttcctgattatttcctttgttaccaataatgcttcgtttttattgttgcgtttcttcgtatcataatctcttaagaaggtacatgttctccttgattatcatttctttgtagctggttcaacacaagctactcggctaactgcagccaaacagatcggggatattgcaaagtctcatcctcaggacttgagctctcttttgagaaaggtatagtcatgggatttactttctatagattacagagatacagggctgtggttgattgttatactgatgggaatcaatgacaattgctagtgaaagttacataaattacgcgtccctagcttagatgctctcttggtctttggaataaacctactattcttccgaatgtgctcaatataggcgggtggacagagtagaatctatgatgtgttgtgtatgtcctgagctttaaatctcaaatttattgctgggaacaaaggtgtcatcccctgttcgatgtgtttacttcttacatgtcttatatacatcacaagtccctgcatgactagagaaagttgtttatagagctatacacatctatgattcctaaagaatgtcgaagcttaagacaaagaatctagtgggcttccagaatgaaaatttaagtagggtgaccacctgcgtatcttagtttcaggtttcaacttgcaattatagagtttctattattagattgaagttcaagctttgttaggacatctgatcttattcataaaataatatttctaatcaggctagggtttgtgttctggagaccttgtttctgctgcttttttaggtatcataaataactatttcgtcttggcattatactttaggtttacatctttctaaactgctaagtcgtcctttacattaaattcatctatttgttcctttggcttaactctacttcttcgggaattaggttttgcatcacctccgtagtaaaaagtgggatacgagggttgctgctgctcatgccattggtgctattgttctgaatgtcaaacatccttcattgagtgaactgttaatttctttagcaacgaagttgggtgaggcagggatatctgataatgtagatgaagtggtggctttccgcaatcttcagtcaaagattctggcaaatgcgccctttagaaggttattaatagctctattacacaatacatatgttttttatagcatctactgttaagacttcttagctggatttttagatgtctttctcatgttaaggttgcacgatgtatgtctctaacatttggcatgtgctaacagctttgagatgaataaggttttagagtttggcgctttgttggcttctggtgggcag

SEQ ID NO: 181587 - DNA, 1017 bp, Arabidopsis thaliana landsberg
atggtagctcatttgtctttgaggtacagaaccgattcagaaggcctgcagcagcaagaaattattgattccctccccaaggctattcgttccagcatatcgcattatctgttctacgaagttgttgacaaaacctacttattccatggaatatccaatgatcttcttttccagttggtaaatgtttctcattcactcttgtctaccttcttttgatggaaacacacagttaaccttctgatatcatgtaggtctctgagatgaaggcagagtattttcctcctaaagaagatgtgattttgcggaatgaagcaccgtcagacttttacataatggtcacaggagctgttgtaagttgctttggttacatcagctaaacaattctatttctcctagttcttttttcaaattagttgacatttctactatatgacaggacatcattgcgcgtgtgaatggagtggatcaggtaaaatccgcatttttatttctcttttgtgacggtttttaagttgtgagttgtgtattcattgcaggtagttggtgaagcacagaccggccatgtttttggtgaagttggggttctatgttacaggccacagttgttcacagttcgaaccaaacgattgagtcaattgcttcgtctgaaccgtacagcattcttaaatcttgttcaggcaaacgttggtgatggggcaataatcatgaataatcttcttcaggttagtccgaagctatttccgtataaatccatagtgactacaacattttagctggtttgactattttttctcatctgggatatgttttggtctaatgcagcatctgaaagactcaacagatccagtgatgaaaggcattttggctgagacagaactcatgttggctcaggggaaaatggatttacctctcagcttatgttttgcagcagccagaggagacgatttactgctgcatcagttgctgaaacgaggctcaaaccctaacgaaaccgataagaacggtcgaaccgcgttg

SEQ ID NO: 181588 - DNA, 211 bp, Arabidopsis thaliana landsberg
atggtcagacgtgatatcttggtacgggagatgcgacgcacaacgtcggtgcgatctgagggcctgggcgtgggcggctacatcgggctcgcgggcctttgggcggcgccggtcagcggcgtattcatgaacctcgcgcgatcctttggccccgcgctcgtaagcggccactggagcagctattgggtctacgtgctcattccgattgacg

SEQ ID NO: 181589 - DNA, 926 bp, Arabidopsis thaliana landsberg
tccaatgaaggggctctattattgtgtaatatacctaaaaccaggggattatcatcgaatacactctccggctgactggaatgcaactgttcgtcgacactttgcaggtttggttattctcaatcctctcatttaatatatagcagcctctgtagttgggcttttgcaacaatttttggaacatatgtgtgattggacctttagtatctctacaaaacgaatttcaggccggttgtttcctgtgaacgagcgtgctacaagaacgataaggaatctctatgtcgagaatgaaagggtaatttttgtgattccttgtaggtgtaccaaccaaatatgtctggcattttattgtctccagacattgatcatcagctgttaatacaacaggttgtgctagaagggatatggaaagaaggttttatggcaattgctgctgtaggcgcgaccaacattggatccattgaggtaggtgtaatgaaaatcgaaactcataagcctcagacattaaggaacttgctaaaaattgcttttatagcttttcattgaacctgagctaagaacaaacaagccaaagaagaagctatttcctacagagccaccagaggagcgggtgtatgatccagaaggtcttggcttaaggctcgagaaggggaaagaggtaagagtaggttcaaaagagagaataaaaattccagtttaagaaatgtaacaaagttcttttgttcgtatgattggtaaatggtcacatgtatgggtcgatgcaggtaggtgtattcaacatgggatcaaccgtagtgctcatttttcaagcaccaaccgcaaacacacccgagggttcaagcagttcttcagattacagattctgtgtcaaacaaggagacagagtccgcgttggacaagcattgggaagatggaaagaggaatga

SEQ ID NO: 181590 - DNA, 124 bp, Arabidopsis thaliana landsberg
ccgaagcgtcctacgttttctttttggagaaggaaaagccaaaaaaggtggtcggtgtttcttgattggagatgtatcattgggcaccaaagaagctatgaaaaagacacctcatgtagattag

SEQ ID NO: 181591 - DNA, 876 bp, Arabidopsis thaliana landsberg
atgaaagctctggcaatgttccagaacgatgctgattgcatggcacttttgatggatggaagtggggcccttggtcttgatttgagttttgtaacacatgttttcctgatggaaccaatctgggataaaaggtacgactttgagcaattttacattcagcaaacacagacaaaaaatcagtaacaaataaaaacttgatgatcttctgtttttcacttcattttgttttaaacttttttggagtttctggagtgaatcatttggccgttctatatacttatctcgtatggataaaactaaaagctaaattgagtggttcacaatttggtgtctcacggcaacgccttttatattaatattccatatctggtcaaatatttttccattacatggtgttgctgactcctacaatgtttacaaatgagcagcttggaagagcaagtcatcagtcgtgctcatcggatgggcgcaaagcgccctatttttgtagaaaccttaaccatgcgtggcacgattgaagaacaaatgatgagattcctagaggtacggttgttttgttttgttttttcctcattgctctgtaattatttagtcatcagactataaaagcttggtatgcatttggtgaaagtctgaacatcgtttgcatgtcaaatgtcccatgtgtattgttttaagcaggatgcagaaaagagtgatagattattgagtggagattacatagaagcgaagcaggagacaacacggagccgccgaacgctacatgatttggtagaaagcaattacctgtctcatcttagctttgtccgatccgatggcaaaatggaatttgcagcttcgcagcttgcaggtttaaaagatcaccaattagcttaa

SEQ ID NO: 181592 - DNA, 385 bp, Arabidopsis thaliana landsberg
atgaacattgatgatgtccatgttgccaagatattgggagtagactctcgcaaatcttgcgttgtctgtggtatcgtctttaaaagtgacgatgtaggtaacattaggcatcctttgaaaaatgcaaaggtgagaccaggttgaacaaatcttgcataacatggcatcctttgtaactgtctttctcaaggatggttgtgtttttaattgttgactatttttctcctttattttgggttctagtcttctaggtacataactttggaaagacaaaggaagccatgcttgagactttggttaaagatattgctttttccaatgtaaaagttattgttagtcggtcatcaatttgtgaaatgacactacgtttctgcaaaatttacaa

SEQ ID NO: 181593 - DNA, 263 bp, Arabidopsis thaliana landsberg
atggttatcggaccatatggcacaatagattcagatgtcatagttctcaaatatcatacgcgcagtggagaacaacagcaatcccgtgagttatttatacgagtccttgtttttgcatttcagaaacatagctctcagccttatattgaggcttgtcctcgagacagttatttctatagggattggtatcctcgcaaccacagtcattaagaatcgcaatgtcatcagactagtagtaaatccatatcgaagacgatcgatag

SEQ ID NO: 181594 - DNA, 90 bp, Arabidopsis thaliana landsberg
atgaccacaaataatccgtatattcatcctaatcacaacttaagctccattaaacgtaaaacagttacacacaacaacaacaacaaaaaa

SEQ ID NO: 181595 - DNA, 1265 bp, Arabidopsis thaliana landsberg
atgcgttggatcggtgaacctcaaagcttgttgatcaatggaagaggacagtttaattgttcacaagcagcgtattttaacaaagaaggagagaaagatttgtgcacgtttaaagaaaatgatcagtgtgcacctcaaactctacgagtcgaacccaatagagtgtaccgtcttcgcatcgctagcaccactgctcttgcttccctcaacttggctgttgaagtaagtttctttctttccaactcacacgtgtactttaaaagctcacacgtgtggtttcattgcgcacgtgacagggacaccagctggtggttgttgaagctgacggtaactacgtcgcaccgttcaccgtcaacgacattgacatttactccggcgaaacttattccgttctccttaaaaccaacgcaattccatcaaagaagtactggatctccgtcggcgttcgtggccgggaacccaaaactcctcaagcactcaccgtgataaattacgtcgacgccactgagtcacgcccatctcatccaccaccggtgactccaatctggaacgacacagatcggagcaaaagcttctcgaagaagatcttcgccgctaaaggatatccaaaaccgccggagaaatcacatgaccagctaatcctcctcaacacacagaatctctacgaagattacacgaaatggtcaatcaacaacgtctcattatccgtaccggtgacgccgtacctcggatcaattagatacggtttaaaatcggcgtacgatttgaaatcgccggcgaagaagttaattatggataattacgatatcatgaaaccgccgccgaatccaaacacaacgaaaggtagcgggatttacaatttcgcgtttggaatcgtcgtcgacgtgattcttcaaaacgctaatgttttaaaaggtgtgattagtgagattcatccgtggcatattcatggtcatgatttctgggttttgggttacggtgaagggaaatttaaaccggggattgatgagaagacgtttaatttgaagaatccgccgttacggaatacggtggtgttgtatccgtttggatggacggcgataaggtttgtgacggataatccaggggtttggttttttcattgtcatattgaaccgcatttgcatatgggtatgggtgtggttttcgtggagggagtagaccggattggtaagatggagataccggatgaagcgcttggttgtggattaaccaggaaatggcttatgaaccggggacgcccttaa

SEQ ID NO: 181596 - DNA, 173 bp, Arabidopsis thaliana landsberg
  unsure (1)..(173): unsure at all n locations
atggtagtggcnnnnnnnnnnnnnnnnnnnnnnnnnnggggcctgatcgcagacattgatccgaaggtgcgtcttattgataccgtgtgggatccatccctgcgcgaatgcgaggcagtgctgaccgatgaaaccaataaagctatctccgccatcaccgggaatcccgactg

SEQ ID NO: 181597 - DNA, 443 bp, Arabidopsis thaliana landsberg
atgatcaagtttatccagtcgacccagtttatcaaccgcgatcttaatatgtatcatgctgaaacaaatacccctgcctcggccaggacttctaatttgaacgaggagcttggacaggtagatatcattccatgctgcgtatttccactagtaaaccatgccacagattgttacttgtatgatatagatatccgtttctgttgctagtatcccatctgttgctaaataattattttaaagatatactttggtattgttctcacttcagttgcaattactacggtatcattcaggtggaatacatattttccgataaaactggaacactgacaagaaatttgatggagttcttcaaatgttcaattggaggtgtaagttatggatgtggtgtcactgaaatagaaaaaggaatcgctcagcgtcaaggcttaaaagttcaagag

SEQ ID NO: 181598 - DNA, 209 bp, Arabidopsis thaliana landsberg
ataggtcagagcaagcaagaagaagaaccttctcaaggttacctagcgcgatatgaggtgcctcatatcttcatccctaagcaccagcctctcgtgaatgaggtcttccaaaggttctccgccgatggcgtaggaaattcctcaaggacctgtatcttatcatgtagcgtagcatggattgtgaattacgtcaatgtgatagttgatat

SEQ ID NO: 181599 - DNA, 135 bp, Arabidopsis thaliana landsberg
gagctcgagatgaccccacaatccggagtcgaatcaaagttagggttttgacaggaaattccgcggattcgacctcgaccctgatgagagaaactcgaagaaccccgagattcgacgaatcaagggagagatttg

SEQ ID NO: 181600 - DNA, 213 bp, Arabidopsis thaliana landsberg
atggaggatgaacatgttatgattgatcttgatgacgtttcaaggcacattgacattccagcagatgctccttatactttatcagttagttcaatccaattctttcatttcactttttgcattctcttgttttataagtttggttttgtttggttctcatagggtttggatactttgaatccggtgttgaccatagatggcaaaatgaagctg

SEQ ID NO: 181601 - DNA, 163 bp, Arabidopsis thaliana landsberg
tttcacgccaacgacaccatccagtccaactctgacgccatcaatagaaagaggaaccacacgcatcacaataatgaccatggtagtggcagctttggcaacaccaccaccgctgccattgccaccgccaacaacgatgacaaggggcccctccttgggcaac

SEQ ID NO: 181602 - DNA, 643 bp, Arabidopsis thaliana landsberg
atggctgtaatctctgaaacttccgacgagggctctaatggcggcgctgcaaacaagaaacctcaagaagaagaagagaatattcctccgattcctaaagaacttccagaagaactcatcgtaatcatcgtcgcactcgtccggagatatcactacccgaagctatctctcatctccaaagcttatcgtgacctaatctcttcaccggaactcttccaaacacgctcgcgcctaggcttcaccgaaccggttctttatacctcaatcggattcccaccttttgatctcccacgctggtacattctccatcggatctcattacagttcaaacaaatcacttcacttccttcaatgcttcctggatctgctgttgtcacaatcggttacaagatgtatgtactcggtggattcatcggcttgaatcaacctgtatctactatgattgtcatcgactgtagattccatacgtatcgtgagctccctagtatgcaaagggatcgcggtggcgcagccgcgggagtgattgatggaaagatttacgtaatcggaggttgcaagaaacgatataatgattgggttgaagtgttcgatgtagagaatgagagttgggaaactgtgcctggtccataccctaacgttgcaa

SEQ ID NO: 181603 - DNA, 1028 bp, Arabidopsis thaliana landsberg
atggtgattttagatatgaaaaagaaacaaaagctggatgattctgtcgatgatgaggctcaggaggaggagaaacgtcgttatagatctatggctaaggttgctattggttatgggattaatccttctgacgagaactctgtcattcctgaaatgattcatactgtgtgcccggatttttcgctcgatacttctaaactcaagagcgcaattctggagatgcacgaagaaggtaaagaaaaggtcaagaaaatgctgaaggatggagaagggaaattaacactctgttatgaatggttttggacaagtgatgacattgatgaacctattttgaacgaggattttatcggtattagtgcctattttgctgatgaaaactggaagatgaagaaatggatcttggggtatcatcctcgtgcgtctttgtgtttgaaagacatttatgttgattctatcaagaatgttattctggattatgagatggagagcaaggtctcgactcttctaatgcctaactatggtgatcttggtgttaaagcgtttgatgattttagaaaatggattgaagagaaagggaaaaatctgatcggttctcgtgtgtttctcatctattgctgctctgacattttccggttaatggttgatgatatgtttaaggacataaacatatggctgatgggtcgtgttcggttgttggttggttggggaagaatggtacctaccaattgggatgtcacgttgtataatctgcaaaaagctgttgatatggaagctacgaatgtatttgaagaggaagaggattatcaggattatgaacaaccatctgatgaagaatggatcaagatcaaaactttttgcaaactcgcggcttgcatttataaagttgcaaaggagctttttgatggagagtatccaacatctaatgtctactttcaccttctcgctgagctaaaggtcatgctaaacaaggagctcaagaacggtgataatgattactttctcagcaaagcaaaagagatagtgaacag

SEQ ID NO: 181604 - DNA, 314 bp, Arabidopsis thaliana landsberg
ggggctactggtcatcttcttggagcagctggagcagtggaagctattttcagtatccttgctatacatcacgtaagcattctcatttcttagttttgtgttgtgatgattaaggtttagtgacctaaccagaacctgcaaaaacttggtagggggttgctcctatgacgctgaatgtcaagaatccagatcccatcttcgacaagaggttcatgcctttaaccacttcgaaaaagatgttagttaggacagcaatgtcgaattcgtttggctttggaggaacaaatgcatctttgctctttgcctctatctaa

SEQ ID NO: 181605 - DNA, 212 bp, Arabidopsis thaliana landsberg
acagcaccaaagaggatatagatacctcaacatcttcaaatcggggcttcgacgtgttgaattttctcgttctcaattccaagtcacacctgaaagcatcagtggatttactacctcaagattatgctttgatgccttcttatcgtcagaaacataaggaagtttcatcaaaccaatgtccacatgctctaacacaacagacacaagaataa

SEQ ID NO: 181606 - DNA, 436 bp, Arabidopsis thaliana landsberg
atggatcccaattcatccaattcatcgggatctggcttaccagttcagatcccaaatgatgacgttacggacgggcacctcccaacggatctccctcctggagcccaggttgatgctatccataacagtgacccgaagaacatctcccaaaactcgaattcttctggatctgaccaaatcactccccctccgcaaacaaggggcggagaacgaaacgtcacgatacagcctccaaacggagataacccggccaacctgtctaatcaggttcgcccgcgacctgcgagtgaattggccgagctccgcgcaatgatcattaacttgatcaacttaaccaaaaaccaagaaattgcgcatcgcaacctcgccacaattgtgggtcagcagagacgctattccacttgcatggcacatgaggtagagcgcgatatcgcgg

SEQ ID NO: 181607 - DNA, 440 bp, Arabidopsis thaliana landsberg
  unsure (1)..(440): unsure at all n locations
atgtccaacgtagactgcgacatgtatgtcaatgaagcagatgtggtgcgacaagcaatgtgtatatttctgctaaaatcaatggattcaaaccattgtgcttttgttcaataccctcaagatttctatgattctaatgtcggtgaactcaccgtcttacaattagtaagatttatctctttactttttctttggtttatttctaatgttaatatnnnnnnnnnnnnnnnnnnnnnnnntttatatttgttataccaatccgtacttaatcttagttccttttatttattaaaaaattaactagtacttgggacgaggaattgcgggaatccaaggacctcagtatgcgggttcaggatgcttccatactagaagagttatgtacggtctttctctagacgatttaggagacgatggaagtctttcttcaattgctacaa

SEQ ID NO: 181608 - DNA, 1447 bp, Arabidopsis thaliana landsberg
atgcatggtaacacactgactattattgaaagtctagtttcagcgaagatatcaaagattgcttcaaaagaggcatggaataatgatctagagccacaagatgtctcaggtttaaagttctttgagatgaataccattcaaactgccactgataatttcagtctctcaaataaactaggacaaggtggatttggctcagtttacaaggtaagagatttttttcttttctttgcttctatgtattcgcctttatgttcacgagatgactttctgcaatctgttttagggaaagctgcaagatgggaaagaaattgctgtaaaacggctttctagcagctccggacagggaaaagaggagttcatgaatgaaatagtactcatctcgaaactacaacataaaaacttggttaggattctgggatgttgcattgaaggagaagagaggctgttggtatatgagtttttgctgaacaaaagccttgacacttttctcttcggtgggttccttcttgcctcatttcttttctattagcagctttttttctacatggaactgtcagttctgatcgtttctatacggtattattgcttagattcaagaaaaaggcttgagattgactggcctaagagatttaatatcattgaaggcattgcgcgtgggcttcactatctccaccgtgactcatgcctcagggtcattcaccgtgatcttaaggttagcaatattcttctggatgagaagatgaacccaaaaatatcagactttggattggctcggatgtataagggaaccgaatatcaggacaacactcgtagggttgcaggaactctgtaagaacatgtctttaattacatgcttgtgaatgattcatagttataatcatatttaaactatttgatatatgtgtagaggatatatggctcccgagtatgcatggactgggatgttctctgagaaatcagatatctacagttttggagttatactgttggaaatcatcaccggggagaagatctcaagattcagctatggtagacaaggaaaaacccttcttgcatatgtaagtaaggcttttaggtttttatacacttgtagatgtttcaaaaatgtttcttgctgttacattctgaagacctgaaacctaaacaacaggcatgggaatcttggtgtgaaagtggaggaatcgatcttttggataaagatgttgctgattcatgtcacccattagaagttgagagatgtgtgcagattggtttgctatgtgttcaacaccaacctgctgatagaccaaacacaatggagttgttgtctatgctcaccacaacatcagatcttacatcaccaaaacagcccacatttgtagtgcacacgagagatgaagaatctctgtctcagggtttgatcaccgtcaatgagatgacccaatctgtgatccttgggcgttaa

SEQ ID NO: 181609 - DNA, 754 bp, Arabidopsis thaliana landsberg
agtcatcgaagtttcacgaaaaaccaatcacccactcgctggttctcgtctcctccttctcgataatcccggtaacatccatagcatctctttccttcttaaaaccttaaccgatagttacttcgacgttttcgctactctgcctccgattatacctcccggaccaattggtattctcggattcggagctggttcaacagctagattgattcttgagctttaccctcctgagatcgctgtccatggatgggaacttgacccttccgtgattgacgttggtagagagttctttggtctctctaagctcgaaagagatcataaagataggatttttatcaacattggtgatgctttgaacgctagtgttaaaaccgggttttcgggtattttggtggatttgtttagtaaagggagtgtgatcaaagagcttcaagatcctcaagtgtgggaggatttgaaatctaggttgagatatagagggaggattatggtgaatgttggaggtaaatgtgtggaagctgaggattcagatagagatggagctttggttatggaggaaacgttgagagtgatgagtcaggtttttggagataagctatttgttctaacgcttgggaatgggaatgatagctcggtagctttaacgggtgatttaccggatcttgatgcgtggaagaagagattaccgcgtagtgaattgagaagctatgttgatatgtggataccttatagagaattctgcttgagatattag

SEQ ID NO: 181610 - DNA, 115 bp, Arabidopsis thaliana landsberg
atggcaacggtgcctgaacgaggaggagtttgtggcggaccaccttcagttccattggaggccaactttgcaactggaggcagaggcggatcaatcacgtctttggcatcaaaag

SEQ ID NO: 181611 - DNA, 180 bp, Arabidopsis thaliana landsberg
gtggagctgacagctaatcagaaagctgatttacagaaaccagaagacagtaaggggctacaggcagcagatgggtcacctgacactatcaagcaagaatcaaaaccttactgtatcgctcaaaaccgaacaaagaggattggagttggaccaccgcaaagatacggttatgaggatatg

SEQ ID NO: 181612 - DNA, 429 bp, Arabidopsis thaliana landsberg
atgaacgccgaacggatcgccatggccgccgatggccatcgccaatcctgtgactgcaagcgccagcagaatgacgagggcgccctggcgttcgtttgtcgtgagttcggcgatcatcgaagcagtcccctgtctcatcgcgcagtcggcgcggtcagcgccgtgaagggatcgtttggccgctcgatgtgccgccctcgatccctttccgccgcgggttcagcgatcccgttcagacattattttgtccggggattgcgtctttgtgcaaacgcaaaatgtgcgtttccaacgccggataacgccgggtcagcgggcggcggcgccggctccggtctgtgcggtggcatttttggccgcctgatccagcaaggccgtcatccgtttggtggcgagcggcggcatcttggcctgcttggcggcgtcgag

SEQ ID NO: 181613 - DNA, 147 bp, Arabidopsis thaliana landsberg
aaataccaagatcaacgatctatcgttgacgagagaattgacgatgatatgttttactggattttgattttcagtaaagaaagaaggaagaaacggaaaagacagaggtcgtggatcgattttactgcagagagaaaaaaaccttag

SEQ ID NO: 181614 - DNA, 174 bp, Arabidopsis thaliana landsberg
atgtcccggccggcgcgtgcctcccgctttgtgggcagcgcggccttggtgacccgtgcctcgccgaagtagttgggctccattggccgtggcggctcctcggtggtcagctgttcctacgtgccgcggtgcccggctccggacatcgttgtccagctggttgatgccgcccag

SEQ ID NO: 181615 - DNA, 291 bp, Arabidopsis thaliana landsberg
atggcggagatacagccaaatggaagggcatatgagtcattattggaaaaggatctttcaatgaacattctttcttctgactattttaaagagctctatggattaaagacttatcatgaggtaattgatgaaatctacaaccaagttgatcatgtggagcccgggatgggtgggaattgccgtggtccttcaacagcgtattgtcttctctacaaattctttaccatgaaacttacagtgaagcagatgcatggactgttaaagcacacagattctccttatattagagcg

SEQ ID NO: 181616 - DNA, 131 bp, Arabidopsis thaliana landsberg
cgaacattcaactgaatgcaccggatttggttgaggcaaatatcgctgaagttacatctataaccattgagaagtttcttggatcgttcacttcagtcacacgtctgttattgaatttatcacccttgaag

SEQ ID NO: 181617 - DNA, 507 bp, Arabidopsis thaliana landsberg
atgacccgcatgggccgcggcgtgtacgacgttctgggttcggcgggcgacttcgtgccctgcgggcactgggtcggctagccgctggcggccggcgagcaggatgtggcctggccgtgcaacccgaccaagtacatcgtgcactacccggaaacccgcgagatctggtcgttcggctccggctacggcggcaacgcgctgctgggcaagaagtgcttcgccctgcgcatcgcctccaacatgggctaccaggaagcgaagcagggcggcaccggctggctggccgagcacatgctgatcctgggcgtgcagtcgccggaaggccagaagcactacgtggcggcggctttcccctcggcctgcggcaagaccaacttcgccatgctgatcccgcccaagaccttcgacggctggaagatcaccaccatcggcgacgacatcgcctggatcaagccggggccggacggccagttgtacgccatcaaccccgaagcgggctactttggc

SEQ ID NO: 181618 - DNA, 1182 bp, Arabidopsis thaliana landsberg
gattatgtcgacttgattatatggaaggtaatcaattatgtgtttctgcttttggaatctgtgtcaagtgtttggatttgatggcgaaaaaaactaatcttttgtgtattcttgatgtccaggttcagtttttggatcgacaacacctgctaatcaaatttggaagtgtagacggtggggtaagctctctataatacaaattcatggttacattgaactgatactgtcattttcagaaattacaatttgattgattagacttatgattgttgatgggttactcaggtaacaagaagtgctgatcatcatccagctttcttcgcggtgtataatatggagactactgacattgtagcattctatcaggtaaaatggatgtcattttggccagttattttgtggaatttgcatctacttataacttgacttagtacattactatatgcagaactcagcagaagatctttaccaattatttgagcagttcagtgatcactttacagtatcaagtagtacaccgttcatgaactttgtaacatcgcattctaacagcgtctatgcccttgaacaactaaaatacacgaagaacaaatcaaacagtttttctcaggtaagtacatctctgtatttcgatatgttggtttttatgagagagttgaatctaatcaatttttctatacagtttgtgaagaagatgttactctctttgcctttcagttgtcagtcacaaagtccctccccatatttcgaccagtctctcttccggttcgatgaaaaggtaaccattctataaacccttattctcttcaacttcaggattgagttaagttaatttcggatatggttacagttaatatccgcagcagataggcataggcaatcctcagacaacccaatcaagttcatatctcgaaggcaaccgcaaaccctgaaattcaagataaaaccaggttggttgttttagttgtttagatattaagatgacgaaaacccaaaccgcacggaacatgatttaacgttaggattgtctaatggtgaacaggaccagagtgtggaactgcagatggtcgaagcaagaagatatgttcattcttgttccatcctcatttaccacttgccatctctattcaacaaacacttttcatgccaccttctgtcgtcaatatccattttaggcgatga

SEQ ID NO: 181619 - DNA, 59 bp, Arabidopsis thaliana landsberg
atggcgcacgtgaaatcccgtggaagtcagcgagagccaccttgcagcactgaatacgg

SEQ ID NO: 181620 - DNA, 1324 bp, Arabidopsis thaliana landsberg
atgggtcattcgatattggagaaaatgggatgttcaaactcgaaagcatcgatgaataagaagaacgagccgcttcatctatgcaaagaaaggaagagatttgtcaaagaagctatggattccagatgtgctttagccgctgcacacgtgtcttacatccgttcactccgtaacatcggagcttgtcttcgtcaatacgcggaggcggaggctgctcatgaatcatctccgtcgttaaccgccactgagcctgagaaatctccttcttataactcctcttaccctgacgattcggttgactcgccactgagtcataactcgaatccaaaccctaaccctaaaccccttttcaatctaagttacatgaagacggagacggctagttctactgtgactttcactattaaccctctgagcgacggtgatgacgatctagaagtgacaatgccggcgttttctcctcctcctccgccgcgtcctcgccggccagagacgtcttcttgggactatttcgacacttgtgatgattttgatagctttagatttgtagggctaagtgaacaaaccgagattgatagtgaatgtgatgcagcagttataggattagagaagattactagtcaagggaatgtagcaaaatctggttcagagacattgcaagactcgagttttaaaacaaagcagaggaaacagagttgtgaagataatgatgaaagagaagatccatcggagtttatcacacatagagccaaagactttgtgtcgagtatgaaagatatagaacataagttctttagagcttctgaatctggaagagaagtttcaagaatgcttgaagttaacaaaatcagagtcggattcgccgatatgacaggtatgagttctgttttcattgtgtaaatggctgttgaaacctgttgttgattcgtgagtgtttgttttgttaaccaggaaagggaaattcaatagcgtttcttgcagctttgaagcgagcttgttgtagagggaaaagttattcaccagtttctcaaggtaaagatttatcatttacctgtgtctttgctatttttggttttagtgttctgagttaaactttaatgtagagccattgagtcatcaagttactaaagtcattgtgtggaagagaacatcgtcgtcaagatcctccacttctagaaatccgttgatccagacatcaaaagaagatcacgatgatgaaagtggaagtgatttcatcgaagagttttgtatgatctcaggaagtcactcttcttcgcttgatcggttatacgcttgggagagaaaactctatgatgaagtcaag

SEQ ID NO: 181621 - DNA, 347 bp, Arabidopsis thaliana landsberg
atgaagggatccacatgtacctttacagagtctattattcgaaactatggctttcgaactggactcttcacttcacctcacctcattgatgtccgggaaagatttcgtttggatgggtaagtttttctaagtttgctgaaaattttgagaaaataaatatatagttaccggccctcatataatcaggaaccaacaatacttcgctagcataatcctgtttttcactcttctttactgagaaatgcttatattcgcttaatctgatatgttctatttattgctgcagtgtggacataagtgaagagaaatttttgggatatttctggtggtgctataacaggctcaag

SEQ ID NO: 181622 - DNA, 424 bp, Arabidopsis thaliana landsberg
atgggtgacgaagggaagaaggagaagaggagacagactaaggaggacgctgtttatggattcgtcttcgaaagtgattcgaactctgatgattccggcggctctcggaggaagaagaggcgtaaaaccaaacctgtcaaattttcttctgctggtaacattgatcaagtactgaaacagaatcggggaaactgtaaaattgatgagaatgatgatactattttacctattgcattgggtaagaaaatagctgacaaggcacatgtgagagagaagaataataaaaaggaaaactttgaaaagtttagtggagggattggtatgaaattgcttgaaaaaatgggatataaaggaagagggcttggaaagaatcagcagggaattgtagctcctattgaagtacaattgagaccgaagaatatgg

SEQ ID NO: 181623 - DNA, 979 bp, Arabidopsis thaliana landsberg
  unsure (1)..(979): unsure at all n locations
cggttcgtggatggctggctcgcaaacatttcaatagtatgcaaaggcaaaaaaagctacgcaatgtggcgacaaaatcaaagaggaaagctggcagaaggatttcagaagacaaggtacttgctatcaacatgaagattgtctatgtctgaattatactattagtacactttcaactttctctcctttccaattcaggatattcctctggagcagccccaagttcaaccaacatctatgtctgatctccagaaacggattttgaaatctgaaccagccccatcgcagaaggaagaagaaaacacagcataaagagagcagttgaggcaatttgaggagagatggtcagagtatgatataaagatgaagtcaatggaggaaacatggcaaaagcanatgtcatcattgcaggtcaaatgtttacctggttatgaaagtccattcacttactgcatcagcaaagttttctgaaatgtttttgcatcatgtctttttgcagatgagtcttgccgccgctagaaagagtctagctgcagagagcattacgggtcaagcaggaggaagacaagacacatcgatatcacctttcggttatgactcagaggacacgatgtctactggaactccgggagtaagaactcctactaataagttcacaaacggaaacactcctgaactcagaatcagagagctcaacggaagtttgaatgcggttaatcatcttgcaagagagtttgaccaaaggagactcaatttcgatgaagatgcaagagctattgtggaggtgaagctcggacctcaggcaactccaaacgggcagcaacagcaacatccagaagatgaatttaggagactgaagctaagatttgagacatggaagaaagattacaaagctagattaagagatactaaagcaagactccatagagtagatggtgataaaggtcgtcaccggaaatggtggggaaaaagaggctag

SEQ ID NO: 181624 - DNA, 738 bp, Arabidopsis thaliana landsberg
aaccatccatccacatcacaatgatcttgcttcaactaggcctgggcataataaccggacctgatacccaaaccgatacccgaaccgaaaaagctgggttggggcgggttagggtaaggggatattacctcattgggtttggttttggttaatctgtgggttcgggttcgggtaggctattacccattacccattccgggtacccatacacccgattcttgtgcttataacctatacacctatacaccactaattaccttttgtcgattcagtttccttcacgaatcccttgaatatcggcttctcttcttaaattctctttgaaccatattctatcaaactggaaacccttgtcgaaacactctcggcgacctcaccgtcaccgacgttcccgttaaacccaccacagacagctcaatcgcgaaatcattctgaggtaagtacgttcatgcaatttcaattctaggtttcgattattgatctcaatctctgattagtttcaaactttcaagtttcaagtttcaattctcgatttctcagttcctagttcggattgttgtttgcttgtttcaattcaattctcgatttctcagttcctagctctgattgttgtttatgtagatggcgtcaaatgaaactctacctccaaatgattttgatgatgttgaattaagtggaaatgacgatgatgatgttgttcaacatactcctacttctggaaataagaggaagcgttaa

SEQ ID NO: 181625 - DNA, 6 bp, Arabidopsis thaliana landsberg
atggcg

SEQ ID NO: 181626 - DNA, 595 bp, Arabidopsis thaliana landsberg
atggtcgtcatgaaaacaaatatgagtaagaaggtgttcaagctgatcacagattccatgacttgtgacgtttaccgaagctccttgatatacgaaggagatcaaataatggtacttaaagagagtaaattagtggtttttgcataatcaatttcaggagacgcttaagatgaacttaagggctttacatgatatgtgcaggcggaacttctgttggagctaccaagagaacagttactgaactggatgttccagtgcttgtcagaacttcatgcatcacttcctgctcttatcaaatattagttcccccttgtcagtttctcttgcgtgttaaaggaagagagactccctcagcaattgtgttgctgtgaagctttcttcacagaatagaagagaagagaggagaataatatttgcataaatatctacaagggcagcattttaatgaggtacagtacatacgtctcattctgattgcatcaacttaagtttcaacagcggtggcattttcctaatacttcctctcttcttcttttcgcagcagctacccacacttgtctacatgcttcttcttatctctgatgatgaaaaatga

SEQ ID NO: 181627 - DNA, 165 bp, Arabidopsis thaliana landsberg
atgacgcaggttatggttgtgtgggaagtcactagcgccaatattgttgggccattcttgctcatctacaacgtcagccatcatgtgtgtatgtgtctgttctcttagagagcgagcgatgcggtcgatgttgtcgttgaagaggaggttctaatgtccttgtga

SEQ ID NO: 181628 - DNA, 122 bp, Arabidopsis thaliana landsberg
tgctgtggctgaagctgccgctgggtacgtcggtccctctgcgccatcgccgccgctgccgccgcctgctgctgctgctgctgctgctgctgcgctatgagggcctgctgcttctatctccg

SEQ ID NO: 181629 - DNA, 934 bp, Arabidopsis thaliana landsberg
aagaacagagagaggggcaaacctggtgaaagttctcgacctcgcccaagagacaggcaacttattcaagatcgaatcaaggaacttagagaacttgtgcctaatggatctaaggtgatttttctcttcctagctacaagattacttgcaccttcctttgtaatgattttaacttataatatgtttttgtcattcactaatatttttgtcacattttcagtgcagtatcgattctttgctagaacgaacgatcaaacacatgctctttttgcagaatgttactaagcatgctgaaaagctcagtaaaagtgctaatgaaaaggtaaaaatgtcagctttcttgataactgataatctctgttctatcctagaaatttttattccagcctccatagtttgtaaatgaacacattaagcagtttgttaggtttgattgattgatgtagcaaatagtgggtcaaatttctgaatccttgaatgagaagataggattattaggcacatggagatatatagaaaaactcaactgaaaatcagaagtaaatatcaaaattagcttatacctttgtaatctcagatgcaacaaaaggaaactggtatgcaaggttcaagctgcgcagtggaggttggaggtcatcttcaagtaagctcgatcatcgtggagaatctgaacaagcaggggatggtgcttatcgaggtatgtaatcttacattttgtctcttttctttggtttagtttaatctttgtttgaactcgagtcccaagttctgcgagtgtgtattaaaagtatttttgggtattggacagatgttatgtgaagaatgtggccattttcttgagatagcaaacgtcataaggagcttagacctcgtcatcctaagaggtttcaccgagactcagggcgagaaaacatggatatgctttgtaactgag

SEQ ID NO: 181630 - DNA, 304 bp, Arabidopsis thaliana landsberg
gagagaagaaggagaagctgtccgaaataacatatgatctggaaaatgcagaaaaattggtacgtggatatagaagtattctatctatgtttcccctatgatgattctctgccttttatttcactagatttcgaaaatggatcatgcagcaagtaaccttccacccaatatcaaattcatccttcttgaaaaattaagggaatccaaatctagtctaaaaagattgagaaatgaaatcaagaggaacacatctgaaaacttgaaagttactactcgagaagaagttcttgaagctgaaaaggcg

SEQ ID NO: 181631 - DNA, 168 bp, Arabidopsis thaliana landsberg
gtttcgatcgtcgcgcgcagatcgttgagcagcccgccggcttcgccatcaaggtcgagcggcagcggcagcaggcgctgttcgcggcgataggcatgcagtgccaggcgtgccagggacacgggcgccaggagcccatgcgcaagccacagcgagcaagccagcgcg

SEQ ID NO: 181632 - DNA, 1046 bp, Arabidopsis thaliana landsberg
atgcaagctttcaatcatcgatggaatttcgaaactggaagttcagagttctttatctttaccgatcactataatcgactctggaaaggtcagtcacttaactattaccatttttatttatttttttatttttattctcctattctgcatacagcaaatgatttcaatctgcgaaatgtttttgctcagtgccttcctgtagatgcgaacgaatggaatagaaaacttgataagcaacaggaaaaagcaccgtcaaaaattgatttgctggatgaaagagattgcagagaattgaagattgatggggtatgaaagtttcattattttttatgaactattgtcagtttaagtgatagtgtttggtgtcaactgcctttgcgtgcaaatacatataatgagcaataagcacttttgtttccaaatcgttgccacaaaactaagcacctttgtatttcaaacaagcttatcaccgattgtaacgttttatgtatcaatatgttacaggaactacccattggcaattctgtgcgtgctgggaaagctcctccgaaacagattgttgcagttgtccgacctgcatgcttcacgtctttaactccgtcaaagaagttggaccagaaaaatatcgttaagatggatggggaagaaatggtcatggtagtaaaattgaaatcaagtgataagaatatatcttcgcagcgcttgtttcctacatcccgtaaagggattagtggtctttacatcttctcacttgggtccaagtttccaaaccttttcaagaaagctggcacctacaatttttctttctccattgtaagtaactttctacactcttcttttttgtatatgaaaggattgtttgataaatttaaactaacagaattccaccttacaattctatctgtcagttataatgtaattgctcaaacactttatattcagggcaattcgattaagtgcaacaaaacggtggttgttagaccttcttctaaggcagcaaggtgggaacttgacgataatctggagtcccttccgtgcaatgttcg

SEQ ID NO: 181633 - DNA, 198 bp, Arabidopsis thaliana landsberg
gagtatgaagttgtaaagccgaaagtcatggcttcgttcatggaacttttgctggcaaacacaaatacgttagagactttggttgtacagttgggaagttgcattgctagatcaagatttaaagagctgtttcagatcgcactcacgctttctcacgacaaaaaggtctcagttatgctcaagcgaagcaatggctga

SEQ ID NO: 181634 - DNA, 870 bp, Arabidopsis thaliana landsberg
atgctagaattggagaagtcttcaagcaaccgaaatcttgatgatcttgtcatggtagctactgagcagaatatatgtgccagggaaaaatttgctgaggtatatgtggttctttaactgattgtgatttgctgttctattcagacacctggaaaaagaaatgcctctgtgcttcatgaatttaagaaattggttagaaaaggttcagataaaaatatatttttactaatatgaccatatatcgttttagttgtatttttgtttgttggttaaagtatcgttttagttgttgattacatgtttttggaactgtttatcacataggttcttattattagttgatgttcttgttcaaggagaatcatcattcttaaattgtcagtggccttactttttacgatatgaattctttttcgtctttatcactttatacctttgctcaacaagtaaaaagaaaattatccttttaagtcagatttctagacttgttttggtactgttaaagggttttaaaccttttatgtatgaaattctatagattcaagaagagattcatgctgctagagaagaggcccaggttgctcgtgaacaacttgtgtctaaggagtctgaagttattgatgtacttaatgttggtctccctttcaaatctgaagacaatttcttattgttgccacccagtatgccattgcctaattgaattttttactttttattttgaaggaaaatttcaactcactggtcaacgtagcaacagaagttgaagtcttagagtctgaatttcaaaaatataaagcatcagtagaaaccatatcatcagttatgaatgagggtctccaagattttgctttcttctctccgttgatacat

SEQ ID NO: 181635 - DNA, 111 bp, Arabidopsis thaliana landsberg
atggagataatgacgcaacttagtcctcctatgatcactgtggaaattctcttatgggtcagctttacaacctgctcttctctgaaccccgacactgatatcaacgcaaag

SEQ ID NO: 181636 - DNA, 272 bp, Arabidopsis thaliana landsberg
ccattgctcttgctccaaccgatcacgtcctcttcttaaaccgttacgctgctcacgtgtcgcttcaccaatatgctgaagctctctccgatgccaaacagacgataaaactcaaaccgtattggactaaaggttatagccttctcggagctgcttacatagggctaaaccagttcgagttagccgtcactgcttataagaagggtttagatatcgatccgaccgacgaggcgttgaaatctggattggttgaagcggaggcgtctgtctga

SEQ ID NO: 181637 - DNA, 578 bp, Arabidopsis thaliana landsberg
atgacgagccatggccggaaagtagtccgggtggtggctagggtcaagccatcgacggatctggcatcaacgaaatcaatttcggttcagaaaccgatgggtgatgattcagagactgttacaatttcgttcggagctcaattcgctgggtaatttctcttcattcctttctgattctgttgttaatttggagatttcgaattttgagtgggtttatcggatttgtcatgggattcgttaatttgatcgaaatttatgttcttttatatataaactcttgtgttaatcttctgttttcagaaaggtttgacattatatttttgagttgaaatctttctccgtctgttgtggattagcgacgtttcaagggaaattaactagtatgtttgtttgttgttctgtgttgtggtagatcgaaagattcatatagattggactattgctacgaagaaaatgaaactactggttcaattctcactaaggagataaagcctcttatatctactgtctttgagggtaaagatgcgaatgtcatcgcccacggagcaagaaatagtggtaaaacacatctgatacag

SEQ ID NO: 181638 - DNA, 152 bp, Arabidopsis thaliana landsberg
tgacagatcccaaggtgctgtaccaaagcggtgattccaagaacccgagcggagcgccgctgttcgcgctctatttcgcagcatccaatccgaaacccgccgcgtttggactggcgaccaagatagccaaagggattctggacacgctatag

SEQ ID NO: 181639 - DNA, 243 bp, Arabidopsis thaliana landsberg
atgactgaagggttccgtgggatcatccagacgatgggactcggaaacctcaaacccaacattgtggtaatgaggtaccctgagatctggcgcagagaaaatctaacagagattccatccacatttgttgggataatcaatgactgcataacagcaaacaaagcagttgtcatcatcaaagggttagacgagtggccaaacgagtaccaaagacagtatggaacaatcgacttgtactggatt

SEQ ID NO: 181640 - DNA, 73 bp, Arabidopsis thaliana landsberg
tcaaatcgaagagcgtaagagagagagcttgagagatcgattgttccgtgtgttgggtcttcgatcggattga

SEQ ID NO: 181641 - DNA, 495 bp, Arabidopsis thaliana landsberg
atggttcaacaaggatttgcaaagtggtttatgtcccatgtaagtcactaaacttttatgttataggtttactaaagttttgggtatgcatatgtaattgctcagctgagtaattttgttgcaacaggttgagaagaagtgtaatgagaatccagaattggttagcgaaggactgtgggcactgtcatgtggcccagctcggcgagttaagactagtacaacttgcaagattaatggagtgcggtttagcacagtggatcgtgagaagttcatgcagacacaaaatagtggtgtaatgactgaaggtgaacataatggggagaacatagatttttatggtgtccttaaagaggtaattgagttacaatataactcgaattatcaagttcgtcggtcggtggttgtatttcgatgcgattggtacaaccaagtaggaaagactgtgggcattcgagatgacagccatttcaaatccatcaatgtgcagtcattttg

SEQ ID NO: 181642 - DNA, 229 bp, Arabidopsis thaliana landsberg
cagtccctgcacaaccatcagtcatccccttcattacgcttggttctcgccggtaagggtatctgcatataagcatctatgcatgaatgccagctccggctcgggtcagctcagcgtccgggtaaccttctcgctttcccggcggcgtttcctgcgcgcccggatcggggttggcttcctgcaccatccatgcgctttcggcaaagatcgccagcatgttgtcgcccag

SEQ ID NO: 181643 - DNA, 339 bp, Arabidopsis thaliana landsberg
agttggatgggccttgatccatcaaacagccaaaattttgagtcgctacggactcggacagcttcttcaccatcgtaggcgagttcaaatcgacttgagctccggtagagattcagtctcagattgctgcttcgcatctaaaggtatgctttcctaaagatcttctcctagaagatcatcattttcaacatcgaaatcttcagtatctccagtgagggaaggttcaagagcgtggtacgttcgtcatcctcaccgtccagtcagattaagggcgtccgcatcaaatggtggttacaaccaaccatctcagcgtcgtgagtcgcagtatcgcactgggag

SEQ ID NO: 181644 - DNA, 2578 bp, Arabidopsis thaliana landsberg
atggtgaagaagaagccaaaccagagtcgccatcttcttccttctcgcctctcatctccttcttcagtaccccactttgttccttctgctgtatcgcgatcggcgaaagttcatgggttcttcgctagcaagttgggaaacaccaacctaaagctgaaatttggaaatgttatggaatctagagctgggttcttcagttctgagcttcctagtcatggattcgagtctggtggttttactgggtttcaaaagcggggatggtatggaatcgtttcttttcgtctctctttttgtgattttgctgggtttcaaagtaaagttcgaagctttcctaagaaaagttctgaaatttctgagttccttttctctatgatcctctgtttctcgttagctaagtaaaagtctacatttttctgagataaacttgtcttcaggatgaaatttctggttttgatttagggtttaaacagagtttctgtggtaaattatcgaccttttaaagcttttctggttaagtacacgtttggctcgtccaagacatacgacatgtatgagaatttcagagaagaagatgagaaattagtaggctttacttgctattttgccatttctgtgtagttgttgatttgagtagctcaacgttcatttgatgattttctctttatagatagactagcagctcgacactgtacacacccttctcattaaaactttgttctccagatatagaaataacatcagaatcttaaaattcttcaccagctctagttgattttggtttgtgttttcctctggcaggaagtcttggatcaatggagctaatggtgtagtttttggactggtaatagctaatgctgctgtatttacaatgtggcgagtttcagacaggagctggatggtgaaaaattttgtggtctaacatattactgctaagctcttgtcttggatttggttgatctttgatatgtttgaaccttgatttttgagcagctatcaacgtacagttttacgagtggatatatacacacgctaataacttcgggttttagtcatattggtaccagtcaaatcatcttgaacatgattggaatctcctacttcggctccagagtaagaattatctttccttgtcgtttctccatagaaaaatgcttctcaatattcgatttttgtaaatgagatgagaaatgctttcatttgtttcctatgaagtggctactttcactttattggagacacattcactaatagctaatatacttaagaaagaaaagtccttagctagatactattaagtcggttctttttgggaaatttgctacctgctgatctatccattgaattaactatttatcttcatctctaaaatccattgttgctattagattgcaagaaccttgggaccgctctaccttttgaagctgtactttgctggagcacttggtggctctctttgcttcctgagttatcacgccctcttggctacactcaaggtatatagcaagtttccttaaatcatgctataaaaaagcttttaaaagaataactctcttttattgatgattagaaaactctctcaaaaactaaacagcaaagctcttttaatgttttctcttatgtttgccacaactcaacaaacatatatatagggttagcacacactgcaatttcctattcctagtcctacatgaattaggaaactccttttttccttttcttcttgaactagataattactctttttgacataacttaaaccgacttgtttaagttgtcttgggcttcaagacttgaagcttacccaacaaggtccacagattgatagtttctttcattgatcatgttgcatttcatttgcagtacatgttatatgtgcaaaacgaagttttgaggtttagactaaatgattttacctctggagattaaacgaaatgctttacctttgatattggctggtcaatcatacagggtgaaggagttgtcattaaggatcatcaatcaacagcccccatttcgcagctgctggtatgttcgtactcacctaactaaatgatttgtctgagcatgaacagacttggttgatagatatagagagtgagacgaaaatgcacatgtacttgtttttggataccaaatgccgatgaggtaaactctttcctatttgtgtacagggtgctgatggatctatgtttgccatcgcgcttctcgatatgttcatctacccaaaagttacaacatactttgcgttgatgctccgagtgcatgtaatgtttgtaagaactctctacatactcttcttattgagtgaaagtcatgtgaaccaactaaaaaactcgcactctttaatcttcagcgaatcataaacttaggagtcgagattttaaatattccagaggtgtgtataatctgaaaacctaatccgcatttgctttgaaacactatatatgactatctcttaaccataacttttttgggaatgcaggggggaccgaaccatatcgcatcgagttcgggtcagttgggaggagttgtggttgctgccatggcgtgggcacggataaagaaaggtcgattttga

SEQ ID NO: 181645 - DNA, 185 bp, Arabidopsis thaliana landsberg
gtccctcccgagaggcgagatttatatctattacgaagaagacaatactctacaccatcgtagaccgtccgagccttaggcgctggccgttcggatatacagaagaagaagcgctcatacgtctaggtcgtagaccgtctatgtatctagatagagcacgccagacagttggttctaatatttga

SEQ ID NO: 181646 - DNA, 503 bp, Arabidopsis thaliana landsberg
atccctcactaacgatcaagttttatgagcgtacacccgaacaacaagcaactgttggatatcttactaacccatctcaggctggacagtcagaaagaagcctgggaacaccttctactcaaacaactgctctacctcatggaactatcggagcaacagctggtcatcgggctattgcgcagagtaatagcactgatatttcagataacttgtttagatactctgcgcctgaagaggtaaattctgaccctacaaattttggaatagttttgttgaagctcaatgttatgatcacttgagttgagataagaaatcaatgtcaaaaggttgttttgtgagagtttaaaactaaaatggtgagttcatataacgttactattgctcatttttaacaggtgatgactttcccttcaacttgcggagcatgtacaaagctgtgtgagacacggatgttcgttactagtatcctttcaaaactctgtagccgttccttggttctctga

SEQ ID NO: 181647 - DNA, 267 bp, Arabidopsis thaliana landsberg
atggttcatctttttgcggtgttacctgcatcagacagggaaaatcttgaagttaagcgagtccacaactgtcgaaggtcagaatcttatactttctcttggacccttgtgtcttgacttattgacggcttcttttagcttcatattcttaatctgactctgtgcttcttttgtgaatcagatcgacccatgaatggcaagcttacatttcacgttctcatgcgttacgtaaagcgttcgtgtctgccaagggtatttactatccag

SEQ ID NO: 181648 - DNA, 284 bp, Arabidopsis thaliana landsberg
gactctactggttcgttggaagaagaagataaggttctagctattggttgtagtgataattctctcagcatttgggatattaaagaatcacgcatggcttttgaaattcagtcaccaggttagttttactgtacttggggtttaaggggtgtgatgactcaagttagaggttttgatttatttagtaatttttggttgcagaaaggtgtctactgtatactatgcggttatggggagacagtatttcgactctccgtatcgcttctggcactattttcaatgag

SEQ ID NO: 181649 - DNA, 1122 bp, Arabidopsis thaliana landsberg
cttggttctgtaaatgaccgtaggggaaaaaagaatcttgtattggctggctggggcgacgattatttgctttcagaggactgtcttaatcctttttatgtttccagtaattacaactcatacagtgaccaaacacaacaaaatctggtacgctcactttgagcttcagttactcttatttacctatttatccttgtcgtcttattcacgtggttattctgagtccaaacaacttgtgagtgttgtgtagaaaaggttaaacgaggatagaattgactacgagcttcttgaagagttgatatgccacattgatgacacttgtgaggaaggagccattcttatatttttgcctgtaagctgatactgagatatttcatgtaatgagattcgctcatcctctatcgttttggcttgacattatttggttgataacagggagtggcagaaatttacatgttactcgatatgttagctgcttcctatcgttttcgtggacctgctgcagattggcttcttcctctacattcttctattgcatcttcagaacagagaaaggtgtttctgcgtccccctaaaggcttacggaaggtaatttcatgtgacatccatataatctgttacactattgctatctctagttcagatgtctactctcctagagatgagttacttttcatccattttttccagatgactagtttaatggctttgtctttaatgccttgcttttacatgttctctattgtaaatcaatctaaagttgttaggtgctctctaggttgtgtgttttgaatattgatgcattgttttttcggttataagagattcatctcatttcgtgcttctacttatttccttgcattcccactagcaaatgaatatagttgatattgacaaaaaaaatatcgaaaagtaattctgttccagaccccactttttaacaaaaggactacatcaccaatattggttttcttgaaagttgtattatgtgtatataatatacagtaaaggctgcatggatctctgcaaagctgatctgatatatctttgcatcgtctcttatgttcaggttatcgcagctacaaatattgcagagaccagtataacaattgatgatgtggt

SEQ ID NO: 181650 - DNA, 228 bp, Arabidopsis thaliana landsberg
tcttcgagtgatatatcagatgatgtgactccatataacatcatatcaaaactatcattgctagttctgcattctcctcggttaaggttattatggtctcgaagtttacatgcaaccgcagaaatctttactaccttaaaatccaaccaagacgagcccgacgagactcgagcaataagagttggtgtgccttcagaagaagggatcatagaaaatgacatcaggtag

SEQ ID NO: 181651 - DNA, 379 bp, Arabidopsis thaliana landsberg
atgatagatccagcctcgcatgttctaaatgttgtcaacgatgaactcttgggtgctcaacagagaggagagttgggtttagcagagcctgtaattaagactttgattccccttttggaggagctaccacgtgttgtaaaatctagcaaacatcttctttcagatgcactacaagtggcaactcgatggagctggatgatgggaaatagtactcaaatgtcaccgcttgaggcttggggttttctccaacttattgtggcatatggattggtgcatgcaaccagtcaagataatactttacgatttgcctcatatgttgctcactttaaacaagctccgaaactctttgaatctcttggtctcagttatgccatgccaa

SEQ ID NO: 181652 - DNA, 135 bp, Arabidopsis thaliana landsberg
atgaccaatgaactcagcagcttcgggaattttgggaggcaagaacaccggactgtccagtgtgcaccggagtgtctgacatcaacggtaacgatcacctaccaacttagaattgtcacgagcgacgccagaacg

SEQ ID NO: 181653 - DNA, 337 bp, Arabidopsis thaliana landsberg
ccgtctttgccgagtgcccgacaaaaggcactcgcaaaaaatacaacactcggcaaagcttggattccggtagtggcacgacgatggcggccctgcccagtgtcacggcacacagcatcgaaccgagcgtggaggccttgggcccttccacctcacctccacggcgacgacggccctacgcttcacggcgctcggtgccttgcactccagcgaggcctgctctaccacgacctggcattatcccgcgtgcacgacaaccagggagaggtcaagattggcgacatcgttctcactctcaccgccatcctccacaagtcccacaccgtccactgcgtag

SEQ ID NO: 181654 - DNA, 168 bp, Arabidopsis thaliana landsberg
gtgtctgcatatgaggtggccatgacgcctcttgactcacgatctccctggtctactcctgctcagccggacttctctccagcagcctcgagttattactcggtaggaatacgcaccccatcaccttatactgggtgcttcacgccagctcggatcaacttaacctag

SEQ ID NO: 181655 - DNA, 966 bp, Arabidopsis thaliana landsberg
atgcatatcaagtgaaagcatacaagctggaaatgctttctctcattgctaccacttcatctatcgcttcaattttgagagagtttgaggtactctactttatctgtcaaatcgattatagaagttttttggttcattctggaaagtttgtatgatcatttgactttccagtatgatataaataagcacttcttaaagtgttgttacataaggatcgtcatctttgtccctgtactgtagtttctggccaaaatgatgtgtgcatgactgattctttaagttttttccaggattatattaaagatccagacaggagatttgcggctgatacagttgcagcaattggtttgtgcgcaaaaagactgatgacaattccaactacatgtcttgatggattgttagcactagttcgacagggtcagttatgctttattttaattgcattcattagttaacctatttggcagttcagtttaagtagctctcacaatgttgcagaatcttttgctggcgattttgagtcagcggatggagaagctggagtattggtgcaagccgtgatgtcaattcagactatgatagagcgagacccccttcgtcatgagaaagtacacacatatcatccactgactgcacatctaattcgtaccatttcttaaaaacatgcttggaacctgctgcaatgatctcaaataactccttttgtacatctattttcaataatgtattgattttttttttcttgttcattttggttgcttgaaggtgttaattcagctgtttcgtagtctggattcaatcaaggtagctgctgctcgtgcaactattatttggatggtgggggtctactgctctttgggtcatatcattcctaggatgctgaccacaataaccaagtaccttgcatggagctttaaatcagaggcatcagagacaaaactacagattcttaatactattgctaag

SEQ ID NO: 181656 - DNA, 268 bp, Arabidopsis thaliana landsberg
aaatctgcatcaacgtttaagatgtctcataaagaaacgccaattccgtgtatgaaatgggaactttgtgtgcaggtggttaaggaggtgatcgacccaagcgcgaccatagagttcaaaccaaacacagcagacgatcctcacaagaggaaaccagacataagcaaagcaaaggaacagttgaactgggaaccaaagatatctctgagggagggactgcctcgcatggttagtgacttccgtaaccgaatcttaaacgaagacgaag

SEQ ID NO: 181657 - DNA, 1379 bp, Arabidopsis thaliana landsberg
atgaggacgacttccgaaacttctcttcaagaagaatacgtcatcgacgccgttgaccaccgtggcttttccgccagaaggtctattaccggtagatggagagctgcatggttcattatcggtaaccttcaatcactagctgctctgtttttcaatttcctcttctttgaatccctgaggacatttttgcaggtgtggaggtggcggagaggttcgcgaactacgggatcggatcaaacctgataagctacttgactggaccacttggtcaatctacggcggtcgccgccgctaatgtcaacgcttggtctggaatttccactattcttcctcttcttggagcttttgtcgccgacgcttttcttggtcgctacataacaattatcatcgcttcttttatctatgtcctggttcgtctccttctgtctcttctctttcgatctgaattttacaattagtgaaggaattgtagaaattgattcgtttcaaccgcaatgtgatggtttggtacggtttcggttttgattaagtcaaataaaatttttaattttcaaagaaacttcggttttagatcggttttattccttttcggtttgatttggattcggtttctctgatatagaagaagtagaaattgagttgagaatatttgaatttgatgtcagggactggcgtttctgactttatctgcgtttctgattcccaacaatactgaagtgacctcgtcaccttcttcttttctcaatgcactcttcttcttctctctttatttggtggctattggacaaagtggacacaagccttgtgttcaggcttttggtgcagatcagtttgatgagaagaacccgcaagagaatagtgatagaagctctttcttcaactggtggtaccttagtatgtgtgcaggaatcggcctagcgattttagtggttgtgtacatccaagaaaatgtaagctgggcacttgggtttggaatcccatgtgtgttcatggtgatctctcttgttcttttcgttttagggagaaagagttataggtttagtaaaacaagacaagaagaggaaacaaacccgtttacgagaataggtagagtcttctttgtagcattcaagaaccagagattgaattcatcagacttgtgcaaagttgagctaatagaggcaaatcaatctcaagaatctccagaggagctgaggtatgtttaacatataggttgtggttcgaacttcaaagtcttgttggatgattataagattctactttcatgtgacagttttctcaacaaagcattgcttgtcccaaatgattctcatgaaggaaaagtggcatgcaagtctagagatgtcgaagatgctacagctcttgtcaggcttattcca

SEQ ID NO: 181658 - DNA, 488 bp, Arabidopsis thaliana landsberg
atgagtttggatgtgaagaggatactgatgactgtgatggtgaaaagactacatcgaaaaatggaaactcaatcaaacaaaagtcttcaaaaccttctgactggcaagccctttttggtgcgaataacaacgatgatgagtttatgttaggcattaaacatacaaggtatatataagcctacatactctttagatttgaagtgcatgctttcggttggtatctaatttggtcgttgtgctgagacttgaatcctcttgtcaatttcaggaagagtattaggctatatggtgatttttattcctcagacattatagttgcttcccctctcaagttacatatggtaggcagccttgtctatcctttcataagatgatttagttatgcaaatcttcttgatttgatctctaatcaacttcgctcttgttaggccattggtgcagcagaagaaaacaaggaacgggatgttgattatctttcttccatagag

SEQ ID NO: 181659 - DNA, 266 bp, Arabidopsis thaliana landsberg
attcggctgttcccggcgacggaacgcaacttagtgatgaaacgaccgcgtttgaaaggaggaatcatagaaacgcttcggaaaaagttacgattacgctttgtactctgctcgaggaaacaagatttcaaagaaaatcctccgggatggaagaaattgccgccggtgactccgcgacagccacatccgattactccagtctccgtcattttcgtttcttctccttcgtcggagatatttctcagatggttttagatgcggagtaa

SEQ ID NO: 181660 - DNA, 1822 bp, Arabidopsis thaliana landsberg
atggcgtttcaggattttgacaagatccaagaacgtgtaaacgccaataggaaacgtaaattcaggaagaggatcatcgttggaacggtctctttgcttgtggttgttgctgccattgttggaggagcttttgcttatgttgcttatgagaaaagaaatgaacaacaacaacaacaacaacaagcaaagaaccacaacaaaagcggtagcggcaacaacgtcgtcaaggatagcgacaagaagagcccgagctcaccaaccccgagccaaaaagcgcccgtttccgcagcgcagtcagtgaaacccggtcagggtgataagattatccaaactctctgcagttcaacgctttacatgcaaatctgcgagaaaacgctcaaaaacagaacagacaagggttttgctttggacaatccgacgacctttttgaagtctgccattgaagctgtcaatgaagatcttgaccttgttttagagaaggtcttgagtctcaagactgaaaaccaggatgataaagatgcgattgcgcaatgtaagttgcttgtcgaagacgcaaaggaggaagccgtcgcgtcgctgaacaaaatcaacgtcacagaagtcaacagcttcgaaaaagtcgttcctgacctggaaagttggctaagcgcggtcatgtcttatcaggagacatgccttgacgggtttgaagaagggaacttaaaatctgaagtgaagacgagcgtcaattcttctcaagttctgaccagcaattccctcgcgttgatcaaaacatttaccgagaatctctctccggtaatgaaggtcgtagaacgacatcttcttgatgacatcccgtcttgggtaagcaacgatgatagaagaatgttaagggctgttgatgtgaaggctttgaagccaaacgcaactgtggccaaagatggcagtggggatttcacaaccattaatgatgcgctgagagcaatgcctgagaaatatgagggaaggtaagtataccagagcattttataacgtgaacgtggtcatcacgtcatcttaggtttaggtttaggtttagaaactaagtagattcgttgtattgaaattgtaggtacattatctacgtcaaacaaggcatttatgacgaatctgtgactgttgataagaagaaggcgaatcttactatggtcggagatggatcacagaagacaattgtgaccggtaacaaaagccatgcaaagaaaatccgcacttttctcacggcaacgttcggtaaaacccctaattcttttggaaaatttgtcttgacaataagttgagaccaagttaaatatataagagatatagaccaatagaattataggttcacctcctattaatcttgaaatctaaaaagcgaacttgaaatatataagtgtcaatctgaatcaaaactaaaaaaatttctaaatgtttggtatccttaatagttgcacagggagaagggttcatggcacagtcaatggggttccggaacacggctgggccagagggacatcaagcagtcgcaatacgtgtccaatccgatagatcaattttcctcaactgccgatttgaaggttaccaagacacattgtatgcttatacacaccgtcagtactacagaagttgtgtgatagttggaacaatcgacttcatattcggagatgcagccgccatcttccagaactgtaacatcttcatcagaaaaggcttaccagggcaaaagaacacggtgaccgctcaaggacgtgttgacaagtttcagacgactggtttcgtggtacacaattgtaaaatcgctgcaaatgaagatcttaagcca

SEQ ID NO: 181661 - DNA, 290 bp, Arabidopsis thaliana landsberg
atgactggcgtgttgcaggccgtcaaggacgggcagcagcagttctccgcggccacgatgacgccgatgtatgtgttctccccggactcggcgaaccagaccgccgagggcgcgtcgctgtcgcgggagggccaggtcggcaaggccgatgaccgcatcgaccgagtggacccgaagtggtcgaaggtcatcagcttgtgcttccgctggatgggcgacgaggagcgggccgacttggcgtcgctgcagctgatgtgggacgacacaaccaaggcgtcgatcatcgagaa

SEQ ID NO: 181662 - DNA, 126 bp, Arabidopsis thaliana landsberg
cgtcggcaattttttctcagtgtagtagatatagaatgtcgaactgtcaaggtcttcagcgcatttcgagtaattttattcataaaattaagtttaaacattgagtgcacaacatatgagactagg

SEQ ID NO: 181663 - DNA, 333 bp, Arabidopsis thaliana landsberg
atggccttctatgccgttttcccgatcgcgttgctttgcgctcgggacgcgaaaggcgcggcgcttctcacgctcgcgctgttcctcttgggatattatgtcgatcagacttgcgggttgaaaccggatgacgcgctgcgccgtatgtcgctcgccgccaatgccgcctacttcgctgccgggctttgcgccttctatgtttatcgtgcgttgaaagacttgggtccggatcggcgcgacaaggcatcgcttgcatcgctcggccttgcccttctgatctggctcagcgcttacgcgttctccgcgcacttcgacggtgttgccgtctcatac

SEQ ID NO: 181664 - DNA, 149 bp, Arabidopsis thaliana landsberg
attacaaagatattgcatttgcgcacatgcgaccaccaactaacattaacgcatggattgcaaatggaattctagagtttatggtttccattgacgcaaacagggcagcaccgacatccacccatatgccggtggatagtcagggttaa

SEQ ID NO: 181665 - DNA, 596 bp, Arabidopsis thaliana landsberg
agcgtaaaaaaactcgaacaaacttcacaacgactcactaataaaactcttcgcagtaatttagcgaccaaaaattatatattaaaaacggagcccgcgtttagcgctctttttcagttttctgttacaccaaacttttccttgtcacaaatttcccgagaaaaaagaaaaagagaaagcaaaaattctgattcaaagacacattctctgaattttcatttctgttacaaaaccagtggtcggaaatcgaatggatcagagaaaaggtgatccaagaatatacattatcactgttctcttcctttcatgtatcctcataggaggagtccttttaggactttacctggtccgttctgatccgaaccctctgtttctacaagcgggtatggtctttgttggtgtcccttggctcttttggttcttggcttacgtttactcctgcgtcctcaaaccttgcgtcatctttgttagccagagcaccatctttaatagcaagagcgttaccagtttcgatccggagaaaggcgatcctaacaaggctccggaaaccgtcacgacaacttcggatccggcgccgaggaattcaccgaaggaag

SEQ ID NO: 181666 - DNA, 1163 bp, Arabidopsis thaliana landsberg
cacctagttcaccatttgatgatgactctgatgacgttgatgagcaacctcttgttagacacaggccaagacgtgcagcatccggatctctggctccacctaacgctgatcgttcccggagtgggagtcctgaagaagaacatgcaagtattaatccagcggagcgtggcagtgggtttccttctgaggtatccgtaaaatctgttttgtttattacactgaaaccagactagaattccagtattacttattggttagagtagctagtccttacctttgctaatactctattgtgtatgctctagtggggaggcatttcatctgaggaacatgatgaagctgtcatgctcgaggcagccatgtttggtggcattcctgaaactggatataatcatcttccattcttacctcctcagccgagggcccaaccacgtccaccctcaccttcgctgacagctcagaggttgatacgggaacagcaggttaggcaacacttactacctacttgactaaacccctctactatattgagagttatgggttattataaaattcttgagctgttacatcgagcaggatgatgagtatgttgcgtccctgcaagctgaccgagataaagaaatgaagtccattagagatgctgaggcacgtcagctagaggaagaaactgcgagaaaggcttttctggaggaagaaaagaaaaaagaggaagaagctcaaagaaaactcgaggaggaacaggtgcttcttctgttttcatttatatctctctttgtaaatccgcgttcaaacaagtttttgtaaatatgttgactgcggattgttttggaggcttctgctagtggatagagaaagatcagccaaaacacctgcagctttattacatcagaaaaatgtatctctatacaatacaatagctgtgaaaataatctggtttgagttcctatgtaggcgttctcttcgttactgatttaagttttttttttctctgaatgttgttgcaggagctagaaagacaactagatgcaaaagaagcgtctttacctaaggagcctcaagctgatgaagagaatgccattacccttctaatccggatgccggatggaacacgtcggggccgccggttccttaaatctgacaaactccaagtcggttttccctaa

SEQ ID NO: 181667 - DNA, 287 bp, Arabidopsis thaliana landsberg
atgagtatcacatcttactgcacgatcgtattcgaagggttgtcgataaccttgctctctaccttcaattctctgtgaagaatctggtcaacagtcagtttcagaaggagattgtggcggagatggtggatccaagagctggcggaggaatagataggatgctggaggaatcaccgtcggtggcgagcaagagggagaagctgaagaatagtctcaagcttctgaaggaatccaaggacgttgtggcggccattgttgatcagaactctgtatacgctgatcgttaa

SEQ ID NO: 181668 - DNA, 164 bp, Arabidopsis thaliana landsberg
atgaatggtattgagcttaatttggaaggagttaagtataagcttagtgtggtacttccgatttcagaagatttcgagaagttgaagaaggattgggaggagttttacgcttttggtaatcttggttcttcaattttggattttgattttacgattttttcgtg

SEQ ID NO: 181669 - DNA, 387 bp, Arabidopsis thaliana landsberg
atggtgccactgaagccagacgcatggccacaagaggtgagcaaagccaaaggggttgtagcggttggggcgtgtgggtgggtaagtaactataacgtgcctgtcatgtcaaacgatctcaaggcagtgaggagaatagcgaggaagacgagcgagagaggagggggcttggcttcagtgcagacaatggcgctggtgcacggggaaggagtcatagaggttgcctgtaacttgttgaatccaagccaagtggggggagatgaagtacagggactgatcgagaggcttggcagagaggaaggtctgcttgtgggaaaagggtattatacggactatacacctgaccagatcgttgaaagatatatggacttgctcaacaattcataa

SEQ ID NO: 181670 - DNA, 71 bp, Arabidopsis thaliana landsberg
atgactggtgctaacatggttttggaagatcattatcgagccggtccacggaatgttgttataaccggaag

SEQ ID NO: 181671 - DNA, 622 bp, Arabidopsis thaliana landsberg
ctcaatgtgaatcacttcaactatttcaacggttggattttggatcaacgacaaatctaacggttaggtatccaaacgatgtttttgatcggatttggtttcccgccacgccaaatgggacgaagccgttaagtgacccgtcgacttctctcacaagcaacagtaccggtaatttccgtcttccacaagttgtaatgagaactggaattgtaccagataatccaagaggatttgtagattttggatggattccagatgatccgtctcttgagtttttcttttacttgtatttcacggaacttcaacaacctaattccggaaccgtagaaacaagagaattcgtgatcttgttgaacgggaagtcttttggggaaccgttaagtcttaactacttccggaccttagccttgttcacttcaaaccctttgaaagcagagagcttccagttttctcttcgtcagactcagagttcatctcttccacctctgatcaatgctatggagacttactttgtaaacaaacttccacaatcatcaacggatccaaacgaccgtaagctctctcattcctctgcttttccatttcagacctctgcattttctcatcgtcccggtctttatga

SEQ ID NO: 181672 - DNA, 83 bp, Arabidopsis thaliana landsberg
atggtggaggtggaaatttggttggaagccgacgttcgctaccgactaccacaaccaagatggtgtggcgccttgagcgacag

SEQ ID NO: 181673 - DNA, 520 bp, Arabidopsis thaliana landsberg
ggttattttctggagaacagtggaacacacctgcacaaggttttgggtgatgataatgttttaaccgttagattcgatcaattaccaaaggagtcaacatactgtgacaacccttactctaaatacaaagagattgctaagaatggtatcatggttggtttacgtcgttatcaattttttggtgggtcattttccttttctcttgattatcatttatgtttttgcaaaaacaacacttttccttgttaaggtgctaaggccatgtctagcagatattgtcatactttatcacatagtaccttgttaacttcttttaaacagtcttcaaagatggagggaaagcagagaaaaagaagagaaattctacaaagcaagtgaaatgctacttcatacgcacggtttctacagcatccagtgatatggagaatccttatatcctttccgggatgtcaattcatgaagctcgtatgcattttatgcatgtgcatacattgccttctcccgccaactatatggcaag

SEQ ID NO: 181674 - DNA, 470 bp, Arabidopsis thaliana landsberg
cacgtacgtgcgccctggaaactcctgggatctccgaagctgccgacagcagccgggagagtctctccgggactacatccgacgattctcgaagcagcgcaccgagctgcccaacgtcaccgattcggatgtcatcggcgcgttcctcgccggcaccacctgccgcgacctagtgagcaagctgggtcgcaagacccccaccagggcgagcgagctgatggacatcgccaccaagttccctctggccagaaggcggttgaggccatcttccggaaggacaagcagccccagggtcgcccaccggaagatgtccccgaggcgtcaactcagcgcgacgccaagaagaaaggcaagaagaagtcgcaagcgaaaccgacgcgccgacgcggacattgtcccgccgccgagtacaagaaccctcggaaacctcccggaggcgccaatctcttcgacaaaatgctcaaggagcc

SEQ ID NO: 181675 - DNA, 577 bp, Arabidopsis thaliana landsberg
agcaggtcaaggatatggagaactccagaccattatcaagagtttgatagaggttggagaccgccttggcaagcctgttttggctacgggaaatgttcactatatcgaaccggaagaagagatttatcgtgaaattatcgtccgtagtttgggacagggtgcgatgattaaccgaactatcggtcatggtgaacatgcccaaccagcaccacttccaaaggctcattttcgaacgactaatgagatgttggatgaatttgcctttttgggagaggaactggctcgtaaactggttattgaaaacaccaatgccttggcagaaatatttgaacccgttgaagtcgttaagggtgacttgtatacgcctttcatcgacaaggctgaagaaacagttgctgagttgacctataagaaagcttttgagatttatggaaatccgctgccagatattgttgatttgcggattgaaaaagaattaacatccatactggggaatggatttgctgtgatttatctggcatcgcagatgctggtgcaacgttctaatgaacggggttatttggttggttctctttag

SEQ ID NO: 181676 - DNA, 704 bp, Arabidopsis thaliana landsberg
  unsure (1)..(704): unsure at all n locations
atgggagaagtcgatgagaaaccgtccattgatgtagcttctccaaggtattcatcgaacaaagttgcggatattggtacagagctttacaaaatgaaagcttcccttgagaacagagaaaacgaagtcgtttctttaaaacaagagttattgaagaaagacatcttcatcaagaatcttgaagctgcagagaagaaactgcttgattcgtttaaagatcaatcgagagagttagaggaaaccaaagctttggtagaagagtcaaagagtagagattgcttcattaaaagagaagatagatacatcttacaatagccaagattccagcgaggaagacgaagacgatagttctgttcaggattttgatattgagtctntgaagactgagatggaatcgaccaaggagagtcttgcacaggctcatgaggctgcacaagcctcttctttaaaggtttctgaattgttagaagagatgaaatcggttaagaacgagcttaaatcagcgactgatgcagagatgactaacgagaaagcaatggatgatttggctttagctttgaaagaggtagctactgattgtagccaaacgaaagagaagcttgtgattgtggaaacagagctcgaggctgctaggttagagtctcagcaatggaaggacaagtacgaggaagtgaggaaagatgctgaattacttaagaacacga

SEQ ID NO: 181677 - DNA, 284 bp, Arabidopsis thaliana landsberg
atgcattgtttgctacaacaattgggtaaagaaatcactcggggacagtgtctcgacgagcccgggaaacgtaagtttctagttgattctttggagatttcagatgttcttgcagatgaaaccgtaagctttttgagacatgctttccatccaagtcctactcatcacaaaatccacttttagctaactaattgccttctttcttaattgtggtacatttgcagggtacagaaactgttttaggaatatcattagatatgtctgaaattgaagatcaagtgtat

SEQ ID NO: 181678 - DNA, 371 bp, Arabidopsis thaliana landsberg
aaggcaaaagctttgggaggaaaagctacatggtctgtgtacttcatgaggctaagaaggtattgtgaaaatggatgactaggccatagaggtgttttggtaactacatcagcaaattctgcttttcccatatctctgccagggtggctacagctagggctcccttgggcacagaaggacagtgcagatctgaggaggtgtgtgaagcttgtgtgttttgaccgaagtgagctctgagagcttcatgccgatgtgcgctctctgtctctatagacaagcttcagtggaggccgtgtggaacgctgacctgtctacgtcaagctacccaataatagagaaggcaccgatgagtgcgctctgggcccagctgg

SEQ ID NO: 181679 - DNA, 159 bp, Arabidopsis thaliana landsberg
atctctatcacattatctaatgaaaagagagagagagagagaatcacgaaaaggaagaagaagaagcatgtaaagatacaaccagaaaagagaagacatgagggatacctgagcgtactactcgtgccgacatgctctgttattgttactacattctaa

SEQ ID NO: 181680 - DNA, 143 bp, Arabidopsis thaliana landsberg
cggacaatagtttacctattttctttcaaactttactctataaacaatcacaagacgattactcgatcaagaaagcatctatccgcgtctgccgatctacgggctcggcttgtttcgcgtttgcccagtcgtgtcgtgtgcac

SEQ ID NO: 181681 - DNA, 253 bp, Arabidopsis thaliana landsberg
aagtagaacgcgtccggttgaatacgaggaaggaacatcggctatagctaaccggattaaggaatgtcggtcttatccattgtatcggtttgtccgcgatgagctaaatactgaactgcttactggagagaatgttcggtcgccaggagaggagtttgataaagtgttcttagcgatttctgatggaaagcttattgatccgttgttggaatgtctcaaggagtggaacggagctccggtttcaatctgttga

SEQ ID NO: 181682 - DNA, 689 bp, Arabidopsis thaliana landsberg
agccggaaactttctttgtcatcaaacagcttcagcggaacatccaccgcatttacggggtcaagcaggcaaatcggcacgacctcgtgtgccagctccgcgatatgctcggcagcagctttccattcgagctggttcgcactgatattcagtcattttacgagagcatcgaccgcaagcggctggtcgagaagttggaccgcgaccagcttcttagcccggcctcaaagaaatacatcaagcaggtgctagaatcttatggcacgatatccggcactgcgactggcatcccgcgcggtgtcgggatcagcgcctatctagctgaactgtatttgcgcccggtcgataaggcgatccgagcgatccccggcctggttctctattgccggttcgtcgatgacattgttgccgtgtttgcgcgaccgcccgccggtgagagcctgggatcgttcaaggattggatcatcgcgattttcggccagaatgccctcaatcataaccctgacaaaactcacgaattcgcactggccgacagcgtgcccaaagaattcgagtatctcggctacccgtttcatctaaaaccgggagccttcgaaatcagcccgagcgcggcgaaggtggcaaaataccgcacgcggatgaatgccgttttttcgaatactggcgcgagaagccggccaattcaaagg

SEQ ID NO: 181683 - DNA, 133 bp, Arabidopsis thaliana landsberg
atgctccctcagttaccgtcaccaactcgatcgccaccaccaaccaatagacactttatcaccatatcaaagacaaccgtcgcaaggaaccataacatatccgttggagaaacagctaagaagagacatcgaa

SEQ ID NO: 181684 - DNA, 1126 bp, Arabidopsis thaliana landsberg
gctgcctcgagcgaagtggtcgctctcgggtttcgtcggcggtgtacgactaaaattcaccggactgtccggtggtgcaccggactgtctggtgagccaacggtcggccgggccaacggtcggccgcggaatccgtgcacgacacgtggccgagcaacggtcggaaggaggcaccggactgtccggtgtgcaccggacatgtccggtgcgccaacggatccaagtctgccaacggtcggcttcgccatttaaggaaagaaatcgggcaccggactgtccggtggccagtcgacagaaggcaagatcagccttcctggattgctctcaacggctcctagctgccttggggctataaaagggacccctaggcgcatggaggtgtatacaagtattcctacaacattcctaagcaccaagacatcgatttcgcgcattcttttcattgtgatagcatatagagctctagtggagttgtgaactcattgagttgtgttgcgagctcttgttgcgacttgtgtgcgtgttgacactctgtttcttgtgtcttgtgtgtgttgctaatccctcccttgctccgtgttctttgtgaatttcaagtgtaagggcgagaggctccaagttgtggagatcctcgcaaacgggattgagaaaaagcaagcaaaacaccgtggtattcaagtgggtctttggaccgcttgagaggggttgattgcaaccctcgtccgttgggacgccacaacgtggaataggcaagcgttggtcttggccgaatcacgggtaaccaccgtgccatctctgtgattgatccttgttggttattgtgttttgttgaggattcctctttagccacttggcaattattgtgctaacgattaaccaagtttgtggcctaagttttcaagtttcacaggatcacctattcaccccccccctctaggtgctctcactatagcgccaacgatcgactgcaaaagtgaacagtgagcagtgtcgactgcgcgcgcagagtcagagcatgcgccagatggcgcaccggacagtgaacaggtcatgtccgtgcaccaccggactattcggtggcccacatgtcaaaagctccaacggtcgaaccccaacggttgggtga

SEQ ID NO: 181685 - DNA, 135 bp, Arabidopsis thaliana landsberg
gtataacaatcggtttaacaaatcctgcttgtaagaaatacaaatatattttggataccgcggatgggaaggtggtgcactatagactggaaaccacttacacgttaattttagacattacaagtttgatattcg

SEQ ID NO: 181686 - DNA, 1862 bp, Arabidopsis thaliana landsberg
ccaacatgtgattgaagtctgcgagagcaaacttgatcatgatgtggattcaggaggacgtgatagtaatagtaaagtgaagaggaagtcggatgatacgcgatatgaaggtgatccgagttttgcgttaccgttgatgtatattgcaaatttgtatgagactttagttggtgaagcaaatgtgaggcttgcttcattgaatggaataagggataagactattggagtagctcttgaagctgctggtggcttgtataggaaattaactaagaagtttcctaagaaaggtattttgtatctgctctgatgtgttgcaaaagtgatattttgagcactagtttgatatgtgtgattgtcccaagtacttgcatgtacaggagaagagaactggcaacttcagttgaaacaaggacaagatttccagaattggtaatacatgaagagaaacgagttcgctttgtggtggttaatggtttggatattgttgaaaagccaaatgatttgcctattgaagaagctgaatggtgaaaatacatcatcagatctttactattgtgaattgtgtatgagttatttacatcagaatataattggatattgtcactacaggtttaagcgattaacaggccgtaatgaaatggctatctctgctagagattataaattctactgccctcgacgcaagcataggcgtcttcagaattctgtctccagcatcaatggcttgcctgtaagaccaatcaacactctgtttatagcttttatctgagtttgaagaacaaagtgacagtttttgtttttgttttgtagacatttccaggtatagactcttcaacgttagctaatacacaaggatttcgcgaagtaagtgcatactctttcggaatctacaatcaatggcaaattctaatggaaatgatcttgagttcatcgaatttatcaaccatctttgtcataattgcaggatcaaagccaacaacaacacactccttctccttccaaacatcatatgtcatctttgtctcatcaatttcatcaatctattcaccagagccaccaacaccatcaatctatataccaaagtcaacacgcagccacacactatcccggtcagaaccatcaatgtgaccctgaactatctcacacacaaatggcttgcttgcaacccctcactggaggccatgtaatggtacaaaatctacgctatatctattttctaatagtataatttcgatttccattaaggtcctcgtatgtttatctgtctttccacagccaaatagtccggcgaaattttgtgaccaatgtggagcacagtacttgagagagacatccaaattctgctcagagtgtggttccaagagactcgggatatagtgaagagagacaaatctttgctcgagtctcgggttgaaatatcgttttgaggcacaaattttacgagaagtttagtgtttcaggttggtgaagtctgagctagtatatatttacttggcccggaagtagttaacctaattttgattaaagcttgaatggttttggctatgtaaaaatgtataattggatagattttgatgaatataattaaaccaaacacatagacttgaattattattaaaaatccattaaatttcttaaataatgagatagtatatagtatatatggagagaggacacaaattaacaaagtgtgtcccttataattatatagaaacaatgatcaaatagagagtattgaatcaacattgtttggtgcacatacaacgacggaaggctccatcgaattcgcagtgaccgccatcaaagtgctcgaattgttggcagatgatggcacaattgtttgtgcttatgcacactcctga

SEQ ID NO: 181687 - DNA, 1177 bp, Arabidopsis thaliana landsberg
atgaacgacctcttaaaggtttgtcttatctttttcttcacacattttctctgttgcgctttgacattacgtgatcaaggagatttctgctctaatccaaacaaccttttcgtgtatctttattaattgctctctaaattttgaaattagaaactccgaatcttagggtttaaattcgcttggtatacaaggtttctcagaattgacgtttctttagttcggcatttattccgagaaaatccatgatgaagaatgctcctgtgagattcaaaaaatcgtttatagaagtaaaatgatcaaataaatctggaggtttatgttggatttagtgggataaatcaaagatcaaacgttgtgaagcttgtaagtttctaagatgatgtgacagatgttttgattggacagggttcgttagagttctccagggatcgctctaatagaagcgatattgagtcaggacatggccctggtaactctggagatctcgggctctctggtttcttcaaaaaggtaaagcttttgtatccctctgcaactcttctcaatcagtgctacatatgtgtatgactattgagatcatcatatcaattgtttaggtccaggaaatcgaaaagcaatatgagaagcttgacaagcatctcaacaagcttcagggggcacatgaggagactaaagccgtcaccaaggctcttgcaatgaaatgtaatccaaaacgagttcgattttagaccacagaaacaagttcatgatggaagatttagatgaactgaaatttggtttctctttgttttttgttccgcagcaatcaagcaaaggatggagagagatgttgatgaagtgggaagaatttctcgtttcatcaaaggaaagatcgaggaactggaccgagaggttaggcttagagatgaatacattgtttgttgcatctgtttctatgatctggtcatcttttgtttaagacttggattgatatcttcagaatctggagaaccggactaaaccgggttgtgggaaaggaacaggtgtagacagaacaagaacagccacaactatgtgagttttagcctattaaaactcaagattgtctatatacaagtatctttcagtcttccttgacgcttttttcttcggcagtgcggtgaagaagaaatttaaggacaagatatctgaattccaa

SEQ ID NO: 181688 - DNA, 382 bp, Arabidopsis thaliana landsberg
atggtgcatagagatgtcaaaagtacaaatatattgttggacgatcaatttaccgctaaaattgtggattttgggctgtcaagatcttttcaactcggagatgaatctcaggtttcaaccgttgttgctggtactcctggatatctagaccccgagtgagtattttttttttctttttgaattattaagaggttctagccctagatatggaatgatctataatgaaaatggatacaaaagtgttaaaattttgtccttcctcttagtggtgcaaccaactcgtattaattgtacctcatattctcgcctcaccagatattacagaacaggtcggtcacctgaaatgaccgatgtcagcagttttggaattgtgttattgtag

SEQ ID NO: 181689 - DNA, 99 bp, Arabidopsis thaliana landsberg
  unsure (1)..(99): unsure at all n locations
atctaaagacgcttctccgagatggaaaaggactagaacccgatcttcaggaacttaattttgagctcggaaacaatttccagcgagacaaaggagnag

SEQ ID NO: 181690 - DNA, 467 bp, Arabidopsis thaliana landsberg
cccccacagcgcccaactccgcctcggccttcatcgccccgaacatcaccttcatcctgctcgaccttgatcggtggacgacctttggcggcttctgtccgatcagtcacttcgccatacggtaccgcgtcaaggactttagctctacaagcaatcgagcttctgaatcacaacaacagcagccttggacgaccgtctcctcgcacatcaagcccgagtacggcgccatgtacgtcattcgtgagctgctccccggcacctggtacgagctggcggtgacggccactaacgaggcgggcgacaccgaggcgcggtacctctttgcgacgttgacggtgctgggcgccaccatggagccgctccatcatcaccacctcgaaggatacaatcgaagacatttaataggaggaggaggaggagttaatggaggaggggggggggggaccacctggagagcgcctctctag

SEQ ID NO: 181691 - DNA, 153 bp, Arabidopsis thaliana landsberg
gcgccaagcggcagaccgttgtctcccgctccagcgcagaggccgagtaccacgctgtggccaacggcgttggcagaggcctcctagatgcgccagctactacacgagctccacggccctcttcagcgtgcaaccctcatctactgcgacaac

SEQ ID NO: 181692 - DNA, 627 bp, Arabidopsis thaliana landsberg
ggagttcagacctctcattcaagtgaggcgagatcgtgatactggaataacttttgaacatcttgatagtctgatgctgaaagatgggtatctctataagaaagtatccttagattcaatatcttcctggggggttataccaacgaaggatgagttactaaaatttacgcctgtagaccgaaaagaaactggtgatgtagagtggatctcagaaatttatggtgaagaaaggaagaaaaagattcttccaacctgcagagagggtgggaaaggagaaggatcagggggtggaaaaggagaaggatcagggggtggaaaaggagaagggtcaaggggtggaaaaggagaagtttcatcagatttcaagtcagaaagtagctatgagttatataatctagtttgtttcaggtaaggattcgtccataactgtacttttttgcaagtctttgttgtaatttcatatgttaagcacttcctatctttccctttgtagtcgaaaagactttggtctgattgtgggtgtggatgacaaaggtgacggttacaaggtatgtagttattcaccatctcttaatgccctatggcctgtctctgatgattttcaaatgttacaggttctgaaagaag

SEQ ID NO: 181693 - DNA, 1181 bp, Arabidopsis thaliana landsberg
ttccgttgaagattatttggtcagaagctatggaagaagtttcaatggttttgcagccaaacttactgaatctgaaaaagataaacttattggtgagttatataatcatagaagataatgaaactcgtgatcatgatggtttatttgatgatgtcttgtgtaatttgtaggcatggaaggtgtgtttcggtattcccaagcaccgtttataagctttttacgacaaggtcttatgagttcatgggacttggtgacaagagcaacaatgtccctgaggtcgagagcaatgtaatagtaggtgtaatagacggcggaatctggcctgaatccaaaagtttttcagatgaaggcattggcccaataccaaagaaatggaaaggaacttgcgcaggaggaactaatttcacctgcaataggttagtaacatttttatttttattctcaaagtttcttgcgtgacaagaaaagagcaaaagataaagattaactacccggccctaatccaaattctactgcagaaaggtgattggagcccgacactatgtgcacgactccgcaagagacagtgacgctcacgggtcacacacggcttcaacagcagcaggaaacaaagtaaaaggagtgagtgtgaacggtgtggcagaaggaactgcaagaggtggtgtgcctttaggtagaattgctgtttacaaagtgtgcgagccattgggttgccatggtgaacgaattttggctgcgttcgacgatgctatagcggatggggtagatgttataaccatttctcttggaggcggtgttactaaagttgacattgaccctatcgctattggatcatttcacgcgatgaccaaagggattgttaccacggtagcggttggaaatgccggcactgcactcgcaaaagcggataaccttgcaccatggctcatatccgtggctgctggctctactgacagaaaatttgttactaatgtggttaatggagatgacaagatgttacctgttagaagtctttcccttgttcagttgatatatgaatgtgcttgttgtcgtcatcatggtgactaattaaagttttatatgcagggaagatcgatcaatgactttgacttagagggaaagaagtatcctttggcgtatggaaaaactgcttcaaataactgtacagaggagctagcatg

SEQ ID NO: 181694 - DNA, 117 bp, Arabidopsis thaliana landsberg
cagaatcaaacaagcaaagaaacaaatactgcaccaagcaaaggaatcaaagaaacaaataaggaagcaaacaatgaagtaagcaataaacgcacagaaggaaacaaagctaaataa

SEQ ID NO: 181695 - DNA, 726 bp, Arabidopsis thaliana landsberg
tgcgcaagacaaggatttgctttggggttgacattacctgttagcgttatttctagcattaatgtggaatctttgctgaatctcattgctgattctttgtctgtatcttcatccatgacgggacaagtaagtagcagtttttatatgcttcgttcttcatgtgattctgttatagagactcatatgctttgaattgaaattgacacaggatataaaggaatgcttattgggtcgattgtttgcttatggtgcgcttgcacgttctggaagactgattgaagattggcaatctgataaagactctccgataatcaaagaatttaccaatgctcttattggtcttgctgcaaaaaagcgttacttgcaggaaccagctgtgcatattcttctagactttgttgacaaggtataatagattcattcttatgtgcaaagtttagtgcgggtttattacacattgtgaagtttttttgtgatcctatcttttttattgtgcagttgcctactgaacctgttgttactcatgttatggaagctccagaactttataaatggtttgaacaagccaccgaggtgggaaacccagatgctttgctcttagcgctgaaactccatgaaaaggtttcagtcgatcatcctatatttagcaagctactgccagttcctttcagttccgggaagtttttttctgctgatcatctcactgccattggtaattgcttgaag

SEQ ID NO: 181696 - DNA, 1140 bp, Arabidopsis thaliana landsberg
cgtcaccggcagcccgcatgcgcccagcggcagcttcggcttcgacgaacgcggcaacggcctgctctatgtcgatccgtcgcaggactacggctccggcatggtgctgaccgatccgcagggctggggcgccggcaacaaggtggtgcaggccggcttcatcaacgcgccgcacaccgtggactacctggccaacctgcgcctgagcgtggaacgcgacttcgtcagcggcccgttctccagcctggagttcggcgcgggctacagcacccgcaacaagacctacaacatcgaccagaacttcctgaccctgggcggcggttccttcagcgcaacgaacacgccggtcctgtcggcaccgttctccggcagcagctgcgccccgctggcgtggatgggcatcggttcgatgcagtgctacaacccgttcgacctgatcgacaacggcacgctggccgaggtgccggtgttcatgtcctcgctgccgctgccgccgaactggcgggtgcacgagcgtgacgtgaacccgtacgcacagctcaatatcgacaccatgctgggcgacatcagcctgcgcggcaatatcggcatgcaggtggatcacactaatcaaacctcgtccggctcgcgcgtggtagtaaccccagccacttggtttacaaacgggcataccgagttggttcctgtgtcgggcggtaccagctatacccgttacctacctagcgccaacctgatctttggcatgagcgacaacgacgacctgcgcttgagtgcagcccgtaccattgcccagccgcgcatggaccagatgaacgctagcctcgctgtcaaaggcgacgatacccacctgtcgtcgatcaatccgaaccaggcgttcttcagctcggacggcggcaacgccaagctgctgccgagaactcggacctgtgccgcgatggcggcggcggtggctacttcgccgtatcgggttacttcatcaaactgagcgactatatcgacccgaacgcagcctatctgtacgacttcagcgcgttcgtgtcgtcgtacctgaccccggcgaatgccgccacgctgggcaccacccagggcatcgtcaccatcccgaacaacgacggccatggctatgtgaagggcgcccag

SEQ ID NO: 181697 - DNA, 549 bp, Arabidopsis thaliana landsberg
atgaagcggatcttttacttgctcaaaaaaggggtctttcaaggatggctaacggagacaggtcctgaagctgagctcaacaagtttgctctctacgaagtttgcgggatttatgattactccctctttgccaaactcggtgttcacttcttgttgtggtaatgtttcaaaaatcacatctttattttctcatttttagagataagtagagagatgttgttcaaaatgaggatttggaaagttcaggggtaatgctgttaagttctttgggacaaagcgtcaccatgaaaagtggctgaaagacactgaagattatgttgtcaagggctgctttgcaatgactgagctaggccatggaactaatgtaggcatattgcagtgtcattttgcatttatccagactatatatgtattggtgatctttgatttggtggctttcaggtacggggaattgaaacagtgactacttatgacccaacaactgaagagtttgtgataaatactccttgtgaatctgctcagaagtattggatcggtgaggcagctaac

SEQ ID NO: 181698 - DNA, 1298 bp, Arabidopsis thaliana landsberg
atggcgaaacttagagaagataactctgtgagaaaggcgatggaatcagaactgaacaagactattcacattacaggtttgttcaagttaagcactgaaagttttagaaagattaatgagaaaactagacttaggtgttgtgttttttcttttgcagaggagacaatgagagcaaagcagatgctagcgacgatgtctcatgagataaggtcaccattgtcaggagtagtgggaatggctgagatactttcaactacaaaactggataaagagcaaagacagttgttgaatgtcatgatctcttctggtgatttggtgcttcagctaatcaacgacattcttgatctctccaaggttgaatcaggtacaatatactgttttcaaagtttttgatcttgtggtgtggtcattgttcaaatcctcgattacatatgttattttttggtatttgtgtgttctttttaggtgtgatgagattagaagctacaaagtttcgaccaagagaagtagtgaagcatgtgctacagacagctgcagcatcgctgaagaaatctttgacattagaaggaaacattgcagatgatgttcctattgaggttactacacatttcagaaagagttaaatgtggcaaaagtctttgtgatcttaactttttttcctttaaatgtttaggtagttggagatgttctaaggattaggcagatcctcaccaatttgataaggttctttacctgattcctgtattatttgcataatgacaagttttggttcctgatttgttcaaacgttttgcagcaatgctatcaagtttacacatgaaggaaatgtaggaatcaaactccaagtgatatcagaaccatcctttgtgcgggataacgcattgaacgcagacaccgaggaacacgaacaaaacggtttgaccgagacttcagtttggatttgctgtgacgtatgggacactggaattggaatcccaggcaagcaagcaattctgacaaatgaacatgaaaagactaaaaaactccaactaacctatatattaacctggttcatgttttggtgttcttgtgcagaaaacgctcttccatgtttgttcaagaagtacatgcaagcaagcgctgatcatgcccgaaaatacggtgggactggtctcggacttgctatttgtaaacagctggtaagctattattaggattttacaacactacagaagaaactaatgaagctcgttatcctaatctatctctgtttgtttacaggttgagttaatgggaggccaactcactgtccaagccgg

SEQ ID NO: 181699 - DNA, 125 bp, Arabidopsis thaliana landsberg
cacagaacaagaagagtgacaggctactttcaagcctcatctatctctccagagtaaaagacttggaccgcttcaaagaagcttcagatcgatcagatgttgtggccttcgtcgtgtgtggctga

SEQ ID NO: 181700 - DNA, 380 bp, Arabidopsis thaliana landsberg
tgtggtaagcttcgtgattgtgtttgtagcctcgttgttgagctgtccatcggaaaatgtcgagagctagatctggatcggattgagctcgtaacgctgtcacaacgtcggagtttgtgaatcctggttttagattctgaatccatgtttcgaattgagtttcgagtggtgttcgggttcgaatccgggaaggggaggtgtgtgattccggtgaagatgagacggaagagaatgatagagataggtggttcacggcggtggaaagaaacgtcgaagatagattacgggagcgatttgtggaggtgcggagaatgaggcgtcggagcgtcgccgacatcgtacggaacgagaagctgaatctccggtgtggccgtccgtag

SEQ ID NO: 181701 - DNA, 1382 bp, Arabidopsis thaliana landsberg
atggcggtagactccaacctctcttcgcccttgggacctccggcgtgtgagaaggacgcaaaagcccttcgtttcatcgaggaaatgacccgaaacgccgacaccgttcaagaaaaccttttggcggagattctcgctcgcaacgctgacaccgagtacctccgccgcttcaacctatgcggcgccaccgaccgtgatacctttaaaacgaagattccagtcattacatacgaagatctccagccagagattcaacgcattgctgatggagaccgctctcccatcttatctgcccatcccatctctgagttcctcactaggtttgttcaccatactttgttctctatctttactttaccgattactaaatcaatcaaaatccataaaccaataactcctaaaaacatttttccagctctggaacatcagccggagagaggaaacttatgccgaccattaaagaagagctcgatcgtcgccagcttctttacagtctcctcatgcccgtaatgaatttgtacgtcattcacatgaataaaacttttttaaccataaaaatattacgtagctagacgacaatatagtgacgtatgatcagtttgttaaataaagtctttattatttgttcaagcgttgacaatattgtctctttcgggaacaggtatgtgccgggtctagataaaggaaagggaatgtactttttgttcgttaagtccgaaacaaagacaccgggtgggctaccagctcgaccggttttgaccagttattacaagagtgaacactttcggtcacggccgtacgacccctacaacgtctacacaagtcccaacgaagccattctctgtcccgattcatttcaaagtatgtacactcagatgctatgcggcctccttgaccgcctttctgtcctccgagtgggcgccgtctttgcctctggtctcctccgtgccatccgcttcctccagctccattggtctcgcttcgcccatgacatcgagttaggatgtcttgactccgagataactgacccgtctataagacaatgcatgtccggtgttctcaaaccagatcctgtcctggcagagttcatccgccgggagtgcaagtcggacaattgggaaaaaatcattacccgaatttggccaaacactaagtaccttgacgtcatcgtaactggagccatggctcagtatatcccaacgttggaatactatagtggtggtcttccgatggcttgcaccatgtacgcctcctccgagtgttactttggtttgaaccttaacccaatgagcaaaccatcagaagtctcttacaccatcatgcccaacatggcctacttcgagttcatccctctcggtggcacaaggccgttgactcgttga

SEQ ID NO: 181702 - DNA, 962 bp, Arabidopsis thaliana landsberg
cgggaggagatggagagggagatggaggtggtgcggattctggcagcgcaagcgatagcggaagtggaagtagcggcgggaaagaggagcatggagatgataaagtagagagctatagaagcaatgataatggagaaagtggagtttatccttatgaagaggaggaagaagaagaagaagatgagaaagatctttttgggtctgataatgaagagtatactaagacacctgcaattagcacttactcaattccaggttagttcgaatttgcttgagactgaattggcttttgggtttctctggctgctaagtattttctgttatgaaataatgacagttttgcctgcgggatggagcaatgataaccatggtgggagagggggaatgggacgtggtcgttggtcaaatggcacaggagcacctgggcttcttcctcggcctggaccttaccctgcacgtggtggtaatcgtggtggttttggcgggagataccagaattatcagcgtgatgaacgttttgtttctgagcttaagctttcgaaaagcaaagaaacgttggctagaaaacaaaccaactttcaggaggtaatatatatcaaggaatgctgttttaactactacatttttatggttatggtaacgcgtttcgaattgcttgatgttaacagccatgtgagcttacttgctacagtcgagtagaaggtggagaagtaatctacgatgaccaaggattggtgaggcgtttggtgttatagttcctttagattctctcttttcttcttttgtcatcccattgaactatttaattgatggggtatatgcagacctttaaacataccaactatcacagcttatatgtatccactttgttcttgtttcccagaggcttttcaaacgtcatattggtgaagagattggagcggatttaaatcaaggttatgatacttttattgagaaaaaag

SEQ ID NO: 181703 - DNA, 2065 bp, Arabidopsis thaliana landsberg
  unsure (1)..(2065): unsure at all n locations
atgattattgctaatgccagtccttccgtcaggtattctttcaaagctaatttgatctagtgttacattaactcgtatagttagtaaaaaacttatcgcttctctcgtttatcactgacagttgtgcagcagagacgctcaacactcttaaatttgctcagagagcaaagctaatccagaacaatgtaagtttgcactgtaatccatattgtaagttttgagggagataaatcatgaataacctttggataactattatgtatcaaattattnnnnnnnnnnnnnnnnnnnnnnnnnncgaggatgtcctggaattacgccgtcaaatccgacttttaaaggcgtgtaacattttaaactgccgttaggtgctcgttatgtgaagctgtaataacgctaagacaattttttgtgtctgcggaacaggaagagctttccctcctcaagcgccagaacatatccagggcgttgtcatttggatcagcaacagccaacttcgcagaatcacaagtcgattcgccatcaagtgtaatgcatgagacaggacaacagcaggctggtaacttgcttgtgtatgaatctggaggctgtgtaaggatgtctagaaagcaggtatatcaacttgagaaagtatgttaggctttactgaggattcatatgcctctgtcttgggattccactaaaaatctgtatatgtttatatatcagttgaaatctttggagataacacttgctggctcattaagacgagaacatgtggctgatgcttcaattaagaagcttgaagcggagatagagcatctaaaccgtttggtaattctttttcacctacactgttcccattcccacttatgtttcagatatcgcctgaatccatttatgatcatttaactttaggttcgacaaagggaggaagatactaggagcacaaaaatgatgctcaggtttcgagaagacaagatacagaggctagaatcacttcttggcaaccatatatctgcagattcttttttgctggaagagaataacgtgttgtcagaagagattcagctgcttcaagctaaaattgataaaaatcctgaactgactcgctttgccctggaaaacataaggctactggatcaacttagaaggtgataaatcttcaaaaacatgtgatgccgacgttaaagataatgtgtgcttttttatatataaaaagttttgttattatggtacttgcagatttcaagagttttatgaggaaggtgagagagaaattctactgggcgaagtctcaaatctgcgaaaccaggtacctctagttagcacaacatcctggtatcgattcattcttcttttcgattgcaataccatccttaaccttagctattgctcatgcagctcttccagtttcttgatgaaaactctgactggcaaaaacatgttgatgatggaatagagccacaggttacatctatttacctctttctatatgttaatatctcttaatatccagcaggattgtgcttcattggttgcttgtcaataatatcttgttgtatttcgtatggcacagggtgcatcacgtatgagcaaagaaaattgttctctacaggaggaggtcgagtcactttctttctcttgtttcttgtgcatcacgtattttcaatttcattttcttaacgtcttttccattgcagttaaaaaagacctgttacgagcttgagaaatgcagaagtaaccttggttcttgcctggaagagaatgcaaagcttagtaggttagcaaatctgatttgatgattcttgggtttttcctggtatatggccaaatgagttctcattttccccataccctgatgagtcttctcgccattctcctgcagagaaatcaatgatctacaagctatggtcagcgatatcagagcttgcacacctgatgaacatagcagtgtgaacaaacaaaaggtttgaacaataagtacaatgtgatttactaatctgcccaaccatctgttttgttgtttctgcaggttaaccttgagcgtttcactcaacagtcgaattttgtaaaaaaattgtag

SEQ ID NO: 181704 - DNA, 475 bp, Arabidopsis thaliana landsberg
caaaagctattgacggtgcaaaacgtcaaaaacaaatgccctacgtcgcgggtaattaacaaactcatccacatatatatacgagtttcgtatctcaaacatttcataaatcaaaccatcatatacctctcaaatcatttctttgatttctataaacactattcttgttaatcactgaccataaaaactaatggctacttctcgtctagctaggtttgtatcagaggttgctccacctcaatttgtgacggttatgaggaggcatagagcagcgaagcagaagctagacacaatcaaagaagaagagaataaagaagattctttcaatggtgggatggtggtgatgatgaagacatctcatcaacatgtttattcacctaattcttcttattcctcttcgtctacttcggtttctatttccggatctagcagctctaagaattttcgaagctctttttctgtcctcgaaaactaa

SEQ ID NO: 181705 - DNA, 128 bp, Arabidopsis thaliana landsberg
tacgttgtataagtacagtgccggttgacgtgcagcagtgtcggaccattctcaaaatacgcctggtattccccgccccgagggccgttacccagcaagttaacgtgattgccccaacgtcgggcctg

SEQ ID NO: 181706 - DNA, 411 bp, Arabidopsis thaliana landsberg
gtcaactacgtccgcatcgtcgagtccttcgacatcgggacctgggcaggtgacgccaaccaggatgacctcggctgggggcgcccggccggggacccgggccacgacaaggacatcgagcaggcgaccgcgccgttcggcgacgccgtcgaggcactcgcggagctgctgcaggcggccgtcgacgacatccgctgcgaggtcgcgtttgcccacgcgacgcaggacctcgccgtcacgaaccgggacgtgaaagccggaaccgtcgccggcatcgacgccaagtggttcggctcgatcggcggcatcgacgtcatcgaggtcaacgtccgatggaccatcacgccgttcctcgatccggcgtgggagatcgcgatggcctaccagatggaggtccgcggtcacccgcag

SEQ ID NO: 181707 - DNA, 644 bp, Arabidopsis thaliana landsberg
cttgatgtcccggttattgatgaaagcagtattctagctatgcttgaggaagtgggtattctcaaaataggcaatgttggtgactgtggacttaagcttcttcgggaaggtactacactgtaacctaagatgctagattgttttcatgttcagcctttgacaaagatcttcttctttcattctcattttcaggtcagattatttttgccactgctccacaagagcactattttgactgtccttaccaactaagctctgaggggtctgctcaaacttatctagatgcatcggtaaataaatccttaccactcttcatgatttgtgctagtattgtacctttgtatcattttttttgcatttcaagcagtttagcatagtggaagtacagaagggagacgtgatcgtgatgggttcagacggacttttcgataatgtgtttgatcatgagatcgtttctatagtgaccaagcatacagatgttgcagagtcatgtatgtatatgtatataccatctctcttgatttttagtaagtgacatgttttttggtataaccattacagcaaggttattagctgaagtggcgagtagccattcaagagatacagagtttgagtctccatatgcattagaagcaagagccaag

SEQ ID NO: 181708 - DNA, 357 bp, Arabidopsis thaliana landsberg
gccgccgatcaggaaccgttgcaagttaccggcctggcttccggcgaatatcaactcaagatcaacgggcaaacgattggcgaattttccgccgatcaattgggcgccggcatcaatctggcggaactgaagacgccgatgctggagcagagttatgacgtcctggatttggtgtggcaacagacgcaatggcgtttcttcgcctggcgcggcatccagaatcagttgtggtttgaccaggatccggcggtgcaaaacggggccagggcgctcatcgccgcgttggaggcgcagaaggaaggcatcgtggaacaacaatacgccgtcgcccagccgcatccacgcattacgaattga

SEQ ID NO: 181709 - DNA, 531 bp, Arabidopsis thaliana landsberg
atgcacaacaaggtcgattctttaccggttcgatcgaacccatcaacgcgacccatatcccgtcaccactcggcgagtaacatcgttcatcgggttaaagaaagcctcacaacaagagtctctaaactcatatgtgccattttcttatctcttttactatgtttaggcattatcactttcatcttatggatcagtctacgaccacaccgaccacgcgtccatatccgcgggttctcaatctctggtctatccaggcccgacgggtttgagacgtcacacataagcttcaagataacggctcataacccgaaccaaaacgtcggcatttactacgattccatggaaggatccgtttactacaaagagaaacggatcggttcgactaaacttactaatccgtttgaccaagacccaaagaacacgagctcgatcgacggagccttaagtcgacccgcaatggccgtgaataaggaccgttggatggagatggaacgagacaggaaccaagggaagataatgttccgtttgaag

SEQ ID NO: 181710 - DNA, 81 bp, Arabidopsis thaliana landsberg
atgcagaagacgatcgaacgctaccgcaagtacacaaaagatcatgaaaccagcaatcacgactcacaaattcacttgcag

SEQ ID NO: 181711 - DNA, 183 bp, Arabidopsis thaliana landsberg
atgaaagaacgttttggcatcaatgacataacgctagctgagaacgtatttggagaccatatgtctcttaccaaattctacacagtgcaagatattttaggtaagtaatttctaagattattgaagtagtttctcatacttaaaggttccggtgctctccgtgaatttatcgtcaacggttga

SEQ ID NO: 181712 - DNA, 2754 bp, Arabidopsis thaliana landsberg
ctaggcataattctgctatagggcacgtaggtagcttgattactaccgaagacgtgaggattgagggggttatcagccatgttaaatttcatgattcgatgatattcatgaagaattgtgagaacctttttttcctgatttctattctactaataaataaatatatatatatatatatatatataatgttgattcattttaatttacaggtatgtgttatggtactgaggggaggacgaagagaagacgttcaatagtagcttgcaatcaattagctggttcaatccacttcaaattcagagacattaaagtacgtggaccaatacttactcatgcatacatatttgattaattagtttgtgtactgtacaatttacgatcaatctacaatttacaggctctcgaaatcatctttgttcgggaacttctacacaatgatgatcgtgagtttgctgatcagtttcctccactaagtagatcacacatttgtcatcgccaaggtggcgtctgatagtctcatgccaaggcacagcctctttcacatgataattagagacgacgagagaagaagtattagagaggctgctccttgatttgtgtagaataaaacatatacctaattattaatggatttacatggtttttctacgtgtgcattatttggttgactccaattatttaacaattgcatatttgtctcaggtctcatttagcaactaggtaatgtaggaatttaaatagctctataacctactttttaattgtttttttggtgaaacttttttctcataacatggttttttttttggtttaacggatatcttctcgtaacatatgttcttctcacatgttaacactaaagcagacacaagaaaacaaattagtacgttacgttgttgcatgtgttattttgatggctaactggagaaatacaagtcgttgtgattagccatccaatgggcctctaaaaataatgacttggtaaaactagacaacccaaaatcacaaaacaaatattctcttcttctattaagtaaaaaaaaaaaatcttattaaaatctggtttaaatgtttgttcattcaaataaataatggagtgtattttagaatcaaataaaaaaaaactttatcaaatgatttatttggtagataacaaccaaatcttgagctaaaaagggtgaaaaaatattgagaattttgttaataagtaaatagttatggttttgactgggtataggagatatatctaggctggtgaaaaaaaaaagaaaaaaaaggatatatctaggctttaaaatattcacatgcatacaatcagattttcatcggtgttcgataagaaaacaaaaagcaagtgtttgttttgtaaaaaactaatggcatacttaagcttcaagtctaatatggaaccaccacggggatataggagatatatctaggctggtgaaaaacagaaaagcaaaaaaaaaggagagttaatctaggctggtgaaaaaaaaaaggatatatctaggctataaaatattcacatgcatacaataagattttgatcggtgttcgattagaaaacaaaaagcaagtgtttgttttgtaaaaaaactaatggcatacttaagcttcaagtctaatatggaacgtacaccacgcgagtcaaacactccttgtccgcctccccaaccatctccgtcgttgttttcttcactaccagatgacatcgttttgaatatcttggctcgcatatctacttcctactaccaaacgctctctcttgtctccaagaccttccgtttgctcatcctctccaaggagctcgacatggaacgttcctaccttggaacccgaaaaccatgtgtttatgtctgccttcaatctcccacccatccttttgatcgtagatggttcggtctctggataaaaccctatgatcatcagcccctaacccattggacgatcgacatcaagtgtaccggacattggttgctaccgatgccctctccctattctcgttgcttacaaatagtccacgaaactgttggttcagaaacatacgaaatcggtggacaaaacatgacaccctcgactgacgtatgggtctatgataagctcattggcaaacaacgcaaagctcctagcatgatggtggctcgtaagaacgcctttacgtgcgtccttgatggaaaactatatgtaatgggaggatgtgaagcggatgaatctactcattgggctgaagttttcgacccaaagactcaaacttgggaagcattgccggatcctggagttgagctccggtactcttcagtaaagaatatccaaacgaagcaaggaaaagtgtacgtgaggagcaataagaagaactttgtttaccttataaaagagtgtatgtgggaagttgccgaggaaaacttgggtgagagtacctgtgagatagagaatgtatgctactgttatagtaataaaagatactggtggtatgacgcaaagtgtgaagagtggagattagtcaaaggtgtgagtggactttacgagtattataaaactgattctgaaataggtaattatggtggaaaacttgttgtcttttgggaccgtgcggtgtctcgtttaaccgcaaccaaagaaatttggtgtgctatgatttctcttgaaaagggacatgatggtgaaatctggggtcacatcgaatggcttgatgctgtgcttatagcccctcggtcgtatgcactctcacattgtatggacttcttgcaataa

SEQ ID NO: 181713 - DNA, 549 bp, Arabidopsis thaliana landsberg
aatgcatatggggaggaaatgactcaacgccatgggcctgacttcgactggatgcatccagacttagatgcatcggcgttgtaccatagtggtgggggtagaaagcatggcaggtgaggtgtttgtgtttgattcgacgatttcattaacaagaatgtgtccacttaattgctcaactatgtgtatcatgcaggtttgcctttggcaccggcgttgtggagtacaacaggactataggtcaagggaaggcatcgtcttcgggagggagttctcgctcctccaggtctgctcgagaggctcagctggaggaggagactcgggcagcacaggagcaggctcgagcagcacaggagcaggctcgagcagcgcaggagcaggtcggacatctgacgcagtatatgacttcttattttcaggtaattcgtctatctcatcacgtgtcattgaattcaaagtatagtgttgcgattctaacgtttcatccatttgcaggaaatgactactcgactcggccctgatatgaacttgcccgcttttcgccctccccag

SEQ ID NO: 181714 - DNA, 1789 bp, Arabidopsis thaliana landsberg
atgaatggtcactgtttatttgcagcatctcctcctcgtctcttccctcttcgctctatatcatcgagggtttctccatccggtagttacagaatcaaattctccgataatgtcgccgttgagtgtcggaatctctgtttctccgttagtacaagacaaggtatatctgttcctattctccgtgattgctcctttcggattccttctggacaattgtggatgattcttggtcctaatggctgtggcaaatccacccttttgaaggtctttctcttttctcttaaacattgcatttgcagagcaaagacttaagcttttgttaatgaagtatcattattcttacttaagtcatccttcaatctggtgtagactaggtttgctagttgctactttgggcagaatcttagatcatcacactgtttagtgcaatagctaatcttggcatttataacatgaaactcaaagagcattcaaatctttggatgctgtttgtatgtgtaactaagactgattacaaagaaatgccagttaaactgtttgatctacattaactgcttggaactctgcagattttagctggtgtagtgaatccatccagtggcactgtctttgtggagaagccgaagaattttgtatttcagaatcctgatcatcaggttaagtttcttgcttttgcaatgtgaatcatgtgtttgattttatcttgaaggatcttacttttttcccatctttgttttctttattgtgaagtgttctttctgatttgtattgctgttttatagttgagtaggcttgtgtggttgagcgtctttttccatatcacagacagccttaatccaaatctttaattatcctcgaaaagctagatatgctaatgacatcgagaagagtcattttgttgtcacatctgagggagatcagttagtaacagttggattttgattcaagtaaaaccgctcattctggtcacatctgaacgttcttgttcatcgcaggtagtgatgcctacagtggaagctgatgtggcatttggtcttggcaagtatcatgacatgaatcaggaagaagttaagtctagggtgattaaagctttggaggctgttggtatgcgtaattatatgcaggtcagtttatgtacattgaacaacaataagttgtttatatcttctagttccttttactaaagtatagattttggtgttgtttccagagaccgattcaaactctcagtggtggtcagaaacaaagaattgccattgctggtgctttagctgaagcgtgcaaagtgctattgttggatgagctcacatctttcctagatgagtctgaccaggtaaggtttgattaattctaacaacgtgctaatgaaacacaactagtattgcaagggaacccttccataactggaatatttcaacatcgacatatgattgtgttatagtagacattggaagtgagtaacttgcacaattgatatagtatctagaagaaatgaaatgaatttgacagatatgttatgacgtatacgccttttttaatcaatgcatattgttttctcggggtttttgttctgcagatgggtgtgatcaaagctgtaaaagatctgataaatgcaaagaaaggagatgtgacggcattatgggtgacacataggttagaggagctcaagtatgcggatggagctgtgtatatggagaacggtagagtggtcagacatggtgatgcagccaccatctcagatttcattaaagccaaacaatcgtcttacattgatcaaattggttcttaa

SEQ ID NO: 181715 - DNA, 212 bp, Arabidopsis thaliana landsberg
atgacaatccgtacttccaaagcgaatatggaaaatgtcgagcttgtggatttcttgagggagagtcctgaattggaattgagtgatgaagtcaccaacaacaccatcattctcaacataagaaaccaaacaacccgacgtttcctttgttcggttaaaaacagttggtgtagcaccaccaaaaccaatgagatccgaagaagtggaacgat

SEQ ID NO: 181716 - DNA, 1419 bp, Arabidopsis thaliana landsberg
atgtggatgtcggattcacacactcaagtatttatttatttagtgagaaggattatttttgaggacaaaaattgggtagaaaaagctatgaatcgatatcaaaatgactatagtaagtttgcacaaaaatgcgtgtgtctttacatggtcattgacccacaaattatactcaaagaatacatttaattctcatttacacacaattattctatcttaaatgtatccgtttcagttttcgaattaactattcaaacgttcaaatttgaattgatttcaaacttcctgggctttatcttctagccctcttgactctccaatccgggcagttttgacctcgatgtcccgttcacctcgcagatccatcacttcgtgtgtacttttgctcaaagaagcccatatgcctttcctattttgggcccctccttcttacgcggcgatctttgaccgatcccgagcccatggtgcgggatccgacaccaacaaagattgctccaaatgactctctgatttcccgccaaaatcacgttactcctatgatttcggaaccacgcataattactctcgtgacatctgtcacaattatgacggcatatcaattatttactattaaagcggggaaaactcttccacttcccccacgactctcaaggccgttccgtcattatcgctagcttgcgtaaggtaaattcactttactttcttcttattactttcacgctctatctttcttttagaacaaagctcctctgttcttcctctctgtactttctctcctccgaaccctcagactattcattttttacgatgaatcctgaaaatgaaaggcctgaatccccatctttcgaagatctcggatctagaaatgacctttgcacccggccaaatgatatcgccggtccccactaccaaaccacgtgcactcttcaatcccttaatcgatagggagagctttgtcggattctggctgagattatgaaagactcgcagatgccggagcccactgaatcaccggaggaccaccgactcgggttcttttgtgtatacgagatctacttcaagggttgcggtttgacttttccccttcccggagccctcgttcgatacttattagccctcgaaattgccttgcccaaattaacccctaacctcctccggactattctagggattattactatcgcgacggaagctggatatgtcatcggggttcccgaactgaatgaacttctcagcgtgaggagttcttcgaagaaagtgggatacttctcggcttatccgaatgccaacaagaacctcatctcgcatcttcctaataaagacgagaactggcatcacccgtggttctttattagtcatgtttactttgtaattaaactaggattcaaccagcggttcaccgcaggcctcggttttatatga

SEQ ID NO: 181717 - DNA, 372 bp, Arabidopsis thaliana landsberg
gaaaacgaattcatatctatgaactctcacagactttcattttgacatgccggatccagagaatccgggaacttgtaggtgcattaaacctctttggttggatccttacagacttgatagcatctgaacatgttcacaacatcatcgcagaacattggaagaaacctagcaaagggatctgtcttattcctttattgtctcttcaattcttagctgatctttgtgtttctttagatcctcaaaactccaatcccttctgatcccactgcttctgaccagcttgggctcgtccagttccccatagaccatgatgtccgcactgtaaagcctgcgatgacccttattgacccgtctcactacgggcaacgatga

SEQ ID NO: 181718 - DNA, 94 bp, Arabidopsis thaliana landsberg
gatgaaggatgtgaaggtttatgtgaaaaagaagcttgtacgtacgatccaaaaatccatttcatggtctttccctgaaacaattgatgaataa

SEQ ID NO: 181719 - DNA, 51 bp, Arabidopsis thaliana landsberg
agtctcttccttttccacgtcaaaaactcgccggcggttttcgatttcacg

SEQ ID NO: 181720 - DNA, 303 bp, Arabidopsis thaliana landsberg
gtagcttcagttcacgtgaaaattaaacctgctttaccgcagattgaagatccattgaccgtaaaagatgtcgagccttataccataaaagctgtgacaacgttcctggttgagcttgagaaggaatgccccaaaacagagaaatttaaggtatttttcgaaaaacttaaggcgtattccaagtacttgtgcccagtctctaaagcaaaaggctacaaatctgacatgaaggccaaggtcggtagcctttttgaggcaatgtcagccctcatctccgttaaacacagatctaaagaaggatca

SEQ ID NO: 181721 - DNA, 1583 bp, Arabidopsis thaliana landsberg
  unsure (1)..(1583): unsure at all n locations
atgccgaggtatagggtttaagatcctcagagttatactactgatacatagatagttacgtagttcgagattaggttttttaattacttgtttgattttgattttcgcaggtattactgtgattattgcgatacttatctcactcacgattccgtaagtttcctcctctttgttttattgtcttccctagtaatcgtgaactcgttttaggtgatgaattcgatctccggaggtgtctattaggtttccgatttggattctagtttaaaaccagtatgctatttacatatgtatatcacgctggttcccttcttgcctttgactggatttagctcaatttagtacttggaatcatggttttgtggttaagctgaaattctactatacgagttcgatttttgttttgtgaagtgaacttagatccaattttgttaccaatttatagttgcattatgttatctatggttttgatgtttttgtgtttgattaagaatgtaatcatgtttcacggattgtattgtaccgtcttctcgtattagtaaagttttatatttgataattttcagccatcagtaaggaagcagcacaatgctggttacaaacacaaggtacataaagaagagttcttttgtgtggttgtatacatggttttccttaatgtatgttaagagtttgatgatctttttcaggcgaatgtgagaatatactatcagcaatttgaggaacaacaaacccaaagtttgattgatcagagaattaaggaacatcttggccaaactggagggtatcaacaggttggtgctgtgtttaatcagcatatgcttgcaagacctcgccctcccatgatgctaccacctggcagtatgcctatgggtatgcgacctcctgttctgcctagacccatgatgcctnctccaggtaatttctgttattaaattagtttcccgcttgctgtgcggattcaacattcgaaagttttagtaggtaactttcatagtaatctttacaaaagactacagatgaaatagagtataataaagaacgtcatccatataggtgatttgagaaacttgacattgcatgaaactttaggcagctgatgaatatgagctttggttgtcacgtgctgtgtatcatgactcttcagacccttacgaaatagatttcattcatttaaatcatgtcactcaaacatcgattagtaggtttcatacatagatattcacatcctttttttccccacaactgtttgaagtgaaatgtaatattgtacatttgcaggttatatgcctcctccaggagtaccacagatgatggcaccgcctggtgctcctctacctccacctccacaaaatggtattctgaggccaccaggaatggctcccataccaggtcaaggtggcggaccaccaggaatggctcccataccaggtcaaggtggcggaccacctcccaattataatggactacctcctcctcctccttatcatacaaatccagctgctccaccaagtggtaatttcaacaatccaaacctcaacaatccgaatcccagtgctgaatctcctgaaagcaatgagtag

SEQ ID NO: 181722 - DNA, 922 bp, Arabidopsis thaliana landsberg
atggaatctctgaaacaagcttcttctgcttctgggttctgctaccaccaaggcttctcaggtgttctccaagtgtatgttcacaacgcaagaaacatcaacaacatctgcatctacgataaccaagacgtctacgccaaattctctctcacatacaatcctgacgataccatctccaccagaatcatccatagagctggcaaaaaccctgaattcaaccagaagcttatgatcgatgtaactcagatcgatgctcatgctgcagttctcaaatgtgagatctggatgatgagcagagccagacattacatggaagatcagcttcttggtttcgctcttgtcccaatctcagacatcataggtcaagacagtgtaactcaagactacagtctctcctccactgatctcttccattcccctgctggtaccgtgaagctcacgctttccattgttaacccttcttctacttcttcatctaatcccaagattaacaccacttcgatttcttccgaggtcgtgttgcttgaccctcaagtctctgaaacagtagattacacgaggattgagttccctgacatcaatgttgctaacgagaacaaacagatggttacagagtacttcaatgaatccggaaccggttcatttctctgtctcggctcaacacatggaccagaaacggacataacaatggtgtgcttggaagaaaaagagctttatgggaatggaagcttcatggcttcttcttcaacaacaacaagcttaagcgacgaaaagaacacagcagattcaaacgagaaagagaatcgagagataacagaagtatcaagaagaagaagcaaagaaggtgaagaagaagaggaagagaataagatgaatgaagaaacccacatgcagaaacagatagcagagatgtatatgaaaa

SEQ ID NO: 181723 - DNA, 112 bp, Arabidopsis thaliana landsberg
atcgacacaaacattggagaaaaagcttgcgtttagagacgataacgacaaggatcaatgcgaaaggagaattgatgtaagaggaaaattgaagaagcttccttacctgtga

SEQ ID NO: 181724 - DNA, 247 bp, Arabidopsis thaliana landsberg
tgagctgctggaactggggcccctgtccggcgccggccgcggctcccgtttccgcgccgaggccgacggcacctggaccgggctggacggctactacacgggcgagacgctccggctggtgcccgcggccgatggcgtggccgagcacctggacctggcgacattcgtcttcacgcgcgagccctacggcgaggactcgccgaccgcggccgcgccgcacgaggacggctggcggggcgccccgtaa

SEQ ID NO: 181725 - DNA, 172 bp, Arabidopsis thaliana landsberg
gttttatcccagacgagcgaacctgcaacgttatcatcgcaagattgttatattcgagatctccggtgagtacgttgggagttatacaccgtttgatcggtttcaagaaggaagttgtgccatctgtgacgaattacaaccgtttgatgaatcagttgtgtacgatctatag

SEQ ID NO: 181726 - DNA, 468 bp, Arabidopsis thaliana landsberg
gcgaaagcagacctgatacaaagtacaaaggcgaacccgttttagcaggtatgattaacctcaatacggtatctgaagtaaaagtaacagcactgtttaaagacagtaagctaagtaagattttggagatggtgcaggatgctacagcacgtaagtcgcagactcaattattcatttcacgtttcgcaaaggtttatacgcctatcgtattctttcttgcattagcagttgttttagttccttatttttttgtagacaattatgtgttcagagactggttatatcggggactggtattccttgttattagttgtccgtgtgcattggtagtatctattccattagggtatttcggcggtattggcctggcatctaaaaacggaatattatttaaagggggaaactttctggatgtaatgaccaaggtgaatgcgattgttatggacaaaaccggaacactcaccaaag

SEQ ID NO: 181727 - DNA, 1907 bp, Arabidopsis thaliana landsberg
atctcaatcaagtttagctttttggcgcgtggataattctgttggcagtttcttacctgcggatccctctacgctcaacttattaggaagaccctatgagctacgccacatattatttggatccactgcagtcttgccaaaagaatccagctacttggatgatcgtactactcctgataatattattcagcccacacggccacagccactgaattctgttaactctggtcatcgatttgaagctgttgccacctttgagttgatatggtggaataggggctcaggctcgcagaaaaaagtttcaatatggcgaccaatcgtttttgaagggatggcttattttggagatattgctgttagtgggtaagtcataatattatgtactatgtcgtttagtgcatcctattgtacttgcaagttggataataatttcttctggggtgaatgtgtaggtatgaacctccaaactcttgtgtggttcttcatgatactagcgatcaagagatcctcaaagccgctgttgatttccaacttgttggacgtgtcaagaaacacaggggagtagaaagtatatctttctggatgcctcaggctccaccgggttttgtttctttgggttgtgttgcatgtaaaggctcaccgaaaccatatgatttcaccaaattaagatgcgctcgtagcgatatggtagctggtgatcattttgcggatgaaagtttgtgggatacctctgatgtctggcagagggtagaaccatttagtatatggagcatagggaatgagttgaagacctttattgtccgtagtggtttgaaaaaaccaccaaggagatttgctttaaagctagcagaccagggtttgcctgggggaactgataacatggtcattcatgcagaaattgggactttttctgctgcgctatttgatgactatgggggactggtaagagaaccaaacaaatctgtgtggcatatttatctgtgtgaaaataatggtgtatctatgtactttgcagatggttccattggttaacgtatctttgaacaatataagttttggattacttggcaaaaccgactacacaaattcaaccatcaacttctccttagcggccaggtcatataatgataagtatgaagcatgggagcctctcattgagcctgcagacggattcttaaggttttttttctaattgcagtgccattttaagtctcaatagtgtagaaatgtttatgtctaaacactttgtgggagcgggtgatttgctctgtttattctggttgttatataatccaacaaatgtggagtatactatatataatggctatgttccatcatgatgcaggtaccagttcaaccctagatcctttggtgcggtttctcagttgcgcttgacatctacaaaggacttgaacgtgaacatctcagtttcgaatgctaatacaattatccaagcgtattctagttggaacagccttagcaatgtccatggataccataaagagagagtgagaacttttcttttggtccttctgtgccactcccttggtgaagcagaggcttattcagctttaccttctcttttgaagaagtcacgttttctttctctcttgatttacacttgctattttttacagggagcacttcctttagttgacaatggaaaatctgtcattgaggtgcatcagaagaaaaactatttcataattccacaaaacaaacttgggcaagatatatatattagagccaccgaaatcaaaggatttaaggatattgtaaagatgccatctggggacgtcagacctgtaaaagttcccgtcttgaccaatatgttggattctcacctcagaggagaactatgcagaaatcctagaatcatggttacagttattgtgatggatgcacag

SEQ ID NO: 181728 - DNA, 573 bp, Arabidopsis thaliana landsberg
atggcgtcgtcgaagcacgaagactatggcatcccttacacacctcttccatcatcacaaccatctcaatccgtaatccttctaactccttatcgccgtcaccgtcgtccttcacttctccgtaacctccgttgttctctcctcttcaccgccgtaatcctcctcctctccgccgccgtttacttactctacccttcagatccagacatcactgtctcacgaatcaatctcaaccacataagcgtcgttgattctcataaaatcgctttagatctctcgttttcgctcacaatcaaagttcgaaaccgagatttcttctcacttgattacgattcgcttgttgtttcgattgggtatagaggaagagagttaggtcttgttaagtctaaaggtggacatcttaaagctcgtgatagctcttatattgatgctacgcttgagcttgatggtcttgaggttgttcatgatgttatttatttgattggtgatttggctaaaggtgttattccttttgatactattgctcaagttcaaggtgatcttggtgttctcttgttcaatatcccaattcag

SEQ ID NO: 181729 - DNA, 2482 bp, Arabidopsis thaliana landsberg
atgaattgggcccaattcatcttgaagcccatagaatgcggattgggccgaagtgggccgaatccgacatccacaatttgccccccaagtcctcgaagtgatccagatcggggacttaagaaattccgaatcgtacagttccaagaatcacggaacgtcaactcgagagcgaatatcctcgacgtgagaaaaggaaactgaatcgcgcgattaccgagactttcctcaaatagagtgtgacgcttcgggatcctagggttttagttttcccgctcatccgttccattatataaactgacgatctcttcgccttctgcccaacgattataagtaaacggactcccctctcgcttcaggtaaccgtctctaatcctcctttgatcttcgttctcgctttcaatttttgataggatttagagaacctctgaattctgttaggactagagaacgcttttagggtttagccagcggtttttaggacggaaatccttactaatttctcagattttcaattcagaaaaacgaggattttcagttctcgccaccgcccgttcaccgttctccggtaaaattccgccgcgacctgaactcgccgtcgctatttgtcgcagatcgccggattctggcgaaaaaatcttcaaagtgttcttcgtttctgaggaagatcttcagcagaccttcaaagtgttcttcaacagagaactctcctcagatcttcttttattcgttttggtgacgtcgcgctgtttgtcatgcctccgagacagatctcacgggaagtgttctcgattgacggtcagtttggaaaatacatgacttcgctgtcaactccgagcagacttacgctgttaagaggagctcaccagatccctcaccaaataaagttgatttctcctggtacaaagacttcccctgaatctccacctccgggacacacttgcgccttcgaaattttcttttcagaatgtgggcttttctttccacttcccgacatcctgatcgatcttatgcacgagttcgggatcgccctccctcaactatgtccgaacgtaattcggacagtgttatgtcttcttactctggcggaagaagatggtttccgactcgcgctgtccgacttccttcagttatatgcagtgaagaaaagtcggactaacaacacttttttcctatcacctcggaaaggttttcgagtcttcgaagacttcccagaaaaagatgaacactggagaaagtcttacttcttctttcctgtgaatgaactcacttacgaggagaagtctgatttatttgtatctgactggacaactcgggcgggtagttagcttggcttaggataccattttgaactaactctttcatcaataaccccgacttcagcgatttaaccctttccttgctttcgtttttgcagtgaaggttaccattcctcccgtttctcgcacatttgcatctcacttctcgaacttttgccgtcatgaccttggttgggaagctcttacttcggatcgaatccgagcatctggcaaacgacttcggacccgtcctgaccttgctatctcttcacctcccttttctcctcgtatattttgcaaagctgagatgtctggaccatcgtaccgagctgaaaagaagcgtgagagggaaagagctgatcaagaaaaggccaggatcctgtctgacagggtcgtgatgtcggggacccttgaagacagcaaactccgagctgcagagaaagccaagcatccgatgaccgacagtaaggccaaatctcgtcaagagcctggaaagaccccgtcttccgccacaaaaagttccggagctccgacctccgaagcagggagccttgccaaaaagcctcagagcaaagattcggcgacgcgggaagccgaaaagaaaaggaagaaacctgaagacgactcccgcccttcgcctcgctcatctcgttcccgacttgaggagaagaatactggtacggggaaaaataaagaagacccgaaagaggttcctccaaacctcgtagttctttcgtctcgggaatctgaagctctcaggtcggaacctcgcagcactcctcccccaggtaacgtattattattccgaattgacatgacagggtatactatggcatctcacattgttatgcttttgccgtagctcccccgtcttcctttgccgacatcatgaggactctcgtggcccccggttctgccatcgcccccttcgacgaaatgagggaggtgaacaaggataactaccttcgcttcgctgggaaactcggcaaggtaaaagcctcatttgatttaccaggaaatccgacgtaaaaccgagactaacgtcacctttgattttgcagctaatcttggaattcaactccgtcttctgcagccacgaagatcagctttctgacaaggatagcgaacttgacagctttaggcgaaatgaaaacgagaacgctcatacggtggagagggccagcacg

SEQ ID NO: 181730 - DNA, 3754 bp, Arabidopsis thaliana landsberg
atagttctgatgcattcccagaacaacgtgctatggctgcgtttattttggctgttattgtcaatggctacaaacgaggccaagaatcatgtcttgaagctaatttaattgctgtttgtctggggcacctcgaagcaacccaactatgtgatccaccgccagaaccattgtttctacaatggctttgtctttgtcttggaaagttgtgggaggactatttggaggcccagataatgggtagggaggcaaatgcttctgagaagttgatacctctgctttccgaggcccaaccagaggtggtgcttcgccagaagcttagctaacttataagatttcagtatttgtttttgctttgaaatagcagtctaattgctggccacaccaatctcttgcaggtcagggctgctgctgtttttgccttgggtaccttacttgatgttgggtttgactctggtaaaggtgtttgtgatgaagaatttgatgatgatgaaaatatagttgaagatattatcataaaaagtctcttagatgtagtttcagatgggagcccgcttgtccgaacagaggttgctgtaggtatgcaaaacatgttgacgtttgatcatcatgcttaattgtagcattatttgcatcatgtgtcatcaagttcaaaggaaaaataaactacatgtttagtcgtattatatgatctctagtgtctatattaactaaaattaataacctttttaactaatatctcttccgcttagaaagcttgaaactaatgcttggattgtatattctgaatagtctcaacatgttgttattgtctcacagctctcgcacggtttgcctttggacacaaacaacatctaaagtcagttgcagcttcatactggaagccccaaaattctctgcgaacttctctcccttcaatggccaagtttcatgactctgggacttcaatagttgcttcttcagacatgggttctctgactagagctagccctgatagccaaccagtggctcgtgaaggaaggatctcaagcagcctccaagaacctttttccgggctaatgcaaggatctccattagctgatgactcctccttgcattctgatgttggaatcatccatgatggtgtcagcaatggagttgtccatcagccaagaccgctggataatgctatctattcgcagagtgttctagctatgtttaccttagctaaagatccatctccacgtattgcaagccttgggcggcgtgtgctttctgttattgggattgaacaaattgttgcgaaaccctccaagtccaatggccgaccaggtgaagcagcatcagcatctcacactcctctggctggcctagttcgctcatcctcttggtttgacatgcatacaggtaagttggttatgcagtgtttttaaatcatcatttgatgtgaatcttgaagtttttgtccattataaacttctaagtaacttaaccatgaaatttatgttgacaggccacctaccgttaacatttaggactcctccggtaagccctccgcaaacaagctatttaactggactgaggagagtttgttcgctagagctccgacctcatctgctgggttctcccgactctggattggctgatccgattttaggtgtaagcgggtctgaacggagtttgcttccacaatcaactatctacaactggagctgtggtcacttttctaaacctcttcttggcggagcagatgctaatgaagagatagcagcccaaagagaagaaaaagaaaagtttttgttggagcatattgcaaaatgccagcattcatgtaagttatttttatctgtgtatcttttgacttgttctatatctatactagttacttgaactgtatcacaaccttcttttgtcatcgatcagcaataagcgggctcagcaatattccgattgctaattgggatacaaagtttgaaacgggaacaaagacggccctccttcaccctttttctcctattgtagttgctgccgatgagaatgaacggattaggtatgcaaaaatttcttaccttaactaaaattatagacttcaaaccaacaatatgtaatccggttggcggtagccctctgtaaggccaaatacaagctaattttttacaccaggtatttaggtgcacgaagttgtaaaaccatttctagatgacgacacatgttgatcagtgctatctatttagtgccatcatttataaaatgctttatcttgaaatccctcattcactcaaatacctcatctaaaaactgctttttgacttaattgcctctgttggacacttggactctaagtttagctgtctttcctgtcagggtgtggaattacgaggaagcaactcttcttaatggctttgacaataacgattttcctgacaaaggaatttcaaatctctgccttgtcaatgaacttgatgactcgctgctacttgttgcctcttgtaatgttccaactctttccagagcgtcttttgcaagttagttattgattgagtatggctgttaaaagctcttacttgtggttctgaaatctcatgtaggcgatggatcagtccgtatatggaaagactacgcaacaaagggtagacaaaaacttgtcacagggttttcgtcaatccaaagtcagaagcctggtgcaagtggcctgaacgctgtcgtggactggcaacaacagtcaggttacctggtatatggccactccattaacaacatgctatcattttatatttggagttgtgaaacttatctactttgtatttgacgcattattggtgtctacagtatgtttctggggaatcgttatcaatcatggtttgggacctggataaagaacagctcgtcaaatctatgccctttgaatccgggtgcagcgtcacagcccttgtaagccagcatatgcaaacttggatatctgtgttacaaatagatactatctagatcttcttttcgtctaaatgaagacaggatctcaaggactagtcggatcttgcttgatgagtctctttatttgtatgtgtgtgtttatttgcagtcggcttctcaagtgcatgggagtcaacttgctgctggttttgcggatggatctgtaagactctacgacgttcgcacacctgacttgtaagttaccttagagagcttgtttaattctctcacctttggattttaaacatagtaacaaagattattagttcaagagtagaagaaatctcacttctccaatgtatagtcttgtgtgcgccactcggcctcatcagcgagtagaaaaagtagttggactcagctttcagcctggactcgatccagcaaaggttacacacccaaatctctgattctcgccagtcagtacaaaaggcatttagttactcacttgacatgtttgttgtctcagattgtgagcgcatcacaagcaggtgacattcagtttctggatctgagaagaccaaaggagacatacctgactatagacgcgcatagaggatcactgacagcattgggtgttcatagacatgctccaatcatagcgagcgggtcagcaaaacagctaataaaagtgttcagccttaaaggagagcaacttgggatcataaagtaccacacttccttcatgggccaacagattggcccagtcagttgcctcgcctttcacccttaccagatgttgttagccgcaggggctgctggctccttcgtctccttatacacccaccacaacacacaattaccaagatag

SEQ ID NO: 181731 - DNA, 1988 bp, Arabidopsis thaliana landsberg
  unsure (1)..(1988): unsure at all n locations
actgttattataagcaaaatgcagaagctgacaaaggaaggtctgcagcgtactgacaagagaattggccttatgaatgaagttttagctgcaatggatacagtaaagtaagaaattctagaaccaattttgttaacatagttattaatttgcaggaaacttgtactaaaccaaaatgctacaggtgttatgcttgggaaaacagtttccagtccaaggtccaaactgttcgtgatgatgaattatcttggttccggaaatcacagctcctgngagcggtatgactacagcgtagttacttttgtttttcctctaattattgtatatttctaactcttgcttggtcttgtcttggtttgcagttgaatatgttcatactgaatagcattcctgttcttgtgactattgtttcatttggtgtgttcacattacttggaggagacctgacccctgcaagagcatttacgtcactctctctctttgctgtgcttcgtttccctctcttcatgcttccaaacattataactcaggtgatttcttaaatatgttgttgcaatgcatgtgtattaagtagaactgttagtgcttgtagtaactgtcgtttggttatcaaatccatgacttatatttcgaatttacatgctggagggtatccttgctggtgccagaaacagatgccgatgctgactagttttcacttgtaggtggtaaatgctaatgtatccttaaaacgtcttgaggaggtattggcgacagaagaaagaattctcttaccaaatcctcccattgaacctggagagccagccatctcaataagaaatggatatttctcttgggattctaaggtgtcgcttggctattctataccatgttccttctttcgcttctctcattacctttatccatagaaagtacaaaaatcgagctaaccctatgtatctacagggggataggccgacgttgtcaaatatcaacttggatgtacctcttggcagcctagttgctgtggttggtagtacaggcgaaggaaaaacctctctaatatctgctatccttggtgaacttcctgcaacatctgatgcaatagttactctcagaggatcagttgcttatgttccacaagtttcatggatctttaatgcaacagtatgttcttcttttctttgacttttaagttgggctgacgttgcaaatttttctgttgtacataatgttaaatgtattttctgtcttttatagtagaacaatatgtgttctcaaatgcgtcagttacttcaccaacttagtggaaaccttcttcaatatttgattctctaagctattttgaacagaagactgatatgcattttcttataaaaatttgtaggtacgcgacaatatattgtttggttctcctttcgaccgtgaaaagtatgaaagggccattgatgtgacttcactgaagcatgacctagagttactgcctgtaagttttgaggagagcttcgtggagttgataacaaggatttgtcttgcctgttctcgtgttgctaagtttgtttcaacctctttctcttgcttaatagggtggtgatctcacggagattggagaaagaggtgttaatatcagtggaggacagaagcagagggtttccatggctagggccgtttactcaaattcagatgtgtacatctttgatgacccgttaagtgcccttgatgctcatgttggtcaacaggtactaactcattgattctctttgataaggctagtctatttcatttttgaatttatctaacatttttgtgtctggtcattatgggaatactgtcagtctgatttctaggaatattgtttcaggtttttgaaaaatgcataaaaagagaactggggcagaaaacgagagttcttgttacaaaccagctccacttcctatcacaagtggacagaattgtacttgtgcatgaaggcacagtgaaagaggaaggaacatatgaagagctatcca

SEQ ID NO: 181732 - DNA, 953 bp, Arabidopsis thaliana landsberg
cttgcaaatataatgggtcgtttcctgtggctgacatgtcccagagaggtacttgaaagtttaagtcatgtcctgccttttttcatacaagaacctttacaattatttactaaccattatgttattggggttatgaatacaggatctatcgacaggctggctcctctgtgaccctggtccactgttcaagcaagagacacatgctttaccaggatggatttctgattgggtaaagtctagaattgaattgtacaatactaaacaattactcgagcaactttattgcttcttaacgtgaggcgtttactttacagctcccttggaaggaaatttcgattctaccagtccagtggcatgctctatgtcttggattgttcgcctctataatagctccttttggtggcttctttgccagtggtttcaaaagagcattcaaaatcaaggtgggtttcagatgatattcagtataaaaccacaatatctatgcaacattgattcactgttaaatgttctccaaccttgcaggactttggtgatagtattcccggacatggcggaattacagatagaatggattgtcaggtatataggcgcattgacttcaatacattcttattactttcttaaagactttcaaacatcactatggtttagaactgtattagatctgatatgatatgtcttttgggtttctagatggtgatggctgtttttgcctatatatatcatcaatcgtttgttgtacctgaagtcctctctgtggataagctcttagaccaggtaaaagtttactagtagaagaaccaacacaatgtacattaagtaagatctcttatttgacttgtagtgatttatactcattacagataatcacaagcctgacattggaagaacaacaagcgctactcgtgaagcttggccaaatgttgcaggaaaaggttattggatcttag

SEQ ID NO: 181733 - DNA, 312 bp, Arabidopsis thaliana landsberg
atgtatatacaacaggtgaatctatccctgtactatggtgatcatgttcgtttatacgcctcttggactgtaagttttgagttataccagtaagagctagcttgcactaatagttcctttatcttctgagactcttatgtatatgtttgcttataattctgctaatagttacatggaagcaataccgggtgcaacgacatgtcatgtcctggatttgtgcaagttagcaagactatagcacttggtgccattattcaaccactttccatctataagggtccacaatatcaattgcatttgaccttgtatcag

SEQ ID NO: 181734 - DNA, 304 bp, Arabidopsis thaliana landsberg
atggcaatatttgttgttgaagctaagaacgaagggcataaacgtaatagcaaaaaccactgcaaagaaaatcttcgaaacggttccataaaacatgggtcccatccgcacttggacgttaaagaaagtcattggatcgtggggtccacgagcgcgtgagattgcgcgttacgtaatatctacacagaccaccaccacttgtgtcttttctttattggcaaggacaacactttaaattattaatagaacatatacgacgtcgttttctcccttttttaggttctttatttcttgtgatgaatga

SEQ ID NO: 181735 - DNA, 372 bp, Arabidopsis thaliana landsberg
atgaagcaggatcaaatcggggagaagcagatcaacgccttcattcagctaaatgaaaaactgctgagcaacgcgactgcctacaccaacctgatcatggtggccggttagtgacctttgaagacatgcgtcgcagccatcatcgtatggccttgaagcagccggttaaagccgtaacatccaggccatccaagtgcctctgcaaggccctttacctcaatcgttttgagcacatgtcgcgtcgcgagcttgtcgaagatccccatgttacccgcccgccagttgaggtgcaggttacgtctgacgtacgaggcaagcgattcatcgggttggatttggagaggcatggattagcgtcgacacagggttgcg

SEQ ID NO: 181736 - DNA, 26 bp, Arabidopsis thaliana landsberg
atgagggacgtgcgtgttgggggaaa

SEQ ID NO: 181737 - DNA, 333 bp, Arabidopsis thaliana landsberg
  unsure (1)..(333): unsure at all n locations
atggcgacggtggcgaaattttccaccgacaagtggcagcggatgaggagggttccgtcgtcggagttgatgaatacgcaacagcttatggaggtggcttgttgcctccctcttagtcatctctttatctgnctttgggagtttctggtgttctccgtatccgattatgattctgatgatgattatgattatgttgatgatgatgatgatgatgatgatgttgatgatgacgatgtggttgcttttgatcataatagtaacggcgattttgatgatcatgggtcttcttccttggattttgatgactattaccattactcggactccgactaa

SEQ ID NO: 181738 - DNA, 777 bp, Arabidopsis thaliana landsberg
atgcttcaggtgattgatgccattgtgaagaatcctgaggacaacacgcaggtgaccaatttgttattgacttatttttcatacgaattttcgaagtacttcctattctagcgctggtttgtttaccaagatcttgaaagtgttatcatcctctacaattcatttctaaatcagctgaaattttcataaaaaaatagtcttaaccatggaaatttacgatttctctgtgtgcacagatatcattgctttatgccaatgtgtctccagatgatatactcctgaagcagaagcttgatgtacttcaggctaaccacccaaatttgaaggtagatttctcttggatttgtcaattgattagtttgctagctggttactattagcatacacacttttcttaaaaagattttgtgttcaaaatctacagatattctatactgttgacaaccctactaaaaactggaaaggaggagtaggttacatttcaaaggatatggctctgaaaggcttacctcttcctaccgacgatactcttatccttgtaagttaccttactatcttcagaaccataatggaacactgtattctgagagtatgacaacaaggatgtaaaaaaaagcgttacggatttgatctactgacgaacaagttatggattgaatcaaacatacatggttaacaaaaatgcggcatgcttcactatgaattcaggtatgcggtcctcctgggatgatggagcatatatctggaggcaaagctccagactggtcacaaggagag

SEQ ID NO: 181739 - DNA, 173 bp, Arabidopsis thaliana landsberg
atgaccaagaacaatacaagcacaaagaagtgcaacaaagagattcaacgcaaccacagaagcgtgatcagatgtcgataacgaaggcagtttcgacactagagaatccaacattgttatcttcttctagatccaacaaacttcctctttccagatttgatccaagaacatga

SEQ ID NO: 181740 - DNA, 1452 bp, Arabidopsis thaliana landsberg
atgacgttagccactgtcaccggagcagtcgtagacattgtcgaggccgttaagggtaagaaagccctagatttaatctgtaacttgtgctggaagtttctggcttgctttatgatatgttgatatgttgttgtttaacgatcgaccctgagggctcaccaccatggcttgaaccgccacatatcagattgcttagccgtccacttcaccgttccagccgccgtgtaaacagtcccgccgagatccagtgttgtcgagaaggtatcggctgaaccttatctcgtgtcgttgatatcagatggattattaaaccgatggattattaagccgatgttctatgaggtgattgattattataccgatggattgaaccagcctaaatcatgagattctacgtgtaattgattcctttaactgaaacttgacgtgtagtgattaattatgtgaatcgttgacgtgtagtgatgggttctctacagtaaaattcgggacttgtaggttacttgggagtggcaatggttatgccattctaaagtcctatagactaaatcaccattttgatagacaacctctaatggtaaaccaaatttaatatccgcattcagatctcatttctcttaatggaaattactttctcaaaaccttagagctccaccataatatggatagtattcttctataacgttgaataaattactcttagttctaccaaaaaaccctaaaaccaaaaccaaacctttctacttgtataaccatgattgaccaattgttcaaatcaaccatgagtcaaagcaactctcataaaccctaaaaatagataatttgtttagggtttgattttgaaacgcagaaaggatcggaacagaatgattattagtatacttcgtggtaatcaatgttgaataggaagggattgttggagaagccgtgagcttgggacagtaaatagtgtaatgacgtcatcatcattcattcccctgaaaagttggagatttgggatatacgagtttcttctgctctcgtaataagcaaagaaagcagggcttgtgttcgtcgaagtaatttgatcagtcaaaccaaagaggaaactcaggcccagattagcaacaagtcatagcccattaagaaaagatttgactaatttggagaaaaatttggttttcggtatatataacagagctgactggtgagactttccaacgtcaccagttaagaaatgaaattgggacattcaccactcaccaaagttaaggtcatttgcgtatctgctgagactcttgagatatgttgttagtgtaacattgcttacagaaatttttaagttagtgattgaaatttaagtgatgatttttgtttttgtttcaggtatacttacttttttgttgtaaatcaataccgatcgtcgacaacctgattcatttaactattaagacttatcggaaagaaggatag

SEQ ID NO: 181741 - DNA, 179 bp, Arabidopsis thaliana landsberg
gaccggaaaaaggccaaggggtgatcgaccagttgctgcccctgctgatcaggcagatgcccgagtacgaccacagcatgctgcgggtcaaccgcgcccgcggcatccagatgctgcaggacccgaaaagtttcacctgcgacccgaccctgctgtggacgccggaacgcgccgaatat

SEQ ID NO: 181742 - DNA, 626 bp, Arabidopsis thaliana landsberg
ttcatgtaggaactcagcgacatgccactggaaaacgtacaccacgggttcctgtacaaacttcatttatgagggatgatagagaaggctctactccaccaaataaaagagccaggaagcaattcgatgccaatgatgatgtagcacattttttagcgttagcattaacagatgcatcgagaaggggagggtctccaaaagtttctgaatcaccaaatagaagaacagaacttagcgatagctcaccgataaagagctgggggaaaatggtatctctcagcttgacaaaattttaagcggttatctttttgatttcttttctgtgtgagtttgcttcactgaaaaacactatttaactgtgtgcttctgactagtcgcgaaccagaaaatctcagtctaagcactgtggcagctccattttagaggagtggatggaaagtagccgagaaaggaaacttgactctgataaagatactaccttgttgatggatatggaaagggctggcgaaatggaggctccgcgaaaggggaaaagagtctacaagaaaagagtgaaagtcgagaaagcagaatgtaatgattctgatgacaatggagaagcatgcagtgcacacaagggcttagaa

SEQ ID NO: 181743 - DNA, 2053 bp, Arabidopsis thaliana landsberg
gttggggagaatgatgcagtgatcattatcacacatgagccgaactggcttcttgattggtattggaaagacgatactggaaagaacatgcgacacctgatattcgaatttttgaaaggaaggtgtaaacttagaatggcaggagatttgcatcattatatgcgtcattcatgtactcaatcagatggacctgttcatgtcccacatctccttgttaatggctgtggaggggcttttttgcatcccacccatgtgttccgctgcttttcaaagttttatggtgcttcttatgaaagtaaatctgcctatccttcatttgaagattcaagcagggtaaactttttcttgtttcttgaacctcttatccacggttactgattcgccttcttttctttgcattctgatattttatgttgtttgctgttatttgcagattgctctgggaaatattttaaagttcaggaaaaagaactggcaatttgatttcattggtggcatcatatactttctcttggtcttttccttgttccctcaggtgcggttttacacatctttgactttatcaaactctttttcatatgaactgtttcttgtttctccattttatatttattttctcagcaatgcagcctgacttggtcattaagacttttttgttaaaatggtacacattgtcagcatccactattaaatggtcaaactgagacaggccttgcatatctgtagtagtgtttttcctgtgcgaagaaatttttatgctcacttgcactcacgagaaagtttttatcttcattccttgttggtttcagtgtgagctaggccatatcttacgaggcgattcattttctggccacttggggagtttctttggcacagtttggagctcctttgtgtatgtaacagagcagtcatatgtgtctttcaccggggttcttatgttgctaataactgcaattatgtttgttccctcaaaaatatctcggaggaaacgactgttaattggaattcttcatgtttctgcacacctgatggctgctttgattcttatgttgctgttggaactcggcatagaaatctgtattcagcataagctccttgcaaactccggtcagtttcctttccatagaatgttgtggctttcctcattacaatgtcattgacacaagtggacaaaaaatatgtgatcctactttaattgatatttttttgtatctgtgatcaaaccttaatggattttgagattttcaaactttttgctacacagggtatcatacattgtatcagtggtacaaatcagtagaaaatgaacattttccggaccctactggcctccgagaccgtattgagcagtggacgttcggattatatcctgcctgcatcaagtatcttatgtcagcatttgatattcccgaggtaaaatcgtcaacttagccttcgttttagctgaaatagaaaactatttttcagccgaaagtaaagtatttgacattaggtgatggcggttacacggactaacatctgtcgagaaggaatggagtcactttctcgaagcggagcagccatctattatgcttctgtgttcctctacttttgggtcttctcaacccctgttgtatctttggtttttggaagttacttatatatatccatcaactggcttcacatacactttgatgaagcattttcttcacttcggatcgccaattacaaatcattcacccgtttccacatcaaacctgatggagaccttgaagtcttcactctcggagtagacaaggtgagaaaaacaactctcgaaatgacaaaagaaaaagtttgtgattatggaattaaacagaggagtgtatgtgatgaatgagtacaggtgccaaaggaatggaagctggacaaggactgggatgcagagccgagatcgactgtgaaaatgagtcatcacagaaggtttccaagcaaatggtgtgcaacaacattgcagcaggatcctgtcaacaccgtaaagattgtcgataagtttgttattcatagatcagagaaagaaactggaggatcttag

SEQ ID NO: 181744 - DNA, 749 bp, Arabidopsis thaliana landsberg
atttatgatgagtaaaccgagatggtttcaagtattgacagaggaagacttagatggaaactaccaaaagcatacttgtggtttccgaaaaaacatcttcaggttcgagtcctgcgacgtagtgtgccccgagggcatagatcccaaccatattcaacctcatgttcaagtatgttctaatttttttctatatgccctaattatatatattactttatcataaattttgcatctttgaatcagtgcaggtgtgcaccatgcttgatcttaacgcctttgaactgaaccaaatctctgatctctttgattgttcccaaattcaagtaacaaaatagacaaattgttctcatccaccaatttctctaaaggtaatttatttaaacacatgattgatattttttttacagaatcatggttacgttggagggaagcagtttataatgttgaggccatggagagactgtgtaagaaatacagaaggttgcactaaacatgtccaagggattaattccaagttctgcactttcacctgcaagatcgaacatgttttggagcatgaaggtgatttgtccagcattactagactttggtcgtcggaggatgattcgagagaactgtcagaacacgttggtgatttagcaatccatccttgtggtgatccagagagaatctttccattaaagaagaggtctcgaagaagaagagagttttttgacagctactacgaagacatctatgcatcatactag

SEQ ID NO: 181745 - DNA, 680 bp, Arabidopsis thaliana landsberg
atggtcgactcggactcggcggtaggtttagtttacgtgaccgtgggccgaacacgagtttgagagataggaagatgaagaagaagaagaagaagagagagagaattaggtatatagtttccattattgtctttgttgatgacattgattaaaaatatatgagttatagctgattttatagtgcatttggaagcaaaggtaatatgaaaataagttagatcagattcgtatgttaacgttaggataattgttttggacgaaatgaaaaataagaagaggataagagttctgatgatgtcactgcctacttaaacatttagaaacaactagagatatccatgtgacacgtgaacattatgtgatttacttgtcgtcattgcatatgtcattgtgtttttttatttgttttgtttggttttaattgaaagtgatacaatatccattgcatcccccttgaaacctacaaacctactttgagatctatctctcacaaaagaaaaacttgaacttttgaaccatgaatcttctccggcaagcctaggtaagatcccaatcctccatccttatagattcccaaagacaatttgatggagtttcagatagaattttccacatcatggccaaacattattgaagacttagcagcatttatgccttgcaataactgcggagaatcttga

SEQ ID NO: 181746 - DNA, 873 bp, Arabidopsis thaliana landsberg
agagaaaccaaaacaaaaccagtaataatagagacaatgacggaatcggctaagcaacacattgaacgaattcgtcggactaagttttcaatcggtggagctgagaatccgttgacggaggatcttcatcaagctgtgaagaatctctccgctgagctctatgcaaaggatgttcactttcttatggaacttatccaagtaagttctcctctcttactgcccctatcacttatatgtcactgtttctgtgttttttctgtgagattttgctctgtcttctctagggttttgtgctctgttcccgagaaaatctgtaacccattttgaatatctacttttttcccgcactattttcctctgaagtttgtgttagatatgtttgtttgcgttgatgtgtaataatgtaatcgaatgttgaaccagaaccagaacaaaaccgaaccaaaccgtttctattctgcttcattttcatgtattcaagtgttttcatatgatgttacctagttttcatgcatacagtcagaatcatgtttgctcttaaatcgaattatattgtgcttgagattgatacatagaacatgttgttatggttttttggcttcctcctacagttttagcattatgctaatgctaagcattcgtatttttcctctggttttcagaatgcggaagataacgagtatccagaaggtgtggatccatctcttgaatttgtgataacatctgaggatatcacaaacaccggagctccagccactcttcttattttcaacaatgagaaaggtttctctgagaaaaacattgagtccatctgcagtgttggacggtctacaaagaaaggcaatcgaaaatgcggttacatcggagagaaag

SEQ ID NO: 181747 - DNA, 367 bp, Arabidopsis thaliana landsberg
aaagtttttcaccgacatctgggaaaatggtggtcgagggatgactcacaaagttatagagaaaagtgaaaaagatacgcacgatgctagagaagcagcaaaggcagctgaaaaaactgcagagcttgaaaggcggataggttttacataattgcttttgactatatgttttatttctgtgacttcaaacttatatatgttttgtatcgcagctgaactatctcctcccccggagccttttgagtcattagccgaccctgaagcaaaaaaggaagatgaaattagaaagatggccgaagctattatggatgaagctgtttctcaactgttaaacgaagcagcagccctagttctcaaagaagaataa

SEQ ID NO: 181748 - DNA, 780 bp, Arabidopsis thaliana landsberg
agaataatcaaaaagtataaattaagagaagaggttaatgcacaacatcaaacatatgctttgggaatcaaggaggtaaataattttatcctcgttatagttattacttgaatccatgtttgaatttacaaaaactttggtatgatagtagtgatttctttcttttttttctgtgattttcaaatcgaataacatctctacagaaaaagtgatcacacattatcataagggttgagaattttctctcggtataactactactcataggtccttttaattgctgatacttcgagctctcaacaggtctgggagatagatgaaagcaaacataaccctggagaagttattcacacattgggttggcccttggatcccaagacatatggaggttctttcttgtaccacatgaacgatagacaggtaactaactttgtcccttggaagatacttttttacggttgagaaaatattatagtacctccttccagtggtgtcaatcacgctcacttggagttttctttttaaccaaacaggttgcacttggcttggttgttgccttgaactaccacaaccctttcttgaatccgtatgaggaatttcaggtatgtcaatttctcataacgatagacttttcagcggttactacaaatacatttctaaaacccatcatttttatcctccaaatagaaactcaaacaccatcctgctattaaaggcatcttggaaggtggtaccgtgcttcagtatggagctcgtactttaaatgaaggtggttttctg

SEQ ID NO: 181749 - DNA, 2959 bp, Arabidopsis thaliana landsberg
cgtaccgaagccactaaagctctgcggatgaagaaagtgcaagagcttgtaagcttcatgaatgaaagcagcgagagaaaagaagcagttgatatttctcgtgcatcctacaccacagttcttaatatcatatccaacattctgttttcggttgatctcggtagctatgactcgaaaaaatccaacgaatttcaggacacggtgattggtgccatggaagctgctgggaaaccagacgctgctaactactttccatttatggggtttcttgacctacaaggtaataggaaggcaatgaggggtctgacggagaggttgtttagggttttccgtgggttcatggatgctaaaatagcagaaaaatcattagggaattactctaaagatgtttccaacagagatttcttggattcgcttctcatcctcaacgaaggagatgaagcagagctcgacaataacgatattgaacacctactcttggtaagttctaccagcttgcagataatcaagattgtagtcaattttctgttcattcgttttgagatgaaatttcattactcgcaatcttccaacaaatcttgagacggaaatgtcaaaaatatgacttgatcatataaagacatcttgaatacggtttcgcaatgttatgttctttttatcaatgtcttgagatgaaaccacatgaatctttatatacggttccacaatgtcaagctcacttatttatatatgattgtatttcaggatatgtttacagctggcacagatacaagctctagtactctagagtgggcaatggcagagttacttagaaaccctaaaacgatggtaaaagctcaggcagagatggatcgtgtgttaggtcaaaacagtgttgtgcaagagtcagatatctcaggattgccatatttacaagcggttgtgaaggaaacttttaggttacatccggctgctccgctactagtcccacgaaaagcggaatcagatgtggaggttcttgggttcatggtgcctaaagatactcaggttctagtgaatgtgtgggccataggacgagacccaagcgtatgggagaatccgagccagttcgagccagagaggtttatggggaaagagattgatgtgaaaggtagagattatgagcttacaccgtttggaggaggacggagaatatgtccgggattgcctttggctgtgaaaacagtgtctcttatgcttgcttctcttctttattcctttgactggaagcttcctaacggtgtcgtttcagaggacttggatatggacgagacctttggtatcacattacacaggaccaacacgttatatgccgttcccgtaaagaaacagaccattaattagccattgtaatactttcctctgtttgtttaaattgctcaaacccttgtgataaaaataaaacaaaatcatctaaaacgctgtgttctctcggttaaaagttttcttcttatgaaatgggtaaggcctgaagaagtcaaggtatccagtatccagatttgtattgggcctatgtatatcttttaggtaaatttaaagcccataagttattacaaattttcaattaaaaaattactatgactagttatcaatctaaattgatggttgtgctaaagaaaaaatagaaagatgatttgttgtttggtttagactttagtgtaaaaaaatattattattaatttttagggtaagaaaatattaatttctttttctttatcacttaaacactagtgtgtctggtagacctttgttttttctgcatccttgtctaatgtctaagataaagatttatactgtaaatgaaattgttggaaaaaaaaagatttataaatgaatcactttactgttgggaaaaaattgaagtaaataaatgaatcactttactgagagtagtaaaaagaaataaatttgtgttgacatgaatagcaaaatacttaaaaaggaattaaatgaaaactttagtgttaattgacttttatgtgttgctaaaatcccaaatcagtaaaaaaccacaatctctcttctcttctttctctctctcccgcgcgcccaagtcgcctcctttcgctagtctttctccgatcgtcgtctcacctctctttactttcgtcgtcctctggaatcttacgcattctccgtcttccaagctctcgttgcgccgtcggcggatagagattccgtccagatttgtttgagcttccgattcgcttccattcattggttcatcatctccgaacatttctccggtccgatccgtgcgtactctctcccggcattgatttctataagcattttatcctttcatagttctagatgatacactcggaatgtaattttcttatgattttcaaaatcgatcctctctgagatctgacagagaatcttctaattgattgttttctgaagatttttgagctccttttgcagatttttgatgctgtatatgttaaatttagtagatccaagtgagtatatatatggatcattggttcagatgcatttttgcaggtttatttggttcaatcacagtgtcgactttagttctcatcttcatcagtgtcagatgcatttttctcagaagctcaacttttgctctgtgtaacaggtggagggtgagaaaacgctgtgaatgtctgtactctccataagtttatagaatggaagacgatgatgaaagaaagctccctgaagctgatatagctaatcctttgcacaataggatagaggcatttgatacgactttgcaagggatcagttcagctgatagagcctttaaggatgatgattttgaacaagtttctctgggagatcaggaaaaggctgcgaatgaatctcagggtgaccttcaggaacctggaagcttttcaaattctgatcatgggaggtcttcatttggtggcactgaagtagttacttatcaattatccgggactcaggagat

SEQ ID NO: 181750 - DNA, 750 bp, Arabidopsis thaliana landsberg
atggataaagatagtacagcagccagtgcagcccaagcacctgcatatgttagtgtttcaatgccaaagcctaaagaccataccactgctatgtctgacgtaagaatcctttattcaaatcttgatgacctagcaaatgaagtagatattaaatgttggccaccataaatttgtgtgttgagtaattgtttctttctcacaattgagtaattgacattggaaacaaataatgccgatgcttgtagcctggaaccttcccaaaatcgcttcgtgggtttgttgagagggcttttgcccgctgcaaagatgataaagaaaaggaatcttgcgaggttgccctgaggaaggtaaatgtttgtaggaattgtagacgctctggttgttggactattgtagcatgatagatgattttagttacacactctgctcatcttaatattattgcaaaatttggatgaacttcttcaacttgatctttcgagtagatttgtagtatgtttaagataatttcatgccttttatggaagaaatcatatagcagttatttgaataccatgttaatttatggttgctttgcattgctaatgcttatttttgtatctctagattgtcaaaaaagcaaaggaggataatactctttatactcgagattgggatactgagcctctctcaactgtcacgaccacaaatgtgactaactctgagtacgaccttttttcctccatccactgctgcctgcatgatctataa

SEQ ID NO: 181751 - DNA, 105 bp, Arabidopsis thaliana landsberg
cttctccgaagcctcgagaaccttacgccgcgagcttcgaggaggaaacgggcgaattcgacccgaattactcgagcgggtctcacgtttgctcgtacttggcag

SEQ ID NO: 181752 - DNA, 374 bp, Arabidopsis thaliana landsberg
gggatattatgccccctcatggagtgcgagctgctatggaaatgcaagctgaagctgagcgtaaaaagagagcccagattcttgagtctgaaggtaaccttgactgacttgtctttgagaactcatcttcgagactgagcagtgcttgctacggctcataatgttattcttggctaaaatctatctgttattccttttgagtttcgttttttgcatttggaaaagaagaggcctgcttagcatgtttctaatcattgctttactaaatttgacaggagaaaggcaatcccatatcaacattgctgatggtaagaaaagttctgtaatcttggcatctgaagcagcaaagatggaccaggtgaatcgagcacaag

SEQ ID NO: 181753 - DNA, 2219 bp, Arabidopsis thaliana landsberg
atggaaactcctgtgataggtaagagatcaccaaaacatgactcttttatattgataatttgtgtaaacagtttgtttgatgataaagattgttgttatctttgttaggggtaatgaagatgaatgttcaagtcatagtagtcaagaagatgtggaattaacgaaggaggttaaggtagatcggttagagcgtaagtcgaagagcatgccgagtgatattctcgacattttggatgagaaatcgaaagaaaacagtgttgagaatgtgcagtttttatctgatcgtgaagatgatagtgatgatgttccagtttgggagccacctgaaccggaaaatccagaagatgaggtggatggtgtttttgctgatgatgatgatgattgttgtgatggttctaagtggaacaaagcaagtttgttaggggagttgagtgatgaaagtagtgaaaagagaaaggtttatgaagaaaatcgaagagtgatgcttgaggaggctgattcaaagtttaagttcattgttagaaagcatattaagtcgtctgggttttctattgaagaaagtggatattggtttgagatagttgctaggttatgctgggaggctgcttctatgttgaagccagctattgacggcaaatcagttgatcccactgagtatatcaaagtgaaatgcatagcaactggttcttgcgttgacaggtataacaaattacccattttttgcttagactttgcattgtttgaggttctttgacccttaaaaagattggagaatccgccatttaccgttttaaaaaaaaaaaatcagtttctatctactggtactctcttaagacttgttcacttttgcagtgaagttttcaaaggcctggttttcaaaaaacatgctgctcttaaacacatggcaactaagtatgagcatcctagaataatgttagtcgaaggagtactgggtcatccgataagtggattttcgtctctccaatcagtgaatcaggtgggggaagcaacacaacttgtctttcactagtttggaacctttcattttattagtttctgatttattttttattattaccaacaggacaatgagtatctactgaagtatgtgaagcctgttgttgatatcatagaagcttccaagcctgacgtgatgctggtggaaaagtctgtttcacgtgatatccaaaagactattcttgataaaggggtcactctggtgtttgacatgaagctccaccgtctacagaggatttctcgatgcattggttcaccaattctttcagttgactctctgtctagtcagaagttaaagcattgtgattcctttcgtatcgagaaaattgtcgaggagcataatgccgcgggtgaatccgacaagaagccaactaaaacactgatgtttttagagggttgccctacccgccttggctgcacggtgagttcttgactgattgtgcagtatgataagtcattaatgctactagatatctctactttagtaacaatatatatcaactgatgaatttatccaaaatttgaacttgtgaatctgaccttaaactttcttgcattctaattttgacatttgatatgtgacagattttacttaaaggatgccacagcgagaggttgaaaaaggtcaaagaagtagtacaatattcatttatcctggcatatcatctaatgctggaggcttctttcctcgctgaccggcatacaatgttctcaaccatctttgcaaaagaagctacatcatgtgttgtggaaatagaaaatttttcaccatctccttctcctcgtgaatctccctctgaagcagttgatattcctgtgtctaatggattcgatgaacaaactattcagattaatggggaagcagatggtgagaaagttggaacttgggaatcagatggagatcatgtgttctctcacgagccatataatccagttatttttactgggttctcatctttatctgccagattaagtaaatatttaggctttgttcaaaatccggagtcagttccagtttctgtggatacagatgtatcgactaccagcaatcttgattcgattagggaatctgaggaagacactgcagaaaagaatgaggataaacaacctcttttacttgatcctgagctcccagtaaactcgagttcagatgatggagacaacaagtcgcaaacggaaaatgatattgagagcaccttgga

SEQ ID NO: 181754 - DNA, 308 bp, Arabidopsis thaliana landsberg
gcccgccaaaccaacctctggaacctgggctcctgggccctcagcaccaacggcatgcacaccggtaccgacaccagctccaccagccccactccggctgcaccagctatatcggcaccaagaccgttcctaaccccgggctccacaaactcaggctgcgaacccacactctgctcaactgtggcactgtggccatcactctcgccgataccctcgaggactcgtcccctaccgcgaccacgaccatgaccacgaccacgaactccagctcctctaaccatctgcgctactcaagaacaaatggctaa

SEQ ID NO: 181755 - DNA, 774 bp, Arabidopsis thaliana landsberg
ggaagtttggtaatgtcctgagctgggaaaccaggttgaaaatcatcataggagtagcacaaggtaacttaagctgcagtgactgaaacagagtttctcattcatggcagaaactgatatttgtaaagtgcattcacaggtctggagtatttgcatagcgagttgcgaatccttcaccgatatgttaagccgacaaatatcctactaggcgaaaactttgaagcgaaactggctgatttcgggctgtctagatcctctccaaccaaccctgacatacaagcgtcaaataagatttatgtcaagcctggaagagatccatatctggatgaccagtacgtaaagatatatgtttacctcagaacttttaatggactcgaaaatgttactcactgtgcataatgaactcgataatgcagatacttcaactcgaactggttaacccaaacgagcgatatttatagctttggcattgttatgttggagatgataaccaaccagcctgtagttgacaacaagcgtgagagtcctcacatttcaaagtgggtcaatttaaaggtcgcaaaaggcgatactctagagattgttgatctcaggctaaaaaatgactttgagcctgactcagtcaggaaagctatggatatagcatgcagttgtgcagctcgtgctcataataggccaagcatgagccaggttgttatagagctcaataagtgtctagccttagagatggctcgaagtaatggaagaactggggagacaactcagactcagtga

SEQ ID NO: 181756 - DNA, 1007 bp, Arabidopsis thaliana landsberg
gcgattatgaatgggttctgggtggttcttgaggacatagacaaagctccatcagatgttcccctcgtcttgtcatctttgctgggagggtcttgctcattcttgaccagtcaaggagaggtatacactctctttttgctgctctgttacttatcatatacctaaatatattctagggccacaacttttgaataactctgttttaggtactcgtatcatttccttgagagattgattcaattttcagagcttcttaacttttaatctgcttgcaggagatacggatagcagaaactttccaactgttttcaactatatcgacacctgaatgcagtgtgtcacacatcagagacggtatgtcttgcagacacttattaggttgaaggatattgtagttgtataagcttgaaacctgcaactttagggagtttattacttgaagcgtaaaaccaaatgctagtaggatcagaggctcaataaacgactgttataataattattcagcttggccgttttgcaaataaccaacctagctcaaagtgcatggtagattaaatatccaattttattgatgtttactacactaaagctcttatgtggtcttataactatctgtattatcgagctgaagaaaacccatcttttacttgctgcaaataaggttcagttcaaaacaccttattatttttatgtctggttttcttggatgtagctggaaattcgttgagtcctctatggaggagaattgttgtatatccaccagatcgtgagagcttgcaaagtatcctgggtgctaggtatcctaacctaggtcctgttgcagagaagcttattggtaggttcctcttgcacatacacccctttacatggaatctgtactaacagtgaaactattccatctttgcagaaacatttgaaaccatcaactctgctcttcgtccccaattttctagttcaacaactgaaaactcagctactttcagttctccaagtagattttcactgag

SEQ ID NO: 181757 - DNA, 61 bp, Arabidopsis thaliana landsberg
attttccattcacacggcactgaatgatgatgacttggaggagagcttctcaagtttgtag

SEQ ID NO: 181758 - DNA, 659 bp, Arabidopsis thaliana landsberg
  unsure (1)..(659): unsure at all n locations
tgaaattgaaaatcatgtattcaaatggttgcatctccggtacaccactaaaccggattccattccatggaccactccggtacattcgtgattctctgttccatagaaaaatctcagggaagccttcggtttcgagtttgaacgagaaatctccacttgannnnnnnnnnnnnnnnnnnnnnnnnnnnnnnnnnnnnnnnaacccggttttggcatcccagccaagtttcatctccggaagtaaagtatctgtcggaaaatcaaaactctgccacaaaactccatctggagcgctgttcttggagtctctgagcacaaaattaccattatcaagaagctctgccaccaatggagatctcacatctcctccggtcagattcgtcgaccaaaccggtgtatcggactgatccaaaacgacaagattactgtcggagattttgagagttccgatggaactagagagaggagtgtctctgtttgcaacccatacgtaggttctcttagagattgccttgtaccaaattccaagataccaacgagaatctaaaccgggtttgaagaaaccaagctcgaagacattaccaggagacacaatggtgttattgcttgagatagttagagattctgaagccgacaaagtgttggcagagatagagtaa

SEQ ID NO: 181759 - DNA, 3634 bp, Arabidopsis thaliana landsberg
atgcccctgacgaaactgaacccggtttgtacgtatgaaccgcgtcgttggaatccaaaagaaccaggttcgtacgtacactgttcatcgacgagaaatgcattaaatgatttctgggtttcggcgaagttgacatttgagattggaattcaaaaattttaaaattcgttgggctcagaagtttttaatgctaaaaagttttgacaagactaaaacttatgattacctattataatagagattatattgtaagaaatttagataatttagattagaattctggggaaaaaacgtaaatcgaaattgtgttaaggtgaagaaacgaaaattgaatttgtgttacggtgaagaatctgaagttttcagttgctgttttacaaagtttgaaggattgaaggggagacaatctgtgttctgggtaagaaattcgtgttaatcctaattacacttgagaacgtgatttgaatgatacgtttttaaaaaattctgggttcatacattgttttgttggagattttatttgtatttgtagatataaatgaaagctctatgttttgttttgttaaatttataagtacataaattgttttgttagagattctttttgttttcgttgacataaatgaaagctttcaaaaagatctgattttttttctatttaatgttggtctgacctgaggaatttatgttgcaggtatggagttacatgtatcaattatggttggtgagtggatatacaaagaagaaggttggaaatttgaagctgaaaaaggaagtttcggacgctgtgtacgtattatagacacaacgacgtacacggatttggcaagtacaatatgtgatgttttcagctataagtttagtgaatggaaccctataataagttactggatgcctggaaagatgtctgatatgatagcaagtaatcgccctccagtatatattgagaatcaaatcagcctggatacatttatgttgattcgtaatggcgatccttctgttaacttgtttgtgtctttttaccctatcggcaatggaggccatacagagacagaggttacaaatgttgatgcagctcataatttttacgaagatataaatgtagatgaggaggatgacatagatgaaggtgatgaggatgaatatgaggacgaggataatgaagaggacgaagatatggatgtacatgacgatgacaccgatggtgaaagccgtggaagtacactcgaccctacagtagacggtagtgaaggtagtagcgaagattacgattacaataaatggggtgacatgattgtggaacaatatggaaatggtcatgttgaggagggcgtcgtgaatgacactcaacaaaccgtggaacccccaggggaattcactcgtctattggcatcgtgtacgtcgacgggtacacatgtacctcatgtagaacccactggtgttttggttgacagtacaccaacctctgctccatccccgacgtgtcaacatggtttgtaccaatgtacgtacactagattctgtgcagaggagacaagatgcgaaggtgaattagttaagtacacggctgcaaatgtggatgatatagctgagaacgtaactagagatgatggtatagtcgtcctagaaggggtttctgcaagtgggttaaatattgaatctgacgaccgtctagtgacaacaggtgaagcctacgaagtgtataaagggttttctacattgcataatggtgagaatgagtttctcgataccaatgttgctcctgtattcgatgatttagccaatgttcgagtcgatgagacagaagttgaattgagtacgtcaggtcatccgttgtatgtgggaagtgttttcaaaaacaggcaagtcatacagcagactatgcgacttattgcaatcaaaaggtgcttccgctacaaacaaactcggtcatgccctaaaagattagagatggtttgcgtagatcacaattgttcatggcatttgactgcacatgtcatacccaattccaaatgtttcaaaatcacagggtatgattccatccatgtttgcaagatcgagactcgaaaggattatcgtaaacatgcaacttacaagcttttaggcgaggttatgaagaatagatatagttcttcgcaagggggtccgagagctgtagatttgtctcaattggtcttaaatgatcttaatgttcggatctcatattcttcagcatggagagctagagaggttgcagtaaactctatcaggagtcctgatatggctagttacaggtttttacatacatatctgtatcttctacaattagcaaatcccggtacaatctgtcatctccactccactcctgaagataaaggtcgtcagcgcttcaaatatgtattcgtttctctctcggcgtctgtaaaaggttggaaatatatgaggaaagtcattgttgtagacggaacgcagctagtcgttcgttacaaaagatgcctccttatagcatgtgcacaagacgggaacttccaaatttttccattagcttttggggttgttgacagcgagaccgatgcttcatggatttggttctttgagaaattatcagagattgttccagatactgacgatttgatgattgtctcggacaggcattcttccatatataaaggcgttagtgtggtgtacccgaaagccaatcatggagcatgtatagtacacctggagcaaaacatatcggtgtcttacgcaaggtacggtgtgtctggtttattctttagcgccgctaaagcgtatcgggttagagattttgaaaaatactttgaagagttaagaggtcggagccccggatgcgcaaagtatttagaggatgttggatttgagcattagactagggcatactgcaaaggggagcggtacaatatcatcactagcaacaactccgaggcaatgaacaatgtcttaagcaaggcaaaagcgtatccaattgtctatatgctagagttcatccgagaggtcatcatgcgatggtttgcagtaaagcggaaaaaagtgtcgaagtgtaactctttggtcaccccggaggtagatgaacgtttccttcaagacttgcctgcgtcaggaaagttctcagtcatgatgtctgggccttggagttatcaagttacttcaaagactggtgagcattttcacgttgtcctagatgagtgtacgtgtacttgtcttaggtacaaaattttaagaatcccatgcgagcatgctctagctgctgcaatacattttggcatcaacccgaaggctgttgttggattgtggtatagccttcaagtgttttctgattctttccaagaacccgttttacctataccggacccaaaagacgttgttattcctcaagagttatcggacatgattctcatacctccatgcagcagacgaccacctgggagaccacccaccaagagaataccatctactggggaaaaccgggtaagattttcccccatcctcacttctatgcaatttttccttccttttaggcgccttaccattttttaactttcagaaaaagaggcagaaaaaactcattcctaatcagtgtacaagatgtcggaaaacggggcataacaagaagacatgcaaaaaccctatttag

SEQ ID NO: 181760 - DNA, 483 bp, Arabidopsis thaliana landsberg
atggcgtatgttgttcccattggagttgccatctctgtactgtctgctgcagtagcaatacttgtttgtagaaggagaaaaaccgaacttccaggttagttgttttgtgtcttactcagaaaatgaatgaatactcaatcagaaaatacactatgatgtggggtcaaggaatttgaaaaggaacacttttccctgtttaattgtctgtgtctgtgcaaacttctattagctatatgtgaaggacttataaaatgcactgatggatgactgaaaacgttttaacgtgtaaacaaagaaatatcattatggtttcgatttgtgtgttcctttatgttgcaaagaatattacgacacttccgtgttgcagataaaattataactcaaagttcactgcaatatgatcttaagacaattgaagctgcaacacttgcattttcgaagagaaacatgcttggtcaaggtggatttggagaagttttcaag

SEQ ID NO: 181761 - DNA, 66 bp, Arabidopsis thaliana landsberg
ggaccagtttacatcaccgagatagcaccaagaaacttgcgaggagctgcttcttccttcgcgcag

SEQ ID NO: 181762 - DNA, 139 bp, Arabidopsis thaliana landsberg
atgaggaagaccctggcaacgcgggcccagatgtcagtgcgcgagagcgagagggagaaggcagtgcgcgcgggtagtttaagtgcgactggtgcgtgggcccaacagcgcagtagcagcgacggggttggctgcgcgg

SEQ ID NO: 181763 - DNA, 449 bp, Arabidopsis thaliana landsberg
atgctgaccgagctcggatatggtccggcacaggtgagcgagcggctcgccgaggcccaggccggcgtccatgtccccttgcgtccccggcagtggctggacagtgcggcgtcggatgcataccggcacctgtggctgggccagctttccggccgctacggcagcgtgatcacgctcggcgggatccgggacctggcggccctgcgcgcggtcgacacgcccgacgtgcgcctggtcgacaaggtcggcgacatttcagcgctgctggcccgctatcaacgcatgacgctgtggattgttgcgctgggctatgccggtgtgctgctgctgttttccatccgctacggcctcgccgacgccttgcgcgtcgtgtcgagcccggcgctggcgagcgccggcacgctgggcatcttcggcatcttcggcgaacccttgaacctgttcagcac

SEQ ID NO: 181764 - DNA, 1134 bp, Arabidopsis thaliana landsberg
gcgcggatccattctattggatgcgcgtcattcttgcttcaagccgaggtactgttatggagcttggtattacaccaatcgtcacctccggaatggttatgcagcttcttgctggttccaagatcattgaaatcgataacaatgtccgtgaagaccgtgcactcttgtaagggtttaattacacccttatgtttcatatgctcaaagtctttaaagatcgattcatagagactaatagggttaagtttttggttataggaatggtgcacagaagctgttgggaatcctcatcgcggttggccaagcagttgcatatgttctctctgggatgtatggtagtgttggggaactaggagttggtaatgctattcttatcatagttcagctctgttttgctgccattatcgttctttgtttagatgagcttcttcagaaaggttatggcctcggttctggtatttcccttttcattgctactaatatctggtgagttttaagtactccaacgtctagctttctcggttaaaccgttatgcgcatttcagatgttaatggagtttcttttcttagtgagagcattatatggaaagcattcagtcctacaaccatcaacagtgggcgtggagctcaatttgaaggagctgttattgctcttttccaccttctcattactcgaacggataaagtccgcgcacttcgtgaagcgtttttcaggcagaaccttcccaatgtgacgaatctgcatgccacagtcttgatctttctgatagtgatttactttcaaggctttctggtagttttaccagtgagatcaaagaatgctcgtggacaacgaggctcttatcctatcaaattgttctacacctccaacatgcctatcatcttgcagtcagctcttgtctccaatatctacttcatctctcaggtatcaatctacacatagtctttaaatctgtacttaatattgaagctctttatacttaaaaacgttgtgaatctgtttctatagatattatacagaaagtttggtgggaactttttggtgaacttaatcggtacgtggaaggagtcagaatacagcgggcaatctatccccgttggtggtattgcgtactacataaccgcttccgcaag

SEQ ID NO: 181765 - DNA, 629 bp, Arabidopsis thaliana landsberg
gctagaaaccacattaaattatggtctcgaaagagtttgggccttgggttacatcaaaagttttcgccggtgagtttttgtacttttaatacttaatgcttattagaattttgatcaaaaagtagatgttctctattggtagaatttttgtttctgtcattattgtagctagttttcctctgaaattgacgatttggagagataagggcgtttagagtggctaggagttttttagggatcagtgttagcaccttattaaactgatcatacgggaccatcaacaacgaatgtgtttgctttacagggttgtgattggatatgatgaaggaaccatcatggttaaacttggacgagaaattcctgtcgctagcatggacagtagcggaaaaatcatatgggctaagcataatgaaattcaaaccgcaaacatcaaaagtattggtgcaggttacgaggtctacctcctaattgtaactcttgtattctggcatgggaaaacctgcgtgactcagctatttatttgtactgcctgatgattttaagctttcatctctctaccttaggctactgatggagaaagacttcccttgtctgttaaagagttggggacctgtgatctttatccacaa

SEQ ID NO: 181766 - DNA, 145 bp, Arabidopsis thaliana landsberg
atggtcaaagtcgggtatggacaggtcctgtttgctgccgctcacagtaaagccggcaaattcctgagcactggttcctaccagtacattgagtttatgcctgccgaactgattgtcataggtcaaagtgttgtcccagttccag

SEQ ID NO: 181767 - DNA, 252 bp, Arabidopsis thaliana landsberg
atggttcctgaagagttgaaaattattagctttgatggagaaaaagaagttattggagtagttgggaggatcatcaaatcttttttggatggaaaaggcaaagtgaatgccggtttccgtgagaatgtgttgtatcttgtgaatgtctgcctgcgcattgtgtgtctagtcacttaccaaaaatttgagccttatgaagactttggcagtgcaacgactgttgttgcgtccaccatcacgtcgattataact

SEQ ID NO: 181768 - DNA, 288 bp, Arabidopsis thaliana landsberg
atggagatcgaggaagccaaatctcaagaaatcgaagcattacagtccgtgttaacagatattaaacttcagctcagggacactcaagaaaccaaaagtaaggagatctcagacttacagtccgtgttaacagatattaaacttcagctcagggacactcaagaaaccaaaagtaaggagatctcagacttgcagtccgctttgcaagacatgcaacttgagattgaagaactctctaagggacttgagatgactaacgatctcgctgctgagaatgaacagcttaag

SEQ ID NO: 181769 - DNA, 726 bp, Arabidopsis thaliana landsberg
atggggataactatccagtcttcactcgcagaagtaatagaaaaccagcataagagacagcatcgttttgagcacttaaacaagattgaatcagtgattgaagaggtacgacaaaagggactcacacaagagaaagacactgccctatggaaaggtgcaaaggagaattacaaaaacagattcagtacttgtgaaacatgggaagcaatccgggaggctaagccacacatggaggggtatattccccatgccacacctaaatactcttttatagcatggcttgcaatgaggaaccgattagcaaccggcgattgagttttcacttggcaaatgggctcaaatctgtcatgcgtcttctgcgacgaaccaatggagagtagagaccatctattcttcgattgtggttacgcaaaagagatttggtctggtcagagcaggaagatcatcagaaacaagttcactacaacatggagtgctatccaagctacactcttagatgcctcattgggacgaacaaacctcttcttgataaggtactcttttcagctggccatctacacaatatggagagagcgcaacaacaagagacatggagacacacctttatcgcattctcaactacttcgaaacatcgacaaacaagtccgaaaccgaatctcttatattcgggaacaaggagacaagaactatgatggatgcatgaaagtttggtttgacacaagataa

SEQ ID NO: 181770 - DNA, 308 bp, Arabidopsis thaliana landsberg
atggaaggtatgagttatcataagaagctttacagtttatgaaattgcgtgtacggccaacaaataacgatggagacgatgactctgttttcgttttttcaggggacgatgaatcctgcgtctccatggtcggccggtggatttgctactccaatggttggtgggatttcaaggttgataaaactaggccaggaaaggctattaactgcgaaaaaattcagactttcaaatcacttgaacaagttctccggcgaagattctccatggttggtcacgacgtcttttgtttagtattctatcttggctag

SEQ ID NO: 181771 - DNA, 100 bp, Arabidopsis thaliana landsberg
aagtaatgactgcataaagaagtggaaaacatctccggactttcgatatcatcgacaaagcaattcccacaagtcttcttctgagcagtacgaggcatag

SEQ ID NO: 181772 - DNA, 54 bp, Arabidopsis thaliana landsberg
atgattccacgatcacactttatctttacctgcatcaacaacacaatgagatgc

SEQ ID NO: 181773 - DNA, 409 bp, Arabidopsis thaliana landsberg
aatttgtttcaggtgaagatatttggtccacttagaaggcattcatatctcactggatttggccctgggacgaatgcaacattctaccggattcttggaacggggtataatatttaaacaacaacttttgcttaattagcttgtcattaagtgacaaactcatcttcagtcccttgctttattgtttcttagagagcaaaatagctttgtgttgacatcagcatcgtttatcaaaataaactctcgaaaggcattggatagtccgcagttagagaaaccgactcaccgaggtgctttgtgtctgcccaaaattacacctcaggaatacgaaccttgcattcttgctggtcctgcttgtaattcgttctcaggaaacgaggataatcagcaaataaagtttgcctgcaag

SEQ ID NO: 181774 - DNA, 574 bp, Arabidopsis thaliana landsberg
ccgctcagagtaccacatggcctgatgtagtggagtatgtgcttggaaatagttggttcgcatatacgaagaatatacattgtatggtctcgcagcggctcgttagtgagagttgtcacgagggttcaatgtggcatatcctttattttcctccttttagtgagattagataactgcactgggctcgtggactttacatggctggtttttgctccacatctagctactctatatgtggtatgcttacccaatatagaacacattataagcagatctgaggaatctaggttgcaagaaacttgtgagttagcaggtgtcattccgtttcgagaactggaattccttactctgaggaatttggggcaactgaagagcatatacagtgatcctttgctttttgggaaactgaaggaaatcaacattaaaagctgtccgaagttaacaaaacttccacttgattctaggagtgcctggaagcaaaatgttgtcataaatgcagaagaagaatggctgcaagggcttcaatggaaagatgtaacgactaaggagccgtttttttccaagctaagaaaag

SEQ ID NO: 181775 - DNA, 620 bp, Arabidopsis thaliana landsberg
atggttgaatccatgaagtttgtgccggctcaggtgcttcttcctgttgtttccgttatagatgctaaggtcgatttacgttatggatataacattatgtcgtattccatgcaggctcgcattaatgagggaaaagagccaattcagttttttgtgatcatgcaaagcttcatcacatttaaggtccaatatttttattttccctacagattttcttttaagtactctttatcacaatctctaaaaaaaaagttatcttcgtctcagggtagtgaaagtgatgctttcaaaaagtacatagctgagaacgacatccctgatactacttacgaagcagaaggtgttgcactgtttcgggttcaaggttctggacccgagaacatgcaagccatacagatagaagcggtatgtgtattataaaccgtaatcaaatagctttcttgttcatcagtttatacttggtaattcaaataagtatctggttccaacaggcttccgcaggactaaattcttcgcactgttatatattacacggtgattctactgttttcacttggtgtggcaatcttacttcctcggaagatcaagaacttatggaaagaatgttggatttgattaag

SEQ ID NO: 181776 - DNA, 271 bp, Arabidopsis thaliana landsberg
gaccagcaacgccaaccgcgcgcagaacgtggcgagcgccaggaacgtcaagagcgcccggaacaacgtcaagatcagcaggatcgtaatcgcaacaatccacccgccctgcaggcggcaggcgagcgttcgcaacagccctcaggcgaagcacgcgagccccgtaaccgccgtggtcgtgtccgccgtggtggtcgtggccagaatcctgcgcgcgaaaacacacaggcccaaaccaacatcgacgagttggcatcagcggcgaccgtag

SEQ ID NO: 181777 - DNA, 79 bp, Arabidopsis thaliana landsberg
gtggtcctacagagcgcgcatcgccccgccaattcggatcaagccccggcatttggatgatgtggcgagcttcgaccgg

SEQ ID NO: 181778 - DNA, 168 bp, Arabidopsis thaliana landsberg
ttaaaggttcaagcaatatatataaccgagcaacaaaacaatgcaaagctaacaacaatccctagacttgtcctcttcacgcttgatccggcagatttgtgctcatcatcagcagctggagaatcggcatcagacgatgaagttgaggatttcggggcaggagctccg

SEQ ID NO: 181779 - DNA, 181 bp, Arabidopsis thaliana landsberg
atggtggtgggtatgtatcagtaacggaacttacatatgcgtgtgtattactatgtctatatggtgtattcctttgtgtggaacaatgcacgtcagagttgtttattttcttatagaatttaaggaatcaattattggatttctcaaggtgaaagtggacttctttgcacgcaaggtctag

SEQ ID NO: 181780 - DNA, 55 bp, Arabidopsis thaliana landsberg
cgaaaatgaatttcgtcgattgatcgcggaaacttcttccttgcgaatatcataa

SEQ ID NO: 181781 - DNA, 397 bp, Arabidopsis thaliana landsberg
tgacagtgacagggacgacgacaagaaagggaagaagaagattgaaaagaagagatactacaagaagaagggtgaagaggcgcacatggggcgggaatgggactccgacgagagctccatcgactcctcctccgacgaggacgccgccaacatcgctatcaacaaaggacttcccttccccaacgtcggccacaaatgcctaatggcgaaggacgacaaaaagaagaaggtacattctagagataccccaaaatatactacatccgatgatgagggtagctctagtgataatgaagatgatttaacttctctttctgctaaccttactaaggatcaaaagaagagaataaatgaatcaatagaatccattaatgagaaggatgatatcttggaatga

SEQ ID NO: 181782 - DNA, 326 bp, Arabidopsis thaliana landsberg
gctattgggtagtactcccctttgccggttttgagttgctcgtggtgggcgcagcctttctgctgtacgcgcgccacgcggctgactatgaaatgatcgagctaagccggactgaactccggctggttctggcagagggcagcaagcttacagagacatgttttgtgcctcagtgggccagggtgcgatacgatggcaggtacaaggcaccactggtgttgagtcagcgagacaagcaggtctttctcggaaagttcatcaacgagcaagacaaacctttgctgcacaaggaattgcgtgtggcactggctcaggcggcgcactaa

SEQ ID NO: 181783 - DNA, 324 bp, Arabidopsis thaliana landsberg
atgatgatgcaccactttgactatgatatattacacctctcaacatatgatacatcagattataaagatgcataccttttggcgtcaatgcacgaaaatttacgtgagtgagacccaatgaatagataagttttcgaatccttcaacacaactaggggggaggcatctacacatgactccatatgaactttccatatctcttgcatagagaccatttggttccttggaatctccaacgaccagtattctcggtttgcctcttcattactacatgactctggagaatgtaccttattgcaacgactaaatgcacattgtatttga

SEQ ID NO: 181784 - DNA, 657 bp, Arabidopsis thaliana landsberg
gtttgagaagatgtagcaagagctgcagattgagatggactaattatcttcgacccggtattaagcgtggaaattttactgagcatgaagagaagacaattgttcatcttcaagcccttttaggcaacaggtatattttaatgcacatgatccatatttttccaaaaacttacctttcttgggtattatatatgtatataataagatctaaatatgtttttctttgtatatagatgggcagccatagcatcataccttccagaaaggacagacaatgatataaagaactattggaacactcacttgaagaagaagctcaaaaagattaatgaatctggtgaagaagataatgatggtgtctcttcatcaaacactagttcacaaaagaaccatcaaagcactaacaaaggtcaatgggaaagaagacttcagacagacattaacatggcaaaacaagctctttgtgaggccttgtctttagacaaaccatcatccactctttcatcatcttcatcgttaccgactccagtaatcacacaacaaaacatccgtaacttctcatcagctttgcttgagcgttgttatgatccatcctcttcttcttcatctaccacaacaaccactacaagcaacactactaatccatacccatcaggg

SEQ ID NO: 181785 - DNA, 375 bp, Arabidopsis thaliana landsberg
atgatcggaagaagtccttacgagacaagtattgtttggtgggaccaatggtctgacagttttggagatagtcatgagcaagtggtcggaaaaccagatgggtgagtcaagaggaacgaggatttgggtgactgtgactaatgggttgatgcgttgagggaatgcgtaaactcatcgtggttatggttctacgagatgatcaccgttggtaatggtaatgtccccgaatgcgtgggatttgtttcacttgatactgaggcccttagtaatatctcatcctttactaggcgctgcttatgttctattttccaaacaagccgctacgtctttgttgagctttacttgtgccaggcgatcggcatatggatcatgtag

SEQ ID NO: 181786 - DNA, 89 bp, Arabidopsis thaliana landsberg
cccaggttgtcccttgtattgagtgctcaggaggtgatgctggcaacatggaggacttcgaggaattccaggaatacgacgagttttag

SEQ ID NO: 181787 - DNA, 83 bp, Arabidopsis thaliana landsberg
atttaagtagctatgcaacaaatcttatagaacagaatgtacaagcttttagtcaaattagagctaatctctcctcatataag

SEQ ID NO: 181788 - DNA, 221 bp, Arabidopsis thaliana landsberg
gcgcggctcaagatcagattgtggattcaactccaagcaaagaaccgtgtgtggtgcagaatcagagtaccgagacgactaaacgaactgaagaaacggtgaaaaacagctgccaaagtttagccgttgtggttgctccggatgacaagaagatgccgaggataaaacgcgcagtgtcattcccgtctcacggcgaagtaagatcatgtcgaactcgttag

SEQ ID NO: 181789 - DNA, 374 bp, Arabidopsis thaliana landsberg
agaaagagcgaggaaaagcgaatctggagaagaactcggccaaggaacgaggactcgccgaccattcaacctctcttaacgcctcaatcacatcctcagcagcaacgctgtcccaatccatccttctctctcttcagaaactatggagacaccaaacggaaacaataatctgctctacgaaaatcgaagaagaaggattgaagaatagggtttgaactttggattcgaatttgtagagtagtgtttctggggatttggattctgcggatgtttttgttctcaggttttgtgtttgcttttttccgaagacgaaagaaaaagtgaaatcagaacctagggtccgtgtatcgaatgatgacgtggcagaaacgtaa

SEQ ID NO: 181790 - DNA, 324 bp, Arabidopsis thaliana landsberg
atgcgagcagaccggaaacagaagaagccaaaccgttgcacgcgaagcaggtaaccgcctgcggttataagcgttcccccatcctcgccgaaaccaacgggcgaaagggcaggccgctatgcaagaggcgtgcaaccgcaccacggttgtgcaccctttcggcttcatcgcatccggtgggtcagcgtgaaggcccaggcccgcatgtcatgcacccgacgcgacagttactgcgtgcaaggaaactgcatcgccactcgcgccaatgtcgtgtcttctcgattgcggaaccagtgccgcgactcgaggcagccctgcacgtga

SEQ ID NO: 181791 - DNA, 156 bp, Arabidopsis thaliana landsberg
gggggaagttcttatggcgaatctggtcggacgaaaggagagaataagctggagaatatcatcatgcaacctactgatcaagtcaccaccttctttgatgtcgtagtgacgatagctagagcttcctgtagcggccgtggccgtgaccatctttag

SEQ ID NO: 181792 - DNA, 1051 bp, Arabidopsis thaliana landsberg
atggtcgatgtgatggatacagatgaagaagccacaggagatgcagagaaccgtgatgaagaagttaccgcagaagaaccgatccacgatgaggttgtggatgcggtggagattcatgaggaagaagtgaaagaagatgatgatgattgtgaaggattggtgagcgatatcgtatcgattgtcgagtttttggatcagattaacggttatcgaagaacacaacagaaagaatgttttaacctcgttagacgattgaagattcttgttccatttttggatgagattcgaggttttgaatcaccaagttgcaagcattttttaaatcgtttgaggaaagtgtttcttgctgccaagaaattattagaaacttgcagcaatggcagcaaaatctatatggtaaaactcattttggtgacaattttttgattgattgtctcctacgtaacctttaattgtgttatggttattttgattacaggcattggatggcgaaacaatgatgacgagatttcattcgatttacgaaaagttgaatcgtgttcttgttaaagctccttttgatgaattaatgatatctggtgatgcgaaagacgaggtaaattatgtgttccctttccgggtgcgatgtaggggtctcggcccaaaacttttcggatatttaacctaaaagttttttttttctttctttatctacactgtgtagtttctgaaatgagccattttatttttgtggtagattgattcattgtgtaaacaactgaaaaaggcaaaaagaagaacagatacacaagacatagagctagcagtagacatgatggtggtcttctcaaaaaccgatcctcgaaacgcagatagcgcgataatagagaggctagcgaaaaagcttgagctacaaacattacatgatttacatacattccctgtggtcgtgcgacactcaataccagacacaggaactgattcagggcatggactgcattttcttaggagtggcagcccaaatgagatagctgaagttatacaagagatgatgcatgcttcaattatctga

SEQ ID NO: 181793 - DNA, 141 bp, Arabidopsis thaliana landsberg
ctcaattcaaccaaatcaatgctatatcacaaacttcataaagagaacaagaacaacatgagatcatcaaatacaacaataatgtataagaagagatcaaaaatcggcaaatctatgatacgactacagagaaatctgtag

SEQ ID NO: 181794 - DNA, 48 bp, Arabidopsis thaliana landsberg
atggtcgacgacttaaggaggttaaaaccctctgctacaactttaaag

SEQ ID NO: 181795 - DNA, 189 bp, Arabidopsis thaliana landsberg
tctccgatttggagtcacgaacaacagttcatattcaaactagggaaatttcgccagttcagcggtttctatgggacatataatgcctcgggactacaaaatatcggtgtttatctccaaccaacaattgttaaacctaccggtacacgcaatgcagaggaaactgagtcaaacattgttttgggttaa

SEQ ID NO: 181796 - DNA, 342 bp, Arabidopsis thaliana landsberg
gtgatttggagctgtttgcgagcaaattggaagaaacgagccagaactagaagacatactcgaccaccaggtcgtgtgcatccaacaccatactcgacccccaagtcgagtaactttggagccattcttcccacctactcgaccccctggtcgagtatcctcagctcaggccactcgatgacgccactcgaccccctggtcgagtatcacttcgccacaccacctgaccacactcgaccattcactctaccaagttacttgactccctggtcgagtatcatcactcaccaccatcaccatcactcgatcggacactcgatcacgtctttacactctacttaa

SEQ ID NO: 181797 - DNA, 117 bp, Arabidopsis thaliana landsberg
atgggtgcacaattcaccttttataccgtcattatcaacgttactgctacccttacaatcaatgtcatcgctatcatcaccactaccaccatcgctattgtcaacatcaccgctatg

SEQ ID NO: 181798 - DNA, 236 bp, Arabidopsis thaliana landsberg
ctgcagataagagtgaccagaagctgcaagatgtgactcttgctaagaccactcactggggaaagatcaaagctatgcttgaagaaaagatcgatgaattgagccaaggacttcaccgagtagcttctgacaatgcagcactcactagatcgttgcaagaacgatctgagatgatagtaaagattagtgaggagaggtctaaagctgaagctgatgtggaaaagctgaaagactaa

SEQ ID NO: 181799 - DNA, 141 bp, Arabidopsis thaliana landsberg
aaatctcgaatcaatgaaaattgtagcaaaccaaaggtcggattccaagaagatgaatttaagcaattatctcaaagagagatccagaatcaaaaaaaagattcgcgaaattacctgaactctgggaagaaaaagaaataa

SEQ ID NO: 181800 - DNA, 108 bp, Arabidopsis thaliana landsberg
aaccacgtcaccaatgccttcatcaccttcgaagtgatcgcgaggtaccggtatccaattcttctgctcgtcctggatacattcgcgccaatgcaccaaaaagaataa

SEQ ID NO: 181801 - DNA, 408 bp, Arabidopsis thaliana landsberg
atgaattcatttcctgcacaaaaccttatgctatctgctacaaacgcaaacaaggactcaggcttgcgtacgtctaatgctcattggttacattcatgtatcgccgttccaaagaccacaggcattgatctttctcaggaacctcctgctgaaggtgtgatggtgcctcaatctcatttgtttcctcctcctattagagattccagaaacgatactgaaactgtgaaacagaagtccgtaaatcagtctccttcgaaagctttgaagccaaaaccgcataggaagaaacgctctgtatccaacaagtcaaagaaaacacctagcataccagaaacaaaacgtgagaaaaagaatctggacatcaacattgacatctcaagctttgatacttctggggttcctcctcct

SEQ ID NO: 181802 - DNA, 245 bp, Arabidopsis thaliana landsberg
cagtcgctctccaccggcgacttgccggcatcgacgatcgcgattccgggccaagatggtcgccccggatcgggcgagggcacggtgatgatggaaatcgtccatgacctcgcaccgggcgcgaacctcgtcttcgcgaccgcgttcaactctccggagagcttcgccgacaacattctgcggctgcgcttcgagtaccacgccgacgtgatcgtcgacgacatcatctactacttcgagtcgcc

SEQ ID NO: 181803 - DNA, 110 bp, Arabidopsis thaliana landsberg
atgtcgtgttcttcttcatctgggtctgaagaggaggatgaggggttcgactcttaccggaaaggagggtaccacgccgtcagagtcgccgatcagttcgccggcggcag

SEQ ID NO: 181804 - DNA, 699 bp, Arabidopsis thaliana landsberg
atccataaattcttctgctttgcccaaaatccatcatccactgttagcatcaatctcagcaaaagacatttgaatctctcaattctcacactcttcttcaatgggttcttgttggataataaagccaaatccatggaagaacttcaaagatacactgattccaacaatggcttcactcttctcataccctcttcttatacaaaggtagagaaagcaggagctaatgctctgtttgaagaactaaacaatggaagcaacaatattggtgttgttgttagtcctgtccgtataaagagtcttgaccaatttggttctcctcaatttgttgctgataagcttatcaacgcagagaaacgaaaggtgagaaaacaaacaaacccaaaaacaagattttctgtataaacatgtatgtgatttggttcttgttgttgttgagttaagaaaagcacaaaggaagcagaagttgtatcagtgggagagagagcaggattaggacaacaagtgtatgagtttgaatacaaaattgatagtacaagaggaggaatcaagagggttttctcagctgcgtttgtgagttctaacaagctttatctattgaatgttgttcattcagataaaccagagaatccattggattcaagtacgagaatgtcgttggaacaagttcttcactcctttgatgctctgcctcttacatga

SEQ ID NO: 181805 - DNA, 1543 bp, Arabidopsis thaliana landsberg
atggtaagtatcttctgttttgtagaaattaggccagatccaatcactcaattccggctcaaaatcaaataaaagcggactcaattagattctttaaaatatacttcaaaaattaatatatattggtaattttatgatttttctcatgatatattatcctatattaaaatcgatccaactctgttccatcatataacaccgtcccttgataattaaatatcacttttatttaaaatacatataggcctaatcaatttaaaagctttagtctaactaattaaaacttaatgataacacataaactattatactttggactgtatttcaactatcattgctaaagataagtatcttgtttgttataataatatatagattattaagtaaacaaaattttaattaaaaattgtattaacaccttaaaaaatattgtctcatagtaatttgtatttttttttgttttttttggttacaatggttttgtttttaaaaaaaattaagtctattgtttaatagaaaagcagagtgttttcatcctttttataattgtttttaaaaggaaaaaaggagcaactatcgtctctctcttctagtattgttcattcaaaattcagaccttctattctagcaattcttcaaattctgaatttgttctttcaaaaactattgaatcaattctttaatagaataagttcatctcgttgaacccaaagaattgattcagaaatttgcatccaattacacctaccacttcttaaagcatcgattcaattgcatcttcctaattagtgcattctttgtggcggtgatgaaatatagatctccaggtattagactatttcccttctcctacaacagaagcacgttttggttttgatttcccaagaatccttaatcgatgagtattagctaataattgttcatactcatgaaattgaatctgtcgtccttaattagggagtatcagaagaatctctcgatgatgaaaatgggaattgaggtactaaaagcaaagttaagcaaaggtcatttttctaatttcaaagttctaagtttccaatttctttgctcaatatatttacccatctatttgtaccgaggttgtaacaataataactaaggcgttcggggagaacggagtagcttctttattaatgacgaacagaaaagatggtaacttaacagaacggaaaaccgtaagtacagaacggagaaccgaaattacataacggaaaaccgaaagtacaagtcggaaaaccagaaaatacagaatagaaaacgagaaagtaagagatgatagagctaggcaattattctctcttaaattttctaggtaataactcttggtctggacccagttcccaatagtgtcttctgctatttataggttaggagatgacctagggtctcccctgtgactttccatttttaccctcttaggtttgtctggctgggccgaattgatgttgttggaccgagcaacttacatctgggccgagccggtcgatctaatgggtcggttttctgatgggccgttcttctg

SEQ ID NO: 181806 - DNA, 233 bp, Arabidopsis thaliana landsberg
gcattacatcgaccagtttacattcatggaaatatcggaacagtttcacagatttggagagaattgatatcactattaacttcaatgataaatctctcgagaaatctcagaagaagagaagcgaaatcagttccacacgacatgcatcaacgatttatgaatcagaaaatctcaatttacacagaggaaccaaaacagagaatcagttaacggaaaaatcatcgtacctgtag

SEQ ID NO: 181807 - DNA, 241 bp, Arabidopsis thaliana landsberg
acaagacagtaacaatatcgcattcgaccccattcaatctgatgcatttgagccgctgaccatgtccatcttccatgcagccattaatagtatgaaggaaacagatgtttctacagtcttcaacaccgacaaatcctgtctcctgcgaaggtatcgagctgggatagaaatatacctgaaacaacatgagtttatgtcctcaaggatctttgaagttctacaagcatttgtcatctttttg

SEQ ID NO: 181808 - DNA, 403 bp, Arabidopsis thaliana landsberg
atggcgggagaaaattccgataacgagccgtcttcaccagcttcaccttcttccgctggattcaacacagatcagttaccaatcagtacaagccaaaactccgaaaatttctccgatgaagaagaagcagctgtagatacccaagtcattagagatgagcctgacgaagcggaggatgaagaagaagaagaaggagaagatctcttcaatgatacttttatgaacgattatcggaagatggatgagaatgatcagtatgagtctaatggaatagatgattccgtcgatgatgaaagagatttaggtcaggctatgcttgaccgtcgtgctgctgacgctgatcttgatgctcgtgaaaatcgacttgcgaatcgcaagcttcctcatcttcttcacgataacg

SEQ ID NO: 181809 - DNA, 96 bp, Arabidopsis thaliana landsberg
gccaattaaagttgctggttaccgcaataacgcggtacgtttttccgtttgtagttaattcggtttacaatccagaaatccgaaccggaaaattga

SEQ ID NO: 181810 - DNA, 630 bp, Arabidopsis thaliana landsberg
ctttagcaagatttccgtcgagggatacgacacttcggttcatgagtttcctctcaagctcgcgttggcaaagcatttcgcttcatgcggaaagattgtagatattgatgttcccagagactttaaaaagcgtatccttaagaggttttggggatttcaatttggtctctctcatttttgttaaaattcaacactctaaaacaagtttttctctcttttttcacagtcctctcttcattatttttcatgcgaaagaaggagaaagtcccgtagacaaggcattggaacttagtgggactgacgtgggaggatggaatgtagtcgtgaagtctctacccgggcagcaaatgtacagagatcctgggggagtcgaccgcttcaaaggagaacgcacgtaagttgtttaatcctgcaaatcaattttcttagtacctgttcttgtgatcattgccatataatattctctcatacaattaattgatatgttaggctcatagttaaggtatatgatacaccttctacgttgtctaagattgatctccagatcgggctgtgtaaacatttctcttcatgtggagaggtcaccggtgttagtgttttggtccacggaaacttgtgctgtcacgaaag

SEQ ID NO: 181811 - DNA, 1026 bp, Arabidopsis thaliana landsberg
gtcccttggaaaagtttaggcaaagagccagtcattgttctgatcgatcgtgtcttcgttcttgcttatcctgcccctgatgaccgaacacttaaggtattctgttgaaattgttatttatgtttgcttgtcttctctttaagtttttcactttggttggtactgaatttgcttacactaattacataccaggaggaagacagggaaaagcttctagaaaccaagcttcagcagatcgaggtacttcgtatttctggctgatggagcttcatggatacgtctatatatgaccgttacatgaaacttggattttcattttcatctacaaggtttgatgttattctgagttatcattctcgtgtcttttacataggaagcagaaacagcaactcttgaagcaagggcaaagtctaagctgggaagtgtacgtctctaaacttgatgactttatttttggctatcttcttatattcatttcaggggtatgtattttttgtgtgacgctggaactttcctaatctgattagaggataacttatgattttttacgaacgatatatgcactccttgctaactactagataaaataactctcacacgctaagcattttataactaatctttgatggttggttcttttcagcctccacaagggaattcatggctaggctcaattattgctacaattattggtaatctgaaagtatccatcagcaatgtacatataagatacgaggattctaccaggtttgtggctgtttgccttttttgtttctgttttcccttctgattttgtggccatatttagctattctgctcgcttttagtgtcttgttgttggtgtttattagagacagctcagaaatacttgctagctttttttcttatttcaacaatatttgctctagtaatccagggcacccctttgctgcgggcatcaccttggccaagctcgcagctgttacaatggatgaagaaggaaatgaaacctttgacacaagtggcgctttggataaactgcgtaag

SEQ ID NO: 181812 - DNA, 299 bp, Arabidopsis thaliana landsberg
gtatactaccagagtcgttgatcgcgagatcgacggtcatgacttattactgaaccggtattcaacattagccgctggatcctatatctacggcttggatccaaaataaccgagatcgcatcgtatccataggattgcagatctacggtccacgcgtaagggtacccctgatctaatcatggacgttcgtgaacagatcggcggcaaaaacactatctccctccctggcccgaccgcggcggcgcaagcacatccctgcggcggcgctactcaccggcgcacgatgatcaagcgaccca

SEQ ID NO: 181813 - DNA, 353 bp, Arabidopsis thaliana landsberg
aagaactgttcccgagattgaggaagaagaagaatctgaggaaagtgtttattcagaggatggaaatgaaattgccaagactcatgtggatatgagaagacggttttgcgtcagtccagaggtagaacaagctttaggtactctagatagagtaatattcatggttagaaatataacgccagtcccagaaactgaggaattgtcgccaaatagagcagatgatcaggcaaaacaagtgagtgtattagagaacattgaaagtgttcctcaaacacaagagtcatcaagcgatttcagtgaagaagagaagagagaagagcatacaggacaaaagcagggcatgttaaacaaag

SEQ ID NO: 181814 - DNA, 473 bp, Arabidopsis thaliana landsberg
atgaggcagcgaagatggttggaattgatcaaagactacgagctggaaatacattaccatccaggcaaagccaatgttgttgcagatgctctgagcaggaagagtcaagtcaatatgttggcctcgtacccgatgccgtatgagttagccaaagagttcgacagactgagcctcggtttcctgaacagcacgcaaggagtaacagtggaattagaacccaccctagagcgggagatcaaagaagggcagaaggatgatgaaaacatcagcaagatccgtcagctgatcttagaaggaagaggcaaagactttcgagaggatgaagagggagtaatatggttcaaggaccaattgtgtgttcccgacctcaaacctattcgggaactgatcctcaaggaagctcatgagacagcttactccatacacccagggagcgagaagatgtaccaggatttaaaaaggaggttttggtg

SEQ ID NO: 181815 - DNA, 1733 bp, Arabidopsis thaliana landsberg
gcatggcatgagcaaaacaaaccaggaatgtcaaagaagaagccggaacttatagatcagttgaagaagggtcacagaagaagaagactcgctaataccgttacaattgactccatttatgagaagaactttttgtccatgaacagcgttttggaagctgttattatcaatgccgatgttcttcctggtatcttacaaattctggcagcacattcatttcccctgccgtacgatgccaagttggtggttatccatttaaaacataaattctatttcaggtacaaacatattcatgcttacactaggggacttttggagctccaacaccattgatctctatctacatcggaggtatgcttattcggtagaggtgaattatcatcatctcggattgagatgagtttgactgcttgtcataagtttatgatgtctgtatagagtttcttaaggatctaatgtctcttgtctaggtattatgagttggtggaaacaccaaatgggattcttcggaaaggcagagaagttttgatcactggatgctaccttcgtaccgcgagagaaggatttggcactccacggttacttccaactgagtatcttgtcgtattgctagatgaggtttggtttctgacaatcttttgaaagagaaattagaactgcagtattgaatttgcttgtagttagtcctaacacatctcagttttcatgcgaagtttatatgaaaaagagtggtttagtctttacctgactttcaaataccacaggaccaagatgatgatgcaatcctcatagcagctcaattttgttccgatactttctcatctgtttctcttgatgctttcaacgatggagcttcttactctctgtatgctaggtaagagaatatgtgggtaaacaatcttactaccaatcttggtaaaagcaacttactattcacattcctagttgcaaacacattcaagaaacttcaaatactaatacagtgattatttttatcagatcaaaaccttttggaagtaatgcctagtataactccaagtgttgtgattttatagtaaaattgtagaaatatgcgtaaagtaccccataacaaaagtatatgttttgagaaattgagtggttaccatgacttaacttctaaagtaatatttcatgttcccctctttgtttgagagcagaattgaatctataggtcctctggaatctgaactcacgtttagtactgcacgtagaaggcaaatttcacttgtagatggtgatggcgataggttaaaatttatcttgtggggagagcaagtcattgtggcaaaccttctgaggtaagctcctggctgggtgcttctacctttaaatttttcgaccaaccccttcttatagattcattttcagtgtgggaagtgtgcttgggattgagaggccttatatttctagtctcgaagagagtgcaatggaaggaaattatgagttctgccttgaatacggtagcgcaacacatctctatctagtgccatcaaccttacaagaggaacgggtaaatgaagttttttttatgttgcttcctttttctggttcagatttttgcattgatttgttttttttttcttcaggtttgtgtagcgttgtcacaacatcagtgtcaaggatctaaactgcttggttcagtcggagtttcacaggtgacattgcctcgtgatgccgatgggtctgtagacttcagtaattatccttttcgg

SEQ ID NO: 181816 - DNA, 1007 bp, Arabidopsis thaliana landsberg
atggcggccgcaacgatgtcttgggacgacgggaagcacatgaaggtgaagagggtgcagattacatatgaagatgttatcaactccatagaggctgaatacgacggagacactcataaccctcaccatcacggcactcctggcaagaaatctgacggcgtaagggtttaacaatgttgtaaaacctaacttttcacataaaagatatttacatgagtagcaaaaaaaataatctgacggcgttagctagtactcttcacgaccttctccatatatactacatctttcaatttatggatgttgcaatgggtttagtttggtcggtctcggtcttgtggtcttgactcttgacgggttgccttagtttgattaactgacacttaattactaaatgaaaagaaaaaatgatgggtcctgctaggtctaataatagcatataaaaatgaattagggctaggaaaattttggtctactatatttttgtttataatgatttatttattgtatactttgatcgaactaatgtaatatatttgtttttgtaggtgagcttgagcccagacgagtacataacagatgttactggctactacaaaactacaggggctgaagatgctatagcagcattggcttttaagaccaacaaaactgaatatggtccttacggaaacaaaacaaggaaccaattctccattcatgctcctaaagataatcagatagctggtttccaaggaattagcagcaatgttctcaactctattgacgtccactttgctcccttaccttcctcttcgtcgtcatcgtccagtttgagtcaagccaacaaagttgatgctcaaggtgggaaaggaggaacatcatgggacgatggtgctcatgatcatgtaagacgagtgtacattggacaaggtgattctggtgtcacttatgtcaagttcgagtacgagaaggacggtaagaaggaatcacgcgaacacggaaagaagacccttctaggagcagaagtg

SEQ ID NO: 181817 - DNA, 165 bp, Arabidopsis thaliana landsberg
gtgagctcttcacagcccattaaggtccaaatgcgaaatgagaatgaagcagtgggccgtcaacaaactcagcccatgaaacagacaaatgctaataaattactgctagccaacatcacgttggtcttcgacacaacttcaaatttcaaacgaaccaatatgtag

SEQ ID NO: 181818 - DNA, 166 bp, Arabidopsis thaliana landsberg
ggaggaatgttgtgttggatgaatttggaagttctaaggttgtgaatgatggagtcgccattgctagagctatggagttacctattgccatggaaaatgctggtgcatcgcttattcgtgcggacggcgaagctccgttattgtctctagtactgctattcatacg

SEQ ID NO: 181819 - DNA, 483 bp, Arabidopsis thaliana landsberg
atgaattcgggcatcgcgcttgccgtcaacggcctcgtgacgaatgccggcaagatggcgttctattcgagcgccgcgacggataaaatcaccgaagacggctgcacgaagaatggcatcggctggaataccgacacatatgcccaaacgaatgccgtcgcggctagcatgatcgggcaggggctcaagtcgtggttcttcatcgtcgccgactatgaattcgggcattccatgcaggcctcgatggacgaggcagtgaagaaggcgggcggtgaagtgctgggcgcggtcaggcatcccctgcagacgctcgatttctcgtcctacatccttcaggcacaagcgtctggcgcgcaagtcatcgccatcgcctccggcgggcacgatacggtcaacaccatcaagcaggcgcagcagtttggtgtcgatcaggaagggaaaaagatcgtcgccctgcttccctaccagtcggacatccacgct

SEQ ID NO: 181820 - DNA, 222 bp, Arabidopsis thaliana landsberg
atggatttctacgctaccctacactctcggccatccgttcgaggatcaagggccacagtttaacacagcgaacagacacctcacctcaaatcgtggccgccaaagtgaatctaacagccacagagtccgttgcggcaacagccgccacctccgtcgtcggtacctcgactggcgcgcgcatccagagcaaagaactccgccttgcggcttgtcctggcgaag

SEQ ID NO: 181821 - DNA, 960 bp, Arabidopsis thaliana landsberg
atgtcgaattttgaaatggctgggacaggatcatcaagaaacaacgaagaagacaatcaacaaaacacaaattgggtttggtacaaaaacaccaataataacctaagtacgagccacaacaatcagatatggcagcagccaagcctcgatctatatccgggtcagatcgacgtctgtgatatgaccacgtcatcgagatctctaacgataagctgtcaagagtgtggaaaccaagccaagaaagggtgcacgcacgggcggtgtagaacttgctgcaagagtaacggactccactgtcccacccacgtgaggagcacgtggatccccattgccaaacgccgtgagcggcagcagcagctacagacgccaacctccaacccaaccggcggtagcggcagagttgggaagtatagagacattaatcaacatgctactttagactcatcaggtttggtttcagtagtttttcattgttgttgcctaataaatctttctttttacatgataatgcatcagttttactttgatcaaatatcatttcgaaattgcaataagcaatctaagaaatgtaaaaatgaaattccatttcaaaatgatgaaactattaaatattaatgtaagaagctaagtaaaataaagaacaaaaaattgtgtttgaaaaatgaacatagttttgttgttaggatttgataaatgtttgttgtgaagttttggccctaactttgtgtaactttgctagggttagagatgggagagacaagatttccagatgaagtgagctcggatgcacttttccgatgcgtcagaatgagtggtaccgatgatggagagggccaatacgcataccaaacgacggtgggcatagctggtcatctctttaaaggaattctctataaccaaggtccagaaaacaagtccatgcgcagtacacaattctacgagaacccaccaagatcttaa

SEQ ID NO: 181822 - DNA, 4751 bp, Arabidopsis thaliana landsberg
  unsure (1)..(4751): unsure at all n locations
gttttgcagaaacacaaccaggttgataagcacagaagcaaaccaagcaactctcactttttccttccacaaatttttgtttttattttcgaattcctctcgggctgcaaggatggattagcacgaatgaagatcatcagtgacatactcgatcttcttgattcaaatcctatgaatgttgaagctttgatggtatagagtagacacctatggctgaaaatttcagatatgcaggtgttaaattggcaatttaaaatacaaaccttatgtgtaggaatttggatggagtgcgtggttaacagcatcaatgaaacttgatgtgataaaagactacagatctgaattgcttaatcatgatgacttggcattaaatgagcaacattttgtcaggggtctcttttgtgttgttctctgccactatattttatctgtgaagggaggttggcagcagctagaggaaactgtgaatttcatactcttgcagagtgagcatgtaagttaatcaaacctttttcttgcttatatcttaaaacaaatttgttgctgttcttagcttaatctatttcatcacagaatgatgtcccgtaccggtcttttctccgtgatctctatgaagacttgattcagcgtttggtggaactctcatctgaagataatattttcctttcgcacccatgtcgcgacaatgtgctgtatctcttgcggctcgttgatgagatgcttgtctgtgaatttggcagtaggctcctggtatgacccacctatttttcggtttttcagttttatcatgcagttgattgttgaatcaaatccatgttgacacgctgcaaaatcttgtgaaactgccttcttgtcctacgtgtagcttgagaattatggcgtttttgggtgcgattctacgttttcctggattgttaaccatgttgatgcttangtcttttggtgcgtattagattatctagaataatttctcgttccattcgttgatgaatgtactcactatcaacaatcagtcagggtggtgaaggtattagttaagttatcgagtgaaacatcttggattaactaaattcactcgacactctctaaacttaaataacttcattgtatttaaggtcattgctaacaagtggtttgatccagtctctgttgctaagaaaagcatatgtgtgctttcgtttatatattggagctttaatgtcaaatgtatttttttcagtttccagcaattagcactgatttttcagaggatttattacaacttggaaaccgtgaggaccccactttgggattagatgagagtttccaacgatttttgactgaagaaatctctaggtatgctgtttataaatttcatgttactgcatccttagtttagtgccatttacaattttgttttaaagctcttataaaaaataagtatatggagatgattatcggtataaaataaaaattgtaacaagatatgcattcatctcctttatggataactttgtatccattgaaaccaataatagaatacctgttatgggtagcataacttttggcccatgatattgttgtagagaaacataactggccttccaataaagaaaatgactggtgaatttgggtaaaaatgtggctagtgatttctatgtgaaagaaagcctttacttggtttctttcgtcactgctctttgtagttttcatttattttaaaatatatgcgaggctgcttttacagatattgtacaacatctatggctgatccataatactttctactcaatattcttgcttgcgagttctggtgatgatgttattttcatcatttcatttttcagaaacacagaatgtcagcagtcttgcaccacggtaactgaacttatgaccaatgaaagatggtggaatttgtatgacaatctgtggaagataatatgtgatattaatggaaggggtccggtaaagatgtctcccaaatcgttagctactggtccctctattggccaaagagcaagaggtttagtagaatcattgaatgttccagctgctgaaatggccgcagttgttgtgtcaggaggaattgacagtgcattgagtggaataatgaacaaaaaggttgatccagctcccgctcctaaggggggagaaatgcccacgaatcgtgtttaggcttgtcaccctttatctgtgcatgtcttcactggaaaaagccactagatgtgtacagcaggtgacctcactcttgccttccttcttagctgctgatgatgaacaaagcaagagcagactgcatctctttattgggtgtttgctttatgtgagatcccagtatggaaagctagacgacggtgctcgttttcatgtcatatcgcacctgatacgtgaaactgtaagttgcggaaaatccatccttgccaccagtggtatgaataaagatgacagctctgattctggtggaatcttcaaagaaatgggctctatccagaatcttatacacaaagaccgtgtgcttgctgcggtcactgatgaaacaacatacatgaaaacattgatatctgatcgtactcgtcaagtgcaagcccttggtgaaaggaataatgaaacattatctatagaatgcaacagcaagaaagcttttgatggtgagctgcaaaacgttttaaaaactgttgttacatgggatgaaaatagacgagtttcagtgcaattaagccatgaagagcaacaacaaaatgttactgagaaatggattcacatgctgcgatctttgatggatgagaggggtccttggtctgcaactccttttcctaataacattttaaaccgctggaaacttgacaggacagaagattcttggaggcgtagaccaaagttgagacgaaattatcattttgacgaaaggctgtgtcatccaccttctacttccactgccactgaaaatgagacttcaaacgttattaatgaaagcaagtctggtgtgatacatatacctgaacagatgaagaaatttttacttaaaggcattcgcaggataaccgatgagggtggctcagattcctgtgagaatgacagtagtcaagccgagcaaagtttcatggatacttctgcagatatccagttctctgagcttgtgagaaccagcagtggtctcaaggatgtcgtacaggataaagtagatgcatcttctctagaagttggtaccagcgaggtacatatttcacaaattttgaaggagtagccaatatagtggttacgtataacatgctttcgcgttatttctcaggttttgacatcagttccttgtgttctcgtaactccgaagaggaaactggctggttggttggcagttatgaaaaatgttttacatttttctggggagtttttggtggaaggaactggtggatcagctgtcttcaagaactttagcacttcaaagggtagtgatgtaacaaaggctgaaaataaacagaaccttgtaaaatggtcttcgccttatgatagtgagacgtttctagatttggaatcaggaaacaaaaataagaaacccttaaaaaaggttaagcgccacagaagatggaaaatagggaaggtaataaacatcaaactgattgaaaaaatttcatatatcattttagcatatttgataatgtttcatggacgtgctgttgataggtgaaaagtgttcattggacgcggtatttgcttcagtatacagctcttgagattttcttccaggaatctgtacccccagtctttctcaattttgcatctcaaaagaatgcaaaggaggtcgggatgttaatagtttctaccaggaatgaattcctgtttccaaagaatgttcctagggacaggactgcaatgatttcgtttgttgacagaagaatagctatggagatggcagaaacagccagagacagatggagaaggagagagattacaaattttgaatacttgatgattctcaacacccttgcaggcagatcttacaatgatttgactcagtatcctgttttcccttgggtggtggctgactactcatcagagactcttgattttagcaaagcatctacctttcgtgatctttctaaaccggttggagctttagatacaagaaggtttgaggttagtataaagcgatggctatatttccattctgagattagttcattaatgtaatgttatatgatatatgttttttacagatttttgaggacagatatcacagcttctctgatcctgatatacctaggtaccatttgcagtgtttaattttctgtactgaagaaatacttttccctttgcaccttagtaatttttgtttaaaacttgatgcagtttctattacgggtcccactattcaagtatgggaagtgtgttgtattaccttttgaggttagagccgtttacatcccttcatcgtagtctgcaggtatttgttttcaactttgaccaatagcagatttgtggagtattgtaggcaataattatgttttgaaatagattatgaaaaatggtgaatacaaacatattcactgaatagttacttatgtggccagggtggtaaatttgatcacgcagatcgtcttttccaaagtgttgaggggtcctttcgaaattgcctgtccaatacaagcgatgtaaaagaattgatccctgagttcttctacatgcctgaatttctggttaattctaactcgtaccatcttggagtaaaacaagatggtgaacctcttggtgaagtttgtctacctccatgggctaag

SEQ ID NO: 181823 - DNA, 206 bp, Arabidopsis thaliana landsberg
cgcggggcccgccaccacagcccgacaaggcgggagcgaccgcgacgccgttgttatccgctttggttcggttcggtcctccggggtgtgccgatgccgataccccgatgccgccggcactacgcgcacgcggggccctgctgccgtgcggtgccggcccttgcatttcttttcctgcctctcgttcgtcaacgacgccacgcggg

SEQ ID NO: 181824 - DNA, 39 bp, Arabidopsis thaliana landsberg
atggttctacaacggatttccatggtatggaagcttccg

SEQ ID NO: 181825 - DNA, 995 bp, Arabidopsis thaliana landsberg
gttttgagtcaaatgccgtatttccgaagatctggtggtcgtgatcatatatttgtttttccgaggtatgtggcacttaatcaatagtatataaagttttctcgatgaactgtattctttttatactaactttgacattacttttctttgttatgctattgtagtggtgctggagctcacttgtttagatcctggtcaacatttatcaaccgctctattatcctcactcccgaggtacttagcttgctctctgcttaggagtttcttgtattttgaagtatatttggtagtgaagcgctaatgtgaaagttctttggtccatatctgtctcttctggctttcagagttttcattggacatttttaggggtggtttcgaataaactgaatggtctatgtgcctacttgtagaatcatacaatggaatcattgagctaggttcttagagtttgttttacagaaacatgaatgcttcaatgattgtggatgcaggctgaccggactgacaagaaagacacaactgcctttaattcatggaaagatataatcataccaggaaacgtcgatgatgctatgactaaaaatggacaacctgatgttcagcctttgcctctgtcaaagaggaagtatttagcaaattatttaggtcgtgcacaagggaaggctggtcgacttaaattgattgacctatcaaagcaatttccagataaggttagtctcacattatttcttcaaagactacttatacacgtttttcattttccatcgaggatctgctaagctattacttgctatttcgatgtattctttcccttgcttgcttcttatgagtggttttgtgaacagctagaatgtccagatatgaagtttagcggaactgaaaagtttggaaggacaacatattttgaacatctgaggaatgccaagttctgcctcgctcctcgtggggaatcatcatggacacttcgcttatatgaatcattctttgtggtctga

SEQ ID NO: 181826 - DNA, 124 bp, Arabidopsis thaliana landsberg
atgcaacaatttatgtttgatcgtcttaaaacaaaaacaaaaaatcagtttctaaggtaaaaatatggttcaatttctaagagagaatgggttaatatatattcttttgtttcattttaggtga

SEQ ID NO: 181827 - DNA, 600 bp, Arabidopsis thaliana landsberg
tatattcgaaagagtttgcattgtcaaatggtctgatgaacaaatatcagattgtgttaatgaatgaagaaggagaatcatggaagatagacttgagacgcgaggcatataattacggccggttttacatgagaagaggctggagaagtttctgtattgctaatgggaagaaacctggagacgtttttgcattcagattggtcaaaaatgaagaaacacctgtgatacagttgttccctatgaccattgaagatttagacaaacttcgtaagttaattttcataatccgtttgttattgataaaattcttaatcagattctactattgatacagagagccttccaagacacaagattcgaaaaacagaagcagctccttcttcaccagacctttcttcttttgtagccactgttacggcttcaaatctaagccgcgatagactggttatgatactcctgacttacatatattgattttgatatgattgagaagtgttttaatgattttcatgatgactgtacttgactgcagtatcttcccaagacgttcattatgtcaaatggtttgttgaagaaatttcagatgtgtctaatgaatga

SEQ ID NO: 181828 - DNA, 1237 bp, Arabidopsis thaliana landsberg
atgcttccttcaaacccaacaccaaactcacacactcccgtgatctcccgcgttacaaccacaaaggtatgcaaccggagcatcactaccaaacgttacaccgtcgtgtatacactcggccagggtagctttccccgtgtcttcgagttctttgcacttcatggtgataaagtaacatcgttacaaaaccccacgatagcatggttcactacgaaggtcagacatatcacgatcttcgcacgcttatggtctttgcctcctaccacaagcacatcgtaccaagaccccaaagtttaagatattatgaaaaatatggctaaatcaaacacatagaatcatcaatatcccaacacaacctcccaaccataaacaatagcataagaatctaaagatcacatatgcaaatccaatataaccattcacacaattcatataactcacgaaatcaatcaagaatgcatgagaatatgattatgaaacttaaacaattttctagaacttactcagtaaccaacaaaatgagtgcaacgattcggacagaattttcggctacaagaccttaacatgaatcggacggacgatcttcaactcggcagcctctcacttttgttcaatttctcttcacaaatcatttggggtcgagttgggcttgtataggcaaggcaagggcgagtcagcatgtccatatctcaaccgcatgggcgagtcagcaatccaagtgtcatccgcccgtgatgacacgctcgccactttagcggatgagcgacacgtggctacccaaacttcggctccacgcaactcaaattccccaagttagccgagccacgcgtccttggcgtggtcaaatggcggtcaacgcccggcggtgcaaacttcgtccgcggcacgcctgtgttgcccaaacttgctcattcttgcccatctttgcccttctttgcccaaatagttatttcatttttgcttttatggtttatcaccttttgggcacatatgggcaatcagccatgtattaggggcaacttcctctcgttttggcttcgcccggatgacccaattttgaactagaattggccaagttcatttttacctcgcccatctctttggatttcgtccctttactatttctttcttatctggtcttcctcggtcgatcctcgatgttgtcctgctcggccgcttacccgttatggagggtcattacaatgcgtgtgttattttgcctcaggcttttacctga

SEQ ID NO: 181829 - DNA, 916 bp, Arabidopsis thaliana landsberg
aatttctatatgattggttggaacggtagtggagtatatagaatacttaagatagaccggctcgaagcatctgagcttaatctcagagaggattcgactgcgtataccaaaaaagaatgctacgagttgcttaaacggatacacgaaggaaacaaggcgactggtggactgaaacttgtcactgtttgttatggaatcattggtatgtgtttttctctcaagtttatgtttacagaagagtagtagatggttttactttacagatttgttctcacaatttttttttttttttttttggcatttgctctcagggttcattaagtttttgggaccatactacatgctgcttataactgaaagaagagagataggtgaaatttgtggtcacattgtttatgaagtgtcaaagagtgatatgattgcattgcaacattctagcgtgctttgcaacactgcaaattcaagagacgagaacaggtattttgatatatctttggctacattatgctttttttttcttatatatttattgcaatcccattgctgaagaaaggttctgtttttcgtttctgtttggtgaaaagagagagtgcacggctttagcaacattgtaccattccatccaatatatgtactcaagtcattaaacccttgcgtttctctatctgatgtttcccacttgttgataaataggtacaagagactcctgtgtatggtggaccttacgaaagacttctttttcagctattcttacaatataatgcgaagtttccagaagaatatatgcgaccatgagagtggaggtactctctataagaaaatgtttgtgtggaacgaattcttgactcggggaactcgacatcaccttcggaataccctctggactgtagcattggtgtatgggttttttaagcag

SEQ ID NO: 181830 - DNA, 102 bp, Arabidopsis thaliana landsberg
gaagagaaaaacgagaaatatttaatcgcaactaacctgaagattcctccaattgtttacgcaactcttacttttaattttattaaagcctttgtaacataa

SEQ ID NO: 181831 - DNA, 364 bp, Arabidopsis thaliana landsberg
gttcgattggaaaccggtcaattggaatggccgctgccggcggtatgttcgtgggaacttttgccggaatctttctcgtacctggtctttacgtgattatggaaagttttcaaacatggctgacgaggaaaaaatcttcaacgagtcattcaaccgtgaacgcaacatgaacagaaccttgatacgtattgcattgatggtggctgtctcttcttttacatattcatgtaaactttcaaaagagaacgttgcatcaaagatctcattaccgaaaacatttgtaataacaggaaatgacagctcgtccgtcggatttctcccagaagaagtttttatcgtgacagcttgctaccacgtgtattaa

SEQ ID NO: 181832 - DNA, 459 bp, Arabidopsis thaliana landsberg
cggcgatgcaccgccgtgcggactcgtctgggcatgaatcggcagtgctgttgcgaggcacaggcatccggccaaccggagcgcgatgtagcgaaacatggtcgtctccataagctattcggtaggtccgagccggatccggtagggctgacagctgcctacggcaaggtcttcgagtcggatggtcgcggcgcgcgagggtgcgatgccgcgcttgatcgcctggttcaggtacgggaagtcctgtgccagcgcggcgacgcggatcgtcgtgggctgcgattgtttcgaggcgaccgcgccaaccttcccgaggatcgcggtgagatgaggatcgcgtgcgccgagcgcgtcgggcgggatcgtgaagtcgacgaccggggtcggtgtctgagttgcggacgccgattgctgcggcccgtcggaccgaagcgcctgcaactgcgcgcacccggatag

SEQ ID NO: 181833 - DNA, 433 bp, Arabidopsis thaliana landsberg
atgaccggtgctaccaccgtaattggttccggtgttgacgatgcaccaatgggggcacctgggtctatcgggtttaacttcgtatacgaaggagtaacctatacccagtattcagcttcacctgacggatggatccgcctgggcggtggtacggcctccagccagttcaccaactcagtaataagcgccaccaacacgccaaaaatttatgcttactgggatgacctggcaactggtactacaggtaacgtacaaaccctggtgactggtactgctcccaacaggatctttattgctcagtggttcgtgaccattccaagggctacttcaggtgctgccaatgctactttccaggtttggctgtatgaaacttccaacaaaatcgagcttcgttatggcgccatgggaacaccttccggatctgcttcagcag

SEQ ID NO: 181834 - DNA, 909 bp, Arabidopsis thaliana landsberg
ctattccacagctccatcaaaccctaacgacgagaccagtcgctatcggcgacgttgattctcctactaattccgaaacctcgacggcgcggccaaaaatctccgccgtggattcaatcttcattgacgattcctccaattttgtccaatttcttccccaaatgttccatccattgttttttatttaggttttcgtcgtcgtcggagccgaaaccgattttgtttgtctgtgaagaggagcgaacagagtcactgattatttcacgagaacctgtaagatttatttccctttttttttttgaagatttctgaaagctctctaggttcgtataaaccctaagttcttatgctgcttgtagttagaattctggagttagtcttaattgattagtgttttcgagttgttgtgggaattatgaacttaatcgatagtatatacgttaggatttgagtattgattgctttaggatttcgttttggtattatactctttgatctgatggatgcgaaattgtatcagagttttgtatgagagacaagaagctctgcaatattgaagtggtttcatggaactttctgtttcctctccaaagcaaagtgtgttatctccacctgattgtatgagtgaccctgaggaggagcatgagatcagtgaggaggaggatgatgatcgcaaccataagcaccgtaggaaagaagagaccaggtctcagtctttggaacaagattcttcagatcaggctttctcacggccgtacaggaaaaactatagacattatgaaaatggcaattcgtttagtgaacatgaaaagcggtcttttgggactggatcaggccaacgtgtacagtttgatacccaaagaatgaggtcaaacccaatgttttcaagggactcaggtcctggtaaag

SEQ ID NO: 181835 - DNA, 75 bp, Arabidopsis thaliana landsberg
ggcaattttgctgctgattcgttagcaaagcctgcacttgtggcagcaaaagctttctccattaatggaatgtaa

SEQ ID NO: 181836 - DNA, 1835 bp, Arabidopsis thaliana landsberg
agtttcacaatgaacataacaacagtgcaaggctttgaaaccttcacgtcgagcttgacgaacaagtcattttgtcctagcaaggagggcggcagtggtgtggatcttgttttgagttgtgtcgataactatgaagcaaggatggctgtcaaccaggtagctgttacttctttctcgaaaaaggcctttttgttacacattccacagttcttacttcaccatcgagcattttttatcttacattctacataattcaattagttgggaatggaaaatatataaaaagttctagattggctctgatttgagtttattcttatgaaatatttgcttgcaatgagttacgtcaaacatggatggagtcaggtaaatagtatgttaataattatatgtacttcttattttcatttctcttttggctaacaaaaaaggtgatattttgtgcaggtgtatccgaagatgctgtttcaggtcacatacagctcttggttcccggagaaactgcttgttttgcttgtgcacctcccctggtttgttttttttccttcttatatcactcttacaactctaacctatgatgccctgcattagtgcttgaggaatgtatcagtggaatatgggggattttaaggattctgtgatccagggtattgttaatactactttttggatttgctctaaacaatctctttactttgtggtaggtcgtggcatctggaattgatgaacggacacttaaacgggaaggggtctgtgctgcatctctgccaactactatggtaatttcataccaccttacaatacagttcaaaatttggctatgttgactattaatcaaattttctgctaatgcttttgtttgtttaagcgctatctatatattttaagactcttgtttaattgtcaattcagggtgttgttgcggggcttttggttcaaaactctctcaagttcttactaaattttggtgaagtttctccatacttggtaaaggctttgcttcctccagctctcctcacatttaacacactatagtttatcgcagaatgattataatttaaatcagttaaagcttactagttttatgcctgttacttgatcccatagggttataattcactgaaggattttttcccaaccatgaaaatgagaccaaatccacaatgctcgaatgtagcttgtctagagcggcaggtaacctgattaaatgcaaccacaaaactatctcagctcgtctttgttttgcgccttttgtttccatccatgttctggtaaaaaaattgaaatcccaaaatgcagaaagaatacatgcttgcaaaaccagaaagggatgccgctgctaaagctaagatggaagctgatgcatccacaactatcgatgaaggtccactccatgatgataatgagtggaacataaggtaataactccgtaaattagttataaatcaaaatttgtatttttggatcatattttctcctttccagccatatttgcaacaagaaatctgatgtgtatctcatgtctttttgtcagtgttgtcgatgatgaaaatgagaaggatactacaaaagctgcctcaagttcaggtaattccaacttgggactctatgtgctatccatgtgaaaatgtatcaaatataagtcctcttcttctgactgttatctaaatcctgtgtgatgtgtagatacattgcccgaagggcttactcgggagcttccagttgcagatgagtatgagaaagcaatagccatagcctcaggatcaggagaaccagaggaggaagatgatcttgaagatctgaagaaacagctcgaagctctcaacgctgcttga

SEQ ID NO: 181837 - DNA, 94 bp, Arabidopsis thaliana landsberg
atggatatcttctggcttgttatgtttgcatcgaacaaatatgtaacttacatagaagaagacataatggccaaacttaaagacactttgatgg

SEQ ID NO: 181838 - DNA, 336 bp, Arabidopsis thaliana landsberg
atggagagcaccatcagctcggtgagtccgggcgaacgcatgaggttgcgccatgtcaagtcgaggtagtaacagaacatcctgtgcttctgcagaagatcccgggcccgcgaatgggccgcacgcagcccgtcagcagtccacaacgcaaggccaccatcaagggtgcatgtgccgtgccacgccggctggaacagtatcagcaagcccgatcaagcgcttgcgggagacagccgtccccgcgcgggtgtctgcggacacatggcggacagcacgtacgcatgcgagcaacggacacagccgatagtttgagaccgccctgtatccggcagcgag

SEQ ID NO: 181839 - DNA, 142 bp, Arabidopsis thaliana landsberg
ctccgacattcaggctcaaaaattggacaaagcctttggtatagatggcaaagtcatagcaggtattgggttccttactgaccagattaatacgatagcagtacacagtgatgggaaaatagttgcggcaggaattaagaaa

SEQ ID NO: 181840 - DNA, 107 bp, Arabidopsis thaliana landsberg
aatcacacgcaccacaacaagtatcagaagaaggtggagaattcgatccaacggatgcacctgaaagtacgactacgaacatcagagacttaacgtcatcttcttga

SEQ ID NO: 181841 - DNA, 1039 bp, Arabidopsis thaliana landsberg
gttcctttggtactcatccagaagatacacactcaaactttctcgttcgtcaatgtgcaactatttaacaggtaaataatacttgagaattacatctaatggtttctacacaccttatcatcgatactcgtcaaagtacaaaccttcctatggttgatatttctcaaattcctatggaagatataagccaagatcactagtgttttcttacttggttttttccttaacatcttacaatagccttctactgcgtaaagagtgttgtacattcagcaatggagaatttgtaaagtctgggcttgcagagctagaattgtggtgcggccaagtcaatgaagtaagttcctacctcacgttttccttccggaaaaagtttctttcggctcattatatcattctttgattttgcagtatgctgggccatcttgggatgaactgaaacacatcagacaagctgttgggttcctggtatgttttactcttgtttaatactaacttgtggaactcttgtttcttgaatcttcaaaaacgaatacttctcctctcgtaacttatcaggttatccaccagaagtacagagtatcatacgatgatatagtacatgatctttgcccggtaaagctccttcttagtttctagaaacacgtttttgcctagactccatacttaatggctttcttgtttcactttattacagatccttagtgtccaacaactttaccggatatgcacattatactgggacgactgctataacacccgaagtgtgtctcaagaggtaatatcgagcatgcgtgcgctcatgacagaagaatccaacgatgccgacagcaattccttcttgttggatgataattccaggtaactcgaatcatttcttaaagattaatatcagtagtagaaactaaaaccggtttattgttcgcagcattcccttctcaatagacgagatttcgaattcgatgcacgaaaaagactttgcgagtgtcaaaccggccaaagagctactggaaaacccagaattcgtattcttgcacta

SEQ ID NO: 181842 - DNA, 247 bp, Arabidopsis thaliana landsberg
gctggtggaggaggcggactaccgggccacgcgggagctgttcggcggcgaggatcggtccttagacaacctgctgcccaagagcgtgaaggacttcgagacgtatgcggagatcatgttcaacaagtacctggcgccgcacgcggagcacaagcactacaagctgctagtcaagcaggtggtgaacctggcagtcgggccactgggcgcgcaggactccaaggacctgtggccagcaaagaagggc

SEQ ID NO: 181843 - DNA, 977 bp, Arabidopsis thaliana landsberg
ggaggacctcgcggaggcaacgcacgctggacgacatcctcgacgcccagtgcccgtaccacaaggacatgcgccacacccttcggaactgcagggacttcaagcactccgtcgggcacggccgacccttctaagctctacctcctcctccgccacggggaggaccagaagaaccacgacaaccccagcagcaggaggagggaggaggaggagccttcccacgcgttgacagggaggtcaatgtcatcttcagtggacacggatcgcaggagaacagaagacaacaaaagctcaccgatcgccagatattggtggcgaccaccggtcctcccgctccgtaccgatggtcggagcaccgatcactttcactcgggcagatcaatggctcaacttcgaccacccaggcaaatacccgctcctcgtcgatccggtgatcaagagagcagggtgaagaaggtgttagtggacggggagagcagcatcaacgtcaccttcccccggacactccaaggcttgggagctcacctcaaagagctccacaagtcggacactcctttcttcggcatcgtgccgacggaaggggaatacccgctgggccatatctacatgccggtcaccttcggaactccgaagaactacagaaccgagttcctgaggtttgaagtggcgaacttcgactgcgggtacaacgccatcatcggaaggcctggattggccaaattcatggccattccgcattacacatacatgatactgaagatgccaggaccacaagggatcataactgtgcgcgccgacttccaaggcgccgcagagtgtttccgagtggccatccaagcagccctcaccaccaagccatcgacggttccttctacactggcgaactctaagcctgaggaagactcacggtaccggcaaacgaactcagccgcgacctctatgcggccgactgaagaaactaagaggatcaacctggg

SEQ ID NO: 181844 - DNA, 442 bp, Arabidopsis thaliana landsberg
  unsure (1)..(442): unsure at all n locations
atgattagtggcacgtcaacaggaaacaccaatgtgaccatcctctatcattgcaaggtgtctctaaattatcatgtccagacgactttgcctggtagttttatctgttcttaatttatctgaatctgcatcaggccttcgtatgttcctttggaatcactcacccatcttactctaggattctattgccgcgacaaagattgatnactacattctctgaaaccaaaagttttaaattctgtaacttgaaaaaacctttccctaatcttcaacagatgatttcgacgatttctgtctccgagcattgaaactagctgaggaatcaaacggtgctccattgttcacagtgactcaaacccacacagcgataaaccaaagcaactacgggtttgcggatgacgacagcgaggatgaacgtgaagatgactggcaaatgctctga

SEQ ID NO: 181845 - DNA, 101 bp, Arabidopsis thaliana landsberg
aaacatgtcgtcgttccgatccccgttcaagaatcattcgcagttcctccaaagttgatataggaatagttgtcacattctctacaaagaccattccttga

SEQ ID NO: 181846 - DNA, 92 bp, Arabidopsis thaliana landsberg
gtatatctcgaccagtaaacccatatgcgttttggagtaatcgtattccggtcattcttaatccaacagacggtttggagtatttggactaa

SEQ ID NO: 181847 - DNA, 64 bp, Arabidopsis thaliana landsberg
atgccccggatgagctggccgtcgtggaggatggacacgcacaaccacgagagcggctggcgag

SEQ ID NO: 181848 - DNA, 132 bp, Arabidopsis thaliana landsberg
gaggaggaggaggatggtgatgaatgggcggcggatgtggttgagcagctgatgatactgcggcgggaggaggtggcgcacctgccggcggccactgctggtggtatgggtggattccggcgccggccatga

SEQ ID NO: 181849 - DNA, 236 bp, Arabidopsis thaliana landsberg
gtgccgttctgccctggctggtcggacatcgacctcgccacacacgtcgacggcgtatttcgttgggtaaccgaggtgggtgccaatcggcgactcgagcccccggtcggtgacaagcgacgggcgctgatcgcggatccggaccccacggacacgtcgggagtcatcaaacgactgcgcagcgcaagcgacggcgtcaccggcgcattggcggactcggatcccaacctcaactg

SEQ ID NO: 181850 - DNA, 310 bp, Arabidopsis thaliana landsberg
gcttgaaaccctcaatgaaagccggtctggagttgtgcaaatggtgaaattagcggagaaagaaagagacaacttagaggtttgttgacgtttttccttcttgtatgtgacccggttttgttgtatatgttgctaatgtgcttttgcaacagggtgtgaaggatgaggcagagactaacatgctgatagagttatcacatcttaaatggcaagaaaaggcttcaaaaatggcgtatgaagattctgtagccctaatcactgatcagagagacagcatgcagaaattggaaaatagtttaaaagatgagcg

SEQ ID NO: 181851 - DNA, 194 bp, Arabidopsis thaliana landsberg
agcaagagggcaaatcagttgcaaaacacactctcctgaactgttctacgccggccaccaaagctccactcaacacaattcacgatcttaaagaggcaccttcatcgttaccagattatggtgccaacatgggaatgaaggctttattctcttcttactcagaattgagcaaccaatggtctacaagattatga

SEQ ID NO: 181852 - DNA, 2054 bp, Arabidopsis thaliana landsberg
actacggaattgctccgtactgccatcttcaatatcagttacatcagaggcctctttcccgtgcggtatttcaaggatatgtcggttcctgctttaggtgagacactaaccatggaagtttctacaactgtttaatgggaacctgacgcttttgaatcacaatatagatctgaagatgaagaagctaatgcctatggacgctgaatcacgccgattgattggctggatggagaaaggggtctacgatgccctgcataagaaacacctgaaaaagctgatattctacatatgtgaaacagtagatggtcccttgattgaggaatacatatctaagttcttgggagatgattggttagttcaatactagtgtagttcgctggtaaaatggtctgattaattgatactctcactatgttactgcagtttctttcagctattcagattctgacagtcaagatgtccggatgaatatcaatattactacaatcaatacctatgggggaactcttaactccactgctgacaactccattgctgacatgaccctaaatcaaatgaggtgaaattttttatcctattgtgaggtctaagatgtttatcttgcatacctgcttaaaatttttcatgagtgtagtgcaacacgagttcagcttgcaagatggttcataccctagttcagttgatgaagactttggacagaatgcccgaagaagtaatgcatttgttacctatcagagggtttcagtttacatcagtttccatattgccaattacagactttgttacttttttgcttctgtccagcgcaccattttgatgaagcttctttactacgaatatgtggtatgctttgctttcttttcgaataatcttatctcactttcctctactctgaaaattgattgcccataagaaaggctgacagctcttatttgaacctttttgcagccaccagattaccagccacctttcttcagaggctgttcagaagaagaagaagctcagtatgtatggccaaagattcctctgagaatggaaattggtaatgttaacagccaacatcacgtgttaactgtaaaggtaatctgattggaagaataggctgctactctttatacagacatgtttctctcgtctttatgatgtccatccattgtggatgatctatgcaggtcaagagcgtgcttgatccttatgatccttgtgaggatgaaaatgataacatgcaagatgatgagaggagtaaaggacctgattctctccatgatgaccagccttgtaaggttttcactaagccgagtaaactcatcttaacagagaacaaagacgctgaccatggagaggttaatgaaggtaaattattagacaaatattaaagcaaaattcgattcattgaatacagaaaagcttcttctaattacacctatctgtgaaatacttcaagatgtcaaacaggatcaggttgaacatcagctagcaaaggtgaaggatacaaaaggaagacctgcctcaattgtaagtgaacaaacagacaaaccataatttttctatttggttatatgctgaaacaaaactaaacatttttcttgtcattggttcaggtgcaaaatcctattctgcagtctcatgaatatgacattcgaaggcttaaagcccgtttacaaagactcgagcgtcatatatctgttccggattctcctcaggagggaatccggaagtggtttgctgctgtttcctcgcaactattctacaaagttatggaagcttgtacacgaagaaaaccaattttgggtgatgcaatactgtcgtcaaccgttaaagtgcaaaatttcaatgcaaaaatttgtagtaaattgttgaagaagcctgcatcgatataagaaagaaacacttcacactgaacagtgcttccttaagaatttcaggcttggcaggaagcatatttgcgtgggctgttggtttctgtctcttttctgctcagattggacatgtcttcgttcagcctaagaccagaagttctgagtcaaagccaaaagtcaccatggaagaactag

SEQ ID NO: 181853 - DNA, 124 bp, Arabidopsis thaliana landsberg
gaataatatgcgcatgcacatgcggcacgctctgccccgactcagagccatcctgaatcgcaatattcagactatacgccccgtacacgcgctgaatcattctgccgacatgccggaccgttaa

SEQ ID NO: 181854 - DNA, 481 bp, Arabidopsis thaliana landsberg
attcaatttccaacttccatcaaggcaacaataagattgttgtcaggatcatccatatatgggaagttcgagactttagaagaaataataccttactaactcttgaatgtcttctactcgacgaaaatgtaagttattcttaaccgatgttaatcttcatcctacttttacatagatttccccacattaatttctagtatgtttcaggattgtgctatagaagcttccatccaccccactcggctgcctaagtttaaagatcaattggttctcggcaatttgtacaacatcaacaattttgatgtcgttatatcctccaaacgctatcgtcgaaccaaccacgagtggaaaattgttttcactgacaaaacgtttttggagagtgttaaagaacgacactactgtattagttatgaattttttagattgtcttcttttacaaagttgcttgatttggcagacaagggcgacgagcttccag

SEQ ID NO: 181855 - DNA, 181 bp, Arabidopsis thaliana landsberg
atggctccgccgattaagtatattgttccttcagaagagacatcaccgacggcggcgacaactacggaggaagaagatctcttgtttttgggaagaatcacattgtttggtgatggtgatccccacgaagaagaatgtttcaggaagttggttgatgacacgaacgtcgtctgcaatgccg

SEQ ID NO: 181856 - DNA, 86 bp, Arabidopsis thaliana landsberg
aaccaaactttgaaactgggtccgatgtgaaatcgaagaagaaactcgagaaattgatgaaagtctcagacttttttgtggattaa

SEQ ID NO: 181857 - DNA, 292 bp, Arabidopsis thaliana landsberg
atgtcgcccgaagaaattcttggaaaatttgtaagcgggcggatgatgatcaaggaggcaaggtacgtcgatgacgcgttgaacggtccaatccacgagcctcaacccattgctctcaaggcatcgaggagcaaggaggcactaccaagcaaggtggcgcaaattaaggtggccgggcttaatgacgaagaaatggctctcatcattaagcgcttcaagacggtgctaaagggtcgcaatggacagccgagcaagactaagaccaaggggaagcgatcatgcttcaaatgcg

SEQ ID NO: 181858 - DNA, 1314 bp, Arabidopsis thaliana landsberg
atgactcaagaaaaccaaaaatatatcaagtcagagttactgccttgtctgggagcagcggacaggaatatacggactacagttggaactatcatcagtgttattgttaatattgagggagtttctggatggcaagagcttttgccagctcttgttacttgtttagacagtaatgaccttaatcacatggatggtgctatggatgcattgtcaaaggtatgtagcagctatgtgttctcttttctgtttcttgctcttttcgttgaacctttgatttatgaaccataagcttgtgtaatccaaagttgtgattgttggttttgatgatatatttggagtttttttcaaagtttttctaatatctacatgtcgtattcttatcaatcagatttgtgaggatattccgcatgtcttggatacagaagtgcctggcttagcagaacgccctatcaacattttcctgcctaggctattacaggtaaacatctcttattcctacacagattttggaactcggttgtagcacttgtttaggttctagtttgatttcttttcgtcctgttggattggttgcgttaagattgattacctctctttttttgagcagttttttcagtcaccccatgcttcactgaggaagcttgccctgggttctgtgaaccagtatatcattataatgcctgctgtaagtattgcgaagactacttgtaaagcttcgtttttgttttatatgttattaaggaccgtaaatggtaacaatctgagtttggcaggctttgtacaattcattggataagtaccttcaggggttgtttgtcctagccaatgatcctgtaccagaagtcagaaaattggtatgcctcttatttaagcttctgtcaattgtttcttatttttgtcagtacaggagagagtgatttcgtgttgaagaattttttctttagatgacatatgattcaatcagattcctatctcatatcggatgttcttatgcttctgtaataatgtcttttcttcttttgttaaaaggtctgcgcagcatttgtgcatctcacggaagtactcccctcatctatagaggtatttttctttgtggttttagtatacacattgtttcaaatctattccaaagtttccctttttttttgaggtacttcatatgtgtagtttgagcatttcttctaccttgcatctctgatttgtcttcttcccttattttctatttcagccgcatctcaggaatgtcatggaatacatgttacaagttaatagagaccctgacgaagaagtgtccctcgaagcatgtgaattttg

SEQ ID NO: 181859 - DNA, 524 bp, Arabidopsis thaliana landsberg
atgagcctgctacgaggaaataaactaaaaaaggtcaaatactaactacttttcttgtttatcttgaaacttttcgtatatatacgatttattttattttatctgattttgaataacaattagatatatcggtggctttttgtttaggataataaacactcttaaatcttaggaactggagtaatagatttacgtatatgagctaaaataaaacccagtaagcgctcttggtgatttggtgttagcctatggctagtggccttttttttgctaagagacacagcatcaatgagaatgatcatagttataataaagtacttgatgatgtatatgtcgctatcaatgagaatgaccagaggtttgatgatgattatattgctatcaatgagaatgaccagaggttagctttggctgatatcctaagaatgaggatactttgtgaagacagttatgcaaatgagaagccatttgcaacaactcaaattttgactgttacgataacacgtacatccgtacgactataa

SEQ ID NO: 181860 - DNA, 778 bp, Arabidopsis thaliana landsberg
atgaggacagatttggagtcactccctgatgctccggaacaagaggatttcgagagctttcctgtggatggctttggagaggcgttactggctgggtatgggtggaaaccaggccaggggattggtcttaaagctaaagaggatgttaagattgttgaatacgagaagtggtctggtaatgaaggatttggctttggtaaatcggacaaagccatgaagatgatagataataaacttgttggttctggaagccatgaggaagtgaaagttggtatcaacaagattgaaaatatggagaaagatagagttgtgagaaaacgtaatagagaaacagagggagagagtcgcactgaagttaaagcctgtaagcagaactatagaggtcaaactagagagacgagagagaagacctcatggcttaggagtcatataaaggtgagaataataagcaaggatgttaaaggtgggagattgtatcttaagaaagcagtggtgactgatgtggttgggccaacaagttgtgatattgctatggatgagacgcaggagttggttcaagggattgatcaggagttgcttgagactgcattgcccaggcgaggagggtctgtgttggttctgtctggtagacataagggtgtgtatgggagactacctcacgaaagatttggataaggaaactggtgtggtttgcgatgcagatagccaggagatgcttcatgttaaacttgaccaagtcgccaagtacattggtgatcctgctgatattgggtactga

SEQ ID NO: 181861 - DNA, 397 bp, Arabidopsis thaliana landsberg
  unsure (1)..(397): unsure at all n locations
atgggcgcggtcggcctcggcgccggcccggccctcgccgccggcgngacctggaccatcaacgagcccaacggcacggcgttcgccggcagcaacaagacgtcggcgaccctggacgcgggcggcatcaacctcgcctgcaagcccgggacggcgctcgcgtcgggaacggtctccggaaacgggaagtccggcgtcccggcttcgctcgccaatgtcacgagtgccacgttcggagccacgtcgaacccctgcagcttcctcggattcgatgtgacggcgacgctgaacaagcccgtccacctcgtcgccagccaggcgaccaccacggcgggcgtgaccaagggttacctgggcggtgccgctggcgacatcagcgccgccgttaccggagtgg

SEQ ID NO: 181862 - DNA, 189 bp, Arabidopsis thaliana landsberg
atatatgccattggtttcaacttgaatgataagccaattacaagtgaatcctctatttatattattgtatttcgaaagtactcactcataacgaaatcacgaacaactaaaagggaacaatttgtggacaaagaacaagagggaacacaatttgaagaagaaaataaagagatgatgctattttactag

SEQ ID NO: 181863 - DNA, 363 bp, Arabidopsis thaliana landsberg
gaactcgatcctcctccatggcttaacagaatgcgagagattggatatccaccaggatattttggtaagctttcatactctctcttgttatcatatcaaaggcatctttgttcatgactacgttgactcttcttttttgtttgtatcacttagctgtagaagaagacgatgatgatcactcgagaataactatatttggtgaggaagagactaaagaagaggaagaagttaacactgaagaaggtgaaatcttggaaaaagcaagccctcaagagccaagaaagataatgacagttggatttccccgtattaacgcacccattccagaaaacgcagattcgtggctatgggaacagaggaata

SEQ ID NO: 181864 - DNA, 74 bp, Arabidopsis thaliana landsberg
gaaattttatcaaaagatatataaacaacaatcaacgagaattaaggaaggagtatattatctacgatattaag

SEQ ID NO: 181865 - DNA, 6 bp, Arabidopsis thaliana landsberg
atgcac

SEQ ID NO: 181866 - DNA, 88 bp, Arabidopsis thaliana landsberg
atgggcttcaccaactttagcccagggccggccctgcatgctacacatagtttaaataaaagagtcgtagaagttcttggatacaagt

SEQ ID NO: 181867 - DNA, 720 bp, Arabidopsis thaliana landsberg
atggctgatgcatacgagccttatcatgttcttcaacaaagccggcgagacaaacttcgtattccatctctcgattcccacttccactttcaccctcctcctcctccttcctccggcggcggaggtggcgtctttcctctcgctgattccgatttcctcgcagccggtggctttcactccaacaacaacaacaaccacatatctaaccctagctacagtaatttcatgggatttctcggtggcccttcttcttcttcatccaccgcagtcgccgtcgccggagatcattcctttaacgccggactttcttccggagacgttcttgtcttcaaacccgagcctctatctctatctttgtcctctcaccctagactcgcttacgatctagtcgttcccggtgttgttaactccggattctgtagatctgccggtgaagccaacgccgccgccgtcaccatcgcgtctagaagctctggtcctctcggacctttcacgggctacgcgtcgattcttaaaggatcaaggttcttgaaaccagcacagatgcttcttgatgagttttgtaatgtgggtcgtgggatttacaccgacaaagtcatcgacgacgatgattcttctctgctttttgatccgacggttgagaatctctgcggtgtttctgatggcggcggaggagataatggaaagaaaaaatcaaaactcatctccatgctcgacgag

SEQ ID NO: 181868 - DNA, 1528 bp, Arabidopsis thaliana landsberg
atctctctccgttgaatttacaaggattgagtttccgaggctcaaaagcctgattgatgatgagatatactactactacaacagcgaagcgcacacgtcgggatctcaacccgggtctacccgtattcgacctagattagttgccttattcttaggcccatcatacggcccactagaatgatccaccagaaccaaaatcatatcctgtttggcttatattggagagattgaaacagaaacttctttgcatttttacgagtaagatggatagacaataataaccttcttgcttgcgctcgtttagcagatttaagacaagggtatattagtaaaatgaaccgagagtacctggctcgtcttacacttgttgccacattacacagacaccatttccaagtatcctcagatctttctcgatttccgttgcttgtttctcctgaaggctcgttgaaatccgtaagtcttcgatcgttaatcgtgttcttgacctatctgttaatttcaacatgccaagtttttctctctacaattttcattttcttcgaattttggttcttctgggagctctctcgtcgttgctttaacttgaaattcgaactctatatatgtttccgcgtatcttacttgctccattgttttcttcatcgtttggtttggatggtattacgctgacttgtgggatatgatacgatttctcgatttatttgggttaaatgtatgttatggaactgcttatgatttggagtatttctgtttttagttactcgtcagcctagtttcacaatgtttgatatcaatttctccattgcagttgaaagtaagaggatggagagtggtgggcagtatgaaaatgggcgctacaagcccgattactacaaaggaacacaatctgtggtaagaaaaaacacttgaagaagcagatcactaaaaaaaaaaacatgttttcgttactttgaatgaaacctaagtacaaactgtgtgtgtgtgcagtagaatgtgatgccgaaaaaggagcaacataatgcattggtgatgaataagaagatcatctccatccttgctgagagggacgcagctgtcaaggaaagaaacgaagcggttgcagcaactaaggaagcattagcctctcgtgatgaagcacttgagcagcgggacaaagctctctctgaaagagataatgctatcatggagacagaaagtgcgttaaatgctcttcgataccgtgaaaacaatcttaactacattttgtcgtgtgccaagcgcggtggttcccaaaggtttataactgaagaaagccacttacctaatccttcccctatatcaactattccacctgaagcagccaacacgagaccgaccaaaaggaagaaagagagcaagcagggaaagaaaatgggcgaggatctgaaccgtccagttgcttctcccggaaagaaaagcagaaaggattgggacagtaacgatgtcctagtcacgttcgatgagacgacaatgccagtgcccatgtgcacttgcaccgggactgctc

SEQ ID NO: 181869 - DNA, 305 bp, Arabidopsis thaliana landsberg
atgaaggtgtgcatggtatgaaaggcgcggtctgggagaaggatgaaccagttccgaagctacgaatgaggaagcttcggtttagcacaagggcagcgatggagaatggaacctacctaaaggggaatatattgcccagtcctcgacagattactccttagtcagtagtgtcaaggacatggatgtaattttaccagactgtgtcctgtgcctataaatagatgaacagtaacaccgtactattctcgctgactcgtactcacttgtacatcaaacctggatttttaccttatgccaagccgaag

SEQ ID NO: 181870 - DNA, 243 bp, Arabidopsis thaliana landsberg
ggtttctctctcactcactcactgattcgtctctttcgcggctctctttctctcctctcgtgttgagaatggatgtggccattagtgatgatgtaccggtgaatctcgaatcggttgaagaaaagagagatgaagaaactgtggaagaatcgccggtgaagaagaaaaagccacgttttgacgaggagatgaatagagtggcggagattgttctggttctatcggcgttagggaggatgcgtg

SEQ ID NO: 181871 - DNA, 256 bp, Arabidopsis thaliana landsberg
atggagctgctagggttgagggagcaccatgcccggacgctcctcatccactaccgctgggacgtggagaggattttcgagcttcttgatcagaaggacagggataggctcttctcggaggctggtattcctcttcagtacaccaggaatgccggcccaacctcctcggcggaggtgacctgcaatgtttgttatgatgatgtgccaccctcggctgcctccgagatggattgtggccatagctactgcaatgatt

SEQ ID NO: 181872 - DNA, 2064 bp, Arabidopsis thaliana landsberg
attaatagtaatccagttgctgctgaggcaaccattttgtcgcttcaccaatccccacagccgtataaggcgtgtagatatattcttggtaagtctttctgatgaatccagaaccggccaagtggacttgggaagtttcatctgtttgactgaaagtgttttctacttccagaaaattctcaggtggcaaatgctaggtttcaagctgctgcagctattcgagaatcagctatcagggaatggagctttcttgccaccgatgataaagggggcttgattaggtatttttttcttcttttatgttatttaggtgatatatccttaagcttccagttagttgagcgatcaccctctcctctatcaggaagcaacccttggtgttaagtttgtaatttttgattggctttgcaaatcaactgagagcattcatgcttcacaatatagtagttttagaatactgctgctttcctggtcacattattttccgagataatcatgactatataagaaattataggtttctattatgaagttttggattatataaataaaaataattaagtaatatggcgaaatctttctgcagcttctgccttggctatgtcatgcagcatgctaattcatccgagggatatgtgctttcaaaagtatcttctgtggctgcacagctgatgaaaagaggctggtaagctgcggtgggcttcttctgcttctggtatctaaattcttaaaacatgcacattagatgttggacgttagctttcacttctgatgctatgcgtatgagaggattcatgaaatgatgttgtcgttcacagacaattatgaccggtagcttctggaaaaatagagtagcactaagaaatcttgactaattagttagctacttctgttttcttgcttgctttgttcatctaagggaacctctaatctgaataaattattcttacaggcttgagtttactccagcccagaaggaagtctttttctatcaggtatctacattattttgtaattttttcgtactttcaattttagtttctgtatcctatagtttgagtagcattaggtgcatatatgttgttatctgatactggccatatgttatttctaagaaatttacctggtactattttaactgtaccttaaatatatggacaagaaaggatttagagtgattgagtgtattaactagtaatcatttgagtagtaacaggtccttacaatatgtgcctccattatttcagctagatatgtattgatatgctccatgccttaataaaaagaaatgggggtttacgagtcatggcttcatagaaatgaaaattgtggtactggtagtgctgcttattattttgaaaaatataatcgagtcgtccaatattaatgttaaaattaaaaggatcatggttgatcttcttatgtcccttaccaactgctgtttacagatcaaccaggctattcttggttctcatggcttagatgtgcagttcattggtgtaaattttcttgaatcattggtaatggtctctttctattgtttctggtattatatatatagatataccatatggttgctcataatttcttcatctcaggtatctgaattctcaccctctacttcaagtgccatgggtctccctagggaatttcatgaaaattgccgcaagtcactagagcaaaactttttgaaggtgactgtaggattgcatttgcttccagttattaacccatcttcctttcgtctgtgaaagaataatagcctatgtgtagggttctgttactaaaatagattgtgttgtttactttctatgttttcaattgcagactttctatcagtgggcacaaaatgctgctttgagtgttacaagcaagattattgaatctcattctagtgtccctgaggttaaggtttgcaatgctacactgcgattaatgcatcaaatactaaattgggagtttccttacagcaaaggtggcacaagagccagcattaatgtattctctgacggaattagacctgataatgcattatcaagaaagacagaatgtgtaatagttcag

SEQ ID NO: 181873 - DNA, 480 bp, Arabidopsis thaliana landsberg
aagccaatgatggagtcaatgcttctcaaatgcataatggaacatcagacgccatgggatatttcttaggagaggttggtgtactttaaaatgtcatcattttatggtcgcaagagcttgattaatctcttgagttgcctatctttttccgcacaggtcatgtttccatatcaagctgattcagattttgagctcagcttatcagttggagactatgttgttatcagagaggttagcattcaaatcaaagcatataagataccattctttcgcggctcaggacatcgaataacggaaagaatcttaaaactcttttttttttaatctctgtggactcattcacatgtctttatgatgttccaggtagtgagtagcgtgtgggcagaaggagaatgtaaaggcaacgcgggttggtttacttacatctacatcgaaagaagggatcgtgtcttcgcaactaaggtcatcgaggtcttctag

SEQ ID NO: 181874 - DNA, 129 bp, Arabidopsis thaliana landsberg
atgaagataatggaaggtgtaaaggaaataacaaagaaaggagcaaagtttatggatggtcaagaaaaggactttgactctatcatatttgccactggttacaaaagcaacgtgcctacttggcttcag

SEQ ID NO: 181875 - DNA, 5042 bp, Arabidopsis thaliana landsberg
atgcagaagttagggtttccggcgatgaagagctttgatcaactccgatcgttgcctggatcggcgaagacgtacttcttctccactcgtccgcctcaggattccgtctcctccggaagtttctcgaatttgaaactcacagcaggtttttctcttgttttatttcaccgcctctctcaaatcgtactgttatgatgataccgacaatttcacgtttgttgaacagagaaactggtgaaggatcaggctgcgatgagaacagatctcgaactggcggtaatttggaagctatcctgttttctttatacattgtttgtgtttaggaacttaaattcgatggatgtgcatgtgaggtatattgctaggtttatgtttatgaatatagcttggattatctgcgtatattgctaggtttatattggaactataatttgtgattgggaggttcaagctcttggtttgttcgtctgaggtaatggcatagacatatttgaaaggaaatttgcttttccaatggtgtagaattgtaagctgaaaaagtcaatggagcatgtctatgccttagaggagaaactgcagagcgcttttaatgagaatgctaagctcagagttaggcaaaaggaagatgagaagctgtggagaggactggaatctaagttctcttcaacgaagactctgtgtgatcaacttactgagactctgcagcatttggcttctcaagttcaggatggtaagagtaaatgatcatacagccatctgatttttgtgaattatcttatatacgctgtgttgctttatctgtttcctaacttgcatctgcagctgagaaggataaaggtttttttgagaccaaattcaatactagttcagaagcaataaactctttaaaccagcaaatgcgagacatgtctttaagattagatgctgctaaagaagaaatcacaagcagtaagttgttgcattattctatgttttgacctgtaacgcaattggtatccaagtttgtaacatctttgagttaaaaatgcaggagataaggaattggaggagctcaaactcgagaaacaacacaaggaaatgttctatcaaactgaacggtgcggaactgccagtctcattgagaagaaaagtacatttctccttcgttttaaatttacaatgccattggtcacatgcagtaaaaaaatgatggttgaattagtcttgttctagactatgatttgaagagcttgaaaatgtggccacgcagtagatgggaaaaagcaatgtttctgaaagactttcatgatataaaacaattgtatcttcttactgagtgcttcttctgtggcagatgctgtgataacagagttggaaacaaccgcagctgaaagaaaactcaaaattgaaaaattgaattcccaactggaaaagctacatcttgagttaacaacaaaagaagacgaggtcatacaccttgttagtatccaggagaagttggagaaagaaaagacgaatgttcagttgagttcagatgaactgtttgaaaaacttgtccgctcagagcaggaggttaagaagctagatgaattagtccactatttgatagctgagctgactgaattagacaaaaagaatctgaccttcaaggaaaagtttgataaactaagtggcctatatgatacccactttatgttgttgcgaaaagacagagatcttgcatcagatcgtgctcagagatcgtttgatcaactccagggcgagttatttagagtagctgccgaaaaagaagctctggaatcttcaggcaatgagctaagtgaaaaaatagttgagctccagaatgataaggaatctttaatatctcaactttctggggtacgctgctctgcaagccagaccattgataaattggagtttgaagcaaaaggactggttttaaagaatgctgaaacagaatcagtgatttcgaagttgaaagaggaaatagatactttattggaaagtgtaaggacatcagaggataagaaggtataaaataattttatatccctatgcactgtatctaatgcattcttgtaatactatatttttcttgtatatattgcagaaagaattgtcaataaagctttcatcattagagattgaaagcaaagataagtacgagaaactgcaggcagatgcacaaagacaagttggggaactagagactttgcagaaagagagtgagagccatcagctgcaggcagatttattggcgaaagaggtgaaccagctccaaaccattaaagaggagaaagggcatctaatcctccagtgcaatgaaaacgagaagcagttcaaccagcaaatcattaaggtctaaaaaatgacttctaagtcatggctttaaggttttaaaatcgacatttttagtactcatcaaatatgaatcccactgcaggacaaggagctactggcaactgctgaaactaagcttgcagaagcaaagaagcaatatgacctgatgctagaaagtaaacagttggaattgtcaaggcacttaaaagaattatcacagaggaacgaccaggtatatctgtagcgatgtttccatatatttagtagaataagaatcgtgaggcccttagctgaatctgaatgcaatatgcaaagacactaaagcaattaatttatctctctatgttgtttttaggcaattaatgagatcaggaggaagtatgatgtagagaagcatgagattattaattctgaaaaagacaaggtataatgactacagtatctttcgttttagtcttctgaacaattgatgatgtttattgtggttctaactccaggttgaaaaaattatcaaagagctgtccactaaatatgataaaggactctcagattgcaaagaagaatcaaagaggcaactgctaaccattcaagaggaacattcttctcgggtatatctttgaaattaccttttatttaacagatcatactgtttttccacatattggtaaatcatttaacgagatttctcgaaaaggttctttacgaatctctgagctaaactaccacatcttatcctgttactgatttcatgcattgtccagtccgatactatcaatgagtgttattagattccaaagaaacctgatggttctgaccatcctcaagcatgaaggttcacagcttagaatgaatcaatcaaactgggttgagttgttagatttaataacagaaaatgaagatatctgaaatcaagttcctgttttcttgtatgcattatctggttggaagtttatttctgacacatgtcaagcaaagttcgaattactttgcatattaactcagaaaagctgcgtgttccccagattctcaatattcgggaggagcacgagagtaaggagctcaatctcaaagccaagtatgaccaggaactgagacaaaatcagattcaggctgaaaatgaactgaaagaggtacacacagatataaattcatagctcaaacagatgaaagaataaggagcctctggtattcgaatattttgtatatttatccagaggataacagctctgaagagtgagcatgatgctcagttgaaagcattcaagtgtcagtatgaagatgactgcaagaagctgcaagaagaattagatcttcaaaggaaaaaagtaagtgctttttaagatccattataagatgaatctttatgagtttaacttatgggctaaccttgcaggaagagaggcaaagagctttggtgcagttacagtggaaggtgatgagtgacaatccacctgaggagcaagaagtaaactcaaacaaggttagagtggacttcattttcttccttatctatccactttaaaatatgtttcttaaaataacagaaacagggtaataactggaaaagttgtatccgtaactagatatcgttagcattgcaatgtatggttgacagaatgtttactgttttgtagaactattcaatttcgaaagattctcgccttggtggtagcaaaagaagcgagcatataagagtgaggtctgacaatgataacgtacaggtaaactgtagagaaacaaatatatagttttgttcgttactgctttgtcaaggccacatatataaacacttcctcatggatcaaatgcaggactctccttttgtaaaggcaaaagaaacacctgtgtccaaaatattgaagaaagctcaaaatgtaaacgcaggaagcgtactgagcattccaaatccaaagcatcatagcaaggtaaatatttgaaccttttacatctttacacttttacatcaaaatcaccctcatcgtttggtttgttgtttaacttggcaggtgacacatcgtgagtatgaagttgaaacgaataatgggagggtaaccaatccagaaaaagaaggaaattcaagcatgtatgaggtaccttgtccatcgaaacaagaaatatctggaacatattctagaaagctagcttgccactctttttcaacaggagccacaaagacgcaggactagggctacacctaaattgaccccccaaagtatcgccaaggtaaaatacacagtcactacttttgctgatgcttgaaatgtattaaacccctatcaagtaaacttagtgctgaagcagagagtaaaagagtaaatttgatgatataggaaaaacatcatactttcagaaaaggcacaatagttttttttctgtaacttgatttattctaccttatcttccttggtaataaaatagataatctgacaggtgagaataataggagctaagacttagagctgcttagccaactgttaggtctatccaagtataaatacagtgatccttgtgctatggaaagtccggcacttagaaatgtagaaatttgttttaagtcaagaagttatggatgctgctgctaggttctaaaacgtgttctgagttaattgcatattatgcagggcacaggaatgacgagtcatgctcgctctgcaaatattggagacttgttttcagaaggttctctcaacccatatgctgatgatccctatgcatttgattga

SEQ ID NO: 181876 - DNA, 420 bp, Arabidopsis thaliana landsberg
gtggaagctttatgttctgtttaagcgaacaaccactggtcttcgtcttgcgctcgatcggtttgttgttgttgttgttgctgttgtcaagagagatgcttcttccaagtggtctgctagaaggagtttccttgcgagagaagctactactgcatggtaagtccaatctctgtgtgttcatgggaaaatgcgctgatactgttgctgatgttgctgctactgcttcactcctcaatcttcgagtaggcgacaacaatgatgaactcgaagcaacctgccaacatcctcgacaagatctacctaacccaattcaagagatggtctacaagtgtgtgtgtgtttgctcaaacaattaaaaaaatggaatccgatgaatcttttttttttggttttagtgaaatcaaagtgaatcctatatga

SEQ ID NO: 181877 - DNA, 141 bp, Arabidopsis thaliana landsberg
gattagggcacccaggggcgctcggctctcacggccagcggcgccgcactaccacggtgtcccgcgccatcggccgcgctcggcttggagaagacgggctccatgaccgtcggatccttgggaaccggatgacattagatc

SEQ ID NO: 181878 - DNA, 878 bp, Arabidopsis thaliana landsberg
caacaatttttcggggtttctacctgaagatcttggcaacgcaactacacttgaggttttggactttcgaggaggttacttcgagggctcagtgccttcttctttcaagaatctcaagaatctgaagtttctcggtctttcgggtaacaactttggtggaaaggtaccgaaggtgattggtgagctctcttccttggagaccattattcttggttacaatggcttcatgggtgagattccagaagagtttgggaaattgacgcgccttcagtaccttgatttggctgttggaaaccttacaggccagattccatcttctttggggcagctgaaacaacttacaacagtttatctctaccagaaccgtctcacagggaaacttcctcgagaacttggtggtatgacttctcttgtgtttcttgatctgtctgataaccagatcacaggagaaatacctatggaagtaggtgagttgaagaatctgcagcttctaaatttgatgaggaatcaactcacgggaatcattccgtcaaaaattgctgaattaccaaaccttgaggttcttgagctgtggcagaactctctcatgggttcattaccggtgcatctcggcaaaaattccccattgaagtggttagacgtctcatcaaacaagctttcaggagatataccatcaggattgtgctattccagaaacctcacaaagctcattctcttcaacaactcattctcaggtcagattccggaggaaatcttctcatgtccgactttagttcgtgttcgaatccagaaaaatcacatttccggatctataccagctggttcaggtgacttaccaatgcttcagcatctagagctcgcaaaaaacaacctcaccg

SEQ ID NO: 181879 - DNA, 378 bp, Arabidopsis thaliana landsberg
atgaatctccgtcaaatctacgaagtttgtcaatggatgaaaacaaaagccggtattgaagccgttgtggaagtgcaacgcagcgagaagctaaagaggcgagcgacatcaaaaggtaggacggctgctgaatcggctatgataagagcgtttaacgctcaattttctgagtatagctctgaactaaagatagctcgtgcggtcatgaagaaagaaagtgatactggtgttcgtctccgagacaagtactggccagtttctgcattcggtgtagccatcaatgttttgcatgaagaggcagttcttgatttttgtaggaaagagggagtgaaatgcggtttatacaagtatgttgaaggattgattgaacgcaagacg

SEQ ID NO: 181880 - DNA, 219 bp, Arabidopsis thaliana landsberg
atgatcgaagttatgtgtaacgagattttagggaactatacgaaaaaagaagatcagttgatgactgcagccttcggctcccgaccgaagcgaagattgaatcgagtaatggatgctctacattttgaatatcctgattatgagcgattgaccaagggcgccgaagggcagaaaagaaaaagagttgtcagtgttgtgggcagatacctcgccagaatg

SEQ ID NO: 181881 - DNA, 193 bp, Arabidopsis thaliana landsberg
atggaatgtaaggatgtgagtcacaatgtgctgactccatgagggtgacaatgaaatgtgatgtctacagctttggaggtgtgcagctgtagctaagaacagcaaacgcccccagttcaatcgcgtggagcaaaaaggaaaaatagtcagcttggacaagcgccggggccgtgacatgttgacatcccattga

SEQ ID NO: 181882 - DNA, 1707 bp, Arabidopsis thaliana landsberg
atgaaggtgaatgcgaaagttcagggcttagggtttgttaaggtgaatatggatggagttggtataggcagaaaagtggatatgagagctcattcgtcttacgaaaacttggctcagacgcttgaggaaatgttctttggaatgacaggtctgtactgttttcaaatgcgtacactataaacccgatgttttctatgaatctactgatagtttctgttttatctatcaggtactacttgtcgagaaaaggttaaacctttaaggcttttagatggatcatcagactttgtactcacttatgaagataaggaaggggattggatgcttgttggagatgttccatggaggtaagattcggatattaagcagtattgcagtagttcaaaacctgattagtctcttttctctctttttgtttagaatgtttatcaactcggtgaaaaggcttcggatcatgggaacctcagaagctagtggactaggtaagttttaaagatcatcttctggtttcttgatttctcgtcttgactaatgaaaaagactgattgaatcatttttaatgcagctccaagacgtcaagagcagaaggatagacaaagaaacaaccctgtttagcttcccttccaaagctggcattgtttatgtattgtttgaggtttgcaatttactcgatactttttgaagaaagtattttggagaatatggataaaagcatgcagaagcttatatatgatttgaatccggttttcggatatggttttgcttaggtcattcaattcgtagttttccagtttgtttcttctttggctgtgtaccaattatctatgttctgtgagagaaagctcttgtttatttgttctctcagattgtaaatagttgaagttatctaattaatgtgataagagttatgtttatgattccaaagaatgaatatttgttccttaatatggtttgttgttttctgtctttttgaagtttccattgactcttgtcaaaacgttttgcagaaacagagaagagtgtgtcattaaaaaaaacagagaagatgtttattttttttggtcgaagagaagatgtttctaagaccatcaaaatcatatattgatgattgatgacaagaaaagttttgaccatcaaaagttttgtccttaattgttcttaaattcacacaaaatatgttaagagttatcttttaaaactgcaaactactttaaattgataaactttgaaaagtaaagattttattcttaatctgatagttgaagacaaagaaaataacaaatgtttggattcacgtcaccaaatcaaaatataataaggttatggattgtttaggtaatagttaacttgttacgtagaaaaggagatacagtgcttagcaagtccaaccaaagattaaaggataagtagtaaagtcaaaagaccagtaaattaaagtcttgtagagaaaggaagaaggataaggaagattcatgatccttgataaaattcaagtttggtgaaattctaaagaccacggtttagatttttggggtttgctttggaataagataatggatcatcaatggcgcatgaggttttcgttcaagaacgcaacaattgctctcactgtcatcaacgttctcatcttcctcttcctccttcagggctttttcacttcctcctcttctccatcttcttcttcttcttctcgccgactcatttcag

SEQ ID NO: 181883 - DNA, 303 bp, Arabidopsis thaliana landsberg
atcttgcgcttggaaacccatcgaattcctcgtctagctcatcgggtaaagccgaatctgctttagatagctttatatccatgtgaggaggatgtctcggtctcaaatgatatcgaaaccatacaaaaggagactggtgactcagtgcttagggagaaaaatgacgaacaagaagataaagtgaacgagaattgttgttaccggactcttccatttgcataccgaatcaaaccaaatccaagaatcaataaacgttgtgaagaaactcacaattctttcgaaatgagctctgcctcttcgtaa

SEQ ID NO: 181884 - DNA, 810 bp, Arabidopsis thaliana landsberg
ataatcatggcaaatctagctaagcttgatgttgttgcccttgatgtatctggcaaaaattttatgacatgggcatcagatgttaagatgcatctaagatcaaatgggctttttagcaccatagatgcatctgaaacgacatcagatgagagcaaagctaaagccatggtatttctacaccaccatctgcacgacaatttaaaaaataaatacatcacgagagaagatcctgtggatctattgcaatcacttaaagatcgtttcgatcatcaaaaatatgtgattttgcctaaagccagacatgaatggctaaatctccgggttttggattactaaagtgttggtgattataattccgccatgttcggaatcacctccaggatgatattatgtgctgaaaaagtgagcgattatgatatgattgaaaaaacgctctccacctttcatcctagaaatgtaatctttcaacagcaatatcgggccaaaggatacattcgttattccgagttgatgcacgtcctttgggttgctgaacaaaataatgaactcgtgatgatgaatcatttatctcgcccacctggatcagctccacttttagaagtgaatgttgctacatccagtgatgataattggcgaggacccagaccttgtcgaggtcgtggtcgtgggagagatcgtggtcatggccaaggaaaaggaagaagtttccattccaatgatttcaacacggaaaaaaacaacaaaaataatgttggtcgtgttaagaaaaggcatgttgaaagcacttgccacggatgcggcatgaaatga

SEQ ID NO: 181885 - DNA, 496 bp, Arabidopsis thaliana landsberg
atgaagccggaaactaagagaagcaccgccacaacaagacggcggaccaatgacggtggttctccgttcaatttcagctctctcaagcaagcgatcgaggccatagatgctgcaaaggatacttcaatcaatctatcgtcgttgtctgtggcgttatccgccgcgagtcgtgagatgaagcaaaggaaggagaaatctcaccgtaggcgagaaaccaggaagagggacaagaagaagaagaagaagaaggatagtaacaacaatacgaagctagtgatcggaacaaagccggaaacggatgcagaattgcgaagatggttttcatacttcgacaaatcctttaaactatcattgccgagaaaggtgaaactaacatcgccgagaaagctcaacgatcataataaaaacttgaaggaagcgccgatttgtgagttgaatacagatttctcgatgaatcactgctctgaatcctttagatactaggaacaacgcttag

SEQ ID NO: 181886 - DNA, 149 bp, Arabidopsis thaliana landsberg
ctccttcgagcctacgtagctatcgggctattcggaaaccctccggcaactcggtgatgccggctcgaatcggctacacgtcgtgtattcggcgccatattcgattcggcggtcggtcggaggactcaggggtggaagcaatcaattga

SEQ ID NO: 181887 - DNA, 505 bp, Arabidopsis thaliana landsberg
atgattgtgggattttttggaagagaacgggcttttcgtccttacgcgcgatccatggtaaacatgtttaagatagagtaatttaacaatcaaaatgcctttgcagtttgcacattcttattaccagatatatacatcagtgctatcaatacaagtaaaagtcacattattattggttacttctatgtacatacaagtcctcaaagcacaattaagtgccaaaataacttctgttgtttcagaagaaaaaagattcaccgaaatttgtaaagtgagatataacatgaatagatattaactattcagtaattaacacctaatggtgaagcagcagcagcgagcgaggctctcttcacgaatcttcctttcattcgtggtcttttctctgcattcaatttacgtacctcgtaccttatctccatggggaacaaccttgtcctccttttctctcggtatcttgaaaccctaccctctcttcctccatccccagcatctcctagggtaa

SEQ ID NO: 181888 - DNA, 147 bp, Arabidopsis thaliana landsberg
atgcaggatgttgaccaggtataccattgcgccgccatggtatcattcaacccgcgcaaaagaaaggccatgcacaagatcaatgtggaaggcacggccaacgtagtgaatgcctgtttttctgcgggcatacaaaagctgctccat

SEQ ID NO: 181889 - DNA, 1445 bp, Arabidopsis thaliana landsberg
gatttatcaaaatccagaccatcgtcccatgtttccatgtgcaaaaatagtttgggaaggcatcaaaatcagcctactggttaccgacctgtccgtgttgactggaaagatctcgataagtgcaatgtctgccacatggatgaggtaaaggtttttttttttgtttcacatgagatttcaaacgtttctctttagttagttctgatttatatattttttgtctgcaggagtatgagaacaatttgttcctgcaatgtgataaatgtagaatgatggtatagctcatgctctgggcttttttagctatcatatacctcttagatgtatatctttagtgccttgtgctctttctttctcttgggtatgactcaatttgaattcctggtccactactaggtccatgctaaatgctatggagagctagaaccctgtgatggtgctttgtggttatgcaacttatgtcgtcctggtgctcctgatatgcctccacggtgttgtctttgtcctgtagtaggtaattttaccgtaccatttggtgtatggagtctatatgtgctttcattagtgaataattgaaacttcttttagggggtgctatgaagccgacaactgatggtcgctgggctcatctggcttgtgctatatggatcccaggttcaatcttaacgatttgttgttctgtataagtctgctttcctactaataggaggccgtattacactattactttcctatttacaaattaacacttgttattttattcagaaacatgtttatctgatgtcaagaagatggaacctattgatggggtgaataaagtcagcaaggtacgtacttattttcttgttcggattcctttacctaggtactgtggcctatttcaaaactcttatccctcttcctctttttctctactcttaaaactaggatcgttggaaattaatgtgcaccatctgcggtgtatcttatggagcttgtatccaagtaagatttcgttctatgttaagagaaaactgaatcattcttatgcattgttcaagagctgatatatataatactaaaatgactacattgcattgttcaaacaattcttgtcgcgtggcatatcatccactctgcgcgcgagctgctggtctctgtgtcgaggtaccttagggaataaatcaaaattctttcccacttacacacatgtactggaacacagcaagtccacaaaagagatgtttctaactgattattgctttcctgactctccatgtagcttgagaatgacatgtcagtggagggtgaagaagcagatcagtgtatccgcatgctttcattctgcaagcgacatcgacaaacatcaactgcctgcctaggatcagaagacaggatcaaatccgctactcataaaacttctgagtatctcccaccacctaatccatctggctgtgctcggacag

SEQ ID NO: 181890 - DNA, 1056 bp, Arabidopsis thaliana landsberg
acaaagctaaaggagacagagtaccaattagcaccttggcagtcagatgtaaaccactcaaatgcttcacctttgtcaccatatcagcctgttggtgtgggtttgagatattcagtaagttcgtattccttaatgtcccctcaattttcttaactgacttgaaccaaaaaaccttcttttgtttccattagacagattcagaacaccatcatcaagacaggcgtggtggctcagctgcgagtaattaccatcttgatggtcctgagaggtattaatacaccaaatttgctgttgattcgcggataccaaagataagggattttaaggataatgccgaaagcaatgaatattgtaaattttgggagtaatgggctgagtacagataccgagcattaaataactgtcaagctgttctgtcaattagacattttattaactctttggtactctctgaaccattaattttttcttggtacttttttctcttttctatatatatggccacgaaaaagttaattttgttgcacggtaacattttctgagtcctcgcctggggtttatgaaagctagtggtggatgaatgcttttgattgcaatgttgaaattagtttaatgatcaaatgtgtcttctgtaacagtaggtcgccagccttccagatgcctgtgcaaccagctctcaatcaagatgaatctcatggaccaaataatcgtgttcagtttcgtgagcctctcagcaatacttttatggacgatgcatatgctgacgtacaagcagattcaaatacaactttggaaaattcgacttatgtggctgtcgatgatccaagcccttcaaattatccgattttggccccagttcttgaagagccatcttcatcattttctgagggtaatggtttaataacaatgatagtgacattataacaattccatcaccgtctttcactttgttttaaatattgtgaattacttttggcagctgcggatgatgatccgttgccaggtattgcagacttacagatatcaggagaaccttttcctgtgcgagagcttcag

SEQ ID NO: 181891 - DNA, 73 bp, Arabidopsis thaliana landsberg
taaaaagaacagaataatcagccggtaccagaaacgatatcagatgttgaacgacaatgaacataagatataa

SEQ ID NO: 181892 - DNA, 290 bp, Arabidopsis thaliana landsberg
atggaaggagtggttccaagttctactagatatcatgaagaaggggctgagattgagaagagagaaaattttgaaggctgtattcttaatccagtgagcagtaaagaagaactcgcatcaagaaatggcgatggttgtgattgtgtctttgatgccattggtgccaaggaccaatcaactgtaattgaaccaaggagtcttctattagcaacggttacaaaatcagtggtagacactagagtatctagatctaatgatgtgaactatctctttttgctttacaaaaatag

SEQ ID NO: 181893 - DNA, 381 bp, Arabidopsis thaliana landsberg
atgatcagtaacctgcagaaccagcttgcccagcaaaagagtgatcttttaaaagcccagatctccttgcaaagtgtgaatgcgcagctcagcgccgccgccaagcagggagggggattagccaacaatgaagatattatcgcactgagaaccagcttagacaacctgatcgctcaatatacagacggaggatccaaagatcaggctctggcggataagatcagtaaagtgcgcaaccagcttcagcagaggttatcggaggcaggcagcaccaccgttaccactcctttaggggacctgatgaagcaaaaaaccgatttaggcatccaaattcaggtggcagagaaaaccatccaggacctggaatcaagattgaagcag

SEQ ID NO: 181894 - DNA, 411 bp, Arabidopsis thaliana landsberg
atggctgccacttgtgacaggtccatcacaatgcatctcttttgccaatcaatttgtgttttacttcagcatactacaacatttgcaattgattacccttttacatatcatataagaataggtaggtcttctcagcctttatttctgtctcagttaactggtcccatctgttgaagttgaccttgccactaggtatctcaaacttaactttacactgatgatggaagcaggacagtggcagagaaaaatgcagagaagaagcacaggacccaaaaggttaagccaaaggcagcaccttcagcagcagcaacatcaactgtagaatctaagaagcatctggctagtgtcagggttatccagagaaatctggtgtatataattgggctacctgcacatttatgcaatgagagc

SEQ ID NO: 181895 - DNA, 64 bp, Arabidopsis thaliana landsberg
aaatttgtcgatgaaacgactccttggattgtcaatcaacgaacgacgaattgctgcaatttag

SEQ ID NO: 181896 - DNA, 967 bp, Arabidopsis thaliana landsberg
atgaatacacagaaacaaacgaatcttcgttacgtcgttacgaggtaaactccacccgcaaattctagttgaaagttggacaaaagtcacagtttcttaacccaaaataacaaagtatcagattttagattcaagttggcattttcgggaacagattccggttaactctaattacttaatgacaagtcgacggtggataccgatagagaaagtgttaggaaagccacaggacccttcatcgtcacaaggaaaggtataccctacctgccacgttgattgcttattgaggaagaatcacctcttttgtcaaaactgtagaaaccctaatttgtctttgtgctgttttcttgtgctgcaagtttcagatattgtcaaggagtttcaacctctttatatcatcccaaattcaggtgatgttgtgatctatggagattcgaatacatgtttctatttttatgcttcatgattcattgcacatgaatagatttgtgtgcttagtaataatgaattgttatttaagattgatgatatgatgattgctctactattataggatgattgaattattgtacttgtgataacaagtaattatatgtgttatatgcgaaagtgcaattttaagatgatgaaaagtggaacagtggaaatggtctacattgaattgacggattcttagtagctcaataaaagactaacgagtccagtcgaattagataggttcaaaggtcagggagatgatcgaacctgaaaatgatgtggagatcatgcttaagcaagaatgagttgtgtgttatagttttgcatagagatgcagactataagagtgttgtgtctattttctatgtgattgttgattgtggtttaaaggtagaatcgtgtatcgtatttccagtgggcggaaaggatcctctcactgagtaattctttactcacccctttttcctctttttttcctaggtcacggtga

SEQ ID NO: 181897 - DNA, 1009 bp, Arabidopsis thaliana landsberg
atggctctcatgaaagtaatgacgattctggttctctttgtctcggtatcatcgaccttggcgcaatccaacaatggcggtcacatttcgataatcgtctcggaaacaggtcttgaatttgctaaagattacctcatcaagaaagtgatcactacgacgcttccacttcagctaccagacattgagaataaggttaagatccctctaatcgggaaagttcgaatgggtctatcgaatattcagattgatgcagttcatgtccagtcttcgaagatggagactcgaaaagatggaatcattttgagtgttttaggtgctacagcaaatttgagtatggactggtcttatacttacagagcttccttctttgagatttctgatcatggagatgcttctgttgaggtaaaactctgaaattatcgaaaaccaaattgggtctttttagttttgttgtttgtgttcagaacattgtttcatcatcagaagaaaaagcttaacaggtgaatgattatgacgatgaaggttaaaggaatgaatgtgagaatcactgccactttggttaatgataatggaagtctaaagattgcctcacgggaaaatgattgtacagtaaagaacattgatattcatatcaatggtggtgcttcttggctatatcaagggtattattaaatgttccataagttttcgtatctctaaaatctcttattccaagattataatatttgttttcctttttgcagggtggttgatgcatttcaaaaaatgattatatctactgttgaaaaaactgtctctactaaaattgtagaaaaaatgaagaagcttgattctttcttgcaatcacttccaaaacagagaaagattgatgactctgctgcagtgaatctcacttttacaggcaaccctgtcttagggaattcgtcggttgaagttgacatcaatggtttattcatgccaaagggtgatgatattaaagttgcagggtctcgttcttcttcctcctttg

SEQ ID NO: 181898 - DNA, 1449 bp, Arabidopsis thaliana landsberg
attcgaactttaggcatgttgagaggccggtttcatactttaccttcagctttcaatgcatcccttattccacactcaacaaaagatgagaaaaggagaaaacaaagaggttttttccccttcaatttaggcagggtaagagattgtgtgaatcgaccatgtgtatatgcccaaagactaaactatacatcttttaatgagctggactatatatgagtttcataaaaaagtcgtgtactttgctttgcaggggtctgatggccagaaaaatagtatggccaagtttgtcttggtctggaaccaagtcattaacagtttcagaacagaagatctgataagtaacaagtaaattgctcccttctgtattgcttgcatgtaaagttctgagtcagaaacttctgacatataaacatagctaataagtgtatatttttatcttcagggaattagatttgatgacgatgccgctgtcatcggaggtattatcaggaatcatccgttggcccattttcctccttgcaaataaggtacattttaaaatattttctacacaattgttttggtggaacttcggtttgttggtaaatatagctgccccatcttactagttttcaacagctctgagcattgcaaaagattttgtcgggaaggatgaggttctctatcgaaggattcggaaagacgagtacatgtactacgcagtaaaagagtgctatgaatctttgaagtacattcttcagattcttgttgttggtgatcttgagaaaaagtaatgccttctagtagcctcctctagttacaacttttgctttttttctgctggctgcggtatttaatttatatatttgatattggctcaggattatatctggtataataaacgagatagaggaaagcatcagacagtcaagtttgcttgaagaatttaagatggctgagctcccagcgttgcatgacaaatgtattgagctggttcaactcctggtaattatcttgtggcgttgtgtcagctgttttcttataaatgtagtagttccaatgggtatttttaatacgtaagttcttctgtacattccaggttgagggaagtgccgagcaactccaggttgagaaaagcgaagaactgcatggtaaacttgtaaaggctcttcaggatatctttgagctagtaacaaatgatatgatggtacatggtgacaggttagtgaatttcgaagttatgaaacccctgttgcttttagttctctttctgtgaaggattgaacaggctaaacttccttaataattcttcgaatgtttagaattctggatttgctccagtctcgggaggggtcaggagaagacacaggtatttttatgagggttatagaaccacagttgtttgaatcctacggagaatggagatgcattcattttccgctgccagatagtgcttcattgagtgaacag

SEQ ID NO: 181899 - DNA, 722 bp, Arabidopsis thaliana landsberg
atctctacgatggttacgccactctcttggaccgtttcaatcaaaaccctaaacaagtcattcctcatgacaatgataccgatactgacatcacttctgaagtagagagcatcttgtcctttcaacagatggaagtctccacttgtgatatgcaaaagaacattgaagacttagtctcgcagctcgttactgcaaacttggagaaagataccgcgaagcacatattacaacgcagagaacaaacgttgcaagaagcttgcaagacaattggcttgctaaagaagcttgtgatgttgcttgatatggagaaggaagtagctgtagaagaaaccgcaaatctcggacacaaacttacttccctcttggaagagaaccgagagctcgccagtgaagcgctgttcatgaaaaacgaagcagttaagcttgctaggtgcgttcttaagatgagggatgaacattttcacaagatgtgtcatctccagaaccaaatctacgagctgcagtcatcgagagagcctgtctacgaaaatgaatcctcgcagagctgctttggattggaaaatagtaagaaaaagagcaagaagagaaagatgagtgaaacaagaagtgaaactggagagaaaatgagatccaagtggttcaagagactcaataccatcaatccctttaccaaatgtagcattacgccattatcttctcccctctatcatgctgcactctaa

SEQ ID NO: 181900 - DNA, 825 bp, Arabidopsis thaliana landsberg
atggagctttatggaatcccaagaaatgctaccatcttctgtggattagggaccaagattcttgttaactatgattgtgagggtctgactactgtaccgccaatgcttcattccacaagttttggagatgtttccagaaactgcaaactcccgcttcctccgggtgatcaatgcaggaattgtttgaattccagtatcagctaccttaggagcctcgttggtgctgataatagcatcaaactgagtacttgtcgtgatgcaacttatgctgtgttagcaagccgggttgacaattcatcggctcttgaactagctagctgcttctttaatgtgcctgagcttagccccactccaggtatatactgttttctctgtcaacataccattcatggagtgtagaatcttatcattgtttctatattgggaaagatgcttgacagatcctgtatatattactagtgtgtcctgtataatcttcttagtatcagatcaagattggactttcttttcttttctgactttcttgacacatctactcaggttcgtctccatcatcgctgagtccagaagcttctcctccagtgttagctgatagtccaagcagcgataatcttgttttgtctccattaaaaagtcaccatccatatcacttgacaatggttccgactattgggattgctgtcacagtttttgctcttgtgatggttgtagtcctaatagttcttatccaaagaaaaaaacgagaacttgatgactccaagagcatcgcttgtaatctaacaaggacatctccttctccccgcccaaggtcgatgattcatgaag

SEQ ID NO: 181901 - DNA, 1768 bp, Arabidopsis thaliana landsberg
atgaagagttgcagaaccttaatttttgtggcaataattctcaacgggctgagtactttcgttgcacatgccggtgctgagagcaaggtactttacaattatataaggctattctcttacaagaaacataaatagcttggttctgtttcaataggttcacatagtttatttgggtgagaagcaacacgatgatcccgagtttgtcacggaatctcatcatcggatgttgtggtcacttcttggaaggtatgtaagtgtagttttctccattctatactatgtctctatttgtacaatcatgattgatggttcttgcgtttgcttcaatatttctctatctcaagtttaaaaatttctcaaaaggttactcagatttcttgccttttgttccatgttaaacagtaaagaggatgcacataattcaatggtccatagttaccgacatggcttctcgggttttgcagccaagcttaccaagtcccaagccaagaagcttgcaggtaaataattttaaaatcttatattttacttggcttgcaaggaaacagatagataggacatatattttacatgacatctttcatttgtctcaacaaacccacgtggaatcaatttcatttcttattctctttgacaacagatttacctgaagttgttcacgtcacgccggatagcttctaccaactagatacaactcggacttgggactacttaggcctttccgtcgccaatcctaaaaatcttctaaatgacactaatatgggtgaagaagttatcattggcattgtagactcaggtttgagtgtttatttgtgcatttcttttttgctacattgtagattgattttagttctcttgttgcttttgtttccgctatcaataaatcattttctgaggttgtaggagtttggccagaatctgaagtctttaatgacaatgggattggaccagtgccaagccactggaaaggaggctgtgtatcaggagagaatttcacttcctctcagtgcaacaaaaagcttataggagccaaatacttcatcaatgggtttcttgcgacgcacgaaagcttcaactccacagaatcacttgactttatttctcctagagaccgtagtggacatggcacgcatgtagccaccatagcgggtggttcctacgtgcctagcataagctacaaggggttagctggagggactgtgagaggtggggcaccacgtgctcgtatagcgatgtacaaagcttgttggtatctagatcgttttgacataaatacatgttcatctgctgatatcttgaaagctatggatgaagctatgcatgatggtgttgatgttttgtccttgtctatcggctatcgttttccttacttcccagaaactgatgttcgcgccgtgatagccacgggagcattccacgctgttttaaagggtatcacagttgtttgttcaggaggtaactctggtcctgcggctcagactgtgggaaacacggctccatggattttgacagtggctgcaactactttagaccggtcctttcccacccctataacacttgggaacaataaactgatattggtaacaacaagatatatacaacaccataatgtttttttcacaacataatgtttgatgatacgtgccttagtgtgagtttggtaattttattacagggtcaagcaatgtacaccggtccagaacttggcttcactagcttggtttacccagagaatccagggaacagcaacgagagtttttctgggtga

SEQ ID NO: 181902 - DNA, 343 bp, Arabidopsis thaliana landsberg
gtctgggatgtgctaagcaacgaagaagtagttgaagttgtagcatcagctacaagccgggcatcagcagctaggctcgtggtggattcagctgtacgcgaatggaaacttaagtacccgacttcgaagatggatgattgtgcagttgtgtgtttgtttctcgacggcagaatggactcagagacatcagataacgaagaacaatgcttctcttcggcaacaaacgcagtagaatcagacgaaagccagggagcagaaccgtgtcttcagagaaatgtcacagtcagatcattatcaacggatcaagaaaacaacagttatggtaaagtgattgcagaggctg

SEQ ID NO: 181903 - DNA, 180 bp, Arabidopsis thaliana landsberg
atgggaaaccgtggtactgagtcgttccacaactacgacggtgaggacatgtacacttggctaagcgaatggtatgtcacagtatgttgtaacttcgaattacatagaaatgtgtcattctaacttgtatgtacaggaagacaaatccgcctgtacgccttcgaatctggaggtgtatat

SEQ ID NO: 181904 - DNA, 1185 bp, Arabidopsis thaliana landsberg
atgaagttatttggttatcctactgggcttggcgctctccttgttctgtttggtgcgtaaattgttccctaggtttatctccttctgtaaatcttcacaaatcaaatctgactgtagttcagaaacattctcgttaaattcattacttagatcagagtatttctgttgttaagatctccaatattgttttcattttattcttattccctttgagataatttctcaaacaagatcaatatgtatcatttaatgaaacaaatattgcaaatgctagcttctgacatgatttttcccgttattataatctacagatgcagccaaattgctcaaaaagacttattttagtggaggtatgcatctcatttagttgtgtaaaatggttgaatttgtatggcatttgatgaacataatacttacaggcactgttgctgcttcaattgctgacatcgactttgtaaaaagaagggaaagggtggaggagttttttgaggatggttctgcttcattcctgagcatagcagccatccgtcatggcttcaaattactcaagtcgcttacaccttctgcaatttggatgtgagtagaacttttgctccgtgcagggtctccaatatttaaattagtcgaaatttttaccttggaagatagtctagtaggggcattgtctttttttagagactccatggtgttgatttttctttgaaattttcataagtttaaagttccctccaaaccatctgctattgtagaagctaaagtgtattctgtatctatttactaggcacacaacttcactttccatatatgtgaaaaagaagcttcaggctttacgacatggaaacggggctgctgtatgtgttctgtatggcagtgaaaatctggaggtcagttctttcatgattaaaaactagtttttttctctcatattccattagttatagggcttcatctattgagtgaaatatatgtttcaacaaaaaggatagcaaagagcataggaagaaaacaagtatctatcgtttcatatttgaaaaatatcatatcatcatttactttcgaagtcacataaattacttcttcgtgtgaccataatttgtgactgattctacgttatatgttacagttatcttcacataaatcaggcccaacggttacattcaacttgaaaagacctgatggctcttg

SEQ ID NO: 181905 - DNA, 3026 bp, Arabidopsis thaliana landsberg
  unsure (1)..(3026): unsure at all n locations
atggcgggaaactacaattatggcggtagtggcggtttctatcgagattggatgtacaagagattcgatgaagtgacggggaatttgtcagccgaatacgtcgcaggagttgaggaattcatgacattcgctaatagtcagcctatagtacagagttgtcgaggtaaatttcattgtccttgtagtgtatgcaagaatgaaaaacacatcatctcgggtagaagagttagtagtcatttgtttagtcaaggatttatgcctgattattatgtttggtataagcatggagaagaattgaatatggatatcggaactagttacacggatatgacgtattttagtgagaatcatgaagaagtgggtaatgttgtagaagatccatatgtggatatggtgaacgatgcatttaattttaacgtggggtatgatgataacgtgggtcatgatgataactatcatcatgatggtagttatcagaatgtggaagagccggtacgtaaccattcaaataagttctacgacttgttagaaagtgcaaataatccattgtacgatggttgtcgtgaagggcagtcgcagttatcattagcatctcgactcatgcacaacaaagcggagtataatatgagtgaaaagttggtggactccgtttgcgagatgtttacagattttttaccagaaggaaaccaggctaccacttcacattaccagaccgagaagttgatgcgcaatttaggacttccatatcatacgattgatgtttgcaaaaacaattgtatgttattttggaaagaagacgaaaaagaagatcaatgtcgattttgtggcgcacaaagatggaagcctaaggacgaccgtcgaagaaccaaagtaccatatagtcgtatgtggtatctacctattgcagaccggttgaagagactgtatcagagccataagacagctgcggctatgcgatggcatgctgagcaccaatcaaaggagggagaaatgaatcatccttcagatgcggcagagtggagatatttccaagagttacatccccggtttgctgaagaaccccgtaacgtttatctcgggttgtgtactgatgggttcaatccatttggcatgtctcgtaatcattcgttgtggcctgtgatcctaactccatataatttaccccctcgtttgtgcatgaatatagagtacttatttcttaccattctgaattctggaccaaatcatcctcgagctagtcttgatgtcttcctccaacctcttattgaggagctaaaagagttgtggtgtactggagtcgatgcgtacgatgtttcattgagtcagaattttaatctaaaagaagtactactctggacgattagcgactttcccgcgtatagcatgttatcaggatggactactcatggtaaattgtcttgtctagtttgcatggaaagtacaaagtctttttatctacccaatggacggaagacatgttggtttgattgtcaccgtagatttcttcctcatggtcatccatctcgtaggaacaaaaaagactttctcaaaggaagagacgcttctagcgagtatccacccgaatctttgacaggggagcaagtttattacgagcggttggctagtgtaaatccacccaaaacgaaggatgttggtgggaacggtcatgaaaagaagatgcgaggctatgggaaggaacataattggcacaaagaaagcatattgtgggagttgtcttactggaaggacctcaatcttcgacataatattgatgttatgcatacagagaaaaattttcttgacaacatcatgaacactctcttgggtgttaagggtaaatcaaaagacaatatcatgtcaagattggatattgagaaatattgttctcggccaggcttacatattgatagtacgggtaaagctccttttccaccgtataaattgacagaagaagccaaacagagtttatttcaatgtgtgaaacatgatgttaaatttccagatggttattcttcagatttggctagttgtgtagatttggagaatggtaagttttcaggcatgaagagtcatgattgtcatgtttttatggagcgactacttccatttatctttgctgaacttcttgaccggaatgtccaccttgcattatcaggtacaattctaactattttttatggaagaatttttttaatgtaattatttaacttccacatatattttaggaattggagcatttttccgggacctatgttcgagaactttacagacaagtcgcgttcaaattctcaaacagaacatagttttaatcatctgtaacttggaaaagatctttccaccatcatttttcgatgttatggaacatctacctatccatctcccatacgaagctgaattgggtggccctgtccaatataggtggatgtatccatttgagaggtttttcaaaaaattgaaaggaaaagcaaagaacaaaagatatgctgcaggctcaattgttgagtcatatatcaatgacgagattgcttatttttcagagcactactttgccgatcatatacaaacaaaatcaaggtacgtaactaatagtaattaattaaacatctgcaccaagcaagttttctatgcgcaaaaataaccatgaattacctcttttggatcaggttaacaagattcaatgagggtgaagttcctgtatatcatgttcctggagtacctaatatatttagttctgttggtcgtccaagtggagaaatacgtgaagtggctatcagaggaagactnnnnnnnnnnnnnnnnnnatgttatacggaattgtgattattttcaagtaattgagaggtatataacaaaggtcatactcccattttaagttaattataaatgtttgttaactaacccttatatgttgtttttgtctttgtagtatgttcgaagattttctttctattaaatatccaggattgaacgaaaaagaactcttcgtgaaaaaaggcgaggaatatcatgtgtgggtgaaagattat

SEQ ID NO: 181906 - DNA, 253 bp, Arabidopsis thaliana landsberg
atggccgacggcgcacgcagacgctacggagacgtgccccactcgacaacccagtcttcccctattcctcctttcctctcttttcatttcccatctctctctgcgccgtcccgtgctccctccgctagttctcccaattccttccccacctcctcggtcgtcgcttcccccagagagcaggagccgcctcgtccctgccggtcccgaccccgacccccatcccgtccgcgtccaacgccatgaatcccgagta

SEQ ID NO: 181907 - DNA, 260 bp, Arabidopsis thaliana landsberg
caacgcctaagggaccaaagaattatgaagatgagagttgcactatagctctcaataaccttcgatcaaaggttatcaagctgagaaacgaggctacggaaaaagacaagtttctactttcattggtggataaagtaaaggaggatgaagctagcttcaaaaatcaatccgaggcccaaaaaattgagattgaagaccttcggaaacaactggccgaagcaaggaaaaatgtggtctcgcagaggccaactgaaatatta

SEQ ID NO: 181908 - DNA, 339 bp, Arabidopsis thaliana landsberg
atggagaagctctggtattgtttgttaagaagaaagatgtaagcatgcggttgtgtattgactaccgaggtcttaacaacatgaccattaaggataagtatccatttccaagagttgatgagctattggatctcaaaaattgatctggctactaggcctcattaaattacaatctcggagcctaatatcaaggagactgcctttcagaccaggttttgccaatgtgatcatataccgatgcgcgctcctcttacagatggccccttagtcctaatgaaaggcaagagcaacgccatcctctgactttcctttttacgccgccctgccgacacaccagag

SEQ ID NO: 181909 - DNA, 423 bp, Arabidopsis thaliana landsberg
atggcggagctcatcgagaagcgattggatcggatcaagacctatattgacgatacgaaggtggcggagccaaagtttttgaattctatcgtgtatggaaacatcaagactctcgaggcgttgattgaaggcggcgaggtgaagataaagtcgaacgagatgatgtcaagattggatgcgaacgttgaattgttgaaggctgaggtgacatcctttaatattcgtgatctcatggtcggaggatttggcgtttaaactctgtttgccgagctcaggtttgaactttgttactctgctttgcttcagagtagcaaggaagatgacgatcacgcagatggacgagatggccaagaaggtcgagtcggggaacgaatcattgctcaggtcgtagtgcatgatgagaccacgggcgtcgacggctga

SEQ ID NO: 181910 - DNA, 313 bp, Arabidopsis thaliana landsberg
atggaggaagctagtgacgctctgcgagtaagtcagaaaggtacctgaaaatgccaaaatatcagagagtaaacaaaataaagttcacaaaccaactgaagattagttactgaaaaatcataacaccatgtgaattgattatgtatagaaaccaaagttccatatccataaggtcatatactttttttttaagaaaaacaagtctaaacttgaagtagctttttcttctccaaaaaccaaaatcaagttggaaacgaaaatgccaaaatatcagagagtaaacaaaacaatgttcacaaaccaactgaagtga

SEQ ID NO: 181911 - DNA, 287 bp, Arabidopsis thaliana landsberg
atggagctgcgcgggttcgccgagaagcagtcggcgttgcggcgggtcgcgacgctggtggcccgcggggcggcgcccgaggttgtgttcgccgcggtcagcgccgagatcgggcagttgctggcggttgacatcactgtcctggtccggtacgagccggacgccgccatttcgatcgtcggcacgtggagcagcacaggcggagagccggccacccccgtgggtagccggttgccgatcggcgggcagaacgtgaccccgctggtggtccggacgggggcggttag

SEQ ID NO: 181912 - DNA, 86 bp, Arabidopsis thaliana landsberg
tgaaagcttcgagaggattcggaaatagcgtttggatcggattgggtaaagagaaattggagaggatcgtgaagaagagagattga

SEQ ID NO: 181913 - DNA, 409 bp, Arabidopsis thaliana landsberg
gtgtgttttggctgagaaccacaccgccaagtatctagaatccctgcgcattgctgcccaagaaggcccttctgttcagtcactcgacctgctggcagcagctgcgttacatagcatacatgctcgctttgcctttggcttattcctctgcctttgcggttcttctaaagttgggatacgggttttaaaaacattcctggatagggttcgtgattttggagaagcaattctaattgcagaacaggtttgcacatatatccgtgttatgggtacaccgggtctacacgcttacaagggctacaagggcatgattcttcctgcttgtggtttggaccacaacaacggttgggactcttgcccattgtgcttacacgtccattattattttgaaatctatgacctctgctaa

SEQ ID NO: 181914 - DNA, 537 bp, Arabidopsis thaliana landsberg
atggtgggtctgggttagcttgtgctgactctgaacttcggcggagctctagggtcaggaagattccgtccatcctggatgcttctcctccgccaccaaagaaaaggcagcgttttaataagagttccagtagtatagagaaagggaagagaaatgaggatggagattcggatgccccggatggttggaaatccaggttgaggtcaaggaggaagaagaacgttggtttccaagcgagtgggagacagagacgtgtggtaaaggggaaaaggaagctcgttttcagaaaccgtgcctgtgagttgagtgaaaaagcagaggcaagtgacagggaagatgaaaaaggagcccttaaaggtgggaagctgaataaagcaaaaaagccagtggatgttaaggaatcagaaagttcggaagatgggggaaaagagtctgataccagtaattcggaagatgtgcaaaaggagtctgataccagtagttcggaagatgagagtgctatcgagtcagaggaatcaatgcgagctgacagtgcag

SEQ ID NO: 181915 - DNA, 605 bp, Arabidopsis thaliana landsberg
caacacatcatccacacgtctattctttgacaccgacgtcgatgaaaccaaacagttccttacttggtatgtatctctttctaatataagaatctcctcaaacaactatattccacatgcctaagtcactaccaccaccaggttaggagatagtggtaaaaaacgccaactatcgcaagctcctcctctaatgtaacaaaactggagacagtcacaatcaatgaaatataccagtttctacataatgaaaaccacatgttatattcaaagtatttctctctttatttataaatcacattaaccaccatttcttactgctttaagaaacctaacattaccaatgtaggaagttagcttcacttgctttgctacagttgtggacatacaaccacaatatggatggtactacatctaatgcaacatttgcaacaataaacttggaacaggagacacatcaatgtattacaaccattgcaaagaatacaacaacatttgccttatcaggtttgacaactatgaacgacctaaatgaggttatattcatacaaaatgatatagctcaaattgccttaagcctactccctcaaataagagatcgtcgttag

SEQ ID NO: 181916 - DNA, 1940 bp, Arabidopsis thaliana landsberg
atatgggaggcgaggctaaatcgatccaacggcggaaactcgcctatccatggccaatcaatcgagatcatcagctcagaagcgagcgttcaagaaatacaccttttagctccatccatcgacggagaatctgaatcagagaacgaatccaagaatcctgatcagacggtggagattgaatctgggactctcaattcggtttctgatattatccggagattgagtaacgaacagaagctaaccgccagcaataatggcggtgcagtcgatatgccgatcgttaaaacgccgacgctggagaaaagcagttttcaggtggttacttgctctccgcgaattcgaggaaggcaagcttactccgatctgcttgtgcatctggaacgcgaacgtcaccgcgaattggaatcacttcttggacgcaacgcagtttctaggtttcctcaacgtggtcgcctccaggtataactagcaaacgccccaaacattttaacaaacgatccagtttcagtgttaaaatcacaatttctttcactattccttgttgcacagtcaatgttgcggctaaggagtctcaaacgcggcctagcgattcaagatcgtcatcgtggtaccacaaaaagcgatttgaatcgcttccaacctagttctacaattctccatctaaggtatgctcaagaacctctgttttacgtcctacaagttcatgaactcatttttctcctctccttaatgtttaaatcataatgcagagaaaaactccgggaaaaagcagcaaacgctgccgctgaagccggactaaagaagggtcaacaatccaccgtagaaacagagagcatgcagtcaaaagaaaccagtggtattcttcattctccttctacagagcggttaagtcctcaaaaacgcaacatagaggaagcaatcttacgcaagaacgaaactgaaaccaaaatgagttaccttcagctgaaaaaagccatagtagcagaagtattggaaagagaatctgataacactagtcctctcaccagcgtaactcctcaagaaccgcggatactaaggaacgaggaagcggggaaactagaaagcggtacagagggaactcaagagacaccgttccttgagacacaagaaatgtcattccaaagcggatgggaagagcaagaagagtatgaggatgagcagtcttattacggagacatgagctatgactggtttacagaaatatctaggcctcggacttattgggaagatctgaggaaatctcggtatctggaagtgatgaacactaaatctgacaaggacgatatatgcagacttcttgagaggtaaacattatcagagaagagagaaacctttttttctttttcaaaaaatccttaatttagttctatggattatacagaagaacggtttcgggtttcctccaaagcggattacgagagaagaccgataagctcaaaatgtcccgcgttcagatacatccggctcaccggattgaagaagcaactaaagaggacgagaaatctgacatacgcgaagaacaagatgaagacagagatgacttgagccaatcatcatcacagatatttgcaccgcctccggcaggatcatggagctctctggacacaggagttacttccacaccaacgcacaatcttcattccactgtgagcctcttcttttcttgttgaaatgtcaccatcagttttggcgagagattggcatttatatttcattaaaatgtttcaggagatggagattataagcgaaatgagatcacaccttttacagctccaactagaaatgtctgagctacgagactctgtcataacgtgtttggacgtcaatgctagccttcaaaagtcggttcacctggaaaatccctttaaacgcaaatgctgcgtttgtaacgaaacgcaagttgtcacacttttatacag

SEQ ID NO: 181917 - DNA, 728 bp, Arabidopsis thaliana landsberg
agttttacaaaacatttttcgagagcaaatggtttgacgaaagatggttgtatgattgatctaatgaatctaagtggggaaccatggactctgggtctgcgacacaacaaaagaactggtcaggcttttatccgtggacgctggagaagtttctgccatgcaaatgagctgaaacccggatcgttctaccggtttaagcttgtccggaatgggacaaggcctttgctacaattgtgttttaaagttattccacaaggaaactgttccaattccaaagcaaatggaaaagctaatgtttctgaaaagtatagcagggaagatgggagtgcttcaacgaagcagaacaagtttctgacagtaaccttgaagcattacatgatccagtcagggcaacttgtaagttttcaacgtcttaggtttagggttaatttgattatgcattttcttgtaatacttcacgaatgcttatgcagcgtctccggagatcatttgtgagggagaacgggatcaaggaggctgaagagataattctagtggacaaaaatggagtagagtggccatcctatgtatcttcttccaaacaacgaagagagttttacatggcacatggttggattaggttttgtgaagccaataagttaaagacgggagagaccttcacgttggagtttgttcgaggagaaggcacaactcctatgctcaagttctgctccgaggccaaggtcaag

SEQ ID NO: 181918 - DNA, 120 bp, Arabidopsis thaliana landsberg
accatgatccattcctttggttccaagatatcagaattacatgattctgtgcaaaggaaacgcatagagcttcaacgtttattgaaaactaaagctcttctcgcgattacagaatctcaa

SEQ ID NO: 181919 - DNA, 430 bp, Arabidopsis thaliana landsberg
atgggtctccatgaaaattccggcgatgccgctggcgaccgctgcgcgcgccagtaccggcacgtgctcgcgctggccgccgctcttgtcgccctgcccgccgggctgctgcaccgagtgcgtggcgtcgaacaccaccgggcaattggtttcgcgcatgatggcgaggccgcgcatgtcggaaaccagggtattgtagccgaacgaggcgccgcgttcgcagaccatgatggtgtccgcgccgccgctggcttccttcgctttctgcaccacattcttcatgtcgccgggcgccaggaactggcccttcttgatgttgaccggcttgcccgaggcggcgcatgcggtaatgaaatcggtctggcggcagaagaaggccggcgtctgcagtacatcgaccacggccgcgacttcgggcacctgttcctcg

SEQ ID NO: 181920 - DNA, 325 bp, Arabidopsis thaliana landsberg
atgagtttggagttttgggacctgatgataattgttggcctcaaatggcgtgtatggtacccactcgtgaggaagaggtaccaatgatatttataaagctctagtaatagctattggaggatataaagatattctttagcgagtgattttattgacctttgttactcttcagtttgattgggaaggggatatgcatctgaagcttccacagaaagatcttgttatatatgaaatgcatgtgcgaggttttacaaggcatgagtctagtaaaattgaattccctggcacataccagggtgttgcagagaagcttgaccatttgaag

SEQ ID NO: 181921 - DNA, 60 bp, Arabidopsis thaliana landsberg
atattcgactccaacaatttagcaaattgtgttgacctgcattatagagagattggatga

SEQ ID NO: 181922 - DNA, 36 bp, Arabidopsis thaliana landsberg
atgaacgactctatctacaatactctggaactcccg

SEQ ID NO: 181923 - DNA, 99 bp, Arabidopsis thaliana landsberg
cataagcttggagaagggaaatatgagtgtaccattaggatccgtgccatggggaaatttgtgaggaccgttgccacgcagatctatgaccataattag

SEQ ID NO: 181924 - DNA, 631 bp, Arabidopsis thaliana landsberg
aagttgctgcgaacgaatcttgacatgagctccgcgtatcaccggaagagtgatagacaaaccgaagttactaatcgcacccttggtggtttgttaaggtgcttggtgggtgacaatatcaagagttgggatgtgaagctttgtcaagcggaattcgcccacaatcatgcctctaatcaaaatttggggttttcaccatttcgtgtggtttatggactgattcctcgctgccccttggatcttactacactttcatggacaggcgattgattttgttacagagttgcaggaggttcatcgtcaagccaaacttaattgggagatagcaacgttaaagtataagacaactgcatatcataagcaaagggagttgatttttcaacctggagatttagtttgggtagtcatcaccaaggatagattgccagtacgagagtacaacaagctcaagtctcgaaagataggtcttgttgaagtgctagaacgcatcaatgccaatgcttatcgtctgcgacttccggaccatatgcgtacatcggacgtcttcaacgtcaagtatttgtcttctttccgtggcaacaatgagccgttggattcggggtcgaatcctctctcacccggggagacttga

SEQ ID NO: 181925 - DNA, 208 bp, Arabidopsis thaliana landsberg
atgatcgtgaacatcagcattgacctccatagattaacgtgtgaaggcaatgagttagtaggtaatatacagagtatcacataatctaacagataatctaacagttaaggtataacagtggtacccactaacataataccagctcatcctcgacggtagttgaatcatcatccattaacgcttcgccctacagatcggcgagaattag

SEQ ID NO: 181926 - DNA, 706 bp, Arabidopsis thaliana landsberg
gtttgatttttagtgaatatctaatcagcggccaagctcctctaatcaaggaggtcaacgatgaagaaccgctcttcccaacagttcggtttttaaacatgaaatctccagaaaaggtaaaagtgttcattcaccttattatacactctgagatctcttatcaactagtttaaaatctaaaaactttctcggatgaacaaaacaatacttgatgacctgattgattgattcttagtatctgctctattcagctgcaagattttgtcttatcatcagaagcaaaagcagcagccgcagacatagaggaacggcttcaactagggtcaaagctcagcgatgttatccacaacaaggaagaagcaatagcactgtttgatctatatcgcaatgaaggctacatccttacagaacacaaaggaagattctgcgtaagcaatgataaaccttctcataattattattacccaggggaatctctcaccattctatctcctcttgtaattgtcaggtgatgctcaaggaaagctcaactccacaagacatgctcaggtcattatttcaagtgaactacctctactggctagagaagaatgctgggatcgaacccgcaagcacttactcagactgcaaaccgggtggtcgcctacacatttctttagattatgtgcgacgagagtttgaacacgccaaagaagacagcgaatca

SEQ ID NO: 181927 - DNA, 820 bp, Arabidopsis thaliana landsberg
  unsure (1)..(820): unsure at all n locations
gttatcaccaaatcaagatgaaagagtccgaccagctcgtgacttctttcatcacaccttttggcatgtattgttatactactatgccatttggcttgaggaatgcaggtgcgacataccaagggtgcatgaaccacgtgttcggagagcacatcggccgaacggtcgaggcttacgtcgatgacatcgttgtcaagacgaagaaagcctccgacctcctctttgaccttgaaacgacattcaagtgtctgagagcgaaaggcgtgaagctcaatcccgagaagtgtgtcttcggagtcccccgaggcatgctcttggggttcatcgtctccgagcgaggcatcgaggccaacccggagaaaatcacagccatcaccagcatgggcccatcaaagatttgaaaggagtacagagggttatgggatgtcntccggctctgagccgcttcatctcacgcctcggcgaaagaggtctacctctgtgccgcctcttaaggaaggccgagtgcttcacctggacccctgaggccgaggaagctctcgggaacctgaaggcgctcctcacaaaggcgcctatcttggtgcctccagctgccggagaagccctcttggtctacgtcgccgcgaccactcaggtggttagcgccgcgattgtggtcgagaggcaagaagaggggcatgcattgcccgttcagaagccagtttacttcgtcagtgaggtactgtccgaaaccaagatccgctacccacaagttcagaagctgctgtatgcagtgatcctgacacggcggaagttgcgacactacttcgagtctcatccg

SEQ ID NO: 181928 - DNA, 641 bp, Arabidopsis thaliana landsberg
  unsure (1)..(641): unsure at all n locations
acgatgcaaataagttgtgggctccgattgctgaaaatttggtattagaagatattgggctttcacggcccaacacccaaaggcctacttcacgtgaatttggttcttcaagtcaacaaccacgtgagctctcgtcttccacccaaattgcaaatcacgacaattctcgacctacttcnnnnnnnnnnnnnnnnnnnnntattgttccaatagcgccatgtcctgttacgacatccacgaggtcagtcgtcactgccaccgttgttccgcttgttccagcgactgaagaattgggcaaaggcaaaagacaacggacagctgccgtacgtctaaaagattttgtggtacctcagacagttaaagcgactaagcaaccggaagagatgcatatgataagcgagaaagcatttactccgattcaatcaacagaaagtgttcatcgtttttcagaacaacatattgcttatgttgcacccgttgtttctaacttagaacccaaatcatttaaaaaggctatggaagaagaaaagtggagatctactgttggaactgaatatggtgctttgatagaaaatgagacatggacgattgaaaccttaccaccgaataagaaagcaattggaaatcaatgggtcttcaag

SEQ ID NO: 181929 - DNA, 1600 bp, Arabidopsis thaliana landsberg
atgctcctggtggacccaatggttatatgtgaccagatcaatgggcctttaatgggtcaaaattattatcactcaaagcttctaatcaaacaaaggcccaaatacgtgaagagctctccgccgtaaatcagtggcttttcaccgacttcgccattgctaatcgccgtcgagcttccatggctgctgctccatggctctatctctctaggagaaaaagctccactcagacttcattaagaagattcctcatttgctcttcttcattcgatgccgatgaattcatttccagtcaaagccgcgtaatcggcgggagaggagaagaggaagtacgattttccggtgctctcttctctcgtatgattcattcttctacttatcatccttaccgtcaaattccattgccacactcctctgtacaactgcttgatgcgagtcttgggtgtagaggtttctctagtggtagttctaatgttagtgatggatgtgatgaagaagttgaatctgaatgcgataatgatgaagaaactggggtcagttgtgttgaatcaagtactaatccggaagaagtagagagagtctgcaaagtgattgatgaattgtttgcgttagatagaaatatggaagctgttcttgatgaaatgaaactagatttatcacatgatctcatcgttgaggttttagaacgttttcgacatgctaggaagcctgcatttaggttcttctgttgggctgcagagagacaaggatttgctcatgactcaagaacatataactccatgatgagtattttagcaaagactagacagttcgagacgatggtttcggtactcgaagagatgggtacgaaaggtctattgacgatggagacattcactatcgcgatgaaagctttcgctgctgcgaaagagaggaagaaagctgttggtatctttgagttgatgaagaagtacaagtttaagattggtgttgaaaccattaattgcttgcttgatagtcttggcagggctaagcttggaaaagaagctcaggttctgtttgataagctgaaggagaggtttacacctaatatgatgacttacactgttctactcaatggttggtgcagggtgaggaacttgatagaagcagctagaatctggaatgatatgattgatcacggattgaaacctgacattgtagctcacaacgtaatgcttgaagggttgttgaggagtatgaaaaaatcagatgcgatcaaattgttccatgttatgaaatccaagggaccttgccctaatgtccgtagctataccatcatgatccgggacttctgcaaacagtcgagcatggaaactgccattgagtactttgatgacatggttgattccgggttgcaacctgatgctgcggtttacacgtgtctgatcacggggtttgggactcagaagaagctggatactgtttacgaactgctcaaggagatgcaagaaaagggacaccctccggatggcaaaacgtataatgcgttgatcaaactgatggcgaaccagaaaatgccggaacatggcacaaggatctacaacaagatgatccagaacgaaattgagccatcgatacacac

SEQ ID NO: 181930 - DNA, 1114 bp, Arabidopsis thaliana landsberg
atggaggctataaccctccagatcgacaaactaatgcagtctcaaacacagatagacaagttgttccagtgtcaacaaaagcttgaggccatggtgacagcgttggtttctcaacagagtggcgaacaagtcaaccgagctccagactccaacttggtagcttccggtgagctcacctcatcatcatcgttaacaccgagacccctagatcctcctgatttaaacgaatatggtcagctttatatgggtatatgtccgatggattaagacaaagctacggtgcatccaaatgggttgattaccagactttcaaaggtagggttcccctcatttgatggtaacaggtttcgtggatggctttaccgatgtgagcagttcaaaagcattggagtggcatcataactacatacgtgatcggtttgatatgttcccatcttgatcagaatatgtgatagatctatcatctagattcgcagagcttgtagatcattctttggctgatttggtaaatgtgaagcagggaggaaattctgttgaaatattttgggaaaaatttgaatgcgccagaacaaggtggtcgctaccaatgtcgcacgctctcagcatcttccttaacaaccttaacccacacctagccctacaagtccgacagttcaaaattgttatagtggcagaggcagctatagccaagctccatgagtcggctatccttcaaacacctactaaacctcaacgaaccaccttcagtccctactcaaaacccaataaccaaccctactataaactctcaaacaccacagccctacttccaacatcaagattcactgaaaaccttacaacaccaccatacaaaccaaacaataccactaaaccctccataaagttcagttatgatgagatgcaagaacggagaaccgaaggtctatgtatgttatgtgatgagccatatattccaggccatcacttaaagcatagaaaatctcaaatctttgtgatggaatatgaagaggatgatttagaagaacaaggggtggttgcagtagaagaggaagagaatgttgttgtagatcccaatgaggagcagccaacaaatttagtaaacgcattgaattga

SEQ ID NO: 181931 - DNA, 341 bp, Arabidopsis thaliana landsberg
atgacgcctccattaccaggtaaggatgatgtttattacactgatacagttgacgtctcacagccgttaaccgctatcgttacgagttcaccactgccgcacgagacgcacctagccgttcttgagatcgtgccgttctttcctttcctctagctcccttccacaaccgaaccctagccgccgcacccatggatcgaactgctcctgtcgtcgtcgtggcagcagctgttgatgctgctcgtgctgcggctgttgcagctgctgaggctagatgtgcggcgttggtggatgagaaggaggcacgagcggcgatggaatctgccagtaatgccgctgataag

SEQ ID NO: 181932 - DNA, 837 bp, Arabidopsis thaliana landsberg
ggtggcacagaatgttaagggattgctgtgcagttcggatgaaagttatgtcggttccatgacggctaatctcttgggttccaagtactacatatgggccaaggtcagaaattcaagctcaatgtaacggtgttggttctgcttataggttggaaatcgagtatgaatgtttctggtcttttgattccattgcagggagttcgagttggttctgtaggtaaaatggtgaagccgcttctttcggttgtaatgtaagcgttgaggattttgaatgccgtgttttttgatgaatttgcctctgccttagttttgggtttgcttatgcatctgttggcttctgcagattcacacccaccataacaacttggacagggagctacagaagaatgagaactttgctaccaaagcagcagccaatgcagaaaaacaacaataagcaggtaaatgcctaatcttaaacttctctccatcaatcttgcattccgaaaacataaaactgttaatacacgtatgtatgtatctccttataggttcaacaagctagtaaactaccgcttgattggcttgagaataaggaaaaaattcagaagctatgctcaaggataccacattacaacaaagtaagtctcaccgggcatcattgttgattttgtaaagcatgaaattcattgtgtcttcccctttctttagatctccaagcagcatgagttagacttcagagacagaggaagaacaggactgagaatacagagctcggtgaagaactttcagctaacactcacggtgcatttccacaactttaaagctttgatcaaaaaccaatctcaagaatcctaa

SEQ ID NO: 181933 - DNA, 211 bp, Arabidopsis thaliana landsberg
aagatacaaagccaacgactcatacggaattcgggtacaccatcaaagctttgagaagcaagaagatgaggcagcagacactactcgaccctcctactcgatcctttactcgacccctttactcgatcaagggcgacctactctacaagacttgttgatcattcaaagcgtcttcggatcctcctcattccccactcaaccagacatctga

SEQ ID NO: 181934 - DNA, 419 bp, Arabidopsis thaliana landsberg
tgttttccctacaatgaccaccacctacctaatctggacccctctccatcatcaccattgattcctagtgtcaccaatccaatccaacgaccaatacgagcagtgagttttctttgatccaacggcccacaatcagagaatccgtactcgttctctctcggctagatagatctttgaaatcgtctacgagcgattggtgttagagtaaacgacgaaccgacttcgatattataagtacgtcagccatagacgttacgacacgtgaagtgggacacatcttaagccacgtggaatacatgtcgcgcatgagactcgtcactaacacgtgggtcctctgcgcaaatcgctcgtctattcttgctttgcactgtttttacgcgacggcacggctctctcgttttccgtacaattccctctga

SEQ ID NO: 181935 - DNA, 676 bp, Arabidopsis thaliana landsberg
atggaatgctctgcaactcctcccaagctttatccaaccgtcgacacttcaaccaccgttgctcctctccctaagtcctcttcctcctcctcttctactaataataataatctctatccttcaatcaatgtcaatgatcttgtcaacaatatcttccccgatcccaccgcctctgactcagcttcagcgcctcctctcgcgacggaggaagtgattctcacaatccacggcgcgatggtccacctcattgacaaatcctacagcgtagagctcgcttgcggcgatctcgagattctccgtcttgttcaaggagatatcaccgtcgcggttttcgctcgcgtcggtgacgagatccaatggccgttgactaaagacgaacccgccgttaaagtcgatgagtctcattacttcttctcgctccgacccgttaaagaatccgagtcatcggatcattcagtcaacgaaacagagaacgagatgttgaactacggattaacaatggcttcgaaaggtcaagaaccgatgcttgagaagctagacaagatcttagctgattacagtagtttcacagcggaggagaaacagaaagaagagaacgttttggatttgacggcggcgaaggagacttcaccggaggagctgaagggaaagaggaaaaagatggtggagaagcagt

SEQ ID NO: 181936 - DNA, 538 bp, Arabidopsis thaliana landsberg
atgaaagacgatgaagaaaaattgaaaaagaaaaaactgaagcttgagccgaagacagatgcttcgatgaagagaaaagctatagctccgaagcagaaggcaattgatgtaggagaagaaactgctgcaacaccttctgccaccgacgtggaggaaattttaaaggtaatgactgaatccctgcctgcgaacgaagtccattagggcctcaactgacaaagttttttcagaaggaaaaggagcccgaaaaaatgaagaaaacaactaaagtaaagagacagaggatcatcggtgtgacagaggtaattgacaagacaccgccaagagcttcagcttagaaaacaacagcggctgcggaagggacagatattgaaattacaccttcggaggtcgcggctgccgaagctgcctcagctgaagatttgaacctggagagcacaatcgaacacattgacaaaatactgctagacatggctgcagaagaagctaccaccgcccgccgaagaaagcggcgacggaaccttcgggaaaagggagg

SEQ ID NO: 181937 - DNA, 389 bp, Arabidopsis thaliana landsberg
gtcctcttcgtcacaagtttctacgagctttactacctttctggtctagtgcattaccaactctacccgtgacagcaccacctcgtaaggatgcagcaaaggcagatgatggttctgaaggtcgtgtaaggcatcaacgatcatcaaaaatggatataaggaagatactaattttcatagctctcatgtaagaccttgtttacagtgtaactctttcttctgctgctcgttatatgtcaaatgtttggtgcagaatcaatcagtattatccatggcctaaatctatgtgaccaatgtgcagagcgtgtatggcaacaatggggattttatactacagactcgcactacaggcaattggtcaagaactaccccatgaggagcagcgatga

SEQ ID NO: 181938 - DNA, 546 bp, Arabidopsis thaliana landsberg
tggacgcgatcattggctcctgaaggaggaagacattgacagatactcgcgcacgttgccaaaatgtattgtccgtaagctcgacgacaatggacagtttccccttttggttagtgatatctcttcatccaatactgatactagttttctcatgtcaattgagaatatcggatcattcataacttacacttcaactatctcttttacatctcatattaggaggacggtgtagatcttgctactatcatcaagtgtacttgtttttatcgccgtgggaagtctcacgatcacattacggattacattatgcctaccacatttgagttaaaacaacaagtagacgatcaccggtaagctctgagttatattaaacaaaatcagaatatcaagtaaaaagttataggggatactgaatgatatattccgcggtgcagattgctaatggatggtacttctcctgtaatgctgtcaactctagaagacggaacagttgtaaggagcctcgaaggattaccttcagagggacctgttttgtacgtggcctga

SEQ ID NO: 181939 - DNA, 1109 bp, Arabidopsis thaliana landsberg
atgaacatcgctatatgtggtactgttggttcagggaaatcaagcttactctcgtccatactaggtgaagttcccaaaatatctggaaatcttaaggtttgtggaagaaaggcatacattgcacagtcgccttggatccagagtggcaaagtcgaagagaacattctgtttggtaagcccatgcaaagagaatggtaccaaagggtgcttgaagcgtgttctttgaataaggacttggaggtatttccgttccgtgatcagacagttattggagaaaggggtatcaatcttagcggtggacagaagcaacggatacagattgcacgtgctctttaccaagacgcagatatctatctgtttgatgacccttttagtgcagtagacgctcatactggatcacatctcttcaaggtaataatcattttccctttttctgattatcttgacttgaagtatatagactcttaccttttactttttgctggcttctgctatgcatattgatatgatctcttacgcttatcgtttctgttacaggaagtcctgctggggcttctgagaaacaagacagtcatatatgtcactcatcaacttgaattcctgcctgaagctgatcttatactggtttgggcttcttcgctctaccatctttccaatgcgttatctaattacatatttattatatcagataatcatttttgtaggtcatgaaagatgggaggatcacgcaagcagggaagtacaatgaaattcttgaatcaggaacagatttcatggaacttgtaggagctcacactgatgccttagctgcagttgattcatatgaaaaaggatctgcttcagcacaatcaacaacaagcaaagaaagcaaagtttccaacgatgaagaaaaacaagaggaagatttgcctagcccgaaaggacaactagttcaagaagaagagcgggagaaaggcaaagttgggttcactgtataccaaaagtatatgaaattggcgtatggaggagcacttgtgcctattatattggttgtacagattctctttcaggttctaaacatcgggagcaactattggatggcttgggtaactcctgtttctaggatgtga

SEQ ID NO: 181940 - DNA, 3137 bp, Arabidopsis thaliana landsberg
agaatgcggaacaagaggagctagagctcatgccgttgcccaaaagaagtcgaaatgatggaaacgatgtaagtaatctcttaagatatatatgaagttctcacggtatggtttagtgggtggttgattcattgtgttattgattattttctctaggtgaattactctgtaatagatagcagacctaacgacatcagaactgttgcctgtggaactatgcttgggactattttagctcttgaatcccaagcttcggttttcaatttaagtgcatctaaccgaggaatagaggcttttgttcaagatcatcagcctggtccgcagacatccaatgcttcagtggatgtcaatcctacgcatcggttagaggaaagcaagaacgatttgccatctcctcaggaggatggatattacgagcgacctgaaattggaggtttccaaattgctgacaaccaaatattaatcgaagaaggtgatgataaaaataagaaggatctcttccctaagggagagatacaaactgattctgtgcagtccgatcccgttgcctcattgatgccaacagaaaatgagttagaaccagtgcagattgtggatgacactgaagatctacttgtagatgatcacactgtagacatcgttagcacccctgacagagagctgccgttgaagccttctgctacagaagctaatcaagataaatctttggtacaaaaaactctggatcaatgcaaattgccgggaaacagcaaaacgtacagctgttcccctgagataaaacacaccagaaaaagtaaagttatccagaagaggaagcagaattttaacaccgttcgtcttaaagatcagaaggtagacatgtctctttcgtctagagtgaggcctttatataatgttaactacgttaacactcttgcaccgaattttagcattaatgcacactatattaaaagttctcttctcatatttgtggtttaggatcaggcaaagcataacacaattccagattttgattcttacactattgtagaggaagaaggttcaggtatttctttccagtctatttcatctatattcctcattctattgtaacaacttaactagttatcgactaatcactggtgaaatccaaatgtaggtggctacgggattgtttataaggcaacgaggaaaactgatggaacagagtttgcaattaaatgtacgggaaagaaaatgatatgtggctaaatgttttcactgcatcagtgtttttcgttggaagacttgcctcatttgttttccttgcaggccctcatgttggcgctcagaagtactatgtgaataatgaaatcagaatgctggagcgttttgggtaagtaactaagtatgattaggcatgaaccttccacattttcaagcataacgatctgaaactgctgaaattattgctttatttagggggaaaaactgtataataaaacatcaaggctgtctcaagaatggagattctgattgcatcatccttgagcaccttgaacatgacagacctgattcattgaagagagaaatagatgtgtatcagctgcagtggtacggctactgcatgttcaaagctctatcgagtctgcataagcaggtatgcagattttggactgaattatttttagcattcatatttcaatcacgcaactaaccagttctattttttctcttcacaatcttgaagggtgttgttcatagggatgttaagccaggaaacttcctcttctctaggaagaccaacaaaggctatctcattgattttaaccttgccatggttagcattttttgtcacccttctcttatcaaaattttcctagcgacggtttttggttagtgtttcttactatagaatttgaagtaaccgaaaaaaactgcttattcaattctaaggtcagtgtctaacagaggcactgaaaaacttgaggaacacaaacgttcatgttaaaatttactgttatgttcccttccccacccattgatattaatctcttttttttcctgcatggttcaattaggatttgcaccagaagtacagaagagcaggtaaacttctcccctcatgcatatgtgctgtacttggctataaaatatggaaactaaagctatctcttgttatgttctgtagataaatcaaaagcagcttcaggtcttcctaccgccagcaagaaacatcatacattggttaaatcactcgatgcggtaaaccgagggaccaacaaaccttctcagaaaactttagcgcctaatagtatcaagaaagcagcgggaaagacaagagctcggaatgacatgaccagatgggagagactcaatagccaaggggcagaagggtctggcttaacttcagctaaagatgtgaccagcacaaggaacaacccttcaggtgaaaagagaagagagcctttgccatgtcatggaagaaaagcgcttttagattttctgcaagagacaatgtctgttccaattccaaaccatgaagtatcatccaaagctcctacgtctatgagaaaacgggtagctgctcttccagggaaagctgagaaggaacttctttatctgaccccaatgccactgtgctctaacggtcggcctgaagcaggtgcagttctggtgtaatcattgacttttgtttttgtttcagagtttaatttaaaccttaagaagagtttttctgactttactaggggacgtaattgagaagaaagacggtccttgctcaggaaccaaaggcttccgagctccagaggtacatcaactgtaactatagctcacttctcttaatactagttaaatatgaaaatcttgtgccttcagactaaagttgtaggcctgagctactcattagcacatctctgatgggaaagctaattctctggggctgttcttggctgaattggtttgtgcaggtttgcttcagatctttgcaccaaggacctaagatagacgtgtggtctgcgggagttactttgttatacctcataatgggaaggacacctttcactggtgaccctgaacagttaagatctgacttgaatgagtacaccatcactcggttccactcgtttcttctttcttgccttcttacaacgaccttgtatttcccaggaacataa

SEQ ID NO: 181941 - DNA, 519 bp, Arabidopsis thaliana landsberg
atgcgacgagatggacgaacgaagcaatggaacgccaagctggacaaactgaagcaactagatggacgaataaagcagttgggtgtcaagttggacgaacgaagcagttggatgccaagttagatgaactaaactgtcaatcaacaagatagacgaacataacagtttagcgccagttagacgagatacgcagtcaagcgacatgatgaaagaacagagcagttgaacccaagttagatgaatagagcagttgtttgaagtatgagtttcttctcccatcttttttatatgtctcatctctcttaatgagacgcctctctttttataaaatgataagttggtgatagaatcatggaccgaccatcatgagtatttaattggaattggttgccttctaatgaagttaatcttgttttgggtccgcctaaagtgaagggcataatccatgcccaacagaaaccctctgaaaacaaaagcgacgagtttaaagaaaactctcaaaaccaaaagcctgattaa

SEQ ID NO: 181942 - DNA, 79 bp, Arabidopsis thaliana landsberg
aaatttatgggttcgagagtcggagagtgttaattgggcccagttgggccattttgagaggtccatgcatgcatatatg

SEQ ID NO: 181943 - DNA, 435 bp, Arabidopsis thaliana landsberg
atgaagaattccatccgaaaattatccgattttggtctcgctagagaaggtcccgaaggagacaatactcacgttacaaccgcagtaagtaacatttttttccttcctcccttagaaattttgaagtttaattagtttcttcatccgcaagtaacagttttttttcttgtttcttgattctattaaaagagagttggaacagacggctatgccgctcccgagtatgtaataaccggtcacctcaagacacattgcgatgtatatagctttggagttgttttgtacgaaattatcactggtcgtcgcacattggaacgaatgaaacctttagctgaacaaaagcttctagaatgggtcaaaaaatatcctattaatagcaaaagattcaaaatgatcgttgactccaagctatgcaataagtatccaattgctatg

SEQ ID NO: 181944 - DNA, 304 bp, Arabidopsis thaliana landsberg
gtttgccaattgtgaactccggtcgattcggatagagaagaggtaactaaaattagcttaggaaattgaaggaactttacaagtagtggttgtttttaacaatgttcacacgtttaagtgcagtgacatggaagcggacacattaatgactagtaactgtagaaattacgttactccaccttcaacttccttccattcacacgcttgaataggaggcatgcatattatttatatgaactgtgttttcttttaaagccacactcatggaaaatcgaagttcagaaccaaggaaaatcgaagctaa

SEQ ID NO: 181945 - DNA, 132 bp, Arabidopsis thaliana landsberg
caaaaccagcagtaattttgtggttcatcctttactcatcagtggccttttggtattcagccacttaaacaataacacgataagtggagaaattcctgttgagctatccaaattgcccaagcttgttcacat

SEQ ID NO: 181946 - DNA, 515 bp, Arabidopsis thaliana landsberg
gagtaaagagaccggtctacccgcgtcagtacatgttcgagtttgcaacaagagttttaaccttcacaaggtaataatgataatcaaatctctctctcaagaaattctgttttcaaccaatacatgtagcttagtggtttttgttaatataatgccttattttttttgtttatcttttgtagcgtctcttgtgtgcaaagagcggatattttaaggaaagagaggatcagctatcggagatcgagataccacaagagtttcctggtggagcacagacctttgagaagattatgcttttcatttatggctgtccaactttaatacatcctttcaacatcgctggaatacgatgtgcagctcaatttcttgaaatgacagagcaacattcgtcgggtaacctctgcgagagatttgacctttatctaaaccaagttgtcttgcaaaactgggatgacacgttagttgttctgaacaaatgtcaggatctagtgccttggtctgaagatctactcctc

SEQ ID NO: 181947 - DNA, 925 bp, Arabidopsis thaliana landsberg
atgggtcgcagcagttcgaagaaaaagaagaaacgaggaggtagcggaagaaggggtcagctgaaagaccatggatctaatgctgatgaagataatgaacttctatctgaggagatcactgctctgtaagtttgaacttttaatttctgtggattttgtgaaacgagttatttaggcaatgtgagatttagggtttttgatgatttgtggttaatttttgatttggaggggcatgatagaagttgctatgacctttaaagttgtgctgtgattagaaattgtgtaaatgttgggattatgggatttgatcgttcagatgttacagggaaaaacaatagcaattatttgtaaatgttgttaaagacgagcagttttaatttacaccacaatgaaatcaggaaaagaatgagtctctatatgaattctaatagtaagaactaagaagtatcggtttttgttttcatgttatcagctctgcaatatttcaagaggactgcaaagttgtttctgattcgcgttcgcctccgcaaatagcaatcaagctcaggttttcttctgatcaacatgtttgcattcaagtttagctgttgtgatttttcttttttgtgcatgtaaatgcgtctgattcaccaaggtccttgtaattcgagtaggccgtactcaaaggacatgggatatgaagacaccgacatatctgctatgcttatagttaggtgagtatcttctttccgaaattatgaaataattaacatgttcatctttttattacttcttctaactagtttgtccttttaggtgcttaccaggatatccttacaagtgccccaagcttcagattactccagaacaagggttgacaacagctgatgctgagaagcttttatctcttctcgaggaccaggcatgggaatattttttatactga

SEQ ID NO: 181948 - DNA, 434 bp, Arabidopsis thaliana landsberg
atggtggagagtacgaatcagccattggacaagaaacgccgtttaagaatggcccttgatgttgtaagactctgatcttccaaaaacctcctcacaatgaaagaaaaacatatgaaaggctgagcatattcgggttctctgttgttgttgcaggctaggggaatgaattacttacaccgcagaaatccgccaatagtacatagagacttgaaatcttccaatctactcgtggacaaaaactggaatgtgaaggtacaaacagtttcctcaagttacatttatgaagacttgtaatatgagtttattactacatttactttctactctttcttccctaggttggagactttgggttgtcaaagtggaagaacgcaaccttcttgagtactaaatccgggaaaggaactgtaatgtttaacaaaagccatttctga

SEQ ID NO: 181949 - DNA, 167 bp, Arabidopsis thaliana landsberg
aattcctagactcatctattgcaatattagacgccagctgcactgaactggatgttccacttccatccgactcttcagcggaaatggtacaaggaggtatgcttcccggcaatagaccaccatcctgtgggtcacatgaacttccggtcactgaatcaaccatttga

SEQ ID NO: 181950 - DNA, 90 bp, Arabidopsis thaliana landsberg
atgatgcagaatgaagctgctgttgctgcaactagttattctgatgaacttgatttccagccttcatcagggaattcccataattggatg

SEQ ID NO: 181951 - DNA, 264 bp, Arabidopsis thaliana landsberg
atggctctagtgttctcacgactaactcatgaagaagaagaccgtgaatccgcaggtaacaatcatcactgtttacttcatctgctcacgggtttccagatttttaccagggagaattccttcatctgttagttttccttgatttcttgtgtaaggttgcaccatctaaatttgacaaagagttgggatttggtatttggttagggaaagcagcgcacgatggagggacagattgtggggaacaattttccgttggaatgaaag

SEQ ID NO: 181952 - DNA, 1237 bp, Arabidopsis thaliana landsberg
atggagcattctagagtaaaacagagaatttatgctgtagaagcaatccggagacgaaaatgcacgtaggtgtcgagcgacaccactcctggtgtcgagcgacatcaatacctgacgacaattcgaagacgtaacttattgacgttttgaagatctctaaattcggcccaaaactttcgcctatgtttaatgaaggcccaacacgtttttaagacatatatattttttaggtcaatgttgagaccctaagcttggagaggctattctcctcatctcttttgtactttgggagcaaaaccctatggagactctctttggaaaagatcttctttactctttctcttgctattattgatttcttattcagactatgatttgtttttctttgatcatgtcttagtaaaccacttgttaggtttagggtttctcattagggatttatatggtttaatagatcgcccccctgctaggttatctatagaattcttcatctttaattgttcttaatgctagatctatattgatcacctagaacttgaatccagacaataaatatgtccaacataggtatctgtagttggatatattatttgatgagccgtgtttataggtgtgcaataagaatcggcctatctactaaggtgaacaattgaattcgtttagaatgcatgtttagtttaaagatctctcggcttctccggttattcttagctataggcatagggagtttcgcggaacaccactggttattccataattagagtttgagtttaaaaacggttcgataacaacctagctatcactagatctactaatcatctatctcgtgagaataccctaaacctgactcttttcccatctgatttacatcttgatatttattgcttttgtttatttcttattttataatctattggtctagcttaattgaaaaaatcataagtctattgtgtgaacatcgagagctcagtggaattcgatccttaagtactaacgacgatctcttatttgagggagtaagcttaagaaaatttgaggtatatcaaatttggcgccgttgccggagttctctttgcttcaccattagactaggtgtcgatcgacaccccacacaggctgagccagagttccttattagagctgattttcgtgtagagttcactgctgatacttcaggcactagagtcacgtcacccactgcaccgttactccttgatccacctcttaaacggctaag

SEQ ID NO: 181953 - DNA, 120 bp, Arabidopsis thaliana landsberg
ccgccggtgaaagtgttgcggtggtgatccatatggaattagggtttgactgttatgatatcgaatgcacaacagaggatataaatcaatatacgaaacgagacgatccatctcttacgg

SEQ ID NO: 181954 - DNA, 148 bp, Arabidopsis thaliana landsberg
accattcatcggtttttgttccatttttggagtaccaggagcatccccaactcttggaagcattctatactcgatcgaacaagtcgtacttacagcactcggcgcaacattgctaattgatcggcttggaagaaggccacttcttatg

SEQ ID NO: 181955 - DNA, 86 bp, Arabidopsis thaliana landsberg
cgagatttgaagcctggaaatttcgtcagtggaataaaaaaattcttgaggatttaagcaaaattaatttttatatcggaaaataa

SEQ ID NO: 181956 - DNA, 123 bp, Arabidopsis thaliana landsberg
accaatactgaacctttcattgacaagaaatatattgccaccgaacctgatgcatctttcataatcgggaatgagagcaccgtcaaacacaccaaaaacataagtataagtttggaaaattaa

SEQ ID NO: 181957 - DNA, 380 bp, Arabidopsis thaliana landsberg
atggttgatctcagtaaagacttacaatttttccaggtctttctccctgaattcggttctcacgaactggtatacttgttttatatgtcatcagtttattcttataatatcaaaatatattccatgcggagattaatttacaaaaataaatctgcaggtgattcctccagcattcatcgatatgttagagaagccattacctaaagaagcgtccttagtcgatgagattggacggttatggtgtgtagagacaaaaacagaagatacagaagaaagattctgtgttttcttcacaaaaggttagcaaagtttcgcaagcgatcaatctcttgaatttggagactttcttgtcttcagctacgacggcgattcgagattaa

SEQ ID NO: 181958 - DNA, 437 bp, Arabidopsis thaliana landsberg
atggcccgagcatcatcacgggctacctcggcgcgatcgcgatcggtgccgcgctcctcgcttggacggtcgcggccagtgccgccacttcgacgacgctgctcgcgggtgcgttcggcttcgcgatgctcatcggcctattcctcgtcggagagctgcccgcgtcgttccccgacctcgcgatcgatcatccaacgctctcacacgcgctctccgcgctctcgctgcgcggcgagctgacgacgttcgcacgcggtgagctgtcgctccagtccgtcgtgttcgtgctcgggctcgccatcacgggcctgtcactcgcgatcgcgttcgcatgtgcgggccggcgcagggtcggtgaaatccgccggcgcttcctgtcgacgctcctcgtcgccgtgatcgccctcctggcgggcgtgctgttcacgcgccacccg

SEQ ID NO: 181959 - DNA, 62 bp, Arabidopsis thaliana landsberg
atggcgatgaagggttatttggatgagtatgaaaagcttgttattaggatgaacactccaag

SEQ ID NO: 181960 - DNA, 552 bp, Arabidopsis thaliana landsberg
atgaccaagactattacctttatgacgctaaccagtcaaaacctgcattctaaattcaaacacataaggcatgtatgtatgcacacatgaacacatacaaaacctgtattctaaattcaaacaaataaggcatgtatgtatgcacacatgaacacatacataattaaaaattacaaggcttacaataatgtgaagccattatgtctcaccgaaaacacctaaatcttttcattcgcctctgtaattatggataaagaagatgtaaaaccaaaaaagaaaaacgattgaattcaattaagagtaaaaattctaggcttgatttcatacctttgaaaacttgagtgccctctcgtaatccagcggaagtacaaaaccctcaataccacagaagaaaggaagaaaaacacatttgatagaaatccacagatgaggattgccaatgtttctttccttttaaaagtagggttccctcttgtaaaccccaatgccatagaagagaggccaaaacaaaaaaatcagaatgatgagaaagacggatttgataaagattag

SEQ ID NO: 181961 - DNA, 310 bp, Arabidopsis thaliana landsberg
atgtcgtcccctgatgattcactctctcgcgcttcgattcctttctcatgggaagaagaacctggcaagcctaaacaccatgttcgtcatccttcttactccaagtgtcttgatttgccaccgaggatgctctttcctgacgaatttaccaaaatgcctcggacagcgaatcatggtcgttatctcgccgggtggaaacggtggttccggtggaagaaagagagagatggtgatgcttatgtggccggaagtggaagttatatttatccatcggaagatgaagatgataccaagaccacaagaacaaaag

SEQ ID NO: 181962 - DNA, 131 bp, Arabidopsis thaliana landsberg
gaagatggctcattcatcatcatcgaaccgtttttctccacttttctccattcaatgtttcgtcctttggttcaacgtgtcgagttcgggttgatccacacaaatggctaaatttgatggatcccacataa

SEQ ID NO: 181963 - DNA, 57 bp, Arabidopsis thaliana landsberg
atggtatatgaacgaagatactattcccgagaccgagaagatacctgcaaatcaaag

SEQ ID NO: 181964 - DNA, 570 bp, Arabidopsis thaliana landsberg
ggtttctggccaacaagctgtggtgcagccttctcctcctgtgccgcgactcaatggcaaaattgctggaacacatcgcaaacagaaggtgtttgcccaacaagcagttgtgcagcctcgtcctcctgtgctgccacttaatggcaatatcgctggcacacatttcagacatgagtcgtttggccaacaagctgtgttgcagcctcttcctcctctgcggccagtcaatggaagtattggtggaactcattttagagataggttgtttgaccaacaagtacttgtggagcctcgtcctcttctgccgccattcagtggcagtatcgctgaaacgcatttcagacataggtcatttccccaagaagcagttctggaccctcgtccttctgtgcagtcgcgcaacgtttactcacaacaacttcaccataactacagaaacggtttcagcggtcctcctgaagaacattacagcaaaagactttgtttgggaaaccgctacagagctctagaagaaacgggtcactgtagagaggaagagagatacgaagatcccaaaggaaaacgaagcag

SEQ ID NO: 181965 - DNA, 318 bp, Arabidopsis thaliana landsberg
  unsure (1)..(318): unsure at all n locations
atgtttgagccacttattcatatttcgcaaggtgacagcgaggccgatacttgtcgtaaggaggtaactccaaggctttaccaaagnnnnnnnnnnnnnnnnnnnnnnnnnnnnnnnnnnnnnnnnnnnnnnnnnnnnnnnnnnnnnnnnnnccgagacgctaagcggcgggcaggtaaaagagcagattatatccttcgctattcacagaactttcctatcgcggtaatagaagccaagaaaaaatggaaaacggcaggagatgctatgggacaaccaaaactctacgccgagatgttaggcgtaaatatcgcttaa

SEQ ID NO: 181966 - DNA, 135 bp, Arabidopsis thaliana landsberg
gttgaacgcgttcttcaccacgcgcaccggcttggtccgcatcgcccccaccagcgccacaaaccccagcaacgtggccagcgtaaacccatacaccaccgccgcgccattccactccgtcagtgcgcccgtcag

SEQ ID NO: 181967 - DNA, 858 bp, Arabidopsis thaliana landsberg
atcttagctgcaatcacttatcaaatagtccctgctgatacacagtatgctgagatacctcttgctgctgtaacatatacacaccagaaaaaggttcgttttgctctgactcttttgacacttactgttgtaatagctttttttgtgcaacgcttttactaaaggtcttgtgtttaatagttcatgtctataagtttatgtattagatattgcatacttggttttaagtgcttcttagaactgtaaactttttctttctgcaactggttttactaaaaatagcgtgctagaaacctcatcaaaaactaaatagatgagtttcttttaatacattttcagggatttggtaagctcgtctatgaagaattaatgaagaggcttcatagtgttggcattcgaactatatattgttgggcagacaaagaatctgaaggattctggcttaaacaggtgatattatcactttatcactatgtttatggttgttggtgttttatctttattagtttgttggattcaaactaaactatcttttttaagtgctttgactgtttggtttcttatattactttacgaattttcaggggtttataaaattagcagaggtagaccacaaaggaaaagcaaaggggttgcacattaagtctaatattcgaaaagccttgtgttttcctggcggttcaactctcatgctttctcatctgaacaaggaatttatttcaaaccttgagatttcctcttcatggaaatatcagtgtgagggatctccactctcggcaagaaataatagcacaggtcctgtgactggagattcagttaaactgagagagagctttggtgaaagcgtatatcttgact

SEQ ID NO: 181968 - DNA, 71 bp, Arabidopsis thaliana landsberg
atgtatgggcatcgtactgcctctgtcgccaaaatagaacgcccaattgccgccctcctggcagccacaag

SEQ ID NO: 181969 - DNA, 223 bp, Arabidopsis thaliana landsberg
atgcgggcatgagttttgctacaattgcggaggtggatggaacaagataatggggacttgtttaaatcgctgcccaacctggaacgaagaatacatcacacgacaagatccagcgcgtgccaatgtggcagctaacaactactttgatgatgaggatgatgatgatgttgatggtgattacgactatgatacaacttccacccgcattttggacatgctatga

SEQ ID NO: 181970 - DNA, 152 bp, Arabidopsis thaliana landsberg
gtaatcaaccatgcctcttttgccgagaactagatgagtcatgggatcacttattcttcgtgcgccgatacacgttcacaatttggagcgacattgtcgggaatttgctagacgctcaacccgacccggattgggaacaaacattacaatag

SEQ ID NO: 181971 - DNA, 332 bp, Arabidopsis thaliana landsberg
gtaagaccagaggatgttttggaaaaagctctgataatggttcaggattctcaaaagaattatctttttaaatgtgatcaactaaagtctattcgccaagacctcacagtacaacggatacacaatcatttaacagctaaggtacataactgacttccaataatgtcgagtgttattgcatgtaggattcatttcctgttggaaggtttatcctatttacacccaattagcatgtttataatggttccatgtgcaatctctatttcaggtttatgaaacacatgctagattagctttggaggcaggggatttacctgagtataatcaggttg

SEQ ID NO: 181972 - DNA, 560 bp, Arabidopsis thaliana landsberg
aacgaacccccacctgcttcccgctggacccgaagcagcacatcctggtggccggccccggcgcggccagcatcccaaagcagagcggcggctgcccgctgacctggcagggtaccggcaccagcaatgccgacttcccgcacggcgaatcgatctggagcggtatccacgcccaggtgcaggcggccggcggcgcgcccgagctgtcggtgcatggcaagtacgcgcacaagccggacgtggcgatcgtggtctacggcgagaacccctacgccgagttccagggtgacgtgcccacgctggcgttcgcgccgggcgattccaccgacctcgacctggtcaggcgcctgcgcgcgcggggcatcccggtggtatcggtgttcctgtccggccggccgttgtgggtgaacccgcagatcaacgcgtcgaacgcgttcgtccccgcctggctgcccggttcccagggcgctggcgtggcccacgtgctgctgcgcaacgccgccggcaaggtgcagtacgactaccacggcaagctggcctattcgtggccgcgcagcgcg

SEQ ID NO: 181973 - DNA, 339 bp, Arabidopsis thaliana landsberg
atggatgagcagattatattctgtgatggcttcgaggtggttccttcgcccgagataaacgatctaattctttacgaatgcgaccaatctttgacaaatagcgaggtcaccaccgacgaagaagaagacactattttttccggtggtgatagttcatcgggacttgcagctgaagaggattcgtctggagataaacctctctctttctacattgttaagcaacctgtttacgataatcccgagattaaagccaagatcgatgaagctaatcaggagatttttcgttgtaatgaactccgaatcaatgtcttgagcgccaagaaatccgaactggctgag

SEQ ID NO: 181974 - DNA, 414 bp, Arabidopsis thaliana landsberg
cttccgcttcgtgcgcgtgggcggtgccacgccgttcgacgatgatgaattctccagcctgaagaattccatgctgttccccaccatcctcaaccgcaagccggtgtggtcgaagcagcccaaccagcatggcgacctgaccgagcagggcctgttctacgccaagcgcatggccgagcagctggacaacccgcccgaggactggctggtgttcgacgagcgctacaagacgccgtccatcgagccggccgcactggagccggacaacggcaacggttggtacgacccggccagcggtacgctgtatttcgtggtcgcgacccagtgcccgttcgaactggcgcaggaatgcgtgcacatgatcaaacagtcgcgcttcgccctgaacacgctgaacatgcacccgggctatgc

SEQ ID NO: 181975 - DNA, 1743 bp, Arabidopsis thaliana landsberg
  unsure (1)..(1743): unsure at all n locations
atgtcgttaactcgacaacttctattcacttactacttcatcgtctttcttatccttttctccgatttcgtatcctctgcgacattaccaggggaagaaggtaccaacttatacaaaagtttatgtctttgtacgtatatgttttattcggtgtaatgatttggtccaatcgacaatttttgaaattggcagtggatgctttacaaagcgtcgcgacggcgttgaagaagagtaattggaatttcagtgtggatccatgtgacgaaaccttgtctgaaggcggatggaggaatcctaacgccgctaagggattcgaagacgccgttacttgtaactgctcctccgtcatctgccacgtcaccaacatgtgcgttcttctctctttttcaacatcctatcttttctttgtcaaaattatcattaatatctagttttaaatattgaagaaattcaattatattattaatggaaaaaaataaaaaaaatcttggtctcnnnnnnnnnnnnnnnnnnnnntcaaattattgaagtactgttaaacccacttgtttttaatttaataaagtaggtttagatgcttgaacgtggacaatttattaacgccgtcgctattgacctttttctgacgcgtccgtgaatcttgttttggtcgtttttgacgagtccgtgaatttccaaagtaaaaactagtcgacttttacttttaaattatttttttactttcgtgttgggtcgaaaacataatgggcctataatttcgaagaccgttttttaaaaactcgttctgttttttttctttccctcgtaatattgaaacagagttctcaaggcacaagaccttcaaggatctcttcctacagatctttcaggacttcctttcttgcaagagctgtaagcagaagattcactcaccaatgttactattattacaacatctgctgccactcttagtatctctcattaactattcttttatcttcagtgatctgactagaaactatctcaacggttccattcctcccgaatggggagcctcatcacttctaaacatgtacgtatagataattagatatagactcattgatttgatatatatgtataaatatagattgatttgagtatgtttgtttgttgggatgatgaaaatgcagctcactacttggaaaccggataagtggttcaatcccaaaagaacttggaaaccttacaaccctttctggtctgtaagtacacttctttgatctcgatcttcaataatgtttctcaaagtttttttttttttttcctttctatctttaatttcctggaacatttggtttttagtgtcttggaatacaaccaactctcagggaagatacctccagagctcgggaatctaccaaaccttaaaagactgtatgaatatttgttccaatttcttccaaactgttccttttttcttctgttaacaattagttattggtctttgctggctggtgttgagactatgtttaccctttttaggttacttagctcgaataacttgagcggggaaatcccaagtacattcgccaaacttactacgttgactgatttgtaagtattcctgtgttcttatttgatccgtggaacatatgtgttgccgaagatttctgactttttctttatatgtatcttcgtcttggtttatagacgtattagtgacaaccagttcactggtgctataccagatttcatccagaactggaaaggactagagaaact

SEQ ID NO: 181976 - DNA, 43 bp, Arabidopsis thaliana landsberg
atggacgacgcccagtttgagcgaagccgtttgtttataggcg

SEQ ID NO: 181977 - DNA, 2555 bp, Arabidopsis thaliana landsberg
tatcttccacaagattgcacaagttctaatggtctaaataaaaaatgccgcaagatttttctaacagatggaggggatagatcatgggaaatggatctgaagttcgacaaaaacttagatagtttttgcataaccagaggttggagacatttctgtgacgaaaacgggaaaaaggtaggaagtttttttgtgttaaactagtgggaaaaggtgaaacgctggtgctcagtttctgtcctacagaatctatcaatggggaagagaacattacaagggaggacagtaaagaggagtgcagctcgttggactcattgatgaatatagtagaaaaaaagaagtatattccgaaaccaagaggttcaccatattcatcatattcaccaagtcataaacaattcgtaacatttacgcttccaccggattatgctagaattggaaaattggtaagtttatcaatgacaactcttgattctgcgcttattagttgtgacgcatgttaaatcggcttttgttcaaatatctacagagtctttcggcgcctttcgttagggaaaatggcatcaacaagcctggggagatatgtcttttggataaacatggtagaaagtggttgacaagtcttctgctggacagtaaaggaacaatgtctttgggaaagggttggaaagagtttgttaaagcaaacagcttagagacgggcttcacactcaagttgatatgggaagaaacaactcctgtgcttagtttgtgtagtccagaatctaacagtgacagagagcaggaagagatttcaaaagctatcgagaaacattctcttttcatagatcctagcaacagggacaaaatcagcaacaatgacaaagaggagaacatgtcatgggagagaaagaaggatcatctgaaaagtagagattcaactctatcaagccaaaaacaatttgtaacaataacaattacaccttccagtgatagattggtaagtttatcaaatgactcttgtttagtggttgttagtttattgtactttgatatggttttgataaactattttgctttaactgaaatcttcaacagcgtctcccaaaggtattcacgagggagaatggcatcaacaagccggggaggattactctgttgggaaaagacggtataaagcagcagacgaatttgttattcgacaaagcaaatggtgccatgtctttgggacacggctggaaagattttgttaaagataatggcttaaagacaggtgactccttcacgctaaagttgatttgggaagaccaaactcctgttcttagcttgtgtcctgcagactgtagcattgacagagaagcaggaggagggcgatctgaaacaaaccagaaaaagtctcttccaatagaacctagcacatgtaaaaaaatcaggaaagacgtgaacatcaaagatgacaacagcaaagagaaaaatgacaaagaagagagcaaatcagtggatggagagaggaaatatctgagagggacatatttaactccatcaagccaaaaacactttgtgacattaacaattacaccttcctctatcaaaaaagatagacttgtaagtttatcaaacaactcatttactcttactggttttatcccataacaagaggttattaattttaccctcgtttcatattttttccagattctttccccacaatttgcaaggaagaacaatattgacaagcctggaatgatatatctgctggatacagatggtacaaagtggctgataagccttcaacgagataagaaaggaacaatgagtttgggaaaaggttggaaagaatttgctgaagcaaatgactttaagttaggcgaatcctttacgatggagttagtatgggaagacacaactcctatgctcagtttgttacgtaccgagtttaggagttcaaaagctaacgagaaagagtcaatttcctcagaacataaaaccagagaatcatccccaacaatcaaaaaccgaatcgtgactccagcactcacacctgaagatgttaaagcctgtaaattggtaacttcatcaaactactcttgtttttcagaggtgagatagtttctctcttgaaatcataactgataatgagagatgtgttggttcaaatcttttgcagattcttccaagtcaattcatgaagaagatcaggacagtggataaagagaggaatcatctaaaagggagagatttaaatccatcgtgccaaaaacaatttgtaacatttacaattacaccaacctgtgtcggaaaaaataggctggtcagtttatcaaacaactcttgcttcagagaattagtttttttctctattttactcttactggttttatcacataataagagtatcaatttgttttctagattctttcagcgcaatttgcaagggagaacaatattaaccagcctggaacgatatatctattggatacagatggtaggaagtggctgacaacggttaaacgggacaagaaaggaacaatgagtttgggaaagggttggaaagagtttgctgaaacaaaagacttaaa

SEQ ID NO: 181978 - DNA, 293 bp, Arabidopsis thaliana landsberg
aggatgtaaggcgaaagactcaaaacagtggtgtaacatatgaagctttcagtatgtgtagatcaagtgccaaagatactggacaccaagcagacatagtagcattttacggagtgattaaggatatcataatgttggactaccacatgttccagattcccattttcaattgtagttgggccaacaaagggaatggtgtgaaagaagaagatggatttacacttgtgaatcttcatttgagtcaagttgcgtttctgcaagatccttacatcctggcatcacaagcaaaataa

SEQ ID NO: 181979 - DNA, 125 bp, Arabidopsis thaliana landsberg
gtattacgacgatgctgcttgtgtgctacggaaaatgtttttggatgcaaaggctcctcatctttcttcaacaattcctcccattctgccatggaaaatcaacgtacctgtccaatctaatgaag

SEQ ID NO: 181980 - DNA, 207 bp, Arabidopsis thaliana landsberg
atggcggaggaggcggcggtaatgctacaataggtggagacggtttaacaacagaacgaccacaaccaaaagatccacaatccaccgaaggccgtgacaagaaagctgaacattgccgtgaagatctctgagcaggtcttccgggcaaacaatttctccgatcatcaaactcagacaacctcaaacacacaggagcttcaccagtaa

SEQ ID NO: 181981 - DNA, 488 bp, Arabidopsis thaliana landsberg
gttcaagtcagatgaggagaggacaccggtttcccgcattgtggaggaaacatttcctcaacttttgactatttttaatgggcttatccagataccaaatccgtctctggagatagcagaacttatgaagttgatatgcaaaatattttggtcatccatatatgtaagttgctagagagatcagttacatatgcctctgcggaatttcacattttatctttcttaacataatatgcatatccttaaaacacaattcaaaccagttaagctgtttaatgtctttttactgttctctgtgggcagctggagcttccaaggcaattatttgatctaaacgtctttaatgcctggatggttctgttcttgagtgtttcggaacgtcctgttccagttgaaggtcagcctatggatccggaacttagaaaatcttggggctggtggaaggtcaagaagtggacagtgcacattttaaacaggctctatagtcg

SEQ ID NO: 181982 - DNA, 72 bp, Arabidopsis thaliana landsberg
ggctgcgaaattcggattcgttcgaatcaacaaaacctaagatttgatggcttctttggtcgccttcgttga

SEQ ID NO: 181983 - DNA, 167 bp, Arabidopsis thaliana landsberg
acagccttgcgctgagctatggcccggatgccaaagaactactgaagtacgcggaagcggtcatcgtagtctttgctgccgatcagcctctgaccgaagaggataaaaaattcgcagcatttctccgggaccaccaggtgctgaccttaggggctgtattgaacagg

SEQ ID NO: 181984 - DNA, 1132 bp, Arabidopsis thaliana landsberg
atgacttgtctcagatgtttgggggattgtgtcatatgggaagaatcaatcgatgaacgaccttgggagaaagctagatccaggtagtgttgttattcaagagttgaagtcttaattctgtttaatgtttgactaataaacctcatttttttctgccacagttctccatttagagtaaaggaggatgatgaggttgataatttagagataaagttcagtaaaaggcgaaaatcgaagcggatttatcagtcaccaactcctgaagttggacaaaagatcagccgatctctaaaagttagcttcattcatatacacttcatgttattctactctctccatgggaaattgtcatagtcagtccaaattatggtttttatagagtctcaatgccaaaactggactttttagtaagcgcatgaagattatacatcgtgatccagtgcttcatgctcaaagagtagctgcaattaaggtctgtaatctactccattttgttttatatcctaaattaacatggaacaagttttgttgtttttttcccttgaatctgcttagtgttgttgtgttctagaaagctaaaggaacaccagctgctagaaagcatgcatccgaatctatgaaagctttcttcagtaaccctgtaaaccgtgaacagagaagcctatctatgaaaggtaagtctcagtttcttggtagaatttcagagtttaggtccatgtagtactcttttgtttcttgagctttatctgtttacattctccaataatgtgagatcactgtgatgaattaggttgaggcttgtcacttaaagttgagatataatgttgattcgaagtgtagaaatgtaggtttcgatttgatttccttttgtggtgacagttccatgtgcaagctatgaaatggtaaaagaaccatttttctctcattgattcaggaactaagttttactgcaagaactgtggacaggaaggccatagacgccattactgtccagaactaggcactaatgcggacagaaaatttagatgtcggggttgcggcgggaaaggccacaaccgtagaacttgtcctaagtcgaaatcaatagtcactaaaggcatttccactaggtatcacaaatgtggaatatgcg

SEQ ID NO: 181985 - DNA, 450 bp, Arabidopsis thaliana landsberg
atgacgactaataagcccggcctgcggctcttcctggcgtccgcgctcctcggcgcggcgccggccgccgcgaacgcgcccggcggggcgttcagcaactgggtggcgatgaaccagcagagctacgcgctgtacgcgcagaagtccgtcggggacgggggcaaggagcccctggacaagaagctgtcggaggcggagaagaagaaggtcacgtacgtggtggaccccagcggcaagggcgactacaccaacatcaccgcggcgctggaggatatcccggtgagcaacaccaagcgcgtgatcctggatctcaagcccggcgctcagatccgcgagaagctgttcctgaacatcagcaagccgttcatcacgttccggtcggaccccaagaagcccgccgtcgtggtctggaacgacactgcggccacgaacggcaaggacggcaagccg

SEQ ID NO: 181986 - DNA, 2136 bp, Arabidopsis thaliana landsberg
gattgcagtatttgcataacgcatgtagacctcttatggtacatagagatgtgaaaccaaccaacattttattaaatgagcggtctcaagcaaaactagccgactttgggctatcgagatcttttcctgttgatggtgaatctcatgtcatgacagtcgttgcaggaacacctggttacttagatcctgagtgagtgaatcaatctgtttcttgtactgaaataagttatgaagaattgggaactgtaacctctctttatgatactcttcttttcaggtattacagaacaaactggctaagcgagaagagtgatgtgtacagctttggtgtagtgcttttagagatagtcacaaaccagcctgtgatgaataaaaaccgagagagacctcatatcaatgaatgggttatgttcatgctcaccaatggggatatcaagagtattgtcgacccgaaactgaatgaagactatgacacaaacggtgtgtggaaggttgtagagttggctttagcttgtgtaaacccgtcttcaagccgtagaccgacaatgccacacgtggtgatggagctaaacgaatgtcttgctttggaaatagaaaggaaacaaggtagtcaagcgacgtacataaaggaatctgttgagtttagtccatcttctgcttctgatttttcccctttagctaggtaaaagtctttgtgttatcaagctttgttgtttattataatcgattgttcatattgaaatgtttaagatagttctgtgaattttcttcaaaatgtattagcctttattatgtgtaacattcttggattccaagaaatttatatctttaatattagtttatgtatgtgtcatcaacgcatggtcttggatgctcttttttgattactctgttctcatgattttgaagtaaaagtttgcaagaaattcggactcatacaaattcaaagtgaacgcatgaaagcgttgttggagtcaaatgtgacatggtccgtgtataattcactagagttcatatcacatacaaaaataaacgtgcctccataaaaattaaaatttactatctgatttaaattgactgattcatttaaaatctgctaaagttttttaacctataaataatgtaacaattgatttcacatctttttttagaagtctacctaataatatacatttgaaaattctccaacgcctgaaagcggaaagaatgtcgtagacacgtaatgtgttactataataatcacctgaataaaataaaagaatctaatgttgaagacttagcacacagcttacacaagctatgaatgccaaatcaattgaccaatataatgttatctcaatacttgccagtcaagaacaatgatcaatgaataatcataacctccctgaatcagagcactcactgcaaaaaaagaagaagatgaagtctattcatgggtttttgctcttcttgatcacagcttatgtcattttggaatcagttcaagctcaagatcaattaggttcttactttttgtttcttcgattactctatagattaagaaacccttttggaatttgtttctttaaatttgttattttggtgttgatcgtcaacaggattcatcagtttggattgtgggttagtccctaagaacgcaacttatacggagaagacgacaaatataacatacaaatcagatgcaaattacatcgatagtggattggtcgggaggatcagtgctgagtacaaagcggcgcttcagcaacaaacttggaccgtaagaagcttccctgagggtgaaagaaactgttacaacttcaaccttaccgctaaaagcagatatctcatcagagcaacctttacgtatgggaattacgatggtttgagacaagtccccaagtttgatattcacattggtcctagcaaatggacttctgttaagttggatggagtaggaaatggtgcagtcctcgagatgattcatgtcttaacacaagaccgtcttcaaatttgtcttgttaagacaggaaaagggataccatttatttcgtcgctggaacttcgtccgttgaacaataatacttacctcacgcaaagtggatcgttgattgggttcgcaagagttttcttttcagccactccaacattcataag

SEQ ID NO: 181987 - DNA, 524 bp, Arabidopsis thaliana landsberg
aatctgagagctgaaactcttgacgaacatgagaaaattgaaatttatatcaaggtaataattctaaacattaagctgattttacattcactttaggcttgttagtctatggttttacattcactttagacttgttagtctctggttttacattcatttattcttgtgatatgtgtaatctaaactatcgttttagataacttgtaatgttttctttttttggtaatatatttggtctttcattctaggctgctggatcatctaaacatggccatatatttggacttggagcactaatggagactctaccatctgttggggcttcttcaaatgcaccacaagcttctgaagaagtagagacgataacgtatgggtacaagggatggaaactgatcttcaaaagagcctttaagagaatttgcaaattcagaaaagacttgaagctattgaaaaacttgttgattctcttgcaagtcaaaatgtctagatccaaaaccaccaccaagaccgtccacttaatctag

SEQ ID NO: 181988 - DNA, 634 bp, Arabidopsis thaliana landsberg
gttttgaatttaaccagagatcgttctcaatttctcaagctagcagaagaagaagctaaagacctttgttcttggttaagacagcttcttcagggcttcttttgttttgaactggtacgtgtgttaatcttcctttttcgtgtgtttgttatatactagtactaattagtaattactatcctgagaataaacaaaattctatatttggtaatatttcctatattagggttaaacgaatgatgattgttagaagcaaattagttgcctttattattagggtatagttttgattttagctactgaatgttgttcctcataaaaggtagaagaacttagcttaatttggtatataagatctttgattacattatagtcttattatggtgtagaagaatcaattcatcagatggctggaagtggaagttgggatggaagccaatcggataacagctcacaattcgagccagggattgataacatatacgaagcttttatctgtccattgacaaagcaagttatgcataatcctgtcactttagagaatggtcagacatttgagcgtgaagctattgagaaatggtttccagaatgtcgtgaaaacggtcaaaatctatctatatcctataacttctaa

SEQ ID NO: 181989 - DNA, 1752 bp, Arabidopsis thaliana landsberg
attcttgtaactgggttctttcacgacagcttccaacatttgggaagatcaaacctcatctgcatatgtggagagttgcgtgtccccgccgaatttctccagatgggggtttatcgttgcttccttcctcctcaatctcctggggtggtgaacctttatcttagtgtcgatggaaacaaaccgatcagccaattgttcagcttcgaacaccgctcagttcagtttatcgaaaaagccatccctcaagacgaccagctatacaagtgggaagaatttgagttccaagtcagacttgctcatcttctgttcacttcttcgaacaaaatcagcgttttaactagtaaaatatcacctgaaaaccttcttgaggctaagaaactcgccagcaggacttcgcatctcttaaatagttgggcttatttaatgaagtcaattcaggcaaatgaggtaccgtttgatcaagcgagggaccatctctttgagcttactctgaaaaataggctgaaagagtggcttttggagaaggtcatcgaaaaccgcaacactaaggaatatgactctaaagggcttggagtgatccacctctgtgccgtcctaggatacacttggtcaatccttctcttctcctgggcaaatatatcgttggatttccgtgataagcagggttggactgctcttcattgggcagcatactatggaaggtaaactaacttgcatatttcaaggactatgagatttgctaatcttgtatccgttttatttaatttactttttgaccaagttttattttttttaaagggagaaaatggtggctgctcttctatctgcgggggcaaggccaaacctggtgacagaccctactaaggaattcctcggcggctgcacggcagctgatctggcacaacagaaaggttatgacggtttagcagcttttcttgctgagaaatgtcttgtagcacagttcaaggacatgcaaacggctggaaacattagtggcaaccttgaaaccatcaaggcagagaagtcgtcaaatccagggaatgcaaatgaagaggagcaaagcctgaaggacactctagcggcatacagaactgctgcagaggcagcagcgcgaattcagggagcgttcagggagcacgagctgaaagttaggtcaagcgcagttaggtttgctagcacggaagaagaagccaaatacatagtctccgcgatgaagatgcagcacgcgttgggcaattgtgaggttcgtaggaagattgcagccgctgctcggattcagaataggttccaaacatggaaaatgaggcgggaatttctgaacatgcgaaagaaggcaattaggatccaggtacaagcgaaagctaatctttctaccgtctttaagaaaagaaacgagaaactatctgcaaccgtataaaactgttctatggttttgaatatgacaatgttttgcaggctgcgtttagaggtttccaagtaagaagacagtaccagaaaataacatggtcagtgggagttcttgagaaggcaattctgagatggagactgaagagaaaaggattcagaggccttcaggttagtcaacctgacgagaaggaagggagtgaggcggtggaggatttctacaagacaagccagaaacaagcggaggaacggcttgagaggtcagtggttaaagtccaggccatgttccggtccaagaaggctcagcaagattacagaaggatgaaactggctcatgaagaagctcag

SEQ ID NO: 181990 - DNA, 3320 bp, Arabidopsis thaliana landsberg
  unsure (1)..(3320): unsure at all n locations
atgatatcatccctctccgggcatggcaaggaaaaggctatacgacatcgttttgactgttgggtttctgagtctgatgaaaaaaggttttgtgccctagaaaaatgggatggtgtgaggtgttggattttgactgagaagagaagagttgagttttgggtttgggaaagtggtgattgttataagattgaagttaggtttgaggatattattgaaactcttagttgttgtgttaatggtgacgcttctgagattgatgcatttcttctcaaggtaaatttgttagtcctaatgtgttttgcgacaatgtgagtctgtgttgagtttatttaggagttcaggttctgtgaaaatgattcaagattgagttttttggttagtcatatgtttatgcatgtattggttctttgaatcctctgtgacagctttatggtttgatgaacgtgcatgagattgagattggattgatttgtatgcttgtgttttatcttggtctcttctgatttcttttagcttacatgttgttttatgttgcagctgaaatatggaccgaaggtatttaaaagagtaacaggacctcacatagccacaaagtttaagtctgatcggtacagattctgcaaggaggattttgatttcatatggattcggacaactgatttctctggttcgaaatcaattggtacatcaacttgcttttgtttggaagtccacaatggctcaacgatgttagacattttctcgggcttaccttactaccgagaagacactttgagtctaacttatgtggatgggaagacctttgcttctgcagctcaaattgttcccctcttgaatgccgccattttggggttagagtttccatatgagatccttttccaactcaatgcgcttgttcatgcgcagaaaatcagtctttttgctgcgtcagatatggaactgatcaaaatccttcgtggtatgagtttggaaaccgcattggtgatcctcaagaaacttcaccagcaaagttctatatgttatgatcctgtcttctttgtcaagactcagatgcaatctgtggttaagaagatgaagcattcccctgcatcagcttataaaagattgaccgagcagaacatcatgagttgtcagagagcatacgttacaccctcaaagatctatctgttgggtccagagcttgagactgcaaattatgttgtgaagaactttgcagagcatgtctcggatttcatgagagttacttttgtggaagaagattggagcaagcttcccgcaaatgctctctctgtgaactccaaggaaggctattttgtgaagccctctagaaccaacatttataacagggtgttgtcaatccttggagaagggattaccgttgggcctaagaggtttgagttcttggctttttcagcgagccaactgcgaggaaattcggtctggatgtttgcttctaacgagaaagtaaaagcggaagatataagagaatggatgggttgtttccgtaaaatccgaagcatttccaaatgtgctgctaggatgggtcagttgttcagtgcttcgcggcagacacttattgtccgtgcacaagatgtggagcagattcccgacatcgaagtgacaactgatggtgctgattactgcttctcggatggcattgggaaaatttcacttgcatttgccaagcaagttgcacagaagtgtggattgagtcatgtcccttctgcctttcaaattcgatacggtggctacaaaggtgtgattgctgttgaccgcagttccttccgaaagttgtctctgcgtgatagtatgcttaaatttgactcgaacaacaggatgctgaacgttaccaggtggacagagtcgatgccttgcttcttaaaccgggagatcatttgccttttgtcgacccttggaatagaagatgcaatgtttgaggcgatgcaagcggtgcatttatctatgcttgggaatatgcttgaagaccgcgatgcagcacttaatgttctgcagaaattgagcggagaaaattccaagaatttgctagttaagatgctgcttcaaggatatgcaccgagttcagaaccttacctctcaatgatgcttcgtgtgcaccacgannnnnnnnnnnnnnnnnnnnnnnncagatgcaggatacttgtaccgaaaggacggatcttgatcggttgcatggatgaaatgggtatcctggagtatggccaagtgtatgttcgtgtaaccctgactaaagcggaactgaaatctcgcgatcagagctactttcgcaagattgatgaggaaacatctgtggttattgggaaagtggtcgtgacgaaaaacccatgtcttcaccctggagatattagagttcttgatgctatatatgaggtccatttcgaagaaaagggatatctcgactgcatcatctttcctcagaagggagaacggtacaataaatcaatcctttagagttatgcaccataagataaaccatatgcttctgattcttagtcccaacttagttgatggtttgtttctccttggtttttgttgactccacagaccacatccaaaatgaatgttctggtggcgatctcgacggagaccagttttttgttagctgggatgagaagattatacctagcgaaatggaccctccaatggactatgctggaagcaggcctcgtctaatggatcatgacgtcacgttagaggtttgtttcttgaaaaggctttcatgatgtgaaagtttcctaatctttggagctaagctgattctctttctttcactctgctttgtaggaaatccacaaattttttgtggattatatgataagcgacacgcttggggtgatctcaactgcacatttggttcacgcagaccgtgaccctgaaaaagcccggagccagaagtgtctagagttagcaaatcttcactctagggctgttgattttgcaaaaactggagctccagctgagatgccttatgccttaaagcccagagagttccctgattttctggaacggtttgagaaaccaacatacatctctgagtctgtgtttgggaaactataccgtgctgtgaagagctctctagcacagagaaagccagaagctgagagcgaggacacggtagcttatgatgtgacacttgaagaagctggctttgagagctttatagagtcagcgaaagcccatagagacatgtatggtgagaaactgacctcgttgatgatatactatggagctgctaacgaagagaagattctaacaggcattttcaaaaccaaggagatgtatctggcgagagataaccggag

SEQ ID NO: 181991 - DNA, 87 bp, Arabidopsis thaliana landsberg
atgacagaggacggcaagactcaaggttactgtttggccacgaactttaaaccgaacccaaccaaggcaacagcaacagtgacacag

SEQ ID NO: 181992 - DNA, 439 bp, Arabidopsis thaliana landsberg
atcaatccaacctttcccgcaaacacctgccggatggaaagccttattaccggattcggtaatatcaggattgattaaaagaggagaagatgcacttggaaaagaatttaaaaatataccagcagcggttatgttagaatataaacgtaatggaaaccgtagtgattatgaaaaaatttcttttggtaacagaaatcaattatggagtctggtgctggcagaagcaatggagggcaaagggcgtttcatagatcaccctgtaaatggaatatgggcaatctctgaagaaagtttttggggagtgagtgcccatgtaggtattcagaaggctggcgtaggattgcccgatgtagaagatcctatagttgatctgttcgctgcagaaaccggggctttgctcgcatggactgattattttctaggcgatgaattaggcaaa

SEQ ID NO: 181993 - DNA, 877 bp, Arabidopsis thaliana landsberg
ataataattttcgttttatatatggaagatgctggtgaacatttacggtgtaacgataacgttaacgacgaggagcgtttgccattggagtttatgatcggaaagtcaacatccacggcggagctacagccgcctccaccgttcttggtaaagacatacaaagtggtggaggatccgacgacggacggggttatatcttggaacgaatacggaactggcttcgtcgtgtggcagccggcagaattcgctagagatctgttaccaacacttttcaagcattgcaacttctctagcttcgttcgccagctcaatacttacgtacgtatatatgcttcactgtttcaaatcagtattttaaactatttgtgtttctttgagtttactaagtgtatttgcttaattaaaggcattaatgagtgttgttacaaaaatattatagggttttcgaaaagtaacgacgataagatgggaatttagtaatgagatgtttcgaaaggggcaaagagagcttatgagcaatatccgaagaaggaagagccaacattggtcacacaacaagtctaatcaccaggttgtaccaacaacaacgatggtgaatcaagaaggtcatcaacggattgggattgatcatcaccatgaggatcaacagtcttccgccacttcatcctcttttgtatacactgcattactcgacgaaaacaaatgcttgaagaatgaaaacgagttattaagctgcgaacttgggaaaaccaagaagaaatgcaagcagcttatggagttggtggagagatacagaggagaagacgaagatgcaactgatgaaagtgatgatgaagaagatgaagggcttaagttgttcgcagtaaaacttgaatga

SEQ ID NO: 181994 - DNA, 776 bp, Arabidopsis thaliana landsberg
atggaggagatagagcaagaagaacaagatgttaacaaagtcattcttgattctactttgtcacacatagaatcaagaatagttgaacccccagtcaaagatttatctactccctccaaagacttgtccacgccaatccggctcatgagtgctacaccgacgttgcagctatctaaaagatgtattgagttgactccagagggtggtgatgataactctgttagatcaacaaatagtctggcaaggggtccatctcgcagtctgaattttgatacttttgaggaagatgcaattgagaaagatgatattggtaatgaatcggatgataaaggaatcaactatgaagaagatggccttctccagtcagtaaaaggtccatctcgcagtttgaattttgacactcttgaggaagaaacaattgtgaaagatgacattagtaacgaatctggtgatgaaaaaagcaactatgaaggtgataatgcttctgatgatgatagcctccttcagtcagtaagtgattaaagcaaccatttgctttcacattgtttccggatatattcgttttcagctgcaaacagccatccttacttaccattgtgtgtgtgtttgtgtcttgcagatgatagagagaccaaagactgaacccgagaagcacaatttgccacagcttgttaatttgattcatagagtgtttcactcaacaaatcggacagtcatcacgaaggaggagcttctttacaagattattgcaaaccaaatcaatataactgatagaa

SEQ ID NO: 181995 - DNA, 1613 bp, Arabidopsis thaliana landsberg
atgagttttggaaataatcgtactaacaattgggacaactcgtcttctcatatcagtttcaccattgatcaacccggaaaacggtccaagaactccgactttttcaccttagaaactcaggtattttctataactttaatttgaggttatttatgtatgtgtatcaatacttttagattatttttttatacaacaaagttaataaatctcggattcttctaggtaaagggagaaaagagtgaatatccccaatgttagttgttttgtgtattattagtttctataggcttggagaaggtttatgattgatctataataggttgacaacttgatactaagaaagtatattatcatatcgtatgaaattttatatcagtttaattaacttccataaagttagcaatagaattccatgttgaaatattgccaacagcaatgtctatgtcacaggttcatgtgtataaactgcttggagaaggtttataacttttcacaagtccttggcaattaaatgatttgtgtgtttaattatatgtatggtccacaagttgtatgctaacaagtgttattatatagtgcgcgtcatatacaatatgaattctacaagcccaatttaaattccatatccacaacagaattccaagttgaaataaatgccaataaagtgcaaatagccaaatttctgtgtgtagaagccagagttgagtggttgtgtaatagatataaatagcttagagaagggttatgattaatttatgtatatttttcacaagccctttgctaccaaatgatttttgtgtaaacattctcactgatgttggtttggttatgatattcattgagtggttatacattgattttcatctcaatatatatggttttgacttttagtatagcatgccgcaaacaactctggaaatggcgacaatggagaacttgatgaacatcccagaggactcggtgccttgtagggctagagccaagcgcggcttcgcgactcacccacgcagcattgctgaaagggttagtttattctattattatggtgattactattgcataagtctagatacaaacttaaaaggtgaattcatttgaaaccaaagaaaacaagagtaaaaattaggttttatatatgatttggtttgcgtgtttgtggtatataggagagaagaacgaggataagcgggaagctgaagaagctacaagaacttgtgcctaatatggacaaggtaagtgatattatttctgtttttaatgtaatgttggtgtggttttacatatctataataagtttgaaaaatttggcagcaaacgagctacgcagatatgttggatttggctgttgagcatatcaaaggtcttcagcaccaagtagaggtgcgtccttagatacaaaatgaatctatatatgcaaaagtgacattttctcaaattgaagcaaagggtgatcatattccttctatgttgggaaaatgttaccttaaagccaaattttagtattttagaaaatagttatattaatataatggttagttattgtccaatatgatcataaccatggatcaaccatttactcggacgtgttttttttcttccagaaaatttcatga

SEQ ID NO: 181996 - DNA, 457 bp, Arabidopsis thaliana landsberg
atgaatgcgtgcatctgggtacaagagagacttgcagctggtgataggctctctgtcctagctttcttgaggcgccttactgaaaccgttactgatgtcgagaaaaaagaaatggtatatatagtctctttcatttctgagagctgtataactatcatttatcattcccggtatagtgtccacttgtgctctgactttcttacattttccgtgactactacacaatataaaaggttgcagtgttttctgtctttgatacacactacttgttttcccatctctctcatatacacagagacacagtacatatggatcttcttcctacccctctcgtgacatgaaaaataaacacatatcacaaaactttcaaagaattacggcgtcaaaagaaaaacacatagtcacatacgtacttgttgtgcacacagataataacaagccaattaagatggattga

SEQ ID NO: 181997 - DNA, 293 bp, Arabidopsis thaliana landsberg
atggctcgcgactccaagaaagctggtggagctttaccggcgccggcgactgctatgggtaatgctgcggcggagacatcgctccctcctggcttccgatttcatccatccgatgaagaactcattagctattacttgaagaagaaggttcagggaaaacccatgcgatacgatgagattggagaagtagatatttgcaagctcgagccctgggacttagcagttataatcttcctctgtttcttggctttagatttccgttatgtggtagatttcgtgttcttcaagtttgt

SEQ ID NO: 181998 - DNA, 986 bp, Arabidopsis thaliana landsberg
acaagccgccgttaatggacctacaatacttcttggacttctctgggccaagagcatgggctccggtccataacgaccttccatttggcgcggcaccaaatatggcttcggcctatccagctcttcacatcaacttcatgggtcccaaactatacgttaataccactcccgtacgtgtatttttatacatcccaaattacacatgtaagaatatttgtagttactaattggtgacgttttatttcccgggctaggtgactagcgagaagaatccagtaaccggaatgcgatttttccttgaaggcaagaaatgcaataggctggctatacacctacaacacctagacaacacaagaactacggttggggaaaagatcactgacgaacatatatggagaggctccgatcaaatcaccgacaatgatcgctacttcgaacctttaaacggtaagaaattctcacacgtgtgtacggttccagtgaagtacgacccaaactggatcaaaacaacaagcaatcacaagtcccaaaacgacgtagctttcatcgtcaccggagcacaactcgaagtgaaaaaacacggctcaaaatccgttctccatctccgactccgttacactaaagtctctgatcattacgtcgttcagaatagttgggttcatggaccaattgggacttctcagaaatcgggaatcttctcttccatgagcatgccgttgactagtgggagtgttcatcataatatgatccaaaaagacaaaaacgaggtcgttttggattcaggtgtcttccctggtggacctcctgtgccggcgaataacaagatagtgaaattcgtcgatctttcgcagttatgtcgaggacctcaacatagtcctggtcattggttagtcactggagtgaggctttacttggacaagggcaaactttgcttacacgtcaagtttgctctgctacatcgccaacgtcttcttgtctcttcttga

SEQ ID NO: 181999 - DNA, 160 bp, Arabidopsis thaliana landsberg
atgcttacgctgcgagaatgtgttgagaaactgcaactgttaaaatctccagaggaacggcagcgcaggctagaagaaattccagaaatacatgctgatcccaaaatggatccagattgtgaatcggaagatgaagatgaaaaagaagaaaaggaaaaag

SEQ ID NO: 182000 - DNA, 1177 bp, Arabidopsis thaliana landsberg
atggaggagttgatttctcagtatcctgcttaccgtccatatgcgaattcgggtttatctaatttagcttgggctcgagctgtgcagaacaaaccttttaatgaaggtttggtaatggattatgaaccaagagagagtgataagattgtgattgaagatagtgatgatgagaaagaagaaggtgagttggaggaaggtgaaattgatttggtcgacaatgcttctgatgacaatttggttgagaaggatactgaatctgttgtgttgataagtgctgataaagttgaagatgatcgaattctaaaggagagagatttggagaagaaagtgaaactaattcgtggggttttggagagtacttcgttggtagaagcacagacgtaagactatcctgagaatggagagatcagatgatgatgatgaaaaaaattaaaacatctgtcagagtttgatgagtgaagtttgatttttttttcttttcatgttttgttctgtttcgtttcagcggatttgaaggagtttgttccagaatattgggggcgttagagtctttgcgagagctggtttcagataatgatgattttccgaagagggatactttagttcaattgtcatttgcttctcttcaaaccattaactatgtatgtgccactcaagatcccttccctcaatcttctgttacgtttccggttttatgtaactaatctattatctttcaggtgttttgctcgatgaacaatatttccaaggagcgtaataaggagactatgtcaaggttgttgtgaatctgtgtttttactgtgccagcctttgattaaagatgcttcttggagtcctttgattgctcacattatttttggtttttcttgtgcagattgctgactcttgtaaatgaccatttttcccaatttctctcattcaaccagaaaaatgaggtgcgtttcctttggtttacctgttgaagtagcacaagtcaaaatcttttccactgttccaaacattgggatgagtgccttctcgtcttacataagtacatgtcttggttttgcagatagagaccatgaatcaggatttaagccgttctgctattgcagtttttgctggaaccagcagtgaagagaatgttaatcaaatgactcagccgagtaatggaattcttctcctgcaaaaaggctga

SEQ ID NO: 182001 - DNA, 2126 bp, Arabidopsis thaliana landsberg
atggatttccacagtcttcctcgaagagatcttcaatttttctgtaagaggaacaaaatcccagccaatatgaccaatattgccatggccgatgctctcagagatcttgagattgtaagttgttgcctctcttttcttcagattttgttccagtagtcttcgcatcttgctttttctcagtaatatgaaaatgatttgagatcgatatcttgttaaccatctagagcgtgtcgttgtttgtggattcatctatttctgaaattgcttggacgattgataaattatggatgtttgttagagtatttgaatatgaaatcggaaagttcctcgaatggttttagatctggatggttgttcgattctgtttgagtccagtgcttttaaatcttatatgtttgatcttaacattttgatggttttgctttgcttgtgagttttacaatttgtaattagtagatccctgagagtctgaccattttgatttgttaggtggaaggtatggatgagttcatggatccatctcgtgaccagtctccaaccagtgttgcaagaaatttgccaagtgctgctcgaactgctgctagaacaactcgaaggaagtccaccaaggatgaaactcagtcatcagaattggtgacccgttcttgttatgtggtgagcaagtccttagctggagaaatggatcaagaaaacaaggacatgaatatgctccagaatccatcagtacctcagagccgtgctgtgaagttagatgtcaatgatatcatgcctgaagccaatgtgagcaaaactccagcggctagaagcacaagaagggctcaggccgctgcgtcttccaagaaggatgagtcggttcagcgggtttacagtaccagaaggtctgtcagattgttagaagaatccatggctgacctgagtttgaaaaccaatgtacctgcaaagaagcacgaagattctccagcaggtatgaaatccaatctctctctcgttttcaaaacagatgattgtcatgttattatatattgaatgagtttgtaatcaaaatcagttgtacaatgcaggttccaaattccaggcaaagtcagatgagaactcagaaaatactgacaagggtggagtaatgtcagggagagatttaaatgattccttggagaaggaatgggatggctcaaagaatgatccagatcttgatatattatatggtgatcttggtgatatcactttctttgatgcatccaccagtaaggaacatctgaatagaacaggtatacacgcaaacaagcacacccttcaatgttttgtgcttcactattttcttgttgcctttcttaatttccatgggggatttctttgcagattccagcacggtttcagcttcagatagttttgttctagtcaatgaacatgaaacttcgcaggaggatggttttgttgttgtagaccatgctacttctactaccaccacaaacactttggcctgcaacaaagaatcagagcctgagcaaatgaagattgattctgaatctgaatcagaggaaacagaatatgagactgatccatgggagggtgatgattttggtgttgctgttcacacaacccaagaggcatttgagtctaaagtctcagctagtgataatgtgagtaaggttgactcagtggcgactgttctgatagctgatgaatcgaaagaactcgatttttcttcttcacctcttgctgtggaggaactcgaagaagacagcgatgaatggtctgattatgagataggcgaggtcgagttggaggaaaacagctgcgggtctgaagaatccattgaaattgaatcagaagaggctcctgtttcagataagaagactccagcttcttcctcttcatcaagtcttgctggtaatgagacaagaacttcgttgtctccatttgaagcagaatcaatcttagagagcgaggaggacaaggagatggctgttaacaacaatggagaggggaaagctgaggccgaggttaagaagacaaagaagaagaagacgattgatgaagagctcaaagatgtgagcatgaggcaactaacgaagatggtgaaagaacttgctatcaagagtaagcaacaacacaagggtcctgagtaa

SEQ ID NO: 182002 - DNA, 354 bp, Arabidopsis thaliana landsberg
  unsure (1)..(354): unsure at all n locations
atgaaccgcgcggaaggattnnnnnnnnnnnnnnnnnnnnnnnnnnnnnnnnnnnnnnngtgttctgattacgatgatatcattgcctttaccaggtcgggcaccataaaagtggtaaaggtttccgataaggtattcatcggcaaagacatattgcatgcagccgtattccagaaaagcgatgaacgcaccacctataacatgatctatgtagatggtaaatccggtgtgagctatgcaaaacgttttaatgtaaccggtgttacgctcgataaggaatatgatctcacaaaaggaacaaaaaaatccaaagtgcattatttctctgccaacgccaatgaagaggcggaaacg

SEQ ID NO: 182003 - DNA, 70 bp, Arabidopsis thaliana landsberg
atgggcccccagattggaccctttgttctgctaatgatcatgggacagcctgtgccggtctcgatgtctg

SEQ ID NO: 182004 - DNA, 366 bp, Arabidopsis thaliana landsberg
atggtcaacgttgccttttcagcgttgatatcctctgttcacttggacgaggcgatcttctgctcgcatatcgatgcagttcttcgcatgtcgtcggtgtaacttgtgtaccactttgcacaccgttcttgcactccctcatccccctctcccgctctcctcatctcccctgctccctcaccacacccccttctccacacatccccgaaatcgcaggtcgtcgttgttggcgacttctccgtcggcaagacgtccctgattcgtcgcgccaccgagggccagttcacgaccgagtacaagatcacgattggcgtggactttttcctcaagaagctgcgccgcaaggactcggtcgccgatctgcag

SEQ ID NO: 182005 - DNA, 388 bp, Arabidopsis thaliana landsberg
tcacctgaagagctcgtggaggcaacgagatctgcagctgctttagcggttaaagctgcaaaggctgcgagagctattgctaacgagaaggctttgatttccgctcaggcgattgctgcggctaagagggcattggaattggttgattcttttcctaaagaagcaatggctgattgcaaggagaggtctcctaggaagaacaagcagaagaaacatgtccccgtcgagctcttgtattcaaaggggcagctaagagacgaggaagatgatttagcgcgtaggttgcatcgagctatagacaatacgtcgtatcctagagtcttgagaactagcgaggagaatggtcagagatacaagaagcagaagaagaacaagagcgtagttgaag

SEQ ID NO: 182006 - DNA, 818 bp, Arabidopsis thaliana landsberg
atgaaggacaccaagcagtcgggtataaatgggtctttaatactgaactcgactgtaatggcagtactgaacgacataaaagtaagacttgtagccaaaagctttaatcagaaagaaggtatcgattacaatgagacctttttctcatgtgtcaaagaaaagactcttagaattatcatgacattagtaacttagtatgactacgagttacattaaattgatgtgaaaattgcctttttgatagagacttgtaagatagagtctatgtatgtcagtttaaggtttcataatcgaaacttgtgaagatgaagtctgcaaactaaagagattaatatatgatctgaaataagccttgacgtaatgatgtctaaagttttatgaaactattacaaaattcgttttcatagaaaacattatataaccaagtatatacctcaagattagtgggagtaagttcatatataaatgtattgtatggtgatgatatatgataagtgtatattttgcatgttttaagcatctatttgtcatcactttagaatcatatcatcacttttttatatcatttctcatcatttgtcatcaatttgcatgtttcggatagttttgcatgcattttgcatatttgtgttgttttcaagtgatttgaagctcttggcgagctaattggaagaagcggacctgatcatgtcaaaccactcgagcccctggtcgagtacaagcttcacgacctcaagagaccactcgaccccttgttcgaggagaagacttcatcaattcacctcaccactcgaccacctggccgagtaccaccatga

SEQ ID NO: 182007 - DNA, 15 bp, Arabidopsis thaliana landsberg
gtaatacgagactga

SEQ ID NO: 182008 - DNA, 619 bp, Arabidopsis thaliana landsberg
gaacaagtgtggacagatcaatggatgaagaagaatgtaatatatcactgtttgattattctgctgagagtcatctaaaggcagtggaatctatcactgatttatgtggtgaagctaatgctgacattgatgagaatgatatcaacatattgtcatcatcagttacattcttgaggtgcgtaaagaattaattatgtattcatataagattctttctattgtaacttatgttgaagtggttatagaaagtgtttctcaatgtggcggtaagagtattctactagacgatttaacactcacaaatctaattcttgcctactgaatttttgtatagggaatggaggcattataatttcgaaccaaagagttttgcattctacaacgaggctgagaaaaaccatcaaccaaaggatataaacagtcaaactttgcctcaattttcttcggcacgagctcccaaggttttgtgtaattacgctaaaaaattatttctactttggttcttaactctccatttacttcttaaattgcttcaacgacaatgcattttttaatctctactcttattggtgcaggttaagatacatgacgatgagtcatcatcatctggtgaaatcag

SEQ ID NO: 182009 - DNA, 800 bp, Arabidopsis thaliana landsberg
gttgtactaacaacaattatgcatcacgagaaaagtgcaagaaatgtgggcaatctaaggaagtagcagcattgtcagcacttgctatccctggagcttctcttcaaactcatctccattacttcacccgtggacctgagtcacatgatcaacctggttctttactcgcattctctaacgctacaaatcaagcttcggttcataaagaatggaggagtggtgactggatttgcagatgtggttttcacaattattcctctcgtatacaggtgaggaaatgggttcacaatgcaaaaccgacttgcagattccggcttgttgttttactcatttctgttttgtatgtctctgcagtgcaaaaagtgcaatgaaatagctccactaggtaaggtttttgtctaagaccgatgcacgtgcaatcttatataacccgaaggtgtctgataatcctttcacgagttttaatatgggaaagtttattttgggttgcagcccttggtacaaagagattagcatcagaagctttggctcatgaatgggatagcaaaagactgaatcaaggatatgtaaggattagttagagcgcataaattgattagtacattcatcaattttacttgctgcttaaccaacctctgtttcttctggctcgttgtgcagacaagcatgcaaacacagtcagcgatatatgcatcttttcctggtatgagcctaggaagggtctcaaattggcaacttcctctcccgtttctacaacaacactcaacacctgctttacttggaatggggtactgtattga

SEQ ID NO: 182010 - DNA, 582 bp, Arabidopsis thaliana landsberg
atgaaagcacttatcgatggtcatgttctctctagtcaagaatccctcaaccaggtattgaatggtcattttctctctattaaagaagttaagcaattattgatagctcaatgattgtttattagttagaaactgtatttatttttttaattcatctatggtaatgttttgttgcagccctacgttaagaacttagttcgagatgcttactcaaaggggaactttttagaagtgggcgaacgaacagcgaacgaggctgctcttttgacacaaggtattactttacaatagtgtcaacataaacaccatttcagtttttctataattgcgaaacatcgttgattatatagtatgttacaacaatgtaattttgattatataggtgatgatttggaccaacaatatgctgcgagccactaccaaaacatcgaaatcgataaatcatatcaacaaaacggatatgttcaagagagatctacaaacaatttggagatagtaaacgaagggtatataacgactccagcggaattcaatatatgtttcaccggatcttcgtctcaaaatcatataaaccctttctaa

SEQ ID NO: 182011 - DNA, 836 bp, Arabidopsis thaliana landsberg
atgggaacccggagatgggccaaacgggccggattgacgacgtcacaaggccacgaggcgggagctaaacggcttatagatatcgccgagctctgcttcgagttgggggttcatacagtctcagcttttgctttctccacagagaattggggaagagacaaggtgtgacattttggaaaaagtatgtagcttacattctcatacaattatcgattctaacaatttgttgttattattaagattgagattgataacttgatgtctttgatccaacactaccgcaataagtccaacatcaaattcttccacaggtatgaaatataaatataataaaaaaaaattgtttaacatattggtaagctcatttattagcaagctcttcttgtttcagatcggaagttcgcgtttctgttatcgggaataaaacgaagatccctgaatctctcctcaaagaaatccatgagatagaggaagctaccaaaggctacaagaataaacatctcatcatggcagtagattacagcgggaaatttgatatcatgcatgcttgcaagattcttgtgaagaaatcagaaaaagggttgatccgagaggaagatgtagacgaggcattgatcgagagagagcttttgacaaattgtagtgacttcccaagtcctgatttaatgattaggacaagtggagaacagaggattagtaacttcttcttgtggcaacttgcttattccgagcttttcttctcgccggtattttggcctgatttcgataaggataagcttctagaggctcttgcttcgtatcagcgtagggaaagacgatttggttgtcgggtttga

SEQ ID NO: 182012 - DNA, 58 bp, Arabidopsis thaliana landsberg
atgaagtttgcgattgagggtacaggaaaggccaaggatgaacggagtagtcgcccag

SEQ ID NO: 182013 - DNA, 93 bp, Arabidopsis thaliana landsberg
atgcgcgccaagccctctgatctagtgcatgtgtgcctggcagtagcaaatggtcgtccctcgccatccttctataatgcgggccgtaatctg

SEQ ID NO: 182014 - DNA, 707 bp, Arabidopsis thaliana landsberg
atgcccgaaaaaactaggattgaccccaaggataagcatatcttgttccaggtaatgaattatataaccgaaacaataattatttttgtttcgataatttaacaaaccatgtgtaaaatgtagtgcaataatatgatacaaatggagagaatatggatgtttcttatttcaaaacgagcatagcggatgggggaattcaagtaactcatgtgttttttcacgaccccgtcgggttcatgatagagatttgtagctcaagcaagctaccgatcattccactcgtcgagtgaattcagaaaatgtgtcgcaacaactgctacctcaaaatcccttttagttttgtcggtttgtgtgatgcagcgaatccttatacttatactgcgtttttaatcttcttctttggctttcttttatttctcttcttttacttacttgagctttaagctacgtcttagtcggttccttttcccaaacatgttatggtttatttcttcttgtcgcctctatataaaagctctcttgtagttgcagaacttaacttattattgaatttaaaaacagagctttaagcttcccttctctcttgatatctcggctattccaaggaatcaacaactttcaagttcgtctttgttcggtattcacaagaatcaacgaactgcatacacccctttgttcggccattcacatcgaatcaacgagcttag

SEQ ID NO: 182015 - DNA, 185 bp, Arabidopsis thaliana landsberg
atgaacctgaatccaataaagtaagattgatactagacatcacaagttctgattcgcaatcacatagaaaaccaaatttattccgagaaaatcagaagaaagccacacgaatccatgatcctacacaattacaatatcatagaagaaacgagatcactagtttgatgattttcaaacagatctga

SEQ ID NO: 182016 - DNA, 491 bp, Arabidopsis thaliana landsberg
gtgttctgcgacacctcgctggaggagtgcgagcagcgtgaccccaaggggctctacgcgaaagcgcgcgcgggcctgatcacgcacttcaccggtatcgacagcccgtaccagcggccgcggaatcccgacgtgcggctgagctcgcagaacagcgtcgacgagcaggcccgccaggtcatcgcggcgatcgactcccgcaagtgaacgatcaccagctcgccgcacacctggccgccgaggcgggccggctgctgctgcgcgtccgcgaggaactggccgacgcgacagaggcggagcgcaaagccgccggcgaccagcgttcgcacgacttcctgatggccgcactggcgagcgagcggcccgatgacgcggtgctgtccgaggagggcgccgacaacccggtccggctgagtgccgagcgggtgtggatcgtcgacccgctggacggcacccgggagttcagcgaactcggccgcgacgactgggcc

SEQ ID NO: 182017 - DNA, 315 bp, Arabidopsis thaliana landsberg
atgcccgacgacatcacgttcgcgaccgcagcaggcgtgtgcgtcgcttacctgaccgcgtactacgggttgggcgacgtgggggccatccgccccggggaccgggtcttgatccatgcggccaccggcggcgtcggcttggccgcactccggctcgctcggcatctcggcgcggaggtctatgccaccgcgagccccggcaagtggcatatcttgcgcgcgaccggtctggatgacgagcacatcggctcctcccgggatctcgccttcgaagatcatttccgcgcacgctgcgccgcgagcggattcgacctg

SEQ ID NO: 182018 - DNA, 1171 bp, Arabidopsis thaliana landsberg
ggacataaggtcattaattatgaccagaaagtcagggatggattttacgatgtgtatgggattacatctaattctctttcacaggggaagatgccacttcttgttgatcttcaagcgatctctatttcagataatgttgattatgaggtcattctagttaacagattgattgatcctgaactacaagagctagagaggagagtatccgctttggcttcggaatgtccagactttgctcctggtcaggtgtcaagtgatttgactcagaaaattgcaaatatagttgtagagcaaatgggtggccccgttgaaaatgctgatgaagcattgagaaggtggatgcttcggagctatgaactaagaaattctttgaacactactattcttccacttggtcgagttaatgttggtcttgcacgacacagggctttgcttttcaaggtttataacaaatcctcttacttgtttctttctttggtcttaaatcgcttggttatcttatttggggattctagtggcaacactcattatttcctttttcatcgctgagttccttttttggtcacggttagaagatgtacggtgaagctaattactcccatccttttcttttttctaggtccttgctgataagattaatctcccatgtatgttggtaaaaggcagttactacactggaactgatgatggggctgtgaacttgattaaactagatgacaaaaggtattctttgattgtttgcattctagattcctgatattaggctcagtttgtatgtgatggtagtgatttttgcagtcctaattcgttcttcacatgcagtgaatacattattgatttaatgggtgctccgggtgctctgatcccttctgaggttccaagcagttttcttccagtttcttgcacagatacaagagtatttcctgaggatttggactcattgcaacattcatcccccgtactagagaaagaaattgaaacgccagcattttcagtttcgaaggaagcagattctagatctggtatggtagcaaacttcttcactggaaaccaggaagaaaacagtgacagatgtgctgttgaaaaacatcaaacagagagatttgagcatgattttgggaagttaatgcactcacagcagatatctggtgaaaatatgccaccattttaa

SEQ ID NO: 182019 - DNA, 537 bp, Arabidopsis thaliana landsberg
gtttcaatggctattgatgggagtttcaaccttaaacttgccttggagacgttctctgtacgttgtccaaaggtcgcagcttttccatgtttcacttcgattctcagcaaggtaaagttttgtacttgttacttcaaatttgacccagaattatgggcttgactttgttttgaacaattttttgtctttatggctactgggttttgtttagggaggagaagttgtggataacgaagaggtgattcatgctttaggggatgcgtttcttcacccggagtttacagttccgttggttcattgcttccttccaataataagaaatgttgtagatagagtggtgggtcttcttcgtctagtggatgatcttaagtcaagtattgactactcagacgatgtgtcatcagttttggataatgctatgacggaaggtattagtgtgattgatttttatgtccggcgtggacaaaggttggagcttcatgagtgtgcttgcttggccttcagtcgtgcgcttcatttcaatacgtctttgttagg

SEQ ID NO: 182020 - DNA, 420 bp, Arabidopsis thaliana landsberg
ggagaagtggcaacaggacatcgcatagatgtcaagaaatcttacacttcacttcatactcttgtcaacgacatgtttcctccaacttcacttgttgagcaggtaactagagttataatcttttagcaaatataaagtaaagtggattcatcagtggtttcaaacgcttgcttacacattcacaggaagattataacccatggaatttctggaaactgccaatagaagaggttgaatgaagaaatcatgttacagtacgagaaacttttccggtttctaaaacgaggtgcagatgggtcggacatggtggctgcggaatctccattgttggactttctagtcttattctgtgactttgtagacaggaaagagctggaaattgtagacaagaaagagctggaacttgtctctactctgtaa

SEQ ID NO: 182021 - DNA, 347 bp, Arabidopsis thaliana landsberg
gaagtatcagtgtggtgagcggcgacgctatttatgccgctatgggaccgaaagacactcccactagattcaacctcgctgactttgaagttcctttgattgcaggaacctcaaaactgacatacggatggatagttagtagaacaagttatagttctcttgataactactacgggaggatcaagtactacaatgccagtggaagcaccattagtacctcaagtgttactgatgctgtatcttctgccaatcaaacttttatttacggaactccagttactatgcctgcaggaaccgtatcttttagcactatctttggaatacggccggagctactcaaactgtaa

SEQ ID NO: 182022 - DNA, 2250 bp, Arabidopsis thaliana landsberg
aaatggaagcaaatagagagaagtatgctgctgatttatcttctataaaggaagctcatgatcgtattaagccgtatatacatagaactccggtgttaacatctgaatcgttgaattcaatctccggaagaagcttgttctttaagtgtgagtgctttcagaaagggtgagagtacttcttagtaataatgcttgattgagtggagattctctcattgttctcagtattgaatatcgatcattttactcttctgtttattgtggaaaaagtggagctttcaaattccgtggagcttgcaatgctgttttgtctcttgatgctgaacaagcagcaaaaggagttgtaacacacagcaggttttgtttccatactgtgaaagattaatgctttattgtttactgatttcatttgtgccttataggtaatgtatagagttaatagtgactgaatattctgcaattgtattcgtttgttagttccttaatgttgaatttctattaccagtggaaaccatgctgctgcattgtctttggctgcaaagattcagggaataccggcatatattgttgtaccaaaaggtgctccaaagtgcaaagttgataatgtgatccggtatggtggtaaggttatatggagtgaagcaacaatgtcttctagagaggaagtagcttcaaaagtcttgcaggaaacaggttcagttctcatccacccttataatgatggacgcattattaggtattttgctttctcgctattggtctttcaaatgtcttttatgggataccattttctgccagaaatgcgttattggtgaaactgtttagtgatttttactgaaatgttggattatggttcttgtaacagtggtcagggtacaattgcattggaactgctcgagcaaatccaagagattgatgctatagttgtgccgataagcgggggtggtttgatatctggtgtggcgcttgctgccaaatcgattaagcctagtatccggattatagccgctgaaccaaaaggagctgatgatgcggctcagtctaaggtcgctggtaaaatcatcactttacctgtgactaatactatagctgatggccttcgagcttctcttggaggtttaacctggtaatctacttcttactcgtataggaatcatgtctatgaagcagatatagaacagaaattttctcaaactctgtatcattccttctctaaacatttttttttgctatcaggccggtggtgagggacttggtagatgatgtggtcaccttggaagattgtgaaataatcgaagccatgaaaatgtgctatgagatactgaaggtctctgtggaaccaagtggagctattggcctagcagcagttttatcaaacagtttccgcaacaatccttcttggcgtgattgcaaaaacataggaattgtactctcaggaggtaatgttgatttgggctctctatgggattcatttaagagttcaaagtaaacattattgcgtattgcatttctttcacgacttccttagatatcgatgagaatggttgtatgctccatggcttcatttttatacattaagttgtgatcttatgattacatgcgtacgcatagctacgtacacacttacacacatacaagagagagacgagtctctactcttaattatcttatgctcctttgtaaccaaataactaccggggaccggggtcaatcgggagctggtgagacccgtagcaccgagcttagcgcctaaggacaaaacatgaccctgtagttagcggaactacaagtgaaagtgcttgttgggtcgtcttgtggataccggatagctgtaggcgtcgggacacctctgtttgaagaatcttgagaacccagtgctgctacatgaaccttgtccgctcatacaacagtaatggtttgacctataaaccgtacacgggttaccgaccggggctctcaacttgtttggacgctgtccttttatgtctgcattgcatattatccggttgcaattcgagcttgtcgggctggaaacaattaacaccaacaaaacactatcatcatcagttcagaacattttaaaaatagactttcgattgttgttttcttttcttcggggagaaaatttaggtttggacatttatgttccatttgtttttgggaaaaagtcaattttacgaaagattatgacgatattcttacctaaactccataggaatgttaaatccatccacaagtgagatgtcgtag

SEQ ID NO: 182023 - DNA, 587 bp, Arabidopsis thaliana landsberg
acaagtcaacaatgtggagagctccaaagaagtttacaaagactccaaaattccagatctcaacttgagcagcatcgcatgtctccctccgttaaaagttctgaagcagcacaaagtaacctttgctttcgtcgtcatgaattctgatcgccaatggagcaacaaaacaactcggaaaattacgatattttctggaataatcagcaacagtcacacgaagccacagaaaaaagcggatcacgatttgaggttatggtttgagagttatgatcgtttttccaagacaattcagactgacaccacttgcaaacgaccaacttcgtgagcaattttccaacattgtacgacgaaccaagagacgggaaacatatccacagattgcccagacagacagctctccatatagtccaatattgttccaatcgaagcgctgtgccgaaagttacatgcgcttctctccagcagatacagcaagacgaaacactgatcaaaagttacaaaaccagtcgactttgaaatcaatttccaggaagattccgacgaactgcgtggcgtgtaacctatccacggaatgccccgaaaagtag

SEQ ID NO: 182024 - DNA, 261 bp, Arabidopsis thaliana landsberg
cgtgatggtggcgaagatggcgatgatggtaatagtaacaatgacagtaccgatggtgatgatgacgacaacagtggccgtgccgatggtaatagtgatgataacagtggtggtgccgatggcgatagtaagacaacagtggtggtgccggtggcgatggtgacgacaacagtgacagtgtcggtggtgatggtgacggcaacaatggcggtgttagtggcgatggtgacgacaatggcggtgccggtgacgacaagataa

SEQ ID NO: 182025 - DNA, 605 bp, Arabidopsis thaliana landsberg
atgagtttcgccggcggaaagtggcggaaagaggcggagcagctggtggttaagcctttccggctggtgacaacaactctcctcagccttctccttcctctctctttcctcctccttagtcgtctctcttcagcttctttcctcttctccttaaccaaatctcagccgcaaacagagtcatcattcttcgtcttctctctgtttcttcgcgtgaatccggcgatcgtatacgctgtcgtttcgtcaataagcgtttacactctagttcttggcttaaccacaaagatcacagctacagatccaaagcattcgattgccttttatccacatgtcagcatcgcgtggcttacactcttccttgttcaaatctccgtcggtataggcctcgaaacaacgatctccaacggtttaatcatcggaagcgaacgcaatttcttgagcaggcttgtgtttttctttggtcttcatgaggtgatgcttctgtggtatcgagtgatcgtgagaccggtggtggataacacgttgttaggaggagaagacggtcaacgaagagaagagacggtggtggagagggtggctttggccgttagctgtgggaccttgtg

SEQ ID NO: 182026 - DNA, 400 bp, Arabidopsis thaliana landsberg
atggggaactcacaagaagatgcttttcaagaattgaagaaacgtttgactgaagcacctgtacttattcttcctgatttcactaaaacttttgaagtagaatgtgatgctagtgggattgggataggaggagttttaatgcaacaaggaaaacctatagcatattttagtgaaaaattgggaggtgctcaattaaattattctgtgtatgacaaagaattgtatgctttggtccgagcgcttgaaacatggcagcactacttatggccaaaagagtttgttattcatcccgatcatgaagctttgaagtatttgaaatggcaagccaaactgaaccgtcaccatgccaaatgggttgagtttatcgaaacatttccatacattgtgaaatataagaaag

SEQ ID NO: 182027 - DNA, 216 bp, Arabidopsis thaliana landsberg
cgcgcgaccgtgcaccgtcaaggcgcgccggaccgtgtcctcggctgtacctgcgggccgcaccaacccgacgctttcctccttgacggcccccgtccgcgcgctcctgaccgtcgcgggcgatgaactcaggaaagacggtggcaacgaggccggcccaggtctctgcgccgaccccaccggaagtccaaagcgggctccgaatctaggaatccg

SEQ ID NO: 182028 - DNA, 560 bp, Arabidopsis thaliana landsberg
atgttgtctttgttgcagttaatgatagtactgattgcagaaaatatctgcagaaggaatataatagcggcattgggtctcttctatgtggaacttcctgatggaactgtgctatcacacaccccggaagaaaacgaagtattccctgcgcagtttggacgggaggtaagacaattcatgaatggattgcgactttgctattatactactaaagaaagatgccattgataacacaatattcatacgcatgaagagtcaaacattatgttctgtttaatacagagtgaccattcacaaaagaactttcatgctaagatcataatatatgacattttggattcgaatagatagataacttctgatccaccttaacaatattttgagatccttaaggcgttttgttgctatagaaatgacattggattttacaggttctagcagggttgctaaagatcccagatagggccgattggagaaactgtaaaattagccaagaagaggaggcaaagctggctgaagatttcaagaaacaatatcaagaatttgacccttgccaataa

SEQ ID NO: 182029 - DNA, 143 bp, Arabidopsis thaliana landsberg
aattttgtgtcttcatcaacgccgacatagtttctccaattgatcttgctactagttggagagcttatagggagaacctccagccttctactgtacgtggaattcctgatgtcagcattaatcctgatccaaaatctgttgag

SEQ ID NO: 182030 - DNA, 245 bp, Arabidopsis thaliana landsberg
aaggagcaggaaacacccgacccatggacgaccgcaccaccaccaccgcccatccctacgccaactccgaagccgccttcctcaaggcccgccaggtcatgcccggcggcgtctccagccctgtccgcgccttcaaggccgtcggcggcacccccctgttcatcaaggaaggcgaaggcgccatcctcaaggacgtcgacggcaacacctacgtggactacgtcgccagctacggcccgatgatc

SEQ ID NO: 182031 - DNA, 165 bp, Arabidopsis thaliana landsberg
atgaccgaactcatggataaatgtttcaaagcccagtccaccgggctccagcgcgccgcccgaagcggaagcggaccaggcggcggcgtattgcgtggcgaacacgccaacgccagagttggtcgtgccgggcgggttcatataggccagaacgtcatcgcccag

SEQ ID NO: 182032 - DNA, 1867 bp, Arabidopsis thaliana landsberg
gtactcaaccatgttggcagaaaatttagtggagccttataaacagggccaaaatactccttcaaaacctctactagctatcgaatcaaaaagtgatgaggagagggcagaacagatacctccagagataaattcttgtgagcaccttattacctaacacagcattagtgtttactgtaagcaagtgagctgaatcctaacaattctcttgatgcggtagctgcaggtcttgaatcaggaagtcctgaactcgatgaggattatgatctaaaatctgaggatgagaccgtgagtttcactttatcatcttttaatttttattttaccacttatcggcagttactgtgtatcactccttgaatctagctgcacatcaaaggtagatggagaatagcttgatttttttgttaaggaaatcgttttctttgtcatgacaccaccctgcaccccaatatacaggctatactctagttttgaatagtttttgtggagattgaattggttattgtttatttattagttatttacctctgatcttttgaggagttatattttccatatctcattttaaacccacgattacacttaggaagatgatgaagatactattgaggaggatgaaaaacacttcaccaaacgtgaaagacaggaagagttggaagctttgcaaaatgaagtggatctaccagttgaggagctgctcagacgttatacctctggaagaggttggcataaatctacactcgctattgattgacctttttgctcacgttatcaatttttactttgaattatacaagctgtattcttaagaaatatcaactatttgaattgcatcctcttttgtgtaagagttttattttgatccctcagttagccgagaaaccagcccagtaaaagatgaaaatgaggacaatctgacctcagttagccgagtaaccagcccagtaaaagatgaaaatcaggacaatctggcctcagtaggtcaagatcatggagagggtgagtggtgtcaagttcctataatgtattgaaagcaatacaactgctctttgacttcctcgtcccattttacatttgtagcagacaagaacaatcttgcagcttctgaagaaactgaagggaacccaagtgttcgtcgttctgtaagttgtatgtctttttaaaatcccattgtctgatttgtcatcgaaattctggctcaaatgtaaaatatatatccttcatttgcagaatgatagctatggtcatttggcaatatccgagacccattcacatgaccttgagccaggcatgacgactgcatctgtgaagtccagaaaggaagatcatacctatgattttaacgatgaacaggtaactggatctgaccttaaccatgttcttctctgcaattagcgtaaagtctctgattctgactgcaattgatggacttactgtgtcacattgtaatatgtgcaggaagatgttgactttgttcttgccaatggtgaggaaaaggtcagtcatttcatcaaatgccagagatcgttatttaggacttttctcttttaacttgattctcttagccttggctcttttcgaagaaaatttttgaacacgcatttgtactaaaatttttatatctgctcttttggtgtaggatgatgaggcgacattggctgtcgaagaggaactggcgaaagcagataatgaagatcatgtcgaagaggtgacaaacctattaattattcggttttcttgagatatgataaaagttgttaccttcagagtttacaaacagaaatttccccttctaccgcagattgccctgctgcaaaaagagagtgaaatgcctattgaagtactacttgcaaggtataaggag

SEQ ID NO: 182033 - DNA, 104 bp, Arabidopsis thaliana landsberg
atgagaaatgaaggaaaacggggaacaagaatggagaagctcaccggggaagaagactctcgccggagacgaggacgaattcgtcaattgacggagattcggag

SEQ ID NO: 182034 - DNA, 384 bp, Arabidopsis thaliana landsberg
atgagggcattgaggcgcacgagggccgggcgggtgacggccgcagccggtctcgtcgtgctcgcggtcggtgccgccgcggcctgcgaagccggcgccctgagcggggtgtccgtcggatacaccaccgacctgacggccacccacgagctggaacggcggcacgtggacgtcagctggctgagctgcaccgccgacgtcaacggcgacgggacgaggacgtccggcaggtcccccacgccgagccgcgaaaccgtcgcctccgtcgactgccggggcaagaccgacaagggcaaggacatcaccgtcaagggccgcgtcacccgtgccgtgaacggcgcgtgcgtacggggctccctgcgggccaccgtcggcggcagacag

SEQ ID NO: 182035 - DNA, 438 bp, Arabidopsis thaliana landsberg
gttactgagaaaataaacctagtcgagcaatacaaaacagaaagagaacgccaacaaaaggtaaatagattagagggaactctttttgcttcttatgtaaactagtaggaataaatgacagacttgtatggattcttcagctagcagaagaagaagagatacgaaggctgaggaaagagttggtccctaaggcacaaccaatgccatactttgatcgaccattcattcccaaaaggtaaatagaaactcctgaatttctggtttcttgttgatagattgatgaaccatttcgaagactatcagatcgactattctaagtgttgttgttttccattgttgcttaaaggtcgaacaagcacccgacggtacctcgagatcccaagtttaatataccggactaacgaggataacatgctgcagtacatcgtaacggagtga

SEQ ID NO: 182036 - DNA, 225 bp, Arabidopsis thaliana landsberg
gtgtactatggagctgacttggaaacaaagaaatttggaagtggtttcccaaagtataaaccggggtatcctataagtgaagcagatcaatactctcaatgtggttggaacctaaataatttgtcccgtctgcccggatcagttctagcttttgagagctgcgatatctcaggagtcattgtgccatggctttatgttggaatgtgcttttcaactttttgttgg

SEQ ID NO: 182037 - DNA, 70 bp, Arabidopsis thaliana landsberg
tgattatttacgttctctttcggtccgtgagtcctctcctatccgacggtcggttcgctacgaccggtga

SEQ ID NO: 182038 - DNA, 106 bp, Arabidopsis thaliana landsberg
taagacacttgatgatgcgcagagaaattatgcaacaacagagaaggagctgttagctgttgttatcgcttttgaaaaattcagatcttatcttgttggatctaag

SEQ ID NO: 182039 - DNA, 162 bp, Arabidopsis thaliana landsberg
atgtactctcaatgcgggactatacaaaactctcttgaagtgttcaatcagatgtctgaaaaagatgttgtgtcatggaattctctgatctctgcatactcgagacacggtgaaggagagaacgcggttaatacctacaagacaatgcaagatgaaggaaag

SEQ ID NO: 182040 - DNA, 876 bp, Arabidopsis thaliana landsberg
atggaatggtcaatgaggttgcgagtggcgtatcatatagttgaagcattggattattgcaattctgtacgttttgacgagtacgataatctaagtgcttacactgttctgtttgataaggtatgttaaacaacatttttcatgcctatgccttgtcatgtgatctaaggatgctaaactgtttttactggtgttgaaggatggtgatgcctgtctttctagtttcggcttggtgaaagagatcatccgttacaatcgaagagaaggaggtaaccaattcgctcttgtatcttcagactattcatatcagaatgtaatgttttatattctcattgtagggaacgtgaggactgggaatgtgacatacagatttggtactatccttgtgaatctgctaactggattgcaaatttctccgagccatgtaagtaattctgttcaagcttgactttgtggaatccttggtttcttgcaacacaagttacattttactgagtggttatttatcctctgtttctaggctcctgagatgatcaatggaaaggatgtcactgagctcatggatccaaatctgaagggaaagttctctacagaagaagctactatagttttaaaactcgcctctgaatgtttgcagtggaagggttatatagagaatggcatcactaaaaagcttgttgcaacacttaaagccttgcaggctaaaaaagaagtaaggagggttactgttacaataatttcatccctgaagatttttcgcattcatgttataaaaccaaatctttttgcttgtagatttcatcttctgaaatgcatgaagtaacaaagcagcacgatgtggcatcatcttcgagtcaacaacaacttccaccctga

SEQ ID NO: 182041 - DNA, 746 bp, Arabidopsis thaliana landsberg
atgagaggaatggcaaacttcatcttaaagcttcctgatgaattcccactcctcattcaagcatcactaggacgtctgttggaactcatgcgtttctggagggcttgtttagtagatgacagacaagatactgatgctgaagaagaaaacaaaacagcaaagggaaatgataggttcaagaaattatcttttcatcaagcagcagatgcaattgagtttcgcgcttctgatattgatgatgttggcctaatatttcttagttcagtcgacagtcagattcggcacactgccctagaattattacgatgtgtacgtgctttgagaaatgatattcgggatctcatgattcaagagcacccagaccatgttatgaaatttgaagctgaacccatatacatgatcgatgtcttggaagaacatggggtaagtagcttctgtgtagatctcaccatttcagaggctttttagccttttggttgattatggtttaaaaccgtctggctttatagaaaattaagatttgtatcctttatttctttcacataataggatgatattgttcaaagttgctattgggattctgcccgtccttttgatttaagacgagattccgatgccattccttctgatgtgactcttcaatccattatctttgagagccttgataaaaacaaatggggtcgatgtctcagcgagcttgttaaatatgctgctgagctctgcccacgctctgttcaagaagccaa

SEQ ID NO: 182042 - DNA, 295 bp, Arabidopsis thaliana landsberg
atggttcctcccataatttataagtataagcgaaggaaagatcggcgacttggtagggacgatgatagttcagtgatgatgactcgtcggagacccgactccgattttatcgaggtaagtgatgagaatcgctcgtttgctttatttaaggaggatgatgaaaaaaatcgtgatttgggtttagttgatgatggttccacaaatttggttcttcaatgtcatgatgatggttgttccctagagaaggataatagcaatagcttggatgatttgttctctgggtttgtttataaag

SEQ ID NO: 182043 - DNA, 455 bp, Arabidopsis thaliana landsberg
atgctgatcggcgtgttgcccctgctggccctgcagatccaggcggtggccgactcgatcagcattctcaccggtgagccggtcaaggcccgggtggcattcgccttctgcattctgatcatcctgttcaccatcttcttcggctcgcggcacatcgccacccgggagaaacacgaaggtctggtgttcgccatcgccttcgagtcggtgatcaagctgctggccctgggcggcatcggtctgtacgcgctgtacggtgtgttcggcggcccgcaccagttggaagtgtggctgctgcagaaccagaccgtcctttccgcgctgcacacaccgctgcaggaaggcccttggcgcaccctgctgctggtgttcttcgcttcggccatcgtcatgccgcacatgtaccacatggccttcaccgagaaccttaacccgtgttcgctggtcagcgccag

SEQ ID NO: 182044 - DNA, 492 bp, Arabidopsis thaliana landsberg
acctttgacagggcagaggcggccatccaggcggaggtggcgccgccgaccactacaatgttacgaatactgcctgatgtcatactgtcctcatatgcttacaaaggtgattatgaccgccggatggacgatgtcaattcgacggtatatcgtataaaatatttgacaatcggttggtgtcgtgcggatatgtccgacaaaagaaatcgggcctgggggtagtagcatgtgggcgatatcgaagatagctgtcattggcctgtccgccagtctgttgtgcgcagggggaatggcctcggcggagacggtgccggtaaaggtgccgggtacggcaatgccctggatcatcaagaagaaaaaccccgacctgccctatggcaaggtggatggtacggcgccggtggtagcgcctctgaaactgacagccggtatgccattgcagatcaccgcgacaggttcaaccactacggtggccggtggcagcgcgtttga

SEQ ID NO: 182045 - DNA, 266 bp, Arabidopsis thaliana landsberg
gttaatgtcaggatcaagattgtttctggatcaccatgtggagctgttgcggctgaggccaagaaatctcaagcaaattgggtagttcttgataagtaagttaataatctgatttcattcttcagttctttagtttttactctctttgtgtggttgaatgattatatttcttttacaggcaccttaagcatgaagagaaacggtgcatagatgagttacaatgtaacattgtggcgatgaaagcgtctgaggcaaaagtcctgcgg

SEQ ID NO: 182046 - DNA, 500 bp, Arabidopsis thaliana landsberg
cgagatcaatcctataccaacaactcgcgacgaaagcagcgaaatgtatctacgatcgattcatctctctattcaacggtggagaagcaggtgttgttcctgaatctgtgatctcactctccgccgttgatcttcgtaagatcggtgtctccgggagaaaagctagttacctccacgatctagctgataaatacaacaacggtgtgctttctgatgaattgattctgaaaatgagtgatgaagagttgattgatatgttaactttggttaaaggaattggagtgtggactgttcatatgtttatgatcttctcgttgcatagacctgatgtgttgcctgtgggagatcttggtgtgaggaaaggtgtgaaagatctttatggtttgaaaaatcttccaggtccattgcaaatggagcagctttgtgagaaatggcgtccttataggtctgttggttcatggtacatgtggagactaatcgagtctcgtaagaccaaatag

SEQ ID NO: 182047 - DNA, 151 bp, Arabidopsis thaliana landsberg
actttttagtggtctggtgaaatttacgtcgagttttgaacgatacatatggatacgagttacggtttcaagtatggttcaaccgacgcgaattagatcgaaccgaaaatttgatcgaaaaatgaaagcgttgtccgccagaaccggataa

SEQ ID NO: 182048 - DNA, 123 bp, Arabidopsis thaliana landsberg
attttagcacaagatcccatagagaaaaaggatgttcatatttttgatattggtgtgtctcacggcatgcaatggcccactttgctggaggctctcagcaataccacaaggacctcctcctaa

SEQ ID NO: 182049 - DNA, 915 bp, Arabidopsis thaliana landsberg
atgtaccggaatataacaagcggccagagaaacataccggatatcggaccgaatatcgatatgctagctactcaaaccggttttgagccggttagactctttcgttggtgtgtctcggaggagctctctgaacttaaacgacgcgtttctagtttccggtaagcagacgacggtgttggtcatggagataggagagatagagatagcgaaacagagatgcgaatcggttataagaacaatcgagaatcttcctttatcaactgcaatcactgcttcgtgccgtcgcacactccttaagctcgcttcctccgagctctcctttctctcgtctctctcttctgatccttctccgaaacctctcaggttctctatttttaatcatctctttcttctctccctctcattagctctgattctgactttgattttttttccgcaatcagtgtcaacattggccacattgaatcagtggtacggattttacagcttccgtctatcaccggcgtttcgcgcgtttgcaaaccgattcctcttccgattggtggcgttcatgttgatctcgtttgtactctcggaaaagttcctgtatggatcatcgtctctgatagaaaccctaggtacatctcctggaacggtgatcgccatggaagcaaaggtttaagatctagaatcgaacagattctcgccgctgctaattccacaaccacgcttaaaccttcttcggtgtttctgttcttcgcaaatggtctcccttcttcagtttacgagaaactgaaagatgaatttggagctgtgtatttcgattttggctttgattctgattcggattcggatatttcaatgctcgatgattttgattgcgaatgggttaacgttgttcgaaccagatcatataaagaagcagtttctgtttag

SEQ ID NO: 182050 - DNA, 72 bp, Arabidopsis thaliana landsberg
actatacgtcggaaaaaagattcggaagatgttcgacgtactaaccaaggaatattcctactctttagctag

SEQ ID NO: 182051 - DNA, 202 bp, Arabidopsis thaliana landsberg
atggtgaggagaaccctatcacaccattggccattggaaacaacatcgacaaaaacgttcgcaaccgaatcacccttctttagaaacaaggaaacccaaaatatgatgatttgtttgtattttggctttccactaggttttaattggcatagataggacaaagtatgagcctaacaactcaaacaagaagcacttgatgtaa

SEQ ID NO: 182052 - DNA, 994 bp, Arabidopsis thaliana landsberg
atgttgttagcagatttagaggaccaaaagaaaggaaagtatgttctaatccgtgatgatgctgaggactctgagttaggacaattctataagccccttccttgcttcggttttggaatcggatggttctcgtgagtactcactcactcttttttcttattattatcgaggatatattgtcttgttgaagcagaatcttttacctctttatgttaggtttcttctaggattcgtcttcccgtttgcgtggtacgttgctacatttctttatttgatcagctattaccatagagatcctcgggaaagatctggtcttgctgcctctgctatagctgtgagttctcggatccaaatgcatttcgttcttaaaagtgagtaaaagaggatttaccaacgtaatctattttgcttaaaaattgtatgcaggctttgatattctctgttgcacttgtgatcaccgtgcttgtgcttgttttctcgggtcgctagggtcttgctacagattgcatattctttctgagtttcaaaggaaaacagctagcttctaagtctgtttccacaacaagttaaaaaaacttcaatttgatgaagagaatttcggtttcgaagagagtgtactgctagtctttttagaatcaaaatttggtttgctttgtacataagtcagtgtattacatttaaacaatcgaaatgtgatatataactcttggagatctatgtattgtaagccagacaataaccctagccaaggttatgtacttatgtctggttcttatcttccttcttcaaagctttttctttctttcttattgaccctcaagaaacagagaaaagaatggaactaagggtagaagctttgacgattaggatttgtattgcctctatgtcgtgttgtttgaatcatcatctcatcatcatcaattattttataaaagctgcaccttggaacctcacatccaaacattgcggaaagaagccttttaaaggactataa

SEQ ID NO: 182053 - DNA, 437 bp, Arabidopsis thaliana landsberg
ctgtagagtattcgccggaggatcagagcgagccggtggagaaacggagcgataacgagctggtggagaaacagatagataacgagctggtggagaaacggagcgataacgaactagcggagagtcagagagataacgagccggcggagaaacagagcgaaattgagccggcggagagtctgagcgataacgaaccggcggagaaacggaacgataacgagctggtggagaaacagagcgataaagagccggtggagaaacggagcgatattgagcaggcggagaaacggagcggtattgagccggcggagagtctgagctataacgagccggcggagagtctgagctataacgagccggcggagaaacagagcaatattgagccggcggagagtctgagcgataacaaaccggcggagaatcatagtgatgagtaa

SEQ ID NO: 182054 - DNA, 288 bp, Arabidopsis thaliana landsberg
acaccggaagaggtggacacacggaagataaaagagaatgaagaaacccagcagctgcagaatcacccgcagaacaagaaggatctccattgctgctgccactaccttggagagagagcaaaatctggaaatcagaaggagaagcagcggcgagattgtaagcagagaggaggaaacgagcttggacttgacgatcagaaggttgatcggagaatgcagaggaggatgattggtgaagccggcgaagagattcgcagagccaaggagtatgagaggcgaagcaattag

SEQ ID NO: 182055 - DNA, 351 bp, Arabidopsis thaliana landsberg
atggaaatcaaggaatctagaaaggtgaagtaaaggattcgacactacggcaaggtggagttttgtgaggttttgcctaaagtgtctaagagtatctaacccaagtagaaggtttcagccaaaaggaacaaaaatgtctttatttaatttccagatgtaactcttctgaagaaagtggtgtcatggatcttcggctgttgattctaaggcactcttaatgtttgtttatatgtccataaatgttagtgagatcatattcttataaatgttattgcttccatcattttgtaggatggtttggtttttgatgatgatcaagaatttgacattatcaaggattttggttgttga

SEQ ID NO: 182056 - DNA, 1038 bp, Arabidopsis thaliana landsberg
gttttgattctgagtgagaaacttcattcagtcactgcccagtttgatcagcttagagttactcgtttccaagatattataaacagagctatgccgagaagaaaacctaagagggtcataaaggaagctaccccaattaatacaactctgggaaattcggagtccatagaaccggatgaaatccaggcccaacctcgtagattacaacaacaacaacttctagacgatgaaacacaagcccttcaggtaacaaggcaaatatacatgatcttcgaaaacttgcataagttttgtagttatgctaaattttgaaattgataatttttgcaggtagagctaagtaatcttttagatggtgctaggcagacagaaactaagatggtggagatgtctgcattaaaccacttgatggcaactcatgttctgcagcaagcccaacagatagagtttctttatgaccaggttaggacttattaacttctctaacgctctcatgtcaacacactgttttgttaggctttcactgttctttacactcctttgctatctcaaagttaaattcggatgcttattgtattcagaacttttccttgtcacattcacctaaattaggtatagagacgggaaagaaactttgtattggtccaattttaattgctcttcaatttagtggtaggaaatggaacggttaatgtttttagctatgtaaagtctctaaaactccatttgaatgtgtcaatgactcaatgccattcccaatactttagtttatggggctttgcagttttcctactctgtaaacgtacagcttatgactgacttggtggctctctttatgtgtgtgtgtgtgtgtcttgaagccctttttctcactcagtttgacactaaatgcaggcagttgaggcaacaaagaacgtggagcttggaaacaaagagctttctcaagcaatccaacgaaacagcagcagcagaacctttctcttactgtttttcttcgtccttactttctccgtcttgttcttggattggtacagttaa

SEQ ID NO: 182057 - DNA, 284 bp, Arabidopsis thaliana landsberg
atgatgaaaggtctgattgggtatagatttagtccgacgggagaggaagtgatcaaccattacctaaagaacaaacttctgggtaagtattggctcgttgatgaagctattagcgagatcaacatcttgagtcacaaacccagcaagcattagcctagtaagtttattatgaatgatcttgatctgtctctctttatatcatcatcgatcatttctaaatttgggttccttttgttgttgttgttgcagagtcacctaggatccaatcggaagatcttgaatga

SEQ ID NO: 182058 - DNA, 749 bp, Arabidopsis thaliana landsberg
atggataagtcgagtgctttagagtatatcaaccagatgttcccaacaggtaatgagacacttgttgaacaatcatactctttgtacttcgattatggtttagagttgatttttgttgctgctgttattaggacctgtagttcagctgctgattagctgatagtttctgcatatgtgactgcgtttaccatgattttcaaatgtgtgttttcctttacagaggcatcgctaactggcgttgagccacttatgcaaaagattcagggtgaaattcggcgggtcgatgctagcatactctctgctgttcgtcaacaggtgggcttttttagtctacattaacgctagaatatattgtgtacgtgtaatctgtgcttctgaatcatattcatgggctggcaatcatactccagagtaattcgggaactaaagctaaagaagatcttgctgatgctacgcgtgctgtggaggttagtttctcataggttgatatgttctcttttccttcagtcaatatatcatatccttttttcgtttctcctatcagttcccttttaattcattcgcaagagattttgatcttctttttgatttatcacaggaactctctcataagattcaagagataaaatccaaagctgagcaaagtgaagcaatggttcaagaaatatgccgtgacattaagaagttagattttgcaaagaagaacataaccacgacaatcactgcccttcaccgcctcacaatgttag

SEQ ID NO: 182059 - DNA, 221 bp, Arabidopsis thaliana landsberg
tcggttatttcggttttgatttatttatggttaccaagtttaatatccgaaccgaaccgaaccgaaagataaccgaaccgaaccgaaccaaaattcctcaaatatccaaatggttcttatattactataaccgaaataaccgaaaccatgcgcaaccgaaccaaaaccgaatggttaaccgaatgcccaggcctagatccaacttagatattacacactaa

SEQ ID NO: 182060 - DNA, 223 bp, Arabidopsis thaliana landsberg
gtgtagcctagtagatctaatggtagagatggacagaatattacgtccagaaggaaaggttgtgatccgagactctcctgaggtgctagataaagtcgcacgaatggctcatgctgtaagatggtcttcttccatacacgagaaagaacctgaatcccatggaagagagaagattcttatcgcaaccaaatctctctggaaattgccatcaaactcccactga

SEQ ID NO: 182061 - DNA, 1060 bp, Arabidopsis thaliana landsberg
atgaaacctggttccatatttcgtgattattatggaaaggtgcaagtttttcgaaacaatagtaacactcgacaactctgttatatgtgtcacaaccgttgtaccggtttgatcttctacgaaggctacagaaggaatgctacatattactacaatcatagcaatcgatcaactcatagaatgattttttgctctttggaatgtgagatattagggatgagaaaacgtcgtctcatccgtcttccgaggtaagtgtttacggctgaatttaaaaactaagtacacaaatttgtctcttataatctcatagttcatcaatccgtcaattcgattatttgattatatctttggtacacttgtgttgttatcaagttttttcttcgaatatgtaatgatttgtaagaagtcatcgttggttaccaatcgttggttttaatttagtgtctctaacttagatactttcttgttttatgatttttggaaacatctttttcaaatgggaaagttgtatatgtcatctataaattaattcaagtatgaactcccaaaaatacaaataaatatctttattttattttagttttgtaatacacaaatgaatatcttggactataattacgtggaggatttgagaaaccattaggagtattcctgtatcccgacgcataacattgttccatcaaatacactttttgattcgacggctgttcattttttccgttattgctccatactataataacatatacgccttcttctgaaatcttttcaagtattttttgtggatcaatttttccagatacatataccgttttgatttgcttgtcaatcatgaaactcacatctgtaagcaaacaaaagagaagggaagaattatgaaaatatattcttgcatttcatattaaaaagagtccaatattagcaaactggctacaataacgatttgttagataaagcgaagagattgaaactgaaacatgtttatagtactatcatctctagagtacacaaaactatccgaaagattaattcgatggtcatggttatattccggagatga

SEQ ID NO: 182062 - DNA, 149 bp, Arabidopsis thaliana landsberg
gaaaatctgttcaccaacttagagtgccgactccttgggagataatcatcagatacccaactctatcttcgacatattttctgagcacaaagccaacagattctgcatttccgcttttcggcagcgacgtgaagaaacgttttgaccct

SEQ ID NO: 182063 - DNA, 369 bp, Arabidopsis thaliana landsberg
atggcttcatcaagatttcaacttgttgctcttctcgtcgtcttctctctcgttattagtattactgcaaattccgtaggtacttatcttccaccccttcaaaataataacaaatacttttaaatccaaaacttgtttttgtggcatatgtcatatttttttgacctaataatatacatgcatgtgtgttaaatttacataaaaacagagaaagacgtaatggacggaccatgccgcttaagaggaacgtgcaacaacgacggcgactgcgacaagcattgtcacaggagcaccgacgctgcagccatggacggccactgcctcttcgacaaacccaccggtcctgtttgttgctgcttatttgattaa

SEQ ID NO: 182064 - DNA, 111 bp, Arabidopsis thaliana landsberg
aaactcaaacagtactcgaagcctgcaataaagatagaaaaaattccgagtttccgagtttccgagtttggaatcggtgtttcaccttgcaacttagccttcttcgcttag

SEQ ID NO: 182065 - DNA, 109 bp, Arabidopsis thaliana landsberg
atgaattcaaatccagtcggtgaatttcgtgagggagagatcgatggaaaacaatttctcatattcactttgctatcttcttccggtgaagcagccattgattccggtg

SEQ ID NO: 182066 - DNA, 20 bp, Arabidopsis thaliana landsberg
catgctccggcgactattaa

SEQ ID NO: 182067 - DNA, 65 bp, Arabidopsis thaliana landsberg
ctagtcaacgggctgaggtgaccgagggccatggtatggccgagaggaacggctccagcagctaa

SEQ ID NO: 182068 - DNA, 85 bp, Arabidopsis thaliana landsberg
atgtccgaagcaaaagtattcagtggcgcaggcctgcgcggccaagtgaccggccagaccgcgttgtcgaccgtgggccagaccg

SEQ ID NO: 182069 - DNA, 194 bp, Arabidopsis thaliana landsberg
atgttcagattattataaaggaaaagttcagatgtggtggcaacattgccaacaggaaagaatcagttcacattcgaaagtcgaaaaaggtcttttccactaatggtccctccaaagtttatgaacagcgaggaaagttgagatgtagtcacttgcccaaaaatttggtcttcaaaccccctgagaaagtgtaa

SEQ ID NO: 182070 - DNA, 147 bp, Arabidopsis thaliana landsberg
gatttttggatgttgacgttgatctcatttgctacggtttcgttagccggaatactctatacgattcacctctaccgtattcgaaaacatctatttcacttggagaagattcccttattgaacaacttttttgcttcatgaaaaaag

SEQ ID NO: 182071 - DNA, 360 bp, Arabidopsis thaliana landsberg
atgtgccgggccagcgccacgggcgtcgacgagagtcggttgacccgcggtccagcggactccgctcctgtatggtccccgcacgggacgaggatcgcgttcctgcgcgcgacggacggtcccgcacagatgtgggtgctgccggccgacggcggtgagccggaacaggtcgccacgctgccgctgggcgcgggcgagccgacctggtctccgtacggtgccaggatcgcgttcaccgccccggtcgacccgcgggccggggagaacgacgacgacacggcccggagcaggcgcgcctccgaaacggtacacaccccccggatcgactacaaggcggacgggacgggagtgatcggcgcg

SEQ ID NO: 182072 - DNA, 615 bp, Arabidopsis thaliana landsberg
atgcttgggctttcttacggtgagctcttactcatcgtcggcgccacagctgctcttgtaggttagtctctcttcaatcgaaaatctttaccagctccgatctttgtgttcttctcccaaatttctctggaatcgaatgatttgagtgttcattggaagaatcaaatgtgaatctctgatttaacaggccccaaggatcttcctattattgctagagcaggaggaagattattcggacgagccattggttacatcaatatggctcgtggtcacttggatggtgtcatgaaacaacctcagatgcaagaggtttgattgtttcttcatcaacattgttttatctcaacatcattgttgttgtcttcatgaatcttaaggaacttgttgtagtgaattcgaatgacatattccttgaagtcatgttgccttacattactctcgtacttggtttagatatcgaaggaagttcaagatttacgggcacaagtagacgcgattagccatggagcaagattttctctatttgattctagtcctttgactcgaagagtggacaaccagaaaactcaagaatctagtccaagcaccaccaatggtacagaaaccactcgatag

SEQ ID NO: 182073 - DNA, 208 bp, Arabidopsis thaliana landsberg
atgcccactcagccagtatgggatgctctacgccctgggtgcgggcgagcgcccagtaagcgagcggcaaggcggacgtgcccttagttcacacggcgtacgccatcttcacggtcgacgcgcgtaacaacgggcccgtcgcgatccgcgcgttcagcgctgaccgcccgaacagcaccctttctatattggcacgcgggcccgacag

SEQ ID NO: 182074 - DNA, 164 bp, Arabidopsis thaliana landsberg
ctctccgtcgactaaatcaacatctctcaacgcacggtttagtttcttcagaactgggagtttcgtttcgtaccattcatgaggcaatacatcttcatatgaatcaactgaaggatgatacagaacctggaatgaacggaagaagcgacttggatttgccttga

SEQ ID NO: 182075 - DNA, 169 bp, Arabidopsis thaliana landsberg
atgtgttgtacacaactcttggctctggccaatgccacagacgacacaggttcatcaattggtgcatcatcatcatcgttaagctctcagcatacaacggattcttggattaatagctggaagatggactataatccgtggactttgagtaaaatgcaaaaacaacaat

SEQ ID NO: 182076 - DNA, 95 bp, Arabidopsis thaliana landsberg
atgcctaggcggttaggatccggctgcggttcaggctttcgtacgccagcatccccatatcatccagtcgtgatcgacacagacacgcagaccca

SEQ ID NO: 182077 - DNA, 491 bp, Arabidopsis thaliana landsberg
atgcatgaaacagacagagatcttcacatctctgatggtaccatgaacaaggaagagcagagcccaaataatgaagagatggttgaagcgtttcgcaacttgcttctcctccatggccacttacctgataagcacggggatcataatacacttcgcaggtaatcttcaaaatcatcctataaccccaaaatcaccctggttgatttttcttctcaaaatgttaggtttcttaaaatgagagattttgatctggagaaatctaaagaggcttttctcaattatatgaagtggcgagtggactataaagtggatttgatctctcaggtgagttaaaaaggcgatcactttttcttgtttatgtttcgttaactaagattattagcttactcacaaggtgttcgacgaaattgtctgacagaagtttaagtttgaggaatatggtgaagtcaagaaacattaccctcatgggtttcataaggtagacaaaactg

SEQ ID NO: 182078 - DNA, 2002 bp, Arabidopsis thaliana landsberg
atgatctcggacgcttcctacaatcgcatcctcaaaaactgtgattttacagcggatagattctccaaagaatgcgattccgccatttatgtcgctgctgccgactttggcgacatcgatcagtacagcatctacacacccaagtgtgtaccaccacaagaccaaacgaaccagaccgagtttgagcagatgatgcaaatgcacacaactaaaaggtttttagaagatcagtatgacccttgtaccgaaaactatgccgagatatattataaccgtcctgaggtacaacgagctatgcatgctaaccacactgccattccatataagtggactgcttgcaggtattcccactgctcatctacattgaaactcttgaaccactgttattcatcacatgttcataactttattctaacgtatactacaagaaactcttgaaccaaattgtaaccaaactaacgactccaggtcaaacttcagttataatattattaaaaaccaggcaattttttttgttctctctgtttgttacagtgactctgtctttaataactggaattggagagattccgacaattcaatgttaccgatatataaggaactcattgctgctggtctaagaatctgggtctacaggtacactatgtttcagtatattaacctagacacctagttataaaagatcatgatagcaacacatattttggtcattaaatcacatttctccatgcagtggtgatacagattcggtaattccagtgacagcgactcgatattcccttggcaaactgaatcttcgagtgaaaactcgctggtacccttggtactccggaaaccaggtaggaggacgaacagaagtatacgaggggcttacctttgtgacggtaagaggggcggggcacgaggtgccattcttccaaccgcaaagtgcgcttattcttttaagatcattcttggctggaaaagagcttccaagatcttattagtgacccgacatttgtagctccactggtgtactaaggcaccttccaaacgaagtgttcctcaaggtacgaatctgaatgatgttggggaggtgattaatgttggcaactgactgaagaatttattggccaatgggctgaatcctctttttttaagaaacaaaattcaaaacccttacaaaaacgagaaaacagagtccttgatttctatagggtactttaggacttctttaggccaatatttttttttcataatctttcatttcagtctgcaaatccctaaatgtggtctatgatggcttctgacaattaattttactgtcaaagctaccattggtctacccgaagcatctaatggtagctttgaccgtaaaattaagagagaacatacgactaacaaagttttaaaagttatcatgcgatcaattgtcaaaagagagggtccacattgtgtaaaagaaaccgatatctttcttacatgcatatatataaaagtaaatttattagtggtaccaacacatcctcctccattccaacccattgaagaaaaagcagagactatagtgaaagacagagaaatggcaagaatccacttaatcattatactactagtgatttcatcgacatcatcatcatcatcatcattaagagagcacgaggaggacatgatcaaggcacttccagggcaaccgcaagtaggatcctcacagttatcgggttatgtgactgtgaacgagtcacatggtcgatcacttttctactggctcacagagtccccttcttgttctcacaccaaaccacttcttctttggctcaatggaggtaacataacattctttaattcttatgtctccccacttacgctcatatatgtgcacacatgcatatctcttttatatcttcataataactccaaattaaactatctgaaaaaacgcctaaaataaataaataataataatctcaatttaatataatttgcagaaaatatcgatagatttttgcaacaaaatttgtaa

SEQ ID NO: 182079 - DNA, 1105 bp, Arabidopsis thaliana landsberg
ttcaaagagtctggtcgatgataccttgttgaaatgtttagcaagcgcgacccataactccatagatgttgtggtgcatgtgacttcaacaagcatatcttcagataaggaaccaaggtgtcatgctcgcacaatctgatctgccctgaaccactcattgtagtctggatttggaaccgctataacagaacctccaacttggggaacttgcaagacaggagtaggagctggaatggcaccatttacgaatccaagtaggttctgaccacacaagaaggactcaaactgagacttccaagatatgtaatttttctgattaagtttcaaagtaacacaatttgctatatttaacgcaggataagtatagaggtccatagattgattagccatgatgctctgataccatgaaagtagaagcactgcggctgctagaggtgaacgtgagtaaacatttctcttcttatctctcactatcttaacttgattacattaggtttctttatatagagcatatggattaggttaaatcctctaaacatttgaatctattagtcaagataagatcttgactaggacagctggagatgcctttcttaggagctgccttagccacaagcttcacacatttgtcttcttgttcttttgtagatgaccgttgcacactaacaggctgactggacatttgtttcgtcttggacttccagaccatgttattggacttgggcttatctgaatctttagacaacattggtggaactacaccgtttagagttgtgtctgaatttgacctaagtctcttgtcctcttactcgattaggttatcttcaccttttgttgacctttcaatctcattctccatcgatctctttgtatctccattaatagtccccctcaaacttggagtgggtggaacatcaacgccaagtttgaaccggagagaagcaaacagaccatgaggcagagacttggtgaagatatctgcaagttgaaattgattcgagatgtgagttacccggagagtccccagagctacctgttcccgaacgtagtggtaatgattcgcgaagtgcttgctcttcttgtgaaaggcaggatttgcagtgag

SEQ ID NO: 182080 - DNA, 15 bp, Arabidopsis thaliana landsberg
atggccatccggagg

SEQ ID NO: 182081 - DNA, 1093 bp, Arabidopsis thaliana landsberg
gtaaatgcagtccgtgaacggcttaaaagtctgggtgctgatgtgtctctttgtgtccttgactatttgagtaaaaccgtacacagttggcctggtattgccgaaatgatacttagggatatcaacactgacgacagtgtaggtgccaattttgcaacattaccctgcgggccttttctgattggtgaaaatgagactgcctccgaaatggcggatttgatggaagaacatatattctatgcaaataggcagttttttgatgtctacattctgctggaaatgttgtccatatcgtgcctagctgaagaggcatctcaaacatttgaaagagctgttgctcgtggagccattgttgctcaggctgttgccatggtccttgaaaaacaacgtgttcagagcccaaatctgaatgctacaagtggggatgcttctcttaagcatcaagatcctgtattggagggagaagccagtgagcaaccagccactggagggactgagttcaggataatccttaatcttgctgagacattaactcattctagagatcctcaagtgaggggatttgtgaaaatgctatacacaatattattcaagtggtttccggatcagccctttagggttcaaatactgaggagactcgtagacagattcaccagccctacgagtagcagccacgatttagacttagagttggagattctagctattctgatttttcaggagcaagaggttgcgagacctgttttagccatgctgaagaaggttgtggaacatgcaaatattgacagggcggccctgtggcaccaattgcgtgcaaacaaggaagaacttgtccggttgaaggaagaaaagaagatagagattcaatctatgacaaaggagaaatctagcatcacccaaaaattaagtgaatctgaggctgcaaatacccgtcttaaggtatgtgcttaccttcatataatctgctccaagagtgatgatgctgaaggttattggtgttctgtgatcatatagcttactaatactgtgtatcaaatggcagtctgaaatgaaagctgaggcggaccggttttctcgagaaaagaagaaaaag

SEQ ID NO: 182082 - DNA, 252 bp, Arabidopsis thaliana landsberg
agagaaagaaaagttttcgatatgatttcgtcggcaagaatttttataaaaacttttgttgcaatttcattgggcgtttcactggcttattaagcagtcaaaactttttcttctggcatcagtggctctgttatgcaccgttggccggcaaacttccagcatcgattggcttcttccccaaccgtggctggcttcgtctccatcgattagacttaaagagattcggatggcttatgtcccggcttttgtccg

SEQ ID NO: 182083 - DNA, 486 bp, Arabidopsis thaliana landsberg
atgaaccacgttcacaaatcaaccaccaccgacgaagatgaacgaaacagcggccgagctatagaccgccacaacccgatcattaaagatggccgaagatcattcgctgacgacttcattaaactaccaacttccgcagaagacggagagatgagtaacaaaaagctagagatctataaaggcaggagaagcatcactggcaggagaagcacgggcggtggcggtggaggcggagcatcggcgttgttgaagctgatcactaatgacattggcttagcaaggaagagtttcagctgtgttgcgagacccgcatgtgacttaatcaaaacccctgtgggttctacaaggtatcttttgggatcggacccggattctattaccggttctgtggatcaggatccggctaagacggtagaagctgaagctcctgctggtgaagacaaaacgttgacagagaagaagacaacttgtggtgatacagaccag

SEQ ID NO: 182084 - DNA, 403 bp, Arabidopsis thaliana landsberg
tttggtctgtgaagcttctctgggtcaagagattcaaactcggctccctgtcaaaggaaaggaagatggtggcttagtttggtctgtgaagaatgtggctaagtccaagtctcttaaggttgaagatagtgtttttgggtctatttcagttcagaccaatgggatctctctcggtttggataaggtccagaaaggagattcaagtgttggacagcttgctgtaatcattgataatgcaactgaaaatgaggaggttggcatttgttcaggcacaatttgtgcagttgaggatgattcctctgacgtgttatctactgacactgaagaagaggctttcatcaaggttttgtctaagcgtcagaagaggaatctacgaggcaagggcctcaaaaccaaagcttaa

SEQ ID NO: 182085 - DNA, 387 bp, Arabidopsis thaliana landsberg
atggtatcgatgatatataccaggtgggttttccatcctatgaacaagctctcgagatcttatgtatatatgcttttaggaaaagctatccacaaaagggttttcaatggcttgcattaagagtaacacagctttgtggtaaacttccattgggtctccgtatggtgggttcatctttacgtgggaagaatgaagaaggatgggaagaagtaatctgcagcctagaaaataatattgatcgtgatatcgaggaagtactaagagttggttatgagagtttagatgacaatgagaaaacgctatttctccatattgcaatcttcttcaacaatcagtatgttcatcttgtggaacgcttgttcgctgacggtgacttggatttcaaac

SEQ ID NO: 182086 - DNA, 204 bp, Arabidopsis thaliana landsberg
gtctcactcgtcaactctacggatcttatttcggagcaggacacggattcagcgccagacttggagattttcatgttactcattcaagaatcatttagtctaacaccggagccagagcttatatcactcatcaatcaaataatttcccacgtcgtctttcggcagcgacagtcggagtcaatgcctgatttggaggcggactag

SEQ ID NO: 182087 - DNA, 129 bp, Arabidopsis thaliana landsberg
atggtaccctaagtggtaccattcgattatatgctacccgaaagttgtgcatgagcacaagtgctgaaacaggtgtttggtcgcttggtggtaggacaatgcccactggcgatgggaccgccagagaag

SEQ ID NO: 182088 - DNA, 342 bp, Arabidopsis thaliana landsberg
atgagctcaaataagggatcaactgcaattgttgatacaattactgatgccaaagggaatcatgtattcaaccggatctacgtatgtcttggagcaatgaagaatgcattctacctttgtaggccactcatagggatagatggaaccttcttgaagcatgcagttaaaggttgcctttttactgctattggtcatgatgcatacaaccaaatataccatgtggcgtgggcaactgttcaatccgagaatgcagacaattggctttggttcttgaatcaggtgaagcaagacttgaacctaaaagatggcagtgactatgaggttatatcagataggtgcaag

SEQ ID NO: 182089 - DNA, 289 bp, Arabidopsis thaliana landsberg
tgaagctccccgagcaaggaatcgaactctgcctcgccggagaagccagtccacggtcgccggacttcacccgaccgccggtgaacgtagaccgagctccacggtgagttgttcttcaactccttgcacgtgtcgactcatttacacctcgtgaagcttctcgtgcccttggattgacctatgctgtcgtggttaggtcggagcactcgccgccgacgagttcacccgcctgcgcacgtggaccagccgattccgaccaccaccgccgtcgagtcgtacctcgctgtga

SEQ ID NO: 182090 - DNA, 306 bp, Arabidopsis thaliana landsberg
atgggtcgtgctgcttctcacattacacttgaatgcgctttgcaaacccatccaaacattaccattattggagaagaggtacctttgagtcactcaagcttcttcattcgtggttttcggtttgctatatttcaaatatggtttgagaactagaaagcaccaacatatatgcaggtttttgagaagaagcttacgttgaaaaatgttaccgataacattgttgatgtgatctataaacgagcagaaaatggttataactacggtgtcattcttgttcctgaaggtctaattgattttatccctgag

SEQ ID NO: 182091 - DNA, 15 bp, Arabidopsis thaliana landsberg
atggaaaaagctcaa

SEQ ID NO: 182092 - DNA, 882 bp, Arabidopsis thaliana landsberg
atgtggcctgtaagtgatagatctgatgaaacttctctccaattcatccatgctgatgaagtcgaatctgaatataaggattatgtaactggtaatctaagacttatctatatagtttatgctttctctctattttatttccttagtactaagatttataatatttgattgttatactgttattattagatgctattggagtcatatcaagtgtctcaacagtgtcaagatttccatattgttgtcctgaaggtgaaacagactatgatgccagatatgtgacatttaccatccgagataatcagtaagttaacaatcatggacttatattggtattgaaattagttaggaacatacatacatgtgtagtatgataaatttgtattctccttggttgtagtgagaggatcataacttgtgttgctagagggagtgcgtgtgagtcttttctgtcaaagttttatcgacttattggttcaaaaacttacaactatgagccactcactacagtgctccggttctttagaacttctatgtttaaaggctagtttatatatgttaatatgttatactcttaccttagaatgttaaatcatgtgatatataactaatcaattgaatgataacaaatattataggatctaaggccttaatcagcgagtatgggtgttcaagggtcttcattgaaaaagagtttctagactttgatgtatcatgttacatgtatgtgaaagacattagatactggtgatagtttgtttattagatactaagttattcaagaactttgacatctttttatgtttttgttacagcaatttttttgcagctgaaccagttggaaatgttgatgggaggattgagtatgttgttgaggaataa

SEQ ID NO: 182093 - DNA, 297 bp, Arabidopsis thaliana landsberg
agaaggagttaatacgagaatttgagaaaattgctgcaacactcgtcccagagaaagactggtcaatgcgtatttcagctatgcggagggttgaaggacttgttgcaggaggtactacgtcaatactttttgtctttatcttcgaaatgaagttttattttcttgtatctcatctcatggaatcttttttctgttgaaggtgcgactgattactcctgctttcgaggtctcctgaagcaacttgttggtcctttaagtactcaattagctgaccggagatctaccattgttaagcag

SEQ ID NO: 182094 - DNA, 287 bp, Arabidopsis thaliana landsberg
atgcctcttttgcacaagaaaagtactgaaatctctttatttgaaggagtccacatccacctcgaaggcgatgtgcgcagtggttcgattgctatacccgagattgatttaccggcgattgatgtcgcatcatctgctgcgtcggtggtggcggaagagttaggtaaatcaaatctcacataaatgattctctgttctattctccattcttcgtttttctaattgtttttttagatttttggtggttagatgtttgcgccagacgattcagaatttataaggtgtaa

SEQ ID NO: 182095 - DNA, 105 bp, Arabidopsis thaliana landsberg
agtaatcaaattgccccagtgcccgtaaacgctgcacatggaaggcatgctgatgggggtgtaaaatctgaatatttaatgccgcagtcatcttcttttgctccg

SEQ ID NO: 182096 - DNA, 299 bp, Arabidopsis thaliana landsberg
ggtttaggaaccttaaccctgaggtagaggaaggaatctgccaagtcctctcttacatgtggcttgaatctgaagttctctcagatccttcaacaagaaacttgcctttaacatcatcggtggccacatcatcatcatcatccttctcgaacaagaaaggaggaaaatcaaacgtggagaagaaacttggagagttctttaaacatcagataactcatgatgcgtctccagcttatggaggaggtttcagagcaccatatgcattggcttgtaactacggccttttttatatcacttaa

SEQ ID NO: 182097 - DNA, 121 bp, Arabidopsis thaliana landsberg
accactcgatcgcaaggtggagtccttgaagccaagtttgatccaacagacactcgatcacaggggcccagttgggcccattcgactttccttatttgatttgtatcgcttttataaatag

SEQ ID NO: 182098 - DNA, 442 bp, Arabidopsis thaliana landsberg
atgggcgcatcgcgccgcgcgctgtttgcgcagttgcttatggagtccggcatggtcggtctggcgggtggcatcggtgggttgctgctggcgctgcttggcctgtgggtcgtgcgtcaccgccctgccgaatacgcctcgttggcgcacctggatccggcgatgctgttgatcaccttcgtgctggcggttagcgcgagcctgctggccggcctgctgccggcatggcgcgcctgccgcatcgcccccgcttccgccctgaagagccagtgacatggatatcctgccgatcttcgctgcactgcgccgccacaaattggtgatgtggctgctgatcctggaaatcgcgctgacttgcgcgattgtctgcaactcgatgttcctgattgcgcagaacctgcaacgaatgcacatgcccagcggcatcgccgagcacgagctg

SEQ ID NO: 182099 - DNA, 61 bp, Arabidopsis thaliana landsberg
atggagattcctgatgaggttatcgaaaacgtacgttacgccgctatgggaggatatcatg

SEQ ID NO: 182100 - DNA, 1021 bp, Arabidopsis thaliana landsberg
aaaacacaccattgggatcctttgataacaggtacagttcaatggtattttgaagaaatctttaaacgaaggatgaaagacatggttagcatgataaggactagtcgagagtcccctaaatggatcatcgattctcatatctggaaagcgacgtgtgagtattgggatactgaagaagcaatagcgaggagtcagatatattccaaggctcgcttgtctgaccgtaatgggctcggtcctcacatccatttgtcagggccaaagtcatatcaaaacatcaaacatgaactggttattaacttctatctctgtttttttttaatgtgtctctgtcttaagttcagatgttgtattaagccttgtttatttttaacatcacaggaaaaagagttaggaaggagggtgagtgttggtgaggttttcatcaagactcataccaaaccagatggtacttatgtagataaaaaggcagagcagattgttaaaaattatgagaagaagctgcaagagaagttgtctgaaatggaggcagagacttcaaatgtttcagacggggaatcaagacctcgggagctcacaatagaggatcatactgtcatctttctagaggtaaagtttacattttcacttgcatattgtctgcattttctcaagctctttattaatggtctggctatttttttcataggtcacagagacagatacaagagggaactattatggagttggaagcctcaaagataatcttccggatatagtcactggaaagggcaaacatgcagcagactctacctcctttgtgtcattgcaagagcaactgaaagaagctcaacagaagatcgaagagcaggctgctcataatgctagacgtgaggaagagcaagtccgagctgtggctgaacagaaagacaagctggagcacttggccttggtggaaaagtatttgcgccaaactgatccagcctttctcaactttatggctactcaatcttctgaagcaaccataaccgatcctatctaa

SEQ ID NO: 182101 - DNA, 205 bp, Arabidopsis thaliana landsberg
atggctgtgatgggttcaacatcggaaaacatgtacctctgccaggtaccaaactttgggtttgaaataattaagctgagaccgggcgggtgacttgcacgagaaaggagtctcagtgtagttctttgtcttagtcgattaaggaccgtgccgatgtaggcttgatgaccgaggaccctttaactgctcacatgcctcgtcatgg

SEQ ID NO: 182102 - DNA, 385 bp, Arabidopsis thaliana landsberg
atggagccgaaagagaacggctcagaattgggtcagaagatcattgacggaccaacgaatccaatggtcacacctttactcaatgatctttatcaattcaccatggcttatgcttattggaaagctggcaaacacaacgaacgatccgtgtacaacacacaatctcttctcatgctctgcttttgatgttgaattctgaatggttttgtatatttgaaattgtttttgtttccttttcagtttcgatctgtattttcgtaagaacccatttggtggtgagtacactgtgtttgctggattagaagagtgtgttaagttcttagccaatttcaaattgactgatgaagaaatcgatttcgttcaagagtgtttgcctggatctgag

SEQ ID NO: 182103 - DNA, 310 bp, Arabidopsis thaliana landsberg
atgaaaggcattgttcgctttgctgcgtttaagcctgacttgtgccacataatacgtcttgatgtgagttgttctttctttgttcaagtctttgtctctttttgttccatcttcttatttctgatattttctgcctcaatttctatgtatgggtcaggacggttctggtatagcttccaccatgtatgaggtcagtattattattctgaaacatatacgcttattatctcattgtctccttaagttggtctgtgatgatggtttacaattgttttttgcagaacttgtgggatttgacaccggatactga

SEQ ID NO: 182104 - DNA, 274 bp, Arabidopsis thaliana landsberg
ctaccagaattttctgttgtatcaaatgtcttcaagagaaaaaaggattccgaacaatctgctgctgaattggctctcgagaaggtatacttttgacacatctctctgctcttattgtttagtagacttcttaacactgtttatgtgaaaaagtacaatactattcatgttgtagctaggaattcagtctcaggatgatgatgatgttgatataactgtggatgaagcttggaataatatcgttgaacgcattaagtatatattttctgatgag

SEQ ID NO: 182105 - DNA, 335 bp, Arabidopsis thaliana landsberg
atgagtgattatacggacagagaagaagtaacaccaatgaaggagcttgctgagagatttactatgtatgatccatttgaaactgacaaagaagattcagaagacatatttgtaagagaatgtaacaatgttgatctaccctttatataatccacacctgcattaatctcttttcttttgtactctttcgttggattcaggggaaaacaagacgctatgaaataacgagtacaatagcattggcggtgaaacgcaataaggaagtcatgtttcatgagaggtttcgggagaatggtaaatggaaccccaatgacttcactttcaacatcgcctag

SEQ ID NO: 182106 - DNA, 84 bp, Arabidopsis thaliana landsberg
atggtggcaacaatcctgacagtgtttgaaaggcagttcttcatggcagtggcccttttccttgttctggtggtggttgtccac

SEQ ID NO: 182107 - DNA, 430 bp, Arabidopsis thaliana landsberg
atggggtgttgcgcgagcaatacagctggtggttcaaaggctaatcggatctcacgctggcgatctacaggcattgttggtctccgcgactccaaattgaaggtatacttgtctccacttggaattgatagacaaacttgtttctatctgtctatatgactttgtagagatgtttatactatgtgtgttgttgttattgtctcttgtttgaatgattgatagagacgaaaagcactgaactttgtgattgtgtcatcaatgcagcatacgaatttgttctagggttttgttaagactggattggctgattatctcttgattggtgaattttctgtttttttgatttgttttgttgagtagacatttcctgatgaagtgattgaaatggagagagcagtgcgaacacttgatctaacacacaataagattg

SEQ ID NO: 182108 - DNA, 114 bp, Arabidopsis thaliana landsberg
agtgtatccagtgagagaaagaccaatgccttgatggctagttttgtgaacgcaccaattggagagaacattgattggaggctatcagccacgatatccccttgtcatgctacg

SEQ ID NO: 182109 - DNA, 618 bp, Arabidopsis thaliana landsberg
atgcttcccattgttatctacaaggagagtttcactgtcaacgatacacagtgagttctctcttattcataaagattttatcttttgtggattcacgatcttttttaaggcttatctcatgaaataaacttgttctctccaatgtttgattatcacttgtgattgataagtggataattgtcttgtgtatataatttcattgaaactgttaccttagtctaaggaaaatttcattattttcttcggattggacacaagtgaaatcgtgactcattttcgagtggaggcatatgtaaagcccaaaaaattcaatggtgcaattttggtttgtatattgagttgtttgaaatagttcttatgagtttgcgatttggtagaatcttttattcttagataaaattatatgtaggcctcataatatgggtattagctccaacagaaacctgactaaactacttttgtttacgtttgtttttatctttctttagatatcaaagccaaaacataagaaagtatgattatgaatcacctgattttgactttgagtacttgaaaacagatgttcagtgtgtcttggggactaccaagcagaagagaaactccaacaaatgccatcat

SEQ ID NO: 182110 - DNA, 260 bp, Arabidopsis thaliana landsberg
atgctttccgcaaacactcgagcgaccttattagaagaatcaaaatcaaaaacaggggaatgtgagagtaatcagaattccaaaaccaaagtagtcgattactggatttgaataaactggatcaaatatagagagggatagaaacctcgatcgcagaagaggaggagctagagccggaccaagcaactgaccaacggcggtcaccggagcgtagctcgacagggagaagcggagggagaggagaggagctggtggattga

SEQ ID NO: 182111 - DNA, 854 bp, Arabidopsis thaliana landsberg
  unsure (1)..(854): unsure at all n locations
atgagcatcgatcttcactgttttgtcaccaagcggccaaatcttgttcacgataacatgaactttggcaacgtgaggtgcggtttgtgggaatctgcctatgagcaaatcgtcccaaagtggagctgaatcttcgaaaatttcatcaggaatctgaactatcggatctccgtcaaccatggtgacagagaaatcatgcttcgtgagagaaggcttgttttgaacaattgaagagtatgatggcttcggagcagcagatggggaatctcgggggcttgacagagtgacctcnnnnnnnnnnnnnnnnnnnnnnnnnngggagaacggcggcggatccgccagaaccagcgtcttgggacacacggcagcacaaccctaaatcgctttcagagtcgccctagccacgtcagcaaaagtgtattcaagtttaatctggtgacattgagaccgccatcgacatcctttgctcccacactcctttcgttctagatgatcaccgtattctattttgtctccaaaatcaggtgaatctctttaagcttctattcaaaattgtagtcaatttgctaaagtattggacatttgaaaattttctgggttttgctagaattggtggctaaaagggaaattatgttgtttttattgattgtgactagttcttaggcctgtgaaatgttgcaagtactaatttcatgtgtgtgttacttacatattttgcttagatttgagatgtgtgatttaagccttctttatgatatgtgtcttcttttctaatttttgttcgtttgttttttttctaagtttatggctctaatttggagattgaagttgtagaagatgaggatgatgagtaa

SEQ ID NO: 182112 - DNA, 126 bp, Arabidopsis thaliana landsberg
gcatctcacgtatcaaatagaagaagagcaattcgtgaaccaaaccggagacgataaacgctgccaaaatccccggaaacagagcccaaccggaactcattttgcgttcagagactcgccgcattg

SEQ ID NO: 182113 - DNA, 666 bp, Arabidopsis thaliana landsberg
acggcttcatctccgataactaaactcaatgacaccccgaaggtaggcactttttttatgttagacttgatatttaacatcattattagctaatagtacaaattccgggtaagaagatccttaccgtgtaaaatatctaagaccggtgtgtaattttttttaatacaggttgataatgtttcttccgtaggagcttctttgattcctaatccgccggtaactattgtccaacgttactaactttaatgttatccactataaactttattatctactcacactgtatctctcttaaatctgatgacgattggcaacccttatcaggattcagatgaggtaatccgaagtttcctcctttttaatttttttctttccccccccccactccttattttgctttatcttttctttaggatttttcaacccccctcagccttccggcggcaaactattggctgggaaagatggcggcggtcccgatggcgatgtcaatcaaggaaggaagagcaaaagaccaaggacgctttctagtaagttagatgggcggtttcacttcgacaagaaaactaagttatggtgggtcacccatcccatttatagcgtcggggagttggcatccgatccaaagtgcgttaccacgatctctctgaagataaagggaaaaag

SEQ ID NO: 182114 - DNA, 240 bp, Arabidopsis thaliana landsberg
gttggtcccaaatagacttatctactaggcctatagatatagtaagtggcaccaaagtatatgagaaagcctgataacaaaaatctcaggcttttcaaatcttagcccaatatttatgacaatgtgaagggaagaaagctacaacgagaaacaggaggagagtcttttctcaagaatcctcaagaccactacgtgttagtacgaatgttagcttctgagttcaatagagtgaacaaataa

SEQ ID NO: 182115 - DNA, 1166 bp, Arabidopsis thaliana landsberg
atgagcttgcaaggaaatcttatgtccagtaattctgacctattcgatgcatgcccctctttgcaaagtgggagttggagtgcccttatgcaatctgctgtagcagaaacaaccagcgatgacgccggtgtacatggatgggttaacagcaatactgtcccacatgcgaattcgcacactgatagtagagcccaggatttgggtgcaaaggcttcaaatccactaagtgagagattccacagtgattccactggggcagctgttcaacatttgcctgacaaggtaaataaagtttcagatcatggcctgtttgagaagcctatggctcaacttagtcaaatggctggtaatataattcattcttcaagtattgatgaacagaataatttgtgttctattcgacagaatgagggcattgaagatagatttggtatttggaaggctgcttccaatccaaatgtagctgctctgattgaacagaagaatcatttcacacaaaatccacaaagggcaagctatggatttggaatagccagtgcaggaaacgattctagtgcttctcgggatgtccagggcaatatccaacagcatttggataataactctgtggagaaggctatccctcaactgaaatcgagagacggcagtcagattcttgagtcatatgcgaggaataatgctggaacaaatgaaatggtaaatgcccgcgatttttctatgttgcctggtggaaaagagacacaatctggtcatgtcggtagtaggccctcgacaagtcgcaaatttcagtatcatcccatgggtaatattgatgtcactaatgaatcttgtcaagaaaaagtttctcatttgccaaccacattggagcaggttccagtcggaaaccaagggtattttgggcaatcaaagtttcttggtcagtcggctatgaacatgccaattgacagggtaaatgtttccttagattttgaacatgtatttttaaaaatctgaatcccaatgaatattcttttggcttctccatggtagggacatgtctcacaaaacgacttgaattgcacaaatgaggcttttaatggcatgggttcagaaaactcacctagtacatctgcttcagctgacagaaatgttgataggtgtaatcaagtgaagagcgcttcgtcaag

SEQ ID NO: 182116 - DNA, 174 bp, Arabidopsis thaliana landsberg
atacactctaggacacaacttaagacactcattgtacctactctaattaaacaacatactaatcgaatacgtaatattaatctttattggtttggatcgaacaatcctgctcgagctagcacaaatgcgcgcgacgaccgcactacacatgcatgcatgcgttccacgtggtga

SEQ ID NO: 182117 - DNA, 1232 bp, Arabidopsis thaliana landsberg
atgagattacaagagttggttcttgtgaaaatcagcttagttttcttatggttaattgggtttgtcttcctgcaacgtagtgaagagaatggatttgaagaacccaacaatggggaagaactttcctgggatgatctggagagagaagctgctagtaatatatcatctaaaagatctcatgctgagagatctcaccaacacgaatcttttacaaaaggtatctgcaaaaagattatttcttaaagtaatgttttcgagttattgtagatggtgaaacttttgcttaatctatggcaatgttatctgttttgtcatcttgatgatgtgagtgatgttacaaagcataatatctgtgattgatcaggtgacgaactttctggagacttgtacgaactgtggaggcaagaacagaacagcattgcggcaaggctagacaaagagctaaaatccaggtgggaactcgatgaactgattgaagaacagctgagcagataccagtcccattacgacaattccatggtttcaactttcttaaaggatgtctctaacctcgtcttacccacgtggataccacctcatgagctagctgctgtggcctggcttggagactggcgtcccacctccattcttgaccttgtccgcattctggcagctcaaaacccctccttctctctgtctgagtcgagtgaacgtgtgctctctcagcttttacgtgagatacgcatcgaagaggccgtgattgatgaggaatatgcagaaattcaggccaccggtgtcttgtacctccctttttccccgctctgcaatactcggttgcatgaagaagctctgcgttctgtgcaggagctgtttgggaacatacataaagtcatctcaaaggcacaacgactcaggtttgctttcctccccatcataaataaaagagaattgttgagaatgaacagaaacaaatagctgacaccagatagtgtgtgtggttaatgatgtcttagttttgttgagtgaagtgaaagctttgatcagtattatgagagaaagttgttatgattggcaggtataaagtgttggagctggtgatgaagaagctgctgaatcaaacggatacagccgagtttgtggtcgcatttgcagggattcaagacgccatacaccagtttggagagcagaagaagctaagaaagatttacccagcagttccttcacctctgaagggatcaggatcatctagttga

SEQ ID NO: 182118 - DNA, 712 bp, Arabidopsis thaliana landsberg
atgctggcgatgcgagtattggtggctccgaggatgaactggtgcgcggcgtggaacggctggatttcaagtatggcgtgctcgacgctagcggcaataccgagtttctttctgctgccgacatcgacaaaagcacagccacagattgctcatccagagtggctaatccgctggatgcaacggaccgtggctgcctttggcgcaacgtcaagagcatcgaggttgatctgctgatggacggccaggtgccgctatacacacttgccaccaatgatctggcttacacctatgaggccgacggcatcactactccacaaccgccagcgaaacatggcatcaagcccagcgatcagggttttgtcgaccaaatgcttcgccgcgaattcacggcgctggtttccgtgcgtaatttcaacccgtgatgcccgaggaattcgtcatgtccacggccgatcttcatctgaatatgtcttctggcaatcttttcagcgcgcgacgatcgctccagagttcaaaggggcagcgcggtgccgtgctgatcgtggcgctgatctttctgttgctgttgaccatgctggcgctcagcgccaccggacgctcgctgctgcaaatgcatatggcaggcagcctgcgcaatgcgcaactggcggaaatgagcgcgaacaacgccttgcgtgggggcgagtggcgtttatggaccagcaccagcaaa

SEQ ID NO: 182119 - DNA, 386 bp, Arabidopsis thaliana landsberg
atggccaagggacttgcagcggaagcagcgagtccgcgagcgacagagagcagcagtgtgcgacggcgaaatgcagttgaaacacttgccgacgaggtccgccgggacggcacggcgaggaggacgagccgcacggagacggcggcacctggagccgtgggattccgccctctgccagccgcccggagccggacgcgcggaacagggcgagtagaccgtgcgaccacccctcggacgatcccgccggacgagcgtaatccggggggaaacccggggacaggccggcgaggggcaagcaacaccagcaggagccgccgaagacgaagcgtcagtgccacggccaacagcgcccgaccgcccaccacagaaaccgccgcgcaggacgc

SEQ ID NO: 182120 - DNA, 11 bp, Arabidopsis thaliana landsberg
atggaacgaag

SEQ ID NO: 182121 - DNA, 131 bp, Arabidopsis thaliana landsberg
ctgggatcctggagaaatcttatgtgaacaacttcaactaggctggatagatcattactttggtgagaataaggaaccgaaactactgtcaagaatgttggaaatcgaaactctggaaatcactatcaaag

SEQ ID NO: 182122 - DNA, 425 bp, Arabidopsis thaliana landsberg
  unsure (1)..(425): unsure at all n locations
atgttccgctgcaaggtgacgacagccatctacataccatgtttccacggcggggtattgacggcaaaggtttgtatgcaatgaagtgctcgaattgccatcaggctaccaatacgcccggtctgcatacgccgccgggaaaccccaactggcatcttcccccggccgatatgaaaatggtgtttcagggcaaaacacctcatcaannnnnnnnnnnnnnnnnnnnnnncaagacaaacggcaacaaggatattaaaaagttgattgcacatgccgatgacgggttggtccttgctgcgtggaatccgggcgaaggtcgcacgctttcgccgatgagccatgccgatttcaaaaaagcctggataacctggctaaccaccggagcttatgcgccgaaaggaaataagactgtgatgaacgattaa

SEQ ID NO: 182123 - DNA, 434 bp, Arabidopsis thaliana landsberg
atgggaggagctgatcaactggcaaaagatgtgggatcaagaaacgttgcctcatggaatgatccactagatgctttggtgttgggtgttcaccaagtaggtctatctggttggaagcaagaagaatgtttagccattggaaatgaactccttgcttggcgagaaagggacctacttgaaaaagaaggttaattccttctctcacttatgtcaactcgttctgtttaactctgacgtgtatggcttgtttgtggctgtaaagaatttgcatgctattattataagctatatgctctttattgtttttccatgaaggggaagaggatggaaaaacaatttgggccatgaggctgaaagcaactcttgatcgagcacgcagattaacagcagaatattctgatttgccttttcaaatatttcctcctaaatgggag

SEQ ID NO: 182124 - DNA, 104 bp, Arabidopsis thaliana landsberg
ggtttacaacaaaatctgttagtcttttcagagaagatctaaagaacccagaaaaaaggatgaatcccatccccaagtatacatatccaacggactttagatga

SEQ ID NO: 182125 - DNA, 640 bp, Arabidopsis thaliana landsberg
atggcgaacgccttgttttcagcccaaacgcaaggccgaacagccatgccgcccgtcgccgcgcgcctccgtgcccgagcctccgttcgtcgcgtgcctccgtgtcgttttcctaaaccctcagtgcacttcaccaaagacatgcgctctaggttcggtgtcttttcacacgcttggacttagcttattttcgcggccgtgcccgggcctcagttttcggcccgtgcgccatgggcaacccctcattttcggtccagacgcaaggccgaacagccatgccgcccgtcgccttgcgcctccgtgccgttttccctccgttccgccatgccgttcacccaagacataaatattaccttcggtgtctttccacacgcttggacttagcttatttccggggccatgcccgaacctcggttttcggcccgtgcgccatgggcgaacccctcgttttcggcccaaacgcaaggccgaacagccatgtcgccccgtcgccatcctgcccttcacccaaggcatacgtagcagcttcggtgtctttccacacgctgggacttggcttttttttggtcgtgcacgaacccacggcggtcttcggcctcttcccacgctgcgccttggccgtttccgttcggaagaccag

SEQ ID NO: 182126 - DNA, 780 bp, Arabidopsis thaliana landsberg
gcaggtacaactctaaatattcaagttatgtcactgaagaagatccaaacgacataaatcatacgtcaaaacataaaagaaccaacgcgtttcttatgaattctgcttcagctcatggtaaaacctagctcctctgtttcctctgtttctatgtttgctctgttttctcttgtcctctgtattcttattcattgcttgtacaccaaaaaacctagcttcttccaacgttttctctcccttctcctcccagatctaagattactagaggtagataaagagaagcaagaccccaaatcaccaagaggagccctcgaagcctgcttaactcgttgctcaatctcttccgcttcatcttcatctgacgatcctcctccaaacagagaagctatcgacaacgcagatgcagacacagacgtacagtgcaagaatcacagagcatcttctaattggggaaaattcttcaagctatggaaacgcagatccatgaaacgcctctcttcctttcctccattaagtggcgccgccccaccgatcatcaaacaaaacaaaagtgcagatccaaacatgaatggcatggtccttcacgatatctacgatttccaatcatctctccaaaacttctcaatatctgacatcgaaattgcaactgacaatttcagtccaggtatcgagtttatcttcataacaatatactctcttcttttttacttgaaggactgtttggttgctactattactgcaattaaaacgacgcttctatgcagaaaacattatcggtag

SEQ ID NO: 182127 - DNA, 1380 bp, Arabidopsis thaliana landsberg
gttgccaacttttgcaacgctgaagatgatgggtccttctggagtcgctggataaaacctgattctgtggttacggccgaagtaaaaattctatcttctataagaatatggccttctatgtcatagtttttttttttcacatagtcatatcaggtttttcagtgtctaaacttgtattacctttttataggaagctcttgcaccacgggctgctaggaatacaaagagttatgtggatcctagccatcctgacaggactagcaaaagaaaaaagaaaggatctgagcctccggagcatacagatagaagtcaaaagcgcagaaaaacggaatattttgttccttcaactccactattagaggggacttcagctcaagttagaggctggtcttatggaaatcttcctaagagagatgcgcaacgattttatcgaactgtacgtcaaaattatttatctaatgtttcattcggcatattttttaagtactggaaaaagtttgaattaaaggctcctcaacttgttcagccgcaatgatttcatggtttcggttagggtttccttggtagcagtagtttctatgttagatttgggtagttccaatattgatttactggtttacttagttttactccatgatgctgaactgacgattgttatatttctcattgtataattcaggtcatgaagtttgggaaccataatcaaatggcatgtattgcagaagaggtgggtggtgttgttgaagcagccccggaggaagcacaagttgagctatttgatgctttaattgatggttgtaaggaatctgttgaaacaggaaattttgaaccaaaggtaaaacttgaaatataaacatctgaaatgaaggctcttttgttttccttgttgttcacttggatatttccaatcttcctgttttctattctctgcagggtcctgtgttggatttctttggtgtgccagttaaagcaaacgaactattaaaacgtgtgcaaggactgcagctcctatcaaagcgtattagtcgatataacgatccaatttcacaattccgggtgttgtcataccttaaaccttcaaattggtccaagggttgcggttggaatcagagtatgtacaacctaaattcaatattatcatatcagcatctgtcttatgttttttatcctaagtctttttatcatttggtgttctcagtcgatgatgcgagattgcttctgggaattctttatcatggttttgggaattgggaaaagatacgattagatgagagccttggacttacaaagaagattgctccggttgaacttcaacaccatgagacttttctacctcgtgctccaaacttaaaggagcgtgccactgcacttctggaaatg

SEQ ID NO: 182128 - DNA, 923 bp, Arabidopsis thaliana landsberg
atggttcatatcacacctacaaaagctgactacgtgattcaacatgcgccccattgctgtaacatatggcttgtatgtaatggaaatctcatccaaacgaggtgagattgaggattatacttctgcatgttttgaattattgtaaagtttatagaaaattttctttgttgattagggagggacggttcgaacatgcaggttcagcgtactcatcctcaagcagccttcatagcattgattctgctctgataccatatgggggtgcaggaagagctgaacgtgttaccgagccacatgccttgtcatcatctgaagaacaatcagtatgtaaaccccactttggtcagcacatagcattttggaggattgttttatgaatttggaaccttgcgaattgcttaaaacctcacaaaaccattggagaatatatgaagaaattgaatagtgatatattggaaaatctagattccaacacctctccctgttaagccaaatatgtctcatttcctgtaccgcttgtcttaaaacatgagtttaatgtcaagtttactatgtgagattcttgtgctggtgttctataggcgattctcatttgttcaattgttaaacaggctagagggattgagaaaatgtattacgaggagcagagacggagattggaaattgaggaattaaagagagagaaggagcagcgcgataagatgaggcgtgtaagagaggaagcactctcaagttcttctggtgtcactaagatactgtacaatgaagaagtaatgcgcaagagagaagtggaggcggaactaaacagagcaaaagcagaaatagaagatatgaaaagggtccaaattgaacttaaagaacagcattatgctgattgccgtctgttagagaaagagcgagacgaagctatcaagaacaactga

SEQ ID NO: 182129 - DNA, 408 bp, Arabidopsis thaliana landsberg
  unsure (1)..(408): unsure at all n locations
acccctgacgccggcgagacacggctggaggagatcatcgtcacctccaccaaacgagccgaacgcctgcaggatgtgccggtgtcggtgacggccgtcaccgccgatgtgctggagcgcaacaacgtccgtgaacttggcgacctggtgaagctgtcgccgggcctggtgatcaactacggnnnnnnnnnnnnnnnnnnnnnnnnnnnnatgcgcggcatcggcaccttctcgaacggcatcgccgtcgagtccgacgtcgccgtggtgatcgacgacgtgccggtcgggttccaggccgccgccttcaaggacctgatcgacgtcgagcgcgtcgaggttctgcgcggcccgcagagcaccctgttcggcaagagcgccatcgccggcgtcctgaacatcgccacc

SEQ ID NO: 182130 - DNA, 704 bp, Arabidopsis thaliana landsberg
ttgatgctgcgtctctgtttgaagagacatccaaagaaggacagaatcaagatgaggatgctgaggatgtaaaaaaagaaggatcaacttcgcgttacagccagaggaagagaaaacaggtgcagatacagactaatgaacctaaagcaactccgcgagctagcaacaggaaaaagacagccacaacaacaccagctgctgaacataagtcagctcgggaatcttcctcgaaacgttacacaagacagcaacaaggtgatgtgtttgacttgactgaagaaaacaaggaatcagttgcaaagaaaggcagcaagaggatgaagaaacgcagaggtaactatgcagacgaagaagaagaagaagaggcttttgttccgcatatctatgtttcttctatgaacggtgtcattgcagtctctcaccctcctgtggatataaacccagaagagtttgacagttatctgaactctctagagaatcttcttcagcaacagccttcagaagcaggacaggagtcttcatcatcacttcccgttagtgcaagctctccagtgagagattacgaatggacagaagctcgaatgaagctttcatcgcttgtggagaaagatttctcttccttgttcatgtctaatgaagctacggagatggcaagcttggcagctaaactcaagaaagatccaagcctatcagctgaagaaata

SEQ ID NO: 182131 - DNA, 423 bp, Arabidopsis thaliana landsberg
cctgaaagcaagccactatattcggatccgttcccggagcaaaacctgacggaatcagagaagcaaaaggacttccataagaggcttgcggaggataacctccgtatccgccaccgtgaccagaagacgctggacgaggtggagcaccaccgtaacttccatagtcagaaatcccatgcggtggagtagctccgtatcctccaccgtgcccagacggctgcgacggacgaggtccagcaccgtaacttccgtaatctgaagatccagacggtggtggagctccgtagcctcctccgtaaggtttctcctttggcggcttattgtagtctcctggagaaggcgcgtacggagctgaaggaggcggtgctccgtatgatgaagatccgtacggcggcgcagaagaggatgatgattgtggtttag

SEQ ID NO: 182132 - DNA, 197 bp, Arabidopsis thaliana landsberg
cggtagctgcaagaggtggcatggagactttaaggcctgctttacatcgtctttacatgacacgagcttctaattataaagatgctcttacaagctttattaaaggttaccatgagggtctgcagcaagttatgcagaataaagcagagtctgaagccccagcagatgaagctgacaagtccaaaaagactacctga

SEQ ID NO: 182133 - DNA, 84 bp, Arabidopsis thaliana landsberg
cttatgttttatacgtgatacctctcgctagtgaaagtcctgccatcttcatctcacatgtggtttatatcatttgtgtagcag

SEQ ID NO: 182134 - DNA, 1204 bp, Arabidopsis thaliana landsberg
atgaagctggttggtttctctgaggttaaattcagtcatcagccttatgaatctgctgatttcgacgttgggggacataaatggtatagtcaaccaaatctaagatctaatatatatttcataactcttatgtaagatttgttatgtgtgatttatcaatgataaattttatcaggagattgatattttacccggctggaaaggtagacgaaggtggaaaagaccacgtttccatttatgcgaggatcgaaaatgttggtgcttctatgcagattgatgcagaactcaagttctttatctacaatcataacaacaagcaatactctgttttccaaggtatgaacatatttataaacacactttttattaagatgatatagcaatttatacatggtgtgatcgattttgtcggttttagtcaaatctgtcaaaccaaagaagatattccttggttagaattatgcttattggtgtgtttatatatgtagatggaactatgaagcattacaataaggagaaaaaagagtggggatttgcgcaaatgcttcttttttcgaagttcaacgacccaaagaatgggtacatcgatggaaatgcttgtatcgttggggtggagatattcgttataaagccgatagagaaggtggagagggttgtattcacacaaaacccaccagaaaacaaattcacgtggaaaatctctcatttctcatatataggagacaagagatactattattcagatgaatttgtggtcggagatagaaaatggtgagtttttattcattaatgtaacgcttaatcaccagttttcgatactgattacttgaaaatatttattcaatgtgctattatgatattttcaaggagattgaagattagtccaaagggagacaaaaaggtaagagcactttcagtctatgttcaagccatggcatatctgccaaatgcggtagcttctagcacttatgcaaagctcagacttcggctactaaatcagaaaaactctaaccacattgagaaacgcggtacatatccaactatatttttttttagtgtagaaaattcgatatgatcattcttaaagactgacttatgagtgatgtttctgtgtagtttttcatttttactcgagagagaatggagacggatcagggatatctgagttaatatctgtggaggatctaaatgatgaatcaaaagg

SEQ ID NO: 182135 - DNA, 320 bp, Arabidopsis thaliana landsberg
atgacaaaacagattgactttaaacagaacccgaacaaaaagcaaaagcgggtttattggatcatcacaattattgctttggctctaattgtattgccttcctacttcgcaccgagggagtatttaattcagacaaccaaaaacttacagtttcccgattattttccacttgaattagatatcctgaaaatcgtaggtgctattctgatccttgttcctgttattcccacaatgttaaaagaactgggcttacgtaggtttcggaatactcttgctaactgcaagtttggctcacggagttgtggatggattcgcaaaag

SEQ ID NO: 182136 - DNA, 462 bp, Arabidopsis thaliana landsberg
atgtggagactgagaattggtgctaaggccaaagataatactcacttgttcaccaccaataactatgttggtaggcagatttgggagtttgatgccaacgctggctctccggaggaacttgccgaggtcgaggaggctcgtcggaatttctccaacaacaggtcacggttcaaggctagtgccgatctcctatggcggatgcaggtgaaatattttacagtgtaaaacataacaatttggtctttatttcagaaaatagtattttaatttattctttttgttttattttgtggactttacagtttcttagggagaagaagtttgagcagaagattccgcgagtgatagtggaggatgcagaaaaaataacgtatgaagatgcaaagactgcattaagaagaggaatactatatttcacggcattgcaagctgatgatggacattggcctaatgaaccccctg

SEQ ID NO: 182137 - DNA, 93 bp, Arabidopsis thaliana landsberg
atcaaaatggcatttccaccttcaaaagtctcgagggagctcttcgctctattcacgacaatatctttcgcttggcttgttggaccttcagag

SEQ ID NO: 182138 - DNA, 594 bp, Arabidopsis thaliana landsberg
atgactaaaataaaagaagaatcatattaccttaatgcagtgtgctatcttctccgacttcaaatgcctgagattatagtaagacaacaaagttagtatatttactaaattatttagattaaatactgaagaattcgtttgggatctaaaacataagcaaccattatttatatgtctactgaatccaaatactttatcatcattatctacttaacatcgcagcaattattagcaaatttgttttccatttttttattggctacagaatcggttagcaaataattatatattgactaaaggatttgaacagttatattatatagaaacctttcatatagattcactgaatcgttacaactttcctctccattcaatatatatataagacgaagattaggttaacttcagtcaatctattctctctctgaaaactgtatcaaaccatagaaacttctaatggccgacacaaactatatctgtgacttaagtttacacaggaacaactgggtcctatatgtgaaaatcttaagcatctgggacaatcagtctatgatctttggaactcctactaccatgatcctctgtgatgtgaag

SEQ ID NO: 182139 - DNA, 139 bp, Arabidopsis thaliana landsberg
gatcttcttgtatgatcattcggctcagatgaagcatatttatccggaagctattgaactaaagaaagttttgaagtttgttgaaaacacttggtgtatgaaacctagtcttcatattaaaataaataccgatgcaatt

SEQ ID NO: 182140 - DNA, 193 bp, Arabidopsis thaliana landsberg
tacgtctccagccaatgatgtggtatgttcagatttgaatatgttatcggaaattaagactacaacaatgttccaaaacattaatgagaatgaccattgtctattgacggatattccaaagtttgactcactttccaagatgacgaaaaatctccataacactcgatgtattaagactaaagagtctagatag

SEQ ID NO: 182141 - DNA, 414 bp, Arabidopsis thaliana landsberg
  unsure (1)..(414): unsure at all n locations
gacggcgccgtggtgttcaagcccatccagagcctgcgcgagcgcaagttcgccgacctggtgcaacagaagaccgacttcagctgcggcgccgccgcgctggccaccatcctgcgccaggcctactggctggacgtggacgagcaacaaatcatcgaaggcatgctggcccannnnnnnnnnnnnnnnnnnnnnnnnnnnnnnnnnnnnnnnnnnnnnnnnnnnnnnnnnnnnnnaagcctggggatgcgtgcccgcggctaccgggtggcagccgagaccctgcacagcgtacgtatcccggtcgtggtgctgatggacgtgcgtggctacaagcacttcgtggtcatgcagaaggtggacaagggctgggtgtatatcggtgacccggtactgggccacaagcgctacaag

SEQ ID NO: 182142 - DNA, 441 bp, Arabidopsis thaliana landsberg
atgaatgtggtcagagagggtggcggcaaacgagtttgcagtttaggcagaatcacgaccattaaagaaggtcagcccacgacggctacaattagattatagagggttactaataataaaactgctaaaaaacgatactacgtaagatgatgccaaaccatccgggtaagaggctttagatggaagttgggcgagacatcggcaccgtccatcaatatgaacagccaagacgttcgtgaagagatttaatcggtttgcgtggtaagagcagcacgacatgaggttgtttccaataaaaccgcgtaaaagtttggtatcattttatcgttccagggatcccaggcagattgggattcaggacggttagaacccagtccgagagtttagagcgttaccgattagagacagttgcggatagcgaaagcgtcgttaaaattcaac

SEQ ID NO: 182143 - DNA, 499 bp, Arabidopsis thaliana landsberg
  unsure (1)..(499): unsure at all n locations
cgatctgcatgctatggggagttttcgcaggtacatgggaatttacgccgtttttctgaaagacaccaaatgcggcgacatcgtgtacggcggccagccctatgattacgaggacgggacgcttgtgttcgtatcgccgggacaagtctacggggtggatagccactccgtcaacaggaacccctcgggatacggcctgctctnnnnnnnnnnnnnnnnnnnnnngacgcacctggcaaaagcgatccgggattattcgttcttctcttacgaggtgaacgaggcgctgcacctgtccaaaaaagaacgcaagaccatcgtggagtgctttgagaagatattcgtcgagatccagcagaatatcgacaagcacagtaaaacgctcatcgtatccaatatagcgctgctgttgaactactgcatgcgtttttacgaccgccagttcatcacccggaaccacgtcaataaagatatcctgtcgcggttcgaaaactgttag

SEQ ID NO: 182144 - DNA, 192 bp, Arabidopsis thaliana landsberg
gataatcaactaaacaagtcgaatcagttattaaaagatttcagacagaaccgtacttggcgacatatatggcggagctctggagaccaaactgaagaacgttgttcatcgaataaagggcacaaactcgagactcgagaggaaggagaggcaaagaaccgccaaaaaaaaagctcgtacgcgcgtatatga

SEQ ID NO: 182145 - DNA, 659 bp, Arabidopsis thaliana landsberg
ctagttgcacagtatttgacactcctgggaaatttagctctttccttgcacgacaccgtacaagccagggagatcctgcgttcctctcttacacttgcaaagaaactttatgatatcccaactcagctatgggttctatccatcttcacaggttactattagagttttgtcaaaatagaattgagttaaaagtatgtccaaagctctgagcacaaaatttgatttgtttggtgaatacagctctgtatcagcagttgggtgagaaaggcaacgagatggagaacgaagaattccggaagaagaaatgggatgagttgcagagtagacttgctgaagcgcgaggatcaattcatcacattgaactggtgaagacccaatgatccctcttctgtgtgttattgcaataagtaagatcttaagcaagaatttatataacacactctacttgttactgcttgcaggttgcgaaagctaggatagaattgtatcagatcgacaacaatccacaagaacagtcactagtagcatctgcgcaatcaatgcaagggaatctggatattccagagtctgttggtatagaaggtccatcacctgctccatcatcttcaaggctcgttggtttagacaccggaaaaagatggggaaaacgaaggatgtaa

SEQ ID NO: 182146 - DNA, 120 bp, Arabidopsis thaliana landsberg
atgacgctgttcttagatatgtcacgtgccaacctgcctaaccaacaaaacttacctccgagccttgccgctctgacatgtaatagcccctccaagaccgcttatgaggggatggatgag

SEQ ID NO: 182147 - DNA, 146 bp, Arabidopsis thaliana landsberg
aagtagaggacgaggaggacaagcaaacatgggggaacatctctccaaaccagtttgtaaagagggactcgtcgagaagcagcactcgaaagctattgagtgactttgcaagaaggagagggacactcgtcgtcaagggcgactga

SEQ ID NO: 182148 - DNA, 214 bp, Arabidopsis thaliana landsberg
atgagtgtagtgggatttgatgttgggaatgagaactgtgttatcgcagttgcaaagcaacgagggatcgacgttttgttgaacgatgaatcgaaccgagaaaatcctgctatggtttcctttggtgagaagcagagattcatgggtgctgctgctgctgcctctgctactatgcatcccaagtcaaccatttctcagttaaagagattgatcg

SEQ ID NO: 182149 - DNA, 650 bp, Arabidopsis thaliana landsberg
atgaataaacccagaagtctttatcgaaagaagctccataggaatgatactgagcaggacgtagatcttactttatcaagaggcatgtcttttgcactctgtacagtcaagtctgtcgaaaagctgctcaaatctcctagcagacctttggctatcacattctcggggaactttcctcggtatcttccatatatcatcaatggacttgcagacgtcagatccggaatatttgaagggtatacctattattgtagtcacaggtaacagtttcagttttaggcatcaacttcacagaatcggaaggaaacaaaaatcccagaaaagtcaagcaagcatagaggcacacctcaacttcatctagactttgaaggggctcaattgctatattaacaagaatggtggataaagcctttgtaaacagtttgtccattctttcctcaatgtgatctggacatcaaagaagaagaacattgtttaagaaactatattacagatgttaactttttcctttaattcaccaaacagagtcaaagtttcacctgtattataaactgattcgtgctggccacaggatatatttgcaagcatttgcaggaagtagtgattacagaatacacctgaaatattgcaaagaatccaaacacgaaaag

SEQ ID NO: 182150 - DNA, 60 bp, Arabidopsis thaliana landsberg
atggcggccaagatgccatacacagcccaagatgtttggcggtcgaacatcgtgcgacag

SEQ ID NO: 182151 - DNA, 394 bp, Arabidopsis thaliana landsberg
atggagagaggacactctgcagattctcttgattcgaacgcatcagttgcaaaagcttctaaggtgatttcgtctaaggataataagtggattcaagttcggaaaggaaccaaaattattgtgcaagttgttaaagagggcctcggtacgaaaggtccaactcttactgcttacccgaagctgagaagtagattctgggtatgagatatgttttatcccgttactcttttccatttgtttcttattattctattttctgaaataaagtttatccttataggtactattgactcgttgcaaacgaattggagtctcgaaaaaaatttcgggagttgagagaacccggttaaaagttatagcaaaaacattgcagcctcaaggttttggcctgact

SEQ ID NO: 182152 - DNA, 596 bp, Arabidopsis thaliana landsberg
gtttagtactgaggaggagagtgatgattttgatatcccggtgtatgagaagcttggaaaggaggaaaaagagattgatgaagaaacgttgaaggagaagaaacgagaagagcagttagagaaagctcgactagcgatggaaaggaagaggaaactacatgagaaagctgctgctaaagctgtcataagagttaagaaggaagctgagaagaaaccaaggcaattatattatcttgttcccattttttcaatgtatcattagtttgtttcttatttctttgtttggttttcaggagtgtgagaaaaaggcgaagaagaaagctgctgcaaattctacttctccttcagaatcagaccaagtaatcaatgatgaaaaggttaggacattagcagtttcagggaaagagaaacaccaaaaggagagattgttgtttccaaagcagagaagttttaggtacaaacaccgcggaagcggaaccgaagctctccctaaggccatcctaaaccgtagaaaggctcgtcgatattgggtttggggactttcttctgctgcacttgcggtctcgctcgtccttgtggttttacttctaaggtaa

SEQ ID NO: 182153 - DNA, 141 bp, Arabidopsis thaliana landsberg
atgggcatcggcaactactggcggaacagccatgaatttatgctgaccgccattcggggcaacgccaagcggttcaacgatcattccatccgcagttggcttgagtgcgaccgcggcgtccacagcgccaagccggagcag

SEQ ID NO: 182154 - DNA, 88 bp, Arabidopsis thaliana landsberg
agatcccattgtggagcactcagagcatcggtctttgtctctgggccgccacgagaacaccaccgccccaacacttgaactaatctga

SEQ ID NO: 182155 - DNA, 95 bp, Arabidopsis thaliana landsberg
gtttcccccaggctagtaaccctttcaacgtgtatcggatggcaatacgcgggggtttcatacaacccgctgggccctacggccttgtttacttg

SEQ ID NO: 182156 - DNA, 1614 bp, Arabidopsis thaliana landsberg
atggaggagatacagtctcaatcggatttataccgttcgtcttcgtcttctgcaagtagtcctactagtagagttccatctagtcactttttctatgtaagaaaacctggttctcttcgacaacctatatcttttgaagactctcctgaatgggaagacacacctgatgttgatttaagaatggaagatgaagctggtggtggtgattctattaatgacgctacaacaacgcctgtttctccttcggtgtcgaagatgaatagcggatcaatggcttctcctcctgttcctgaaggaggagctgggactggtgttgttagaaagattgctggtgcttctattgcttggaaagatttgactgttactatgaagggaaagagaaaatattctgataaggttgtaaagagttcgaatggttatgcgtttcccgggactatgactgtaattatgggtcctgcaaaatccgggaagtctactctattgagggctcttgctggtatgtcatttgtcagtttattcattgttagtttgttttttcatttgatctaatcacatcttttataggaagattgcctccttcagcaaaaatgtacggtgaggtgtttgtgaatggctcaaagtcacatatgccttatggatcctatgtgagtcactattgtataatgttttcttgatcttttctttttggtttgaaatgtgtttctgattcttggtttgctgcattgcagggatttgttgagagggaaacacaattgattggttcacttacagttcgtgaattcttgtactattcagcgttgcttcagcttccgggtttcctctttcagaaaaggagtgttgttgaagatgcgatacaggccatgtctctgagtgattatgcaaacaaattgatcggtggtcattgttacatcaagggtcttcgaagtggtgaaagaagacgtgtctctattgctcgtgaacttgtgatgcgaccacatatcttattcatcgatgagcctctttatcatcttgacaggttctaaccatttctagacttatgttattatttgccttctactaaaaggtaaaatcttgcattctaaaattggctcctttgctctttttatagtgtttcggcactgcttatgatggtgacactaaaaaagcttgcaagtatgggatgtactcttgtattcaccatttatcaaagtagtaccgaagtgtttggtttgtttgatagaatctgccttctatcaaatggaaacacactcttctttggggagacactggcttgcttacaggtataaattgtttgaacttgaaaaatttctcatatcatggccaaatgatcactctctaaattatgtttgcttgttatgtgtctgtctccttgaagcatttttcaaatgctggattcccgtgcccgataatgcaaagtccatcagatcattttttgcgggctataaacacagatttcgataggattattgcaatgtgcaaaaactggcaggtgcatacaccattatacaccttgagttatatgattttgtttctttctagcttcttgtaacgccagttttctcatatgagctaaatataaacgacaggacgataataaggaattttcagcagtga

SEQ ID NO: 182157 - DNA, 1387 bp, Arabidopsis thaliana landsberg
atggcgcacggcggatatgcgaggcggagagttgcagagcggaagacgacggcaggaactagtcggagatcgaaaggattgcgcgtggagaaaaaaccgaagaattcctctctcaagaatcaaattcgttccatcggtcgcatgattcgtaaagtaactactcttcttctcttcctacgaaattagcgtttagagttaccttctccggccttttagattgaaaatttagctaatcaaagtaggtttcagtgttttctcttaaatcttttgaggaatttgtttcttatgattataataggatcatggtcgattaacttgcttatgagagatcatgaattgatttcgagaagcaatatgtctttaatggagaagagatgaattttgatgtatgaatatgtacaaatgcaattgtctcttaggatcttcctcctgaagtaagagaggctctagaaaagaagttggatgatctgaagaagcagcaagatatccatttccgtcttgcttttgaacgtaaaatcttcctaaggaacagaaaggtcagattcttcggtgagtgctttatttttgatgcattgtatatttgtattgttctgagttgtttttccgctgaatcatttggcttactcggacaaaacaattacatctttctttgtgtagagcggagaaagattgaaaggagtataagacgtctcgagaagctacatcggagtacatctggtggttatgtgcaagatgcagaaataggtgggcaactcaatagactcaaagaagaccttgaatatgttagggtaagcattttatacaatccaaatccagtttcctgtgttagtcggaagaatagacgagttcttctttttcacaatttcttcagcgtgttatcctctgctacatttcctagttatccaatagaatgagtctgttgaaataatgctactgagatcttgatatgtgcaatgcagttcttccccaagaatgagaagtatgtatcgctatttagtggatctgatgatttacaagtatctgagcggagaagtaaattgcggaagcaaatcaaagccaacataatttttgctgctgccagtgggaaagagttggaaggtaatgatgatatgtggagatgtttatatgggtcctttttcccttgaatttctgtttaaaatttggggcagcgtgcttttttttgtcattgcatgcattccgaccttctgttggcttttgaaaaaatactgattatgttgatcattaatattttttggttcgtgtgaaaaacagagacagggagcgaagatgatgctcttttggacctgagtgacgatgacttctccctcaacgccagttcaagtgacgaagcagatacggatgaaaagtggactgataaaagcacaaa

SEQ ID NO: 182158 - DNA, 59 bp, Arabidopsis thaliana landsberg
agaagagagaggatccgtcggtgtgctagtctcactgacactacatccgatcgtcgccg

SEQ ID NO: 182159 - DNA, 72 bp, Arabidopsis thaliana landsberg
ttgtcacaagtgtttatggagaattcgggttcaacaccttcaacacttatggcgattcggcaaaaaccttga

SEQ ID NO: 182160 - DNA, 687 bp, Arabidopsis thaliana landsberg
tttaacaggggtacgagtgctatgcaacattatgtggctacacgtccaatgtttattgatgtggaagtcatgaattcagacattaggttggttcttggtgaccatggttctcagcctagtcctagcaatgttgcccgtggactttctgctttattcaaggaaattacaggtttgaagatcattgatttggatgcaatcattgaatcatgcttctttgccgattcatatcttttgttacttcttatgtgtagacactgtacgcaaagaagcagcaaccattacagctgttttccctactccaaatgaagttatggctatcttagttcaggtaactggcaccaataatttggacactgtagtgttaacccagcccatggataagctataccaactcttcgtgtattttacgcagagagttctggagcagcgtgtcacaggtattttagacaagattttggcgaagccctctcttatgagtccaccacctgtgcaagaaggcggactgttactagtgtgtagatacctctttatctctcttttgtctatcttcatagtagaattggtataagaaagtaattcttaatttttgtctttagtaccttagaatgttagcagttgcatatgagagaacacaagaacccgctaaagacctccgagctgttggatgtggaaacctggatgttgaag

SEQ ID NO: 182161 - DNA, 625 bp, Arabidopsis thaliana landsberg
ggttttcgatcttttcatcttctggtaaaatggatagataccagagagtcgctaaaccgaaaccagagtctccgattaacgagaatgagatccgtatcaccagtaaaggccttatccgaaactacatcagttatgccaccagtcttcttcaggtactctctctctctcttctactttgtttcaagtcgttcgctaaaatcgtgattcaccgtcgtatatgctcactggagtgtgtaatgtttcattggacttgtgtttcggctactctgttgtacggtttttttgggtcctttctctttccgatcattttggtttcaaatgtgtcatcatgcaccattttactttgatttcgtttttttttttttttttgcatttctgatcctaaaaatgactctatttgcgatgtgatgtacttgaaataatgatgatccgtttcttttggtttcaggagaaaagtgttaaagacattgtgttgaaggcaatggggcaggcaatcagcaagactgtggctatctctaagatactaaaagtcagcgtttttcttcttatgaactttgtgaaggatttatcatctaattggaaatttatccaagaagcagactttgtaattcaatcgcagaaataa

SEQ ID NO: 182162 - DNA, 660 bp, Arabidopsis thaliana landsberg
atgggtgcggtgctgtcccgacggatcgggttcgagctcgagctgctggcacccagcggctcgagccggcgaaccctcgccgacgagctcgcgaaccggtgtggcggatcggttcatccggtgtggcacgtcgacagcgagccggtgcccatccaggcactcggcggtcggttcatccacctgacccagggcttcgaggtgcgccgcgcgtccggtgggcaggtgtgcacgctggtcgacgacatcacgatcgcggcggacctcgacgcgacggcacccgctccgcccggctggcatcggctgctcaccgacgacctgcgcttcgcgtggctgctcgatcagcaatgtgacccggcggcgcccatcgacctggtgctggacccggtcgccacgctgtggggtgccgaggtcgagacggtgggaggggtcaggcgcctcgacacccgcggcgcaacggtcgcgcttgccgcgccgtccggcggcgaacgcgagcggccctgcgagatcgtcaccccaccgatcgcggaaggtcacgccgatgtgctcgaggagctgctcgagccggcacgggacctcggttttaccgtgccgcgcgaggccgccgtccatcttcatctcgacggcaagccgttccgggacgctgcgacactcgccaacgtc

SEQ ID NO: 182163 - DNA, 155 bp, Arabidopsis thaliana landsberg
atactataatggaggaaaatgggaaaacatctgagcaggttaatgaggagggagaggatcatggagggctggaggatgctaaagaggagggcgaaattactgtggtgtccaaacctgttggaacagagattgatgaaactggggaaaatgaatag

SEQ ID NO: 182164 - DNA, 322 bp, Arabidopsis thaliana landsberg
atgcagaagaaagtgttattacttaagattatagagaggtttacaaaggaagcttctctgagctttgatgacctgatgagatggttaatagataacgcagacgaaaagcttggagaatcaatacaaaaatgcgtacaaggcaaacccaaacaacaagaaagcatcgcaggtcgtcgaatggttgccatacagttcaaaattccgttatgttttctccaaggacttgatggagaaaaagccctggtgggtttagaaggatattgcttgtgttataatgaaagctttcgatgccctaattctctcccttgtatgtttatagtga

SEQ ID NO: 182165 - DNA, 120 bp, Arabidopsis thaliana landsberg
atggtttgtgaagggttgtatcgtaaatttaagcgaacaacagagaaatctttgaaaaagagacacacttatgtcttctcattggtgtatctacttcttgagaaggaagcaagagacaaa

SEQ ID NO: 182166 - DNA, 415 bp, Arabidopsis thaliana landsberg
cggcagacaacgccgctgccctcggccaccttacgccccgccggccgttccggatgcgacgacaacgcatgccggtgtcgacgcggccagcggccgaaggcacaccctgccagtggcgtttgtcgaaaacgacgggtgtggatcgtcgaaccgagagcagctcccctgctgccccttttctccaccaccgaaggatacccccgtgtcgcgcatgatcttcatcaacctgcccgtgaaggacctcgccgcatcgacggacttctatcgagccatcggctttacgaacaacccgcacttcaccgacgacaccgccgcatgcatggtgtggagcgaggccatccacgtgatgctgctgacgcatgccaagtggcgcagcttcacccagcggccgatcccctcggccgaagcaaacgag

SEQ ID NO: 182167 - DNA, 355 bp, Arabidopsis thaliana landsberg
atgattactgaaccaagtctaaccgggatttcaggtatggttaatcggaaccgtttatccggtttacccgatcaacccgcttcgcatagcttcactccggtaacactatacgacggtttcaattacaatctctcctccgatcatataaacaccgttgtagcagcgccggagaattcagtttttatccgggaagaagaagaagaagaggatccagctgatgatttcgatttctctgacgctgttttaggatacattagtcagatgttgaatgaggaagacatggatgataaagtctgcatgcttcaagagtctctagatctcgaagctgctgagagatcgttatacgaagctattg

SEQ ID NO: 182168 - DNA, 152 bp, Arabidopsis thaliana landsberg
gtgggtgggttggttttttctcgtacgacactgttcgttacgtcgagaagaggaaattgccattttcaaaggcccctgaggatgataggaacttgccagacatgcatcttggtctgtacgacgatgtagttgtatttgatcacgtggaaaag

SEQ ID NO: 182169 - DNA, 272 bp, Arabidopsis thaliana landsberg
tccaagccaatcaagacgcctggctcagggaatatgacattgagtatcgaaacaaaacatgtgcaaaatcccaggtcctagccgattttattgtcgaactgcccactaaggaggtccgggaaaatccactcgatacaacttggcttctgcacgtagacggctcgtcatcgaagcaaggctcgggtgtaggcatccgcctcacctcgccaacaggagaggtcctcgagcagtcatttagattaaacttcgaggctaccaacaatgtagcctag

SEQ ID NO: 182170 - DNA, 417 bp, Arabidopsis thaliana landsberg
atggtgagagaaaaccgccctgaagaagtggtttcaagaaggcagagagtttcaccttcaaggcaatctgcctatgagcaacgagaggtaagtcgccctcaagctcctgcaagacattcatctcatgagcaccgcgagcagaagagaaggagaaaaacaagaattgttcggccaaggagcaaggaccttcttatgtccagcagaagatcactcgaccaagatacttgacgtgatatcgagcagagtgtcgagctggatccgtcggttcagaacgagcagagtgtcgagcaggatccgtgggttcagaacgagcagagcatcgggcaaaatcagtgggatcaagatgggcagtactcgggaatgaattgggatgcttaccatggcatcaacgagcaggaacccacctctgacaactga

SEQ ID NO: 182171 - DNA, 157 bp, Arabidopsis thaliana landsberg
gggaataaagcgttatgagtgtgcgattgagcacccgattgacatggagatcgagtatcccgcaccagaggagggtgaacaactacaaggtcccagtattccatgggattacaccagagaggaggtggacgactacgtctccagtgccttcggctga

SEQ ID NO: 182172 - DNA, 847 bp, Arabidopsis thaliana landsberg
gtgagaaaaagcaaaacctgaaaacgaaagaaggacaaggaagcagcgggaacaagtcagaccgagaaggtcgagataacccgtgagacttcctcaaagggaaaagaagttgtccaagagaaggaaaaggaaccaagggctctcccgactctgaaatctgtaatcgtttatccgtggataggggaaacggagatcgaggaggaaatcttggaagagaccgatgaagagaatgatgaggcgggaaagggcggagaaaacccaaccgcaattccttcattcggagagatgtgggattccatgaaaacgataatggcacaactggccgttcttacccttgccgtcctgccggcaggaatgccttcgaagggaacggacgggaggattcggcaggccgtgacacaatcggggaacaccgtgaggaattcgaccgaggtgatcgaaattgatccaccggttcgggcagttcgcaaggtcgactaccttagcctgttggaacatatctcatggctcagaacaaaacacttttcgggcagttccaatccgattgaggcggacgagtggaggagccgtttggtgcggaacttccgttctactcgttgcccggaggactacaagaaggacatagcgatccacttcttggaggccgatgcgcataactggtggcttgcggttgataaacgcacgagtgagcacgttgagaccttcaaggacttagaggacgagttctacaggaagtactttccgtccgaggcatgggaccggctagagagtaatttcctgtatcttgtccagggtcatcgtaccgtccgtgagtacgaggaggagttcgacaaactcacgcacgaac

SEQ ID NO: 182173 - DNA, 49 bp, Arabidopsis thaliana landsberg
tgaggccaatgttgattgggccagagcaaccaatcgatttgctgaaaaa

SEQ ID NO: 182174 - DNA, 515 bp, Arabidopsis thaliana landsberg
atggcgacacgaaagagcgttctgcgaggtccggatgatgaacgtggggcgatgcgcgccgatcaccggaaatcgcagaatattacggcgttatttgcgttttgatcccttcggttttgcactgcaacagcgtaaaattcccgtttttaccctcctgtgatgattccatgacgccagcaactgacgaacccgtcgggcacgcagacgtgcgtactgtcggcagcaccgacgcgctccctatcgccccggccctgggcctgtccctggacgcggcgagcatgccgcgcaaatcgaccctggtgacgcgccgaattctgttgatcagcgtgctggccgtgattcttggcgtggcggcggcttacgtggcacagctgctgatgctgttgatcaacctgatcaccgacctgtgcttttatggccgtgtttcggatgtgatcgggcccacggcgcacaagggttccttcgtgttgtcgccggccgggaatcatcttggcgtctgggtcatcctgatcccg

SEQ ID NO: 182175 - DNA, 605 bp, Arabidopsis thaliana landsberg
atggctatctcacctgaagaggtgagagtcaccttttttatcaattggaaactatccattttgttgttcagagtgccagcgctatcatatatgcagataatccatatctcatttttttccctacatacaggctgaatcaaagtttggctatcttctggaggctcttgacatgggtgctcctcctcatggtatgtaaatatttcttaaggtcaaaaaatctgagacttaagaatagattaatacaacatcgttacgtatatgcttaagagtatagactggttcaacctctcttttgttgtgttggaacaagtttctgcctaggatctttaagagaaattggggtcttaaacttttttgacactggatgatgatgatgttaaacaagattggtcaagcatggttgatgaaacattagtatttgatatgaaattacaggtggaattgcttatggattggatagaatggtgatgatgctgggaggtgcgagttccataagagatgtaatagcctttccaaagacaaccacagcgcaatgtgccctaacaaggactccctcggaagtcgatccaaagcagcttcaagatctctccatccgcaccaaataa

SEQ ID NO: 182176 - DNA, 531 bp, Arabidopsis thaliana landsberg
atgaaagtggctcataagggctaccaaggcatcttaaatcaattcgtcaaggtatccggatacaacctctctctgacgggaacctgcgccgtagccgggctcggaggcaaaccctaccgggtcggctcctatcgttactatgcaagccaaagacccgtgacaaacgatcccaagggtgttggcgcctttattctggctgcatcccaaatgcagattgattccgggttatccgaaggacaagggctttccgtcacactggataactatttcaatcaggagcgccacagggatatcacgggccatgaagtgccctttcattatacctgggatgacatggccaatagtggattctccctttggggtaatatatggcagtttcacggggtggcgctcgggacattaagggatgcccccaccagccgcaatctgcaacgcaccaacgtatacatcatagtagatccggatacccgggcagaaacgcctgatccgcactttatcaccccggaggacgttcgcagtctttcccaatgg

SEQ ID NO: 182177 - DNA, 553 bp, Arabidopsis thaliana landsberg
atgtatcaccagcagccaaaagatgcctgctaagagatgatggagcaagtttctggaaaagctctgtgtcttcagataagcaaggtaacatagagagagcagcttttcgaggaacacagatcttgagaatatacggttctccaaaagtgagtaataaagaaatgaatccaaggatcatcagctctgtcgaatcagtcgccatttcaaaaaccaaaaccaaaaagatttaagaaaaccaaggctatatgctcacttaccagctttgattttctctaaggcttcaaggagagagtttttatgcttcttccatagccactgagaagaaacaaattcatatgtttcagacaatgaatgtttgaacaagaacactcgtaagcaaaggaagaagaagaagaaagcagacgttggcgagtctttgaagacccttttcaaggagatgggaaatgaggatgagaaaggtgcagacgacggcgactgcccaagtgggcgtctgagaaagctctttcccaccagagggagctccggtggctgtagctccgccatggaacactag

SEQ ID NO: 182178 - DNA, 925 bp, Arabidopsis thaliana landsberg
atgccgttattttccctcttgttgattccggtcttgtttgttgtctcgctcatcttcctcgtgcgctttatcgtgaggaggaggagaaagtttgcggaggagttcgaagattgggaaacagagtttgggaagaaccggttaaggtttaaggacttgtactatgctacaaaagggttcaaggataaggaccttcttggatcgggtgggtttgggagggtttatagaggtgtcatgccgacaacgaagaaagagatcgcggtgaagagagtgtcgaatgaatctcgacaagggttgaaagagtttgttgctgagattgtgagtattggtaggatgagtcatcggaacttagttcctctcttgggttattgtcgtcgtagagacgagcttcttttggtgtatgattacatgcctaatggtagcttagataagtatttgtacgattgtcctgaggtaacacttgattggaaacagaggtttaatgtaattataggtgtggcctctggcttattctatctccatgaggaatgggaacaagtggtgattcaccgcgacatcaaagctagtaacgttttgttagacgcggagtacaatggaagactcggggattttggtttagctcggttgtgcgaccacggttctgatcctcagactacgcgtgttgttggaacttggggatacctagccccggatcatgtcagaacaggacgtgccacaactgctactgatgtttttgcgtttggggtgctcctactagaagttgcttgcggtaggcgacctatcgagattgagatcgagagtgatgagagcgtgttgctagtggattcggtttttgggttttggatagagggaaacatcttggatgctacggatccgaatctaggatcggtctatgaccaaagagaagtcgaaatggttttgaagctag

SEQ ID NO: 182179 - DNA, 2500 bp, Arabidopsis thaliana landsberg
atggcagccacgcttccactctgtgctgccctccgatctcccgtctcttcccggagattcgctccaattcacaaaaccgacgttccttttcagttcaatgtcgtcctttcaccgtttttcggttccgtcgctattggcggtagaattttcccgcgtttaccggcggcgaagcaggagactgatcaggatgaggttggatttgatcagcagccgtctcaggagcttgcgatagcgtcggcttgtttggttggtgttctcactggagttagtgtggttctattcaacaactgtgttcacttgcttcgagacttttcctgggatgggattcctgatcgtggagcttcgtggcttagagaggcaccgatcggttccaattggttgcgtgttatccttgttccgactatcggcggtttggtggtgagcatcctcaatcagcttcgagaatctgctggaaaatctactggagattctgattctagtctcgatcgcgtaaaggcagtgttgcgtcctttccttaagactgttgccgcatgtgtgacgcttgggactggaaattcgctggggccggaaggtccaagtgttgaaattggagcgtcaatcgctaaaggtgtgaattctctgttcaataaaagtcctcagactggcttctcacttcttgccgctggctcagctgctggcatttcctctggtttgttcatctgatatttgctaatgttgttctctcttgcgtatggaactcttgattgattcgttaagaggactttgttatatgttgttacagggttcaatgcagctgtggctggatgcttctttgcagttgaatccgttttgtggccttcttcatcaactgattcatcaacttcacttccaaacacaacttctatggttattcttagtgctgttactgcttctgtggtttccgaaatcggtctcggctctgaacctgcgtttaaggttcctgactatgacttccgctctcctggaggtaatatgcattgccattcttatgctttttacgcaagggaaccagaaaccaaacttatgagagctggtcactgattttcagaacttccactctatcttttattgggcgctctgtgtggcttggtctcgttggcattatctcgatgtacatcatccatgacatctgctgttgacagtcttaacaaggatgctgggataccaaaggctgtatttcctgtaatgggtggattaagtgttggtatcatagctttggtataccctgaagtattatactggggttttcagaatgtggatattttgttggagaaacgtccatttgtgaagggtctttcagctgatcttttgcttcagctggtagcggtcaagatagctgcaaccgcatggtgtcgggcttctggacttgtcggtggatactatgctccttctctctttattggcggggcagcaggaatggcctatggaaagtttattggacttgctttggctcagaaccctgatttcaatctctctatcttggaagtggcatctccacaagcttatggtctggtactgttcttatgtggtcaatgtttcaaaattgtcttaatttcagactttcttgattggttacctatcaatactttgaacagaatattttttcgggttaactgagaatggatgctagttttttgtagcttcattgccaatgatcctgtttgtctcattgtttaacaggttggaatggctgctacacttgcgggggtttgtcaagttcctcttacagcagtactactgctatttgaacttacacaggattatcgtatagtgttacctctactgggagctgtaggcatgtcttcatggattacatctggacaatcaaagagacaagaaactagagaaacaaaagaaactaggaaaagaaagagccaagaagctgtacagtctctgacgtcatctgatgatgaatcatcaacgaataacctttgtgaagttgaaagttctctttgccttgatgattctctcaaccaatctgaggagctgccgaagagtatttttgtttcagaagccatgcgaacaagatttgcgacagttatgatgagcacttctttggaagaggcattaactcgtatgctgatagagaaacaatcctgcgccttgattgttgatcctgacaatatctttctcggtatacttacactttcagacattcaggaattcagcaaagcaagaaaagaaggaaataatagacccaaggtacgaaattgaatagtctgaaataactatttctttgatcattaattgaagcatttctttggcttaggatatttttgttaatgacatctgttcgaggagtggaggaaaatgtaaagtgccatggactgttacacctgatatggatcttctcgctgcccaaacaatcatgaacaagcatgaactttctcatgttgcagtcgtttcaggcagcattgatgctcccagaatacaccctgttggggtcctggatagagaatgtatcactctaacacgcaggtaa

SEQ ID NO: 182180 - DNA, 3046 bp, Arabidopsis thaliana landsberg
ggttccaatgctcgaaaagcgtacttcatgatttttgagagaggaccaacagcttttgtgaacgagagtacgaagttcgtgagcaaaagtctcagtgaggattctgcgatgcagcatctttgtcagtcatcttcgtctcacatgacagagaggatgcgggtcttggtggagttaagatctgcactcgcgtcctttattgcccaggttctcatgaaaatttaattcctttttaacattataaagttctctgcatgagtagccttgttttgcatactaatgtcacttctttcaatgggctttctagctttatgttgagttggataaacgtggagaggatcttgtgaagattccagaaaaggcactgccatcattgttggctgttatcaatggattgttttcgaacctggagggatctttcagccatttgcatgctgtgcgtgaggtaaacatactgttttttactttttgttgtcactaccttcatttgtctgaccatttatacaatgatggtcccgagtcttacttttatgtcttgacttacatccctttgcagtgtgattcttctgttgatggaagttacccaatgcctcttgtatttgatcgactgcctgaagttaatgaagaaggatcccagtggactgattgtgaacttacagatgcaatcaacctggttcataaaaatttggaaaaacttaactcatatttatcagttatggtaggtgtgactgtagtttatgtagcattggtcataatttgttttagcagatatgatcatgtaaagataaagatctatcacctgaaatcaactgagtttttctacttgcatttctttttatataggtagggaaacatcggaagccaaggaggatgaccctgtactgggtccggtatacatgtggtgcagttgggctctctgttttctctatatggctactacgtcatagtagtttgatgggaagttcggatatagagaattgggttcatgatgcaaaagaagcaacgatgagcttctttagtgatcatgttgagcaaccggtttgttcttaaccttactaatattttaagtgactttttttcctgttccaacaaaatgacttgttgcataaaactctattaaaggatacaaataaagtagaaagtgatagctccagcgtctctcaaagtttggtctgagccaaaataatagtgtgtcgagttacaatgaccgagttattagtttgttacatgacattttgaggggatggagtttctgaattagtttcatgatccttgcagctgctttccgttcgcgatgagctttttgatacttttcggaaaaggcactagggtgttatggaatctgaagaagtgcagctgacgcaagattcgctccacaggttgatattcatttccttcttgattctttttatcctagctcggattttttgttattgtatatgtgcgttcgtcgtctccatttcattatgccttagcaattcacttgttctattcatatggagctattaatctcattttttggatctctgggttttcgcataccctagacaaggaacctctataactatttatttagtacgtcttacaaattctgtattatgcagaatgcttcggaatttctgcgagcaggctacacgtgaaaaggtcccggataatgcatctgatcaggagatgctcgaggttgttatgaataggtacaactctgaacattactctttcttaggcagttaagggcacatgatgttgcattaatgtaaacaatcaaataattgttagtagttccaatcttgggtaatgaaagacgtttcctcatgactatgttggtcattagccttgtttccaaccacgttagacttggtagaatgatttcctctgaaacttcctggtatgtatttgaattttaccttcttattgcaggtatgaaaaagaacttgtgcaccctattcacaacctccttagtggagagcttgcccgtggtttgcttattcagggtaatctaagttcttggcatgaagctatagtttatggtttgtgaaactctaattacatcagaatttttctatcttccaggtccaaaagcttaactgggatatagaaacgtaagttcattaattcagtagctctcagttaactagagtagatctcttactcattttgtatacaactgaataatcttcttctgcagagcgatgcttgaactggatcagatactccgtgcaaatgaaataaactttgccattctggctgcatcacctgcattctttctcagcattgttatgcttacagtgcttcggacctggcttaaaaaggtaaggagtgataataaaaggaaaaccaaatgtgacagaaatagatatatttgatccattttttatagtttaagactaactgtgtacagttaatgcagctctgttatctttattcagtttcatttcattggtatgaatcaggatagcaaagctcaaggacgaggaagaattgctcgtattcacaggagactacttgtcgttgaaattgaaaagagaattatgcagtatcagagctacattgaacaaggacgtgtatgatatccactattctccttttccccctttatcttaaatcattattattttgcaaatgggttctgtaagaatcctgtgaaaacgtttctggtcgtttcttgatgctgttaacaggataaggacgcagaaactgtatttggtttgctaatatacagccttgaacgtttgtaccgagttgttgagaaacctgcaagagcaaccgacgagtgggatttgtaagtttttactctgatcccatcaattagctgaaaacaattaattaaactgaggctgcgccatcagctttcagtttaccacaagtcctttatttgttaaagtggttatatgtgtgcttgaactgactgatgtgtttttttaataacagagtgaaacaagatctgatcgagttaggaaggccacagcagcaaacatcatacaagctaacagtgacacaacgactagtaacggtttatgactgcttgcttcccactctgaagcgacaataa

SEQ ID NO: 182181 - DNA, 357 bp, Arabidopsis thaliana landsberg
aaatattcgatattttgccaacctacaagagcgtcacactctaccgttgctaccctgttattcctgaccttgcaaggtacggatgtcctgcgataggttcggtctcagtgtctgacaaccttgaaaatcctgttagctgcgaagcccgtttcaccgtgaacattcctacgagtttcgttccaaacgagaaaaggttgaatataacaagtttggtaagggatgtaagaaatggatttgaggtgaggttgagaatcgatgaaaattcgtgtcaagaatgttcatcttctcataaatattgcggctttaccggaaccttaccattagaaactaaatgccggccactcaatctaccaactc

SEQ ID NO: 182182 - DNA, 261 bp, Arabidopsis thaliana landsberg
gaacgggctggcacaacaccgaataccgcacctacactttcacagacgaggcgcacaacgaggatctggagggccatcccttggacggtgacaatgccactctgaccgagactcttgagtcgcggcagcgacgtggcaaggtcggttccatgcctgaccgtgagcagcagaagacattgtacaagcttggcacgcagggctgggacgaccagggcttgcagatgagcactgcggagcgggatgctgccaaggtgcctggtg

SEQ ID NO: 182183 - DNA, 176 bp, Arabidopsis thaliana landsberg
ataatttacggctccggcaatgtgaagaaggatttggaatgaaagaagaagatgaaaatgaagaaagtggtttgcttcatagatacttagataatcagttgagtttggctagaactatttttgatgatgacggcgatcgtgataatgattctattagggttccttttttgtcgtaa

SEQ ID NO: 182184 - DNA, 250 bp, Arabidopsis thaliana landsberg
gtaattttccctcacaagaagctttactttcgcatcatagatacagtaagtgtggttgcattacagacacaattttgtttatattatctttgttgacccaattcttggaatcttttgttaggtacgtctggatattgctagtattctgggacttacggcatactttgtaaactacaagtttgagaacatctcatcatccccgtatatctctcatcctcttccttctaagccgcctaatacaaagaattaa

SEQ ID NO: 182185 - DNA, 185 bp, Arabidopsis thaliana landsberg
gagatccaatgaagaccacctttgttcgcaccgttgttctgaccctcaccttcgccggcctcacggctccttccctgacctccgcgaagacggttgcacctaccaaggcgatctccagcaacttcaccccttatccggtgcccctttgcctgcccagcagcggcgatgtctgcggaatgcagtaa

SEQ ID NO: 182186 - DNA, 372 bp, Arabidopsis thaliana landsberg
atggcggccgtaccgagaggcctcctttctcgaatcaatcagtttctatcaatacggtctataactccttcatcctctgaatctcttcctcattgtagtagcttctttctcctccgacgattcagctccgatactgggttgatggacggtggtggatctgatattatcggggctcagacccgaatcattgaggcgaaacaaggtgagatgtctagtagatccaagaggactgggatcatcgccgttaagtgtgggatgactgcgctctgggacaaatggggaaagaggattccgatttctattctttgggttgatgataatatcgtctctcaggttaaaactgttgagaaagaaggcatttttgcgttacag

SEQ ID NO: 182187 - DNA, 325 bp, Arabidopsis thaliana landsberg
gaccaagactgcttggctctcgcgatcgcacacggagccgatgacactttcggctgggaccacgtcaacgaatcgaatgacatcatgtatgcgtcccttagcgaaggtactcatagtttcttgaaatcgactctagaaaatggtgctgtgcaggacgaaccagtcatgcttcgtaaacaagtcggtactttggcagtcgactcacacacggacacaagcacgtctacatcgaccgattcgagcacatcaaacccaacgcaggatgtcagctcatgggctaacgtattcaaactcagcctgtcggacctcgacgcaatgttgaacg

SEQ ID NO: 182188 - DNA, 104 bp, Arabidopsis thaliana landsberg
atacgcagcccgttattgctctgatactagcagtaatggggagtcctaatacagatatttatgttgttgttaatcagcgagtgagtactatacgtagtggctga

SEQ ID NO: 182189 - DNA, 432 bp, Arabidopsis thaliana landsberg
atggcgtttgaaaggtatttaacagtttgttttcacgtatttctgactgcatttcttagatgtgtaatgatggtttgcatttagagtccttgtattgttatctcactgttgtggtttttgattttggttaggtgttgcagacaagggaattgtcgtttactcagggagcaggataagaccggtgattctgtgaggaatggtaagttggtaacactcttatgtatcatgaaaattgatcttataaacttgtttctagcaaatgaatctgatccacctttaactccacctccgggcataattacaccaccgttgaaacaaatagaggctggaactcaaagaaaggcactctccaagaagacacttccaaggaatcagaatggctcgggaaacgattcaacgctagagaatgtaaagttaattcttcacttttga

SEQ ID NO: 182190 - DNA, 107 bp, Arabidopsis thaliana landsberg
ataaaacgaagaaccaacaggtagaaatcaaacgaaccgtgaagaatgtcgtcggcgatatgggtgagaagacgaatttgatgatcttctccggtgggaataaatga

SEQ ID NO: 182191 - DNA, 76 bp, Arabidopsis thaliana landsberg
atgaccacgggtgggctgatgcagcttcagaagcagcagctgcctctgggacaacaactaggcgaggaggtctcgg

SEQ ID NO: 182192 - DNA, 277 bp, Arabidopsis thaliana landsberg
tgtgatgtttgaaagactagccaaaaacgggagaaagttcgaagagaagactcgagaacatgtaaatgaatatgcagatgcagggctaaggacattgatacttgcataccgtgaggttgatgagaatgagtatatagaattcagcaagaacttcaatgaagctaagaactcggtgacagcggatcgtgagagcttaatagatgaaatcacagaacagatggaacgtgatttgattctccttggtgctactgcagttgaggacaaacttcaaaatggg

SEQ ID NO: 182193 - DNA, 669 bp, Arabidopsis thaliana landsberg
atgatgaattcaaccgaagagctgagctcagattcaaccaacaatggcaccgtcgagatcacgtacaaaaccatcggcccagctcggccgtctcaaattcgagtggcgtctcatatcaaagtaaagaattttcttcttctttatctctctaagtgaattcctttgtacgaagggaatgattgattgatccttgggctgattttagattcgtgatttgagaaatgcaattgcggaaaagggtaaatttcccgtttcaactttaaggatgattcttcgtggaaaggcattgcaagacgaagaagatggagatgatttatacgttacgctcaaggaccaaggtaaacaggttctgctgaaaatgttataagcatcaatgcttatctgtgtttgttaaatgcgtctttaggttatgcacaagtcttgattttattgtgtagattcctttattgttgctgtaataccaaatccaccagctggagttgagacatttgatgatgatgatgatgatgatttggtaaagaatggtttcttaactggtaaagaatggttttttagtttctgtccttataaaatctcttttggcattgcagaagtttaaactcccaccgtcagcaagccggtggaagaggaagttatactactttctgcgtaacaagttgaagctgccag

SEQ ID NO: 182194 - DNA, 3580 bp, Arabidopsis thaliana landsberg
agaatgtgtttgatgatgttgagacaaagacatctaaaactcaatccattgttccaacacagaccaataacacttctcaggtttgtgtgcttagctaagattagttgcttttatgtcttaattagattttacaaatttgagaacatttcttgactttttcaggattcagggattcatgctagacatataagtacagtctcaacaatagacagtggtaagaactaagaaacaaagccaaaatctttgtatacatttggtgaggttattaatagtttaactaacttgggtattgttgtttcttcctgaagaactgaatgatgaatatggcaatccaatttggaagaacagagtggagagctggaaagacaagaaagacaagaagagcaagaagaagaagaaagatccaaaagcaacaaaagctgaacaacaagacgctcaggttcctacccaacaacacatggaagatatgccaccgtaagcacatcctcgtacaaatctaatatacgttcaccaaaacgtatgagacgttgatttggtctctgccatttgtattctcaggaacacagaatctggtgctacagatgtgctttcggttgtgattcctatcccgagaacaaagatcacttcatacaggatcgttatcatcatgcggttgatcatcttggctctgttttttaactaccgtatcactcatcctgtcgatagtgcttacggtttatggctaacatctgtgatatgtgagatatggtttgctgtttcttgggtgttggatcagtttcctaagtggtctcctattaaccgagaaacttacatcgatcggttatccgcaaggtacgtagaaccgttatatgcttcattagtacaaatctttaagacttatgaatcatattcaaaactatgcagatttgaaagagaaggagagcaatcacagcttgcagctgtagatttctttgttagtacggtagatccgttgaaggagccacctttgatcactgcaaacacggttctttcgatcctcgcgcttgattatccggtggataaagtctcttgctatgtatctgatgatggtgctgcaatgctttcttttgagtctttggttgagacagcagattttgctaggaaatgggtacctttctgtaaaaagtactccatcgagccacgagctcccgagttttacttctcgcttaaaatcgattacttgagggataaagttcaaccttcttttgtgaaagaacgtagagccatgaaagtaagtaagcaagggctttaaaaccttaaattaatctcatatagcgttaaccgatgattgaattgaaaacttaatgtgtaatttctcttcttgtagagagattatgaagagtttaaaataagaatgaatgctttagtcgccaaggctctaaactcaccacaagaaggatggacaatgcaagatggaacatcttggcccgggaacaacactcgtgaccatcccgggatgattcaggtttgctagctaaaacatttgacctgaaatgctctgtcttttcttgttagtcacgtaatttctttcttgcaggtttttcttggatatagcggtgctcgcgacattgaaggaaatgaacttccaagattagtttacgtctctagggagaagagacctggttatcagcatcacaaaaaggccggggcagagaacgcattggtaaacttcaaaactttttcttttatcgttcaatttagcacaatcctaatgattttgttctttgtaggtgagggtgtctgcggttttaacgaatgctccattcattcttaaccttgattgtgatcactacgtcaacaatagcaaagccgtgcgtgaagcaatgtgctttttaatggatcctgttgttggtcaagacgtttgctttgttcagttcccacagagatttgatggaatcgacaagagtgatcgatatgctaaccgcaacattgttttcttcgatgtaagttatctcatactcataacttcaagcaaagttttgagatttcttatgatattttgtggttttgatatgatgttttcaggttaatatgagagggcttgatgggattcaaggtccagtttatgttggtacaggtactgtctttagaagacaagcactttacggatacagtccaccttcaaaaccgaggattttaccgcaatcttcatcatcgtcgtgttgctgtctaaccaagaagaaacaaccccaagatcctgccgagatttacaaagacgcaaagcgagaagaacttgatgcagcaatctttaatcttggggacctagacaactacgatgaatacgacagatcaatgctgatttcacaaacaagctttgagaaaacgtttggtctctctacggttttcatcgagtctactcttatggaaaatggcggtgttcccgactctgtaaacccgtcaacgcttatcaaagaagctattcatgtcattagttgtggatacgaagagaaaaccgaatggggaaaagaagtaagtgccttgttaactatacaatctcttgtgagtaaatcttataacctatcgttctgttttcgcagatcggatggatttacgggtcgatcacggaagacattttgacgggtttcaagatgcattgtcgcggatggaggtcgatttactgtatgccattaagaccagcttttaaaggttctgcaccaatcaatctatcagataggcttcacccagctctacgttgggctcttggctcggttgagatcttccttagccgacattgtcctttgtggtacggttgcagcggaggccgcctcaagttactccagagattagcttatataaacactattgtctacccattcacttctttgcctcttgttgcttactgtactcttccagctatttgccttcttaccggcaaatttatcatcccaacggtaactttttcatactactaattactttggttaggttacagcaagattgagaatttgatctttgtttctgttctttattgcagctatcaaacctagcaagcatgctgtttctaggtctctttatatcaatcatcttaacgagtgtcctcgagcttcgatggagcggagtcagtatcgaagacttatggagaaacgaacagttttgggttattggaggtgtctcagctcatctctttgccgttttccaaggattcctcaaaatgctagctggtctcgacacaaatttcacagtcacatcgaaaaccgcagatgatttagaattcggtgagctttacatcgtcaaatggacaactctcttgatccctccgacttcacttcttataattaacttggtcggagtcgtcgctggattctctgatgctcttaacaaaggttatgaagcttggggacctttgtttgggaaggtctttttcgccttttgggtgattcttcatctttatccattcctcaaaggtcttatgggaagacaaaacagaacacctactattgttattctctggtctatcttgcttgcttctgtgttttcacttgtttgggttcgtatcaaccctttcgtctccaaaaccgatacgacttccctttctctgaactgtcttttgatcgattgctaa

SEQ ID NO: 182195 - DNA, 1919 bp, Arabidopsis thaliana landsberg
  unsure (1)..(1919): unsure at all n locations
atgactccagaaataaggcaaacttcagaagttctctttgcccgcaatgtagccaggtagttccttggatttttttgttggctgttagttttttaacttgatctaagtattgaaaccagtcgtgcaaaacagagcttgcagaactggcaacttcatcgccttctttcgccttgcacggaaagcaagctatcttcaagcatgtctaatgcatgctcatttttcgaaagtaagggtgtatttgtggtgtgggttcaaaagctattattcgtaccatgttgatgtgtgattatttcactgagatttaaacttttattctgtttcatcagctaagaactcaggcgcttgcctctctgcactcgggtctccaaattaatcagggtctcccagtttcagatatgtcaaattggatagggatggaggtatttcttccatcactctgttacttggtgtgtatcccttttttggtttgtcacagagaagttgttagagatcttacatttttcttctggtaatggaatttaggaagaggacatagaagccctgttggagtaccatgggttttcgataaaggtttttgaagagccatacatggtaaaaaatgacctatttctccatgctgataaggattacaaaacaaaatgctcaaaacttgttcacatgaaaaagtcaagaaccatagtggaagatgtttctgctcccacagtagtggaagatgtttctactccctttccattgccttccttgatcacagaagcaactatcggaaatcaacagtgtattaccgcccataaacacgaaatgccgcctgcgagaagtcttaagaaacaaacatcaatgcgtctatttgataaagaagtggctgactccaagacttccctcttagcagaggaggacaagccaatggggacatttgttatgaatccaccagggccattcgttataaatccagtggtgcatcaagagaaacaaaatgaccttacatcagctggtggatttcattctcccgtgaagctatattctccttttggttcccctaaatttcctcaaactaaatcgtcgaatttggagaaacaacctaatgacgatcgcatcggtatgtctcctggggaaattaaattttcaatcataggggatgtatatacgaatcatgnnnnnnnnnnnnnnnnnnnnnnnnnnccgaagtctatgccaatggagattatgcctgtaactaccattgcagagtgtccgacaagtgtagaaaacaaatatgctttggaagaatcagtaccggaggctgcaatgatttgtaccttggaaaaggagttcaatgacattgacgaggaagacgaggatgaggatggggtcatcttaaatcagtatgatgaggaagtggcgaaagcaaaactcaagttgatcataaggtttgccagctcctcatgcaaattgacaattgatttaagttatttttaaattttctgtaataatatttgcagattatggaagcggtggtcttcacgtcaaagtgaattgcgggagcgtcgacagttagcagcagctgctgcactgaattcactatccctgggtactcctatccgatttagcaaaactgatgtaagtttcagttttcttccccataacatgctgatcatcagtcttttgtcaaggaagcaaaattcttaaaaggcatgtactattgaggttctaatatcagttctctctttatacaacagcaatcgagggcgtgtggtgagtttaacattgatcaagccatgaggaggagatttgaagaacgtgagaaatcatggtcaaggctgaatatttctgatgtgatagctgatatactagttggaaggaatccagaatcaaaatgcataagctggaaggtcgtcttatgtactcagactaaatcagtaaactcatcatcttctgcaagtcag

SEQ ID NO: 182196 - DNA, 101 bp, Arabidopsis thaliana landsberg
gaaaagcgcctgtgagcaaacagccttacaaagatcccaaaaaggtgaaggtggatgaaatgattgccatggtttatgaaaacctgagtgccgaaggaatt

SEQ ID NO: 182197 - DNA, 207 bp, Arabidopsis thaliana landsberg
accgacgtctggcgccgccgcggcctgggcgtcatctatatggacgactgcctgcggttcgatgtggtataccagcgggaagacaatcctgtgcttgggacgcgcgcctcccagaccttcatggtccgcctaacgctcgccacattgggcaatgatgggtacaggaacaacaacaaccggaccgggcctcagagggttcgacgttga

SEQ ID NO: 182198 - DNA, 415 bp, Arabidopsis thaliana landsberg
atgattacttcagtggtttctcgattaacagagatcgatagcttaattaaagcgtttgatggttgtgctggcgttttccacacttctgcgtttgttgatcctgctggagtctctggatattcggtatgtttcattttcatcttcctctgtacaatgtgtatgtgtataacaatggagagatacgtatcataaattcgtacaaaggcatacatcatatttaatgtacatgactagttagttacattctaactagtgaattcgtatgattaaaaaaattctcgttctggtcacacaaattttagtggcgtacgtgtcggggtgtgaatatgagaatgtgtatcttactgatatgtcaaattaagataatattttaatttccttatagaattttgtctgcccctagtttggttactag

SEQ ID NO: 182199 - DNA, 817 bp, Arabidopsis thaliana landsberg
atggaactcgatatagcgttcatgatgaaggtttctggagatcaaaatggttcagaccgttttgtgaaagcgtcaaaagcgagagagaaagcgtttcaaaccgtgttttggaacgagaaagcagggcaatggctggattactggctttcctccagtggtgaggtaagctgttacagaatctttgaatacaatttcggatttcttgatgaggaagcttttgaaaacgtgtctgtgtcttcaggaatctgagacatggaaggctgagaaccaaaacaccaacgtctttgcgtctaactttgcaccaatctggattaattccatcaattcaggtaaagtatctctacttgtctatgtatacactttatatgttgaattatgtatttgaacgtttaattttgcaacatgtagatgaaaatcttgtcaagaaagttgtgacagctcttaagaactcagggctcattgctcccgctggaatcctaacttctttgacaaactcaggacaacaatggtaaatgaagcttgcggttcaagtttcatttggaatcttgaaatttacttcactaagcatattatcttgatacatatgtggttgcactggaacagggattctccgaatggatgggcaccgcaacaagagatgatcgtcacagggctcggaagatcgagtgtaaaagaagctaaagagatggcagaggatattgcaaggagatggatcaaaagcaactatcttgtctacaagaaaagtgggactatacatgagaagctcaaagttacagagcttggtgaatatggtggtggaggagaatatatgccacag

SEQ ID NO: 182200 - DNA, 160 bp, Arabidopsis thaliana landsberg
ttattgcgcagcagtcttgttacgatcctgtacccggtatatggttatgtcaagagtgcagaacctcgactcgcgtgttacagatatcgcatcatgtgaacaacttcaactaatagcggtaagaaagaaacttctaatccggttcaaaatggtggcttga

SEQ ID NO: 182201 - DNA, 579 bp, Arabidopsis thaliana landsberg
ggtgctcttagaaagaccattgctgcctttgttaatgtctttccagaaatgagggactctatctgggcttttcttgagcagtatgatctgcctgttgttgtgggatcacaagttggaaagagtgaccaatcttctcaggtaattgcatgacttcgaggggatagttattagtagatattttaattctacttcgttagttaatatttcttttattattgagactttattaaaatttatgtttctgcatttattttctaaacattttttacttatccgttaaaagacagggttgtcatgttgcatagacgattgatatcattgttttgttatgtaaagttgatgttggtaacacaaaaaattattaatattagtctaatttctgcaacaacttcatgtgatgaaagattgagtttcatttatttcacttaatactctcataacgcattgtgctatgttcactgtagctaaaacgtggatatcacgtgttgtttgatgctgcttttgcttttccaggtggagagaatcttcagcgtatcttcaaaacctaatgtcacatttcgtttatatgcaggtctatga

SEQ ID NO: 182202 - DNA, 180 bp, Arabidopsis thaliana landsberg
atgaccgcgatggacacctcggcgcccccgcgcctcgccgcggtcggcctggccaagcagtacggccacgtcacggccctggacggcgtgtcggtcgagttcaagcccggccccacccccatcgtcggcgacaacggcgcgggcaagtcgacgctcatgcggatcctgtccggagtggag

SEQ ID NO: 182203 - DNA, 595 bp, Arabidopsis thaliana landsberg
atgacgttccttcgcaattgggttcgacggagacttcgtactctgttactccctttttctcgcgatgaacctgatcttcaagtcgaattagggtttactgatactctcatcactttacggagttttcgattcgatgtttctcagcttaatcagcttttcgatgaatcgaattttcaatttgagaaatttactgtcgaccaattagttgttagcttttccgtttggtcagctccggcgattaaattcgaaagtcgcggtgtcaatgtcaaattgtcagctaggtaacttattcccattgctcaattgttgttttgtgaagtccattgttccgttagggtttatcagattctgcgttgtttttttttagagggacggacgaaggaagctcgagaaggaagcgagcatcaagtgatactgttgctaatgagataaagaaagttctatcttctattgatcccaaggtacttaaatcaatgttgctactgtgtgaatgggattgatttgttgattgatcgtaattgtaactatgtgttgcagggatgcgtcttacatgacattttggaaaagatgcttggtcgtagcacttcccagataa

SEQ ID NO: 182204 - DNA, 367 bp, Arabidopsis thaliana landsberg
aatgcagataaaatccacatatctgttctgcttaatagatctgaaaaacttccaacctctggtgcccctgttgtagaatattttccaggtaaacacttgaaatatagattattttatcaagcatatgttcgtggtactaagaatacttttgtaccatgttctcatatcttaatttttttacatttctacagctatggaagaagcaaggctcattgttgttgatttgaatcttgatgtacttacttatgcacccaaggatcttccacttatgcacgcagtctcaaatttagttattcctgctttggttgatcagttatattccctgaagaagattatcttaccacacctcttggtggaacatcctcag

SEQ ID NO: 182205 - DNA, 82 bp, Arabidopsis thaliana landsberg
atggcccgaaaactaagctatcttcgactagatgaccggggagctctatccagttcggatcggagcaggcaaaaagcattac

SEQ ID NO: 182206 - DNA, 1724 bp, Arabidopsis thaliana landsberg
  unsure (1)..(1724): unsure at all n locations
agctaatggcgaagaaataagtcaggtcacaaaaagaaacttgaaggtttctgcaccagtattaggattaatggaggacgactctgatttgcaaccatcatgcttgtacgtttccttctgttcatatttcttattgattaagacttacagagtactttgttcaaaaaaaaaaaaagactaaaggagtactctgggatcctaatgtgtccttgaccattacagtatacttgtttgcttaaggtctacggctgatatgaaattttgactggcggtctgtgctaatgataatttgcctgcaggtgttcgttcagtatacttacgtcagatggacgtattcatcatgtcgagatcagtagggagccaagtgcttctgccttttccaagcatgcttcanatagtgtctcaaagcaatttccccaccacgttttctgcttgattaccatccagatctttcttttcttctcattgttggggggggggcaggcatatcatcgtcagggagttctggtaagttttatacaacttattttagttgaggaaagtttggaattaggagtaattaaaaagctacacttgcttgaaatcattcaatttggcaaaccatagctgcgtactattatatgagaatgctacctatactttatcagtgtttgtgatagttgaatgaaaaatgtggttgttgaaatatttccgatgaacagagatgttaggttcatgattctgcgataattaatgttttaatttacttactttcaggttcatcgtgtatctcgctttggcgtaagtgtcagaatttaggtctggaattgttgtccaccacaaagtttgatggcgtgtattgtgagaacaaagatgatcagttggcatatccaaagactttaatctcccctcaagggtcacatgttgcaagtcttgatagcaatgggtgcgtgcatattttccagttagataaagcaagattgacactttcgtgctgtccttctgaagacagttctgattcactgaagccagataagtcgctacaaagttggaaagaaagtgtaagaaatgtcgtagattttacttggtggtctgatcacgcccttgcaattttgaaaaggagcggtaacattagtatatttgacatcagtaggtgtgttatagttcaagaggatgctaccatttattctatgcctgttgtgtgaaaaagttcagaaatattaaggaccccttttttttttagaaaggtcaacacaggaagcaaaatcagctctggccaatgttgacagggacgctagtgaatttcatcatactagggagcatagtatggtatggaggctaatatcatttactgagaaaacaattcctgaaatgtataaaatcttagttgagaaatgccaatatcaagaagcgttagatttctctgatagtcatggcttggacagagatgaagttttcaagtcaagatggttgaagtcagaaaaaggagtcagtgatgtgagcacgattctatcaaagataaaagataaagcttttgtgctctccgaatgcttagatagaattgggccaacagaagattccatgaaggccttacttgcgcatggactttatctaaccaatcactatgtatttgctaaatctgaagatcaagaatcccaacaactttgggaatttcgtttggctaggcttcgtctattacagtttagtgaaaggcttgacacctatttggggataagcatgggcag

SEQ ID NO: 182207 - DNA, 60 bp, Arabidopsis thaliana landsberg
acgctcaaaactaaagccgacattgttgttgctaaagacgagacatgcaactacaaaatg

SEQ ID NO: 182208 - DNA, 404 bp, Arabidopsis thaliana landsberg
atgacgatatcaaaggacagagtaaagccttctccacttcctgattcatggaaactcaaagagatatttgccaccggcgttgttcttggcacttacctagcagtcatgactgtagttttcttctgggctgcagagagcactgacttcttctctgtaagagagttctatcttacttttatgaccagctcgagtaagtgtatttgttgatcttcagttttctcttggtgcaggcaaagtttggggtgagatctatcagtggaaacccgcatgagctaacagcagctgtttacctacaagttagtatcgtgagccaagcgcttatctttgtaacaaggtcgcgaagctggtcatatgttgaacgtcctggcttctggttgatctctgcctttttcatggctcagctg

SEQ ID NO: 182209 - DNA, 419 bp, Arabidopsis thaliana landsberg
aatggtctattggaaaccagacatgtgagcaagttgtaggtagaaacatatgtggtgggaacagcacatgttttgattctactcgtgaaaagggttataactgcaagtgtttacaaggttttgatgggaatccatacctttcagacggttgccaaggtacttcatattctttttttttttctttctttcttctattgagagttgaatcttttcctcatacatatatttccttggaccagacatcaatgagtgtacaacccgtagacataactgttcggataccagcatatgtgaaaacacgcttggaagcttccattgtcagtgcccatctggttctgatttaaataccactactatgagctgcattaacaaacctaaagaagagcctaagtacttaggatggactacagttcttcttg

SEQ ID NO: 182210 - DNA, 185 bp, Arabidopsis thaliana landsberg
atgatacagatagagagaggagagattcaaattacatccgatgatgtttccgagatgaggaacgttgttgacgtaaggcaaagcactggtgattagtatatttctctttccagggatcggtaacttggggctgctcttgccgtcgtcttccatggcgaaaagaacaagaccacaaagctaattag

SEQ ID NO: 182211 - DNA, 1039 bp, Arabidopsis thaliana landsberg
ggaaattttcacgaactctccgacgtcgaggttttgcgaggtcaccaattgcccgtagctcatcatgatgcctctcgatatcggtacagtctttcgcagtataattatttactatatggatgctgccatatgccttttcatcgcaaccatgttgttagagatggttgtctcgatcttctctttcccaagagatggtgtaatgcccctgaccttgactatatggccggacgtacagtctgtcgagtagaatgcgagatcaagccaaaaaaaggcaagatcagttcggccttttagtgtggcaagtcatgggtaaggagcattgaattggatcaagtccatgggtaaaggaatgacacaccatgagacggaccaagtttagctacgatgcgactatcggtaaaccccaaaaccattaggctagccctaagaactaggatagcttcaggaaaccttactttcggtctaggaaaccttagaaggtcgagtggaatccatttgggcagtggaatatgagtatgggtcgtgaatagtcgagggattgaacggagaatgcggataagtgacgttagcgagcttagtcggttaattctggcatgaaacgtgttatagtcctaaagaagccttgatttgtgtcattgaccctcatgagacattagagatggagtgtgccctatcaatgttcttgcggtccgtgacagatcatgggtttcgccggaatgaagaaacggacggccaggattgaactgtggttcatgtttatccgttaaggctcaagcttatctataattccggtcatccttatcctttagggtcgagcttatccattttggatgatgtttatccagaaaaaatggaggaaaccaatcggagactgattagtgtcccggagcgcccgtggagtgacatttatcgagttttgattggtccgggccacctcgtgcttgttttggccgatcttgtgaccgacttaagaccctataaatactccacttcgtcccatttgttcctcagacccaaaaatccactagaaaatgcctag

SEQ ID NO: 182212 - DNA, 360 bp, Arabidopsis thaliana landsberg
atggccgccgtcgcagattccgttgagaacaacggttccgtaaacctccctgagaatgaaaaccttataccggcgggattcagtgccgccgcattgcttgacgaaaactctggcgctttccctgaattgaatcagcccgatagcttagctgctgctgagactaccttccccgatacgaacgattccgcggaggagaggtggccaggttggcctggtgattgcgtgtttcgtatgatcgttccggtgactaaagtcggagctattattggacgcaaaggtgactttataaagaagatgtgtgaggagactcgtgctcgtatcaaagtccttgatggtcctgttaatactctcgatcgcatc

SEQ ID NO: 182213 - DNA, 420 bp, Arabidopsis thaliana landsberg
atgaaggaacgtctttcgagtattgatgagtttgataagcctgacgcttgtacttacaatatactgatccatggatgttctcagagcgggtgtttcgatgatgccttgaagctattcgatgaaatggtcaagaaaaaagtgaagcccactggtgttaccttggggacgttgattcacgggttgtgcaaggattcgagggtgaaggaagcactgaagatgaagcacgatatgttaaaagtgtatggagtgcgtcccacggtacacatttatgcgtcgttgattaaagcgctttgtcaaattggtgaattgagttttgcgtttaagcttaaggatgaggcgtacgaaggaaagattaaagtagacgcagctatatactctacgttgattagctcacttataaaagctggaaggtcgaatgag

SEQ ID NO: 182214 - DNA, 1725 bp, Arabidopsis thaliana landsberg
tttgagaattcaaggtttgagtgaaaaagagatgggttttgaagccttgaattggtactgcaagccagttgcagacggattttgggaaaaggaagtggatggtgcgtttggagcctacacgccttgtgccattgactcactagtgatgcttgtttctcactttgtgcttctgggtttgtgtttctaccggatatggatcatctttcacaataccaaagctcagatatatgttttgaggaagaagtactataactgtgtgctagggttattggcttgttactgtgttgttgagcctgtactgagattggtcatggggatttcactctttgacatggatgaagaaactgattttcctccttttgaggtgatttcggaagagtagctctgattcttaatcatatatggtcgtctggagattaaactcacatgcccttcttgttaaaatgaaagctcaagaatcagaagtaaagtacgattatggtgttattcattgacaggttgcatctttgatggttgaggcattcgcttggttctccatgcttgttttgatcggactcgaaaccaaacaatatgtcaaagagttccggtggtacgtgagatttggtgttttatatgttttggttgctgatgctgtgctgctggatcttgtgttgcctctcaagaactcaatcaataggtttgttattgtatatttcagataaatgaaatcaattggggtgatttgacgttgaatctcaggagttctaacatattcttgactagggaaatttttttgggcattggttggtagctttagctgtgaagttcataataaagtttcctctattttctattgcagaactgccctatatctctttatcagttcaagatgttcccaggtttgttagaacaacgtcctccttacctataagcttgcaatttattgttctgagaacttgcatccaaaagcttcaaacttacaggcctcactgcttaagtacctcatttgttttctgttgcaggctcttttaagaattcttcttcttatttacataccggaactggatccttatccagagtaccatattctaaacaatgaatcgttagacaatgttgaatatgatgcactgcctgggggagtgaacatatgtcccgagcgatatgccagcatattttctggtacatagcccctgaattgataaacaaaatgtttcccatgttaggcaaataatatacaatagccatgatttctttttgttccactgatttggatttcttatttacttattgaaaaatgtaaggaatatactttagttggatgacgccgcttatgcagttaggctacagaaagcctattactgagagggatgtttggcaattagaccaatgggaccaaacagaaactctgataaaaaggtatagcagtagtgctgctttgcttctgccttctgcagtattacttcttttatatctatgttaaaggtttcgttagaatcaagtaacattcttattcattggataagttatttgacagattccaaaggtgctggactgaagaatcacggaggcctaagccatggctactccgagcactaaataatagccttggtcgaaggtaaaaagctgacaatttttctaaaaaccgtctattccactgtagttgtccgtaaagccacacattatatatactggcattaattttttctttcccgtctttgtaggttctggttgggtggtattttcaag

SEQ ID NO: 182215 - DNA, 151 bp, Arabidopsis thaliana landsberg
atgaagactgaaaagcacaatctactattggtgactaacctcatcctgactatcgccggtgaaagaggcaccatcgcagtaacgcaatttgactctgttccagttgaagaagtctgcaaacccgtagatagtcaagcgagaatcaatgcag

SEQ ID NO: 182216 - DNA, 727 bp, Arabidopsis thaliana landsberg
caattttaactattttgtggatgttcctttggtatgtactaggttttctacactgtttaggtatatcagtttgaaactactttgaatgcaactaaaatttcagggactaaaagaacacgggatactagaagataggttgcagctacttgtgaatattactggagcttttagacctggtgtgcttacagcattagtgggagtaagtggtgccggtaaaacaacgctcatggatgttttagctggaagaaaaaccggaggaactatagaaggcgatgtgtacatatctggttttcctaaaagacaggaaacgtttgcaagaatttctggttattgtgagcagaatgatgttcactctccatgcctaactgttgttgaatctctacttttctcggcgtgccttcgtttaccagcagacattgactcagagacacaaagggtaacataatttctattatctttcgatcatttttgtgttttttcttggattatgctgacatctctaaacttcaaattcttggaggcgtttgttcatgaggtgatggagctagtggagctgacctctttaagcggggcattagtcggtcttcctggagttgatggcttatcaactgaacagaggaaacggttaacaattgctgtcgagctagttgcaaacccttctatagtattcatggatgagccaacttcaggattggatgcacgggcggccgccattgtgatgaggact

SEQ ID NO: 182217 - DNA, 116 bp, Arabidopsis thaliana landsberg
ttcatggagctttgaggtgtttggctcttctctctggtgaattggatgacaaagaggttcctacgctggtacctgtgttgtttccctgcttgcatgcagtcgtatcttctcctcag

SEQ ID NO: 182218 - DNA, 544 bp, Arabidopsis thaliana landsberg
atgccaccagctcttcgtgatagacaaaacgagggactgaagctattgtaagacatagctcatccaactcacatttccattagaaattaccactctattgattttattgttatatagtttcgatgaagataaaaagccatgtttatctggctcatgtgctccgaagaagaaatttccggtgctgattattattgcagtagttgcttcggtggtcgtggtcatagcagtagtactggttctcatttgtgtatttaaaaggaaaaatgtatcatctaatcatgcaaaaggtatacgcaagggctcgttatgatcaaatcaagctacattgggtttcatttagatatatttttcttgtactaaattttattctctacagatctaccaccatcatcaattaggccacatgcaaatgtaaaacccactggtacatcggatacatcgatcgagacaatacggaaaaggtttagttattcagaggttatgccaatgacaaacaacttgcaaagaccacttggtgaaggagggttcggcgttgtctatcacg

SEQ ID NO: 182219 - DNA, 97 bp, Arabidopsis thaliana landsberg
gttagggggatacgacagtacggtctgtccagtaagcgggatccacccgtatcgtacggtcattctgaccaacctgcgcatccttgaaacgttctga

SEQ ID NO: 182220 - DNA, 770 bp, Arabidopsis thaliana landsberg
gtgatggctcagaagctgaaggaagcagagatcactgagcaggactcgcttcttctggtaagctacgccgatcatcgagctttcgagtttttgtttcttaacgattcgtgaaatttctagctccttcctggtgattttcgtagatattgatctggatttcagatctcgttctcttatacttagtttttcgcttaatctgaagaatcgtgaacagtttctatgtttgttacgcgttaatcagctggagtttttagctcgtttacactgacgtctttgttttggttttcgttttgttgaaatagactagaaatttgcttcgtattgctatcttcaacataagttacatcagaggactctttcctgagaagtatttcaacgataaatcggttcctgctttaggtgagatgctaatctggaagtttctagagctctttggctctgggatctaaagaaatcaagttaaattttcgatttcggtaaatattgaaactaatatttggtggatgcttctgtagatatgaagattaagaagctaatgcctatggacgctgaatctcgccgattaattgattggatggagaaaggttttctatactaatgattttggcatttatcgcttagtttcaattgtgtactcgtttatctttgatgattttgtttcttaatatggaatctaggagtctacgatgcgcttcagaggaaatatttgaagacgctcatgttcagcatatgtgaaactgttgatggtccgatgattgaggaatactcat

SEQ ID NO: 182221 - DNA, 81 bp, Arabidopsis thaliana landsberg
agatactgcggaataccctccattgatgaaatcaagcaagctaagcaactctctcaagtacttaacccaagcctatctcgg

SEQ ID NO: 182222 - DNA, 206 bp, Arabidopsis thaliana landsberg
ttgaatttcttcgtcaacgtcattcttcttccttaaaccctaatcaaaaatctcttcttcgagctatggcggcctttgaagacagagcagatgaaaacgatgaaattgccttcaaagatggcaacactgatatctcccaacagcttatggaccgttacggcaagtcctcagccgctcagcaccgtcatctcgtcgccaccgccgtc

SEQ ID NO: 182223 - DNA, 84 bp, Arabidopsis thaliana landsberg
attctattctccatccaaatcattcatgtaactaacaaaatccagtcttattacggaaccatcgcatacgacgactgttcatag

SEQ ID NO: 182224 - DNA, 132 bp, Arabidopsis thaliana landsberg
atggtccataccgctatgaccccgcacccctcgcagcacccgccctcccgcgtacggccgcgcactcatttgcacacgctcaatataatgacatacgcaatgacatccgcacgcactcctatccgcaacctc

SEQ ID NO: 182225 - DNA, 108 bp, Arabidopsis thaliana landsberg
atgaatctgccaaagcaaggatctggaggattttatcagcttatacagcctccttcaagccaaacatcttctcttgacaatgtcactaaatctctagatgaagaaaag

SEQ ID NO: 182226 - DNA, 691 bp, Arabidopsis thaliana landsberg
atagtggaagaattaccacccagtgatcactgcttccccaacctggaattcaacaacaatcaaagcattaatgaagataaaatgtctaaggagtttgaaaataaattggcacattacagggagatagttattgagaagtacaaaatcccttcttcaaatttactgacaggtaccatcatcattagaaccataacgtttgtaactaaatcagtatagtattacgagctctgcgcgtgaattcaaactaatgctatatcgtgcgacagcaaacttatatcaagttacagctctccatgaactaaaatccacacggagttactacagttacagctactacttttgagggttttgccttcataacatcggaatcttatcgattaaaaccaatggcaatggcacgcaatccatcggttaccaaattgacccacagaaggtgaacctacacttgttcaccataacagataaatttctgacaagctttataaaagtaaactctgcagataatactatcacaaaactgatgcgatagaattgaagacctaagtcgaaaagaaaagaaaaagatacttccaggcttaaaaagaaaagaaaaagttatacagacctcttcccctatatagcccttccttctgcaacagcctatcaagacgagaaacagtttctcgacaaagaaacttaccgcaactattga

SEQ ID NO: 182227 - DNA, 222 bp, Arabidopsis thaliana landsberg
atgtcgacgaaagaatgtgatatctataagattatcaacatcttatctcagttagactccgacctgaagaagatacctgtatccgataaagttattagccacaaggaacaacaaggcgaaccaagtgaggaaaaaagatcttggtgggttcgtgtcagaggaagtttgaaaagaattggtaaggcgaagaaggaggctttcaacaatgctagtgacacggag

SEQ ID NO: 182228 - DNA, 106 bp, Arabidopsis thaliana landsberg
atgaagccagtcttctgtgggaactttgagtatgatgcgcgcgaaggtgacctggaacgactattcaggaaatacggcaaggttgagagggttgatatgaaagctg

SEQ ID NO: 182229 - DNA, 113 bp, Arabidopsis thaliana landsberg
agaactgcgtggtggttgcgcagggcgcgctggggcacgacggcatcttccatgtggacgcgctgggcctgcccccctgcgagccgagcagcgcgctgccagacaatgcacgg

SEQ ID NO: 182230 - DNA, 174 bp, Arabidopsis thaliana landsberg
cttgggcggatcgtctttgtgatgaaaggagatgaaactatatggtacaacccatgcaagcccgcatacatggaccaccactcggaatcattgatcaacttctctacgaggctgagcatgttctccgaccaaatacagaacatgcagcccacaaccacaggaatcatagcatga

SEQ ID NO: 182231 - DNA, 48 bp, Arabidopsis thaliana landsberg
atgcatctcacaccagctgcacaccgcatgtctttcattgccatttcg

SEQ ID NO: 182232 - DNA, 47 bp, Arabidopsis thaliana landsberg
ttgcgagagttccttatggatcatggtcggattgttgattccttaca

SEQ ID NO: 182233 - DNA, 554 bp, Arabidopsis thaliana landsberg
atgactggtgttgatcatgaaccaaatgagtgtataacgtacgaaaactcaagaagatgtaagactgaaatgtgattttgctctgaagagtaaggagtaagaaaaatcccacaaagcacgtgtccttgcgtatcttctggttgtgatggtttgagctaaatgaaaaatggcgaatatgtatatgatgctaccaattataagacaacatatactttagcaaaaatagtggtttatgaacaatttagagaaaatattcaaaaatgcattatttctcatatttaaaagactggaaaaaaaatggcccttcttgggaatatgcagcttatttgacatgtaacgtttacaatcgagctgttaaccacctaccaaatgatagagatcatgataagaaggaaaataagaacttattttgatatatactttatatagtgctgattattgccacaatttgatgtcatattaattctggtaataactattgcaagcaaaaaagtatctctcaagtcatccacattatcattttaggtgtgttttcgtggggctcccgtggatga

SEQ ID NO: 182234 - DNA, 85 bp, Arabidopsis thaliana landsberg
ctgaatgggatgaacatgtctctgcggaacaattgggtgacataatacctcaagctgcagcaccaaagagttcggagattttagg

SEQ ID NO: 182235 - DNA, 344 bp, Arabidopsis thaliana landsberg
atgatttttatcattttttccaaatttgagaatttgagtaaagctgtggatgtagcagattcggtacatgcttatagtgagattactggtgagaaaatcaacttccaagcatacttaaacagaccttctacaggtggtggtgtctggttcattgagcctaattcaaagaaagttggtcttatttccggaaataaatcatcacctgaagaaagcgacttccaaagttgtctaactgcgtactttggtcctgaagttagccaaataagagatgcaggtgataggcgctgccatagtgttttggaagaccttctaagcttcttcgagtcagaaaaagcatgtccaag

SEQ ID NO: 182236 - DNA, 160 bp, Arabidopsis thaliana landsberg
ggttaacactcttcgtcttcgagctctcaccgtttaccatccgagatctggatcggatcgaaccgccgagagtgaagaatcagagatggctttggctttcgatgagtttggccggccgttcattatactaaagagagcaagatcaaaagactcgtcttaa

SEQ ID NO: 182237 - DNA, 367 bp, Arabidopsis thaliana landsberg
ggaaaattcattttaccggaaacgatagaagaagacctgtacctgatctgtaccggcaccggcatagcgcctttccgtgccatggcccattttctgcatgcgcatcagctgccgcaccgcaatattcacctgatcttcggctgccgtactttcggcgatgggttatatgtggatgaactgaaacaactggaagcgcaggagcccggcttccatttccacccctgctattcgagggaagaacagatacccgaaggcgccaataagggatatgtacatcctgtatacgaagcactcaccgaaaacggtaaaaagcccgccaaattcttcctctccggctggaaagtaatgatcgatgaagccaaacaac

SEQ ID NO: 182238 - DNA, 245 bp, Arabidopsis thaliana landsberg
atgatcgaagccgaaggtcgtgctgcgtctccatacggcacgaggccaggttcgagaatcagaggctctttcttgaggataagttttccaccagaggcaatggcttgtccggccagggggccgggagcgacatcgttataggccggtgcagattggattcgatggccattaatggtgtcaatgttaagcgccgcgtgtctggtatttttttccgggaagtagacatcaaacgtcaacgcatcgag

SEQ ID NO: 182239 - DNA, 294 bp, Arabidopsis thaliana landsberg
atggatggcgaccaggaagcggccatcgccggcgaggcggtcacgctggtgctcgaccgcgagatcgacatctctcggggcgacgtgctggtgcgtccgggcgagacgccggaatattcgaatcagttccaggcgcgactggtgtggatgcaggacgagccggcctttcccggccgctcctatctcatcaagctcggcacgcagcaggtgccggcttcgatcaccgagctcaaataccggaccaacgtcaacacgctggagaagagcccggccaagagcctcgagctcaacgag

SEQ ID NO: 182240 - DNA, 226 bp, Arabidopsis thaliana landsberg
aaacaaggacgtcttcgcctggtctgccctcgacctggtcggagttagccgcaccgtcatcgagcacagtctgggcatcgacccttcggtgcgcccaaaaaagcagcggctgcgcaaaatgtccgatgaaaaaacggaagccgccaaagccgaagtgcaccgcctgctggaggccaatttcattgaaccaatcgtctaccctacgtggctcgccaatgtagtcatg

SEQ ID NO: 182241 - DNA, 424 bp, Arabidopsis thaliana landsberg
atggaaactacaaaaaacactaatctccaaaaccctactaaactcccaaaaccatttcaacatcacctagaagaagaaaaagaagacgcactatctctccgagatcttcccctcaaagccaagaatcctaatcccaccaccaccgaagaccacaaagaaccgtcaacggaactttttgagtttctaacctcatcctcctacgacgtagctccggcagaaaatataatctttggcgggaaactcatccctttaaactaccaaaatgctctcttttcacctcctgagcacattagccgtcgaatccgttcacggtctgagtccttatccgcgatacaaggccataagcttaaccgtcccggtagttgtaccgtggcacgtcgtgacaatgcgggacctatgagggcaagccgctctttagattatc

SEQ ID NO: 182242 - DNA, 213 bp, Arabidopsis thaliana landsberg
atggaggtgaatgatggtgaaagagtggtaatagcaaaaccagttgcctcaagaccttcttcaagttctggcttcaggacattcactgagcttcttactgattcagttaccgtatctccgcaaacgacttgccacgagattgtagacgctgctataagaccaaagactttgagattcaatcagccagtagcagcttcggtctcatgtccacgg

SEQ ID NO: 182243 - DNA, 518 bp, Arabidopsis thaliana landsberg
atgcatccatgtgttgttgatggaaatgacttcaatatattggatgatgtggttcattttgaattgcttccggttagcagggagaacaagattcttgatgattgttgcactgttacagagtgtggagtatatgcaattactgaaaacgtagaccaaacaaatcttgactttagaggaccgtcttttgccttgttaccaccgtataagaagcgaaaacgaagtttctcgggatcagaagacattgaaatggtacatctgagtgtttcatatttcatatttcattgggggttgccttagttaagcttctgaagtaacatttggactttgttttatataatgttgtaattattgttgcttcgtgtagtgatgatttgaatttaatttttctttaggaaaaccagaggttgaacatctcaaaaaccaaacaaggggatctcccagaaaagataagccaagccgatacggcttatctcacatcaccttctttgcttcaacgtcggagccatcaggttttttga

SEQ ID NO: 182244 - DNA, 697 bp, Arabidopsis thaliana landsberg
aatcacaccagggcctcagtccatatcaacaccgcttctattggcctggcacaagagtttccaacatcagacaacacgtaatacaggtcaagagtcagaaaattcagatagtcagtcaaccatcttattttttgatgctacaacttcagttcctacaacaaatcagtcttcggctattacaacaacttcagcatgtcctactgtaagtaatgtagagggttctgagtgtacggcagactttgattctgttcctataggcaacagtcctcttacattacacagtcaggataatgctgaggcttcagcgacttctacaacaacaacaccaacaagtcaacctgtcagtgtgcctaaccaagtttcatctactgcgaatacagtggaacaagagattgctactttacctgttagacagtctcaaggtcatcacatggtgacaagatcacaagtgggaatcaggaaacctaatccaaaatatgcgcttctaacatccagagttgcatatccggaacctaaaccagtcacagctgcattaaaagatgcaggatggaacaaagcaatgcataaagaatttgacaactgccaagaagctggcacttggtctctcataccttatacaccaaatatgcatgtcctaggctgcaaatgggtcttcagaacaaagctcaatgcagatggtacactggacagactataa

SEQ ID NO: 182245 - DNA, 510 bp, Arabidopsis thaliana landsberg
  unsure (1)..(510): unsure at all n locations
gacctagaaacttttgtccccaatctagatcccgatggagtcgatctcctttctgtaagttcactgagctagatatatgcacacacatatatagacacactacttctgctattagagacctgtatgcttgattgtgatggatctggtctcatgtttcttactanaaaccttttaaccatttgagggtttagatgtcttataaagtcatcaagagccggcggactaaaaccaattcgattaggcttcatagtttcaaaaccacatgaagcccaaaccaaacttgtttgaaatatgaacaatcttcaaaaccaggattcttgaaattcctaaccaaaccagacatctggatagatatctaagatttttgagctcctgtgaaagcaaagatgataatatatctctctgtttgatttgtttcagaaaatgctgttaatggatccgaccaaaagaatcaacgcaagagccgccctggagcatgaatacttcaaggatcttggaggcatgccttag

SEQ ID NO: 182246 - DNA, 930 bp, Arabidopsis thaliana landsberg
ggagcgacaagtcatccatcgatgcggtgctgacttccctagcggaacgtttctccatcaaagatcccacagatcttcactacttccttggtatagaagcaacccgaacaaaacaaggtttgcaccttatgcaaaggaagtatatcaaggatcttctcgcaaagcacaacatggctgacgcaaaaccggtgttaacacctttacccacctctccaaagctcactctccatggtggtacaaaactcaacgatgcatctgaatatcgatcggtggtgggtagcttgcaatacttagcgtttacacgtcctgacattgcgtatgccgtcaaccgattatctcagctcatgcatcaacccacagaagatcattggcaagcagctaaaagagttcttcgatatcttgccggcacatcaacgcatggtattttcctagacactacctcaccattgaatctccatgccttttcggatgcagattgggccggggattccgatgattatgtttctaccaatgcataagataatctatctgggcaagaatccgatctcttggtcctctaagaaccagcggggtgttgcccgctcctccacagaatccgaatatcgagctgttgcaaacgctgcatctgaagttaagtggctttgctcacttctctctgagttacacatccggttaccagttcacccttctatattctgtgacaacattggagctacctacttgtgtgctaatccggttttccactctcgtatgaagcacatagccatcgactaccatttcgttcgcaacatgattcagtccggtgctcttcgagtctcacatgtatcaacacgagatcaactagcggatgccctcaccaaacctctctctcgagctcactttcagtccgcacgtttcaagattggagtccgtcaactccctccttcttga

SEQ ID NO: 182247 - DNA, 71 bp, Arabidopsis thaliana landsberg
ccacttacggacgggacaaaagcctccgagcgccgttcagatcgggacttaagacaccaaaaatggcttag

SEQ ID NO: 182248 - DNA, 122 bp, Arabidopsis thaliana landsberg
aaaactttcggcgactccaaaataccagtaatcacttcatcgatatgtgttttcttggttttgttgtgcttaatccagattttggtctccatagttcctttcaaaacctctacattgattga

SEQ ID NO: 182249 - DNA, 194 bp, Arabidopsis thaliana landsberg
ggaattattttcgagcaaagtcaaaccaaactctcgaccgagttaatcgcgtagtcgtccgttcgtccgaactctgtttcactctgttctgtgtacagacaaatttccgcgggaatatttattccggaaaatgtttagcgcagcccgatttcgtgtttgggccagcccaacccagcccaattaggcccatttaa

SEQ ID NO: 182250 - DNA, 63 bp, Arabidopsis thaliana landsberg
atggtccggcttgtggacactacacgcaggtcgtgtggcgtggctcagctcgtctcggttgtg

SEQ ID NO: 182251 - DNA, 144 bp, Arabidopsis thaliana landsberg
tcccaacgtacattggactttgaagtagtccattttaaaactctcatgaatcatgatactaacatgaaagtagacactgttgtggttggtatacttacgagttttgaggatcggatcatcaacatcatcgacacaggcaattaa

SEQ ID NO: 182252 - DNA, 632 bp, Arabidopsis thaliana landsberg
atgcagatacatcatacatgtcacggaccggaccacatcgggtttggcagatttggcatcctagtttcgacatctaccaaacccactaaagaaatctacacggacactaataagccaaatcagcaatccgacaaacggttcatattccaccacgtggctctcaatatgaattgtcacgtcgacacctattaataccgttctaattcttctccggaacagtagcttagctaaaccgtgatcggaaatagtttcagagaagaaaccactatcggagtctgaagcaaattatgcctaatgtttctcagatctctactgttctacgtctagggttttcgtccaaacgaagactctccaatggcttacacttcgttgctcgttcctattccacctactgatcctcccaaacaaccatcaggtactttcagaatcttcaattcgttgagaattatgcaattgagattaatgtcgctcctttatcaggtccactgaagaattacactaagttagtggagcaagggaggttacaacatgatccgtaccaagagaaagttgtttcggcattcgaaaatttgtttggaagattggaacatttcgagaagcaaatggaggattatcatgtaaattgcaaatag

SEQ ID NO: 182253 - DNA, 875 bp, Arabidopsis thaliana landsberg
atgaatcaagatgcaaacggagatgaaaatgagcagtgtatcagcgatggtgatcttgataacattgttggtgttggggacagttctggattaaaggtattctcattttcaagacttcttgcttacttatatccaacattggaaatttcctttggaaaattgcatgaaaatttttgcaacaggaaatggaaactccacatacacttctgtgtgagcttcgtccataccaaaagcaggcacttcattggatgacccaactggagaaaggaaattgcactgatgaggcagcaacaatgcttcacccgtgttgggaagcatactgtttagcagacaagtgagtgatatttctattgccttcgaactttagtgcgagtcagataagatatttactatctgttttatgtcaataggagggaactggttgtctacctgaattcttttaccggtgatgctacaatacacttccctagcacacttcaaatggcaagaggaggagtatgatctcaataccccacctataaaaatttctttcatttattgtttagattttgtcactttattatatagctgttttgtaataatattatatcctaaaacttttgtagatattagcagacgcaatgggtcttggaaagactgtaatgaccatatcccttttgcttgcccattcttggaaagctgcatcaactgggtttctatgccccaactatgaaggagacaaagtgatcagcagttctgtagatgatctcactagtcccccggtgaaggcaaccaaatttctaggctttgataagaggcttcttgaacaaaaaagtgtacttcaaaatggtggtaacctgattgtatgtccgatgacacttttaggacagtggaag

SEQ ID NO: 182254 - DNA, 245 bp, Arabidopsis thaliana landsberg
atggattatccattggtaagccacgaaaatacagctccaaagtacaaagtaagcaatccggaacagtgggaatcgctggataaggaagaaagaagattgccattagattctaataaaaaaggcaggagattgtgtatccgcagacttcagttttgaaaacttaccaaggaattgaggcttgtgtcaccaaggagaaaaacagcgttgagagaatgcatacaaacatcgagctgcagtcaaaataa

SEQ ID NO: 182255 - DNA, 372 bp, Arabidopsis thaliana landsberg
atgcggaatagagattattctttactgaatagaccaagtctacataagggttacctatgtgcttggggacatggtcatgataaaggtgaacaaagtacagcgcatatatttagcctagacgaatatttcggctacaccgacactaaatccttaatagatgacaaccctgataagggcaagctttctattattggcacaaagaatttttctattaaagaccgtaacattttattttcacaagaaaccccaggccatatgagaggaaaacttgacattaacgaagctaaaggaactaataattcaactctaacccctcagccagtggtgcctgaaaaaattgagagagcacgcaaactaaaaaatgactacaat

SEQ ID NO: 182256 - DNA, 187 bp, Arabidopsis thaliana landsberg
tgaaaacgcgagcggcaggcacaagccagccgcccggcaaaatatttttttcataattgcaaaaccgaaattatttgcgaaagcgaatgcggttacaactcaaacccatcattgccagcccgccgccgaggatcgcccacgtttggggttcggggacggatatgatgttcaggccgatttggttcag

SEQ ID NO: 182257 - DNA, 76 bp, Arabidopsis thaliana landsberg
atggatgctcttcctgtacacggctttgagcattacaaggcgaaagactattcccttgctcatgctcctttcccag

SEQ ID NO: 182258 - DNA, 210 bp, Arabidopsis thaliana landsberg
atgaaaatcaacttgatccttattcattacgagaaatgtgttattgtgagtagaaatcatgaatatgtttttgcctttcaatcttaacttagacctaaagatgtagattatgtttatctcattttgtaggagatgaaacgtccatttgcaccaatgaaggcacttgatatggaagaagtcatcgaggacatcataaagaaagtcaaatga

SEQ ID NO: 182259 - DNA, 19 bp, Arabidopsis thaliana landsberg
cttttatgttcaggtcgag

SEQ ID NO: 182260 - DNA, 204 bp, Arabidopsis thaliana landsberg
  unsure (1)..(204): unsure at all n locations
atggaccnnnnnnnnnnnnnnnnnnnnnnntctgtgatcccctttttgccttctcgcctggcggagcgtccactgcatcgcacggtgcgaggtcagtccagtcacctggagagactgcatcgtcgcctgcacgaggagcaggagcgcagacgccaggagcaggaccaggagcagcagaactcttccccctcacctcagcaggag

SEQ ID NO: 182261 - DNA, 371 bp, Arabidopsis thaliana landsberg
atgaagagaaagagatacgagatggagaagaagaagaagacagagattcaaaccgccattgaagagctctctgttttcatcgtaactaaacctgcagataagactgaagctacacatatacccttgaggcctattctctccttctgcagcttaatcatccaagttcttggtatctttatttctagttttcgtaggaaattatattattttgattaattgtttcatcgattttatatattttcctgagaaactgaagttcaaggacaactcaatgattgtcattgtcctgagctgcttgtgttttggtgcttgcagataagataggaccgacaatggctgttcttagacaagacattgatcaaaatattcag

SEQ ID NO: 182262 - DNA, 351 bp, Arabidopsis thaliana landsberg
atgcgaggccgcgatcaggatgggcaggcggcgcagccggccatccacttcggccgcatctgtaaccagaaacccgacgaactcgctggcctgctcatgggcgtgatcgccgatggcgagatcaacgccagtgaggcgcgattcgtgatcgaatggttcaaggccaactgggattacatcgggcagtggccgttcaatgtgctctacgagcgcttctcggcggccatcgcagacggaacgataaccagcgacgaggaacgcgagcttctgcgtgtcgttgccgagcacgtcggcggtggatatcgcggagccgggataaagcccagcagtcagctgctttgcgacgacccg

SEQ ID NO: 182263 - DNA, 117 bp, Arabidopsis thaliana landsberg
atggaaacaccgcttatgaccagaaatgcagctcagacctacgctacctgcgacacattcagcgtgaagctggctgagactactgatcatggtggaacggacaggactcctaaaaac

SEQ ID NO: 182264 - DNA, 59 bp, Arabidopsis thaliana landsberg
atggttggagctgctgtttcaggcaatggccaaaattgtatgaacttaagcgcgaggcg

SEQ ID NO: 182265 - DNA, 67 bp, Arabidopsis thaliana landsberg
atggaagaagaagagggtgtagctggcggctgtatttgtctgctgaccacgcgtagcatgctgtcta

SEQ ID NO: 182266 - DNA, 114 bp, Arabidopsis thaliana landsberg
gactgtgctggagcttgggtcaggctggcctctggcactacctgtgggagaatgtgttcagcacattagcagcatcaacagatgacagggcgctcgtttacctagttcagaatg

SEQ ID NO: 182267 - DNA, 356 bp, Arabidopsis thaliana landsberg
atggccgcgctgcctcggctcgcgagcatccgcaccgccctgccctttccatcgacgttgtggcgtgctggccaagcggcgccccggcgagcctccgctgccgacgctctactcgcccggcgcggccagcggtgcgacccaggcgtacgtcgcatggccgatgagccgctggtgccccacgcccctcctgcatagctgttgtgccacaccgctaggtcgcccaccggcaaacatgcacggacacccgacgctcgctgcccctgcattccaaaagtgacgaagaaaccaccggcccgtgcaattgcatcgtggtgaagaaaacgcgtgctccgtcgtgcgcagtgaaagaaggaaag

SEQ ID NO: 182268 - DNA, 57 bp, Arabidopsis thaliana landsberg
atgaaggaaggagccttcagtgtgaagatcagaaaagatagaaacagccgatcgccg

SEQ ID NO: 182269 - DNA, 319 bp, Arabidopsis thaliana landsberg
actataagcatttctactgccagtacaatgaaccatcatatgtcaaaaagttgaagcttgagatgttgactgctgttgcaaacgagagcaacacttacgaaatcggtaatgatttcaaactatgtcaatatggaatctgaagctagaaaacctttcttttccggctctttgattggactaattcgtacttttttcttttcagtgacggaactgtgtgagtatgctgcaaacgttcaggtgcctgttcgaaaacagtcaatccgaccagttggtaagattcctgtacatcagtatgatctacatctgatcgacgagcagg

SEQ ID NO: 182270 - DNA, 122 bp, Arabidopsis thaliana landsberg
gtaaagatccggaacggaagctgatctatgtaagcttatctgaagatgagactcatgatcaacttatagagagtgtgcttgaaggacctgtaaatgttatccactaccgctttgtattggag

SEQ ID NO: 182271 - DNA, 244 bp, Arabidopsis thaliana landsberg
atgaagaaggtaaagctatctttgatagctaatgaaagatcaagggaaacatccttcatgaagaggaaaaatgggataatgaagaaactctacgagttgtcaactctatgtggtgtccaagcttgtactctcatctacagtccattcattccggttccagagtgatggccgtcaagggaaggtgctaaaaaaggtggcttcaaagaataaggagatgtcgccgacagcccgaacaggaagatga

SEQ ID NO: 182272 - DNA, 1285 bp, Arabidopsis thaliana landsberg
agggcttcgtgaacaacagaaggtttttgtggcgccgacaaatgggaagcggaaacgaagaaatgtgatggcattgattgaaggcgagtcgagtcgagtcagactcggtcagagaaagttgagagagcagttaagaaacagtagcaggtagaaatgacggatgtgtccccactttcggaccagaccactttactccccgagttagcaagtgaagtgagaaaactgtctgtgtgtcacatgttggccactcgcgcgctatccccgcccaaggaccttaccgtcattttggttggaaactagtaaaaattagtttatttattttttgtttgttgttttgtcaagtagtatatttcttggaaatatcttcccttttctgggatgcttttacttggcgacccaaggaccaagagagaaccaaaaataaatctcacaaaacaaattaatacaaactactactatatactattattatttaaaaaagtatatgagaaaaagaaattgaacgccatggaaatcgacggcggagccggcaccaagctcttcctgaagaccggagttaaggatgtattcggaagaggagcgggattcaacaccgaagacctaacagtgtcacgccgccatgtttcactcgtattcaaacccgccgccgccggaaccgaaccgtccgatatggtttccttcgaggttctcgggaggaatccagtctggataagggccgttgaaaagggcaaaaagattcaaacttggaggaaacccgagactggagaaatcgccaccggcgatcaattttgtgtatcgggtaatcaccccatttggttcactctgaagagacgcgatgaacttatggaggagcgagcattggatcatggtgaaatcgaattgaatactgatcctgttaaaggtaatcaattttgcaacttgatgtgtttctggatttgtgtcccaataaacaacattttggttgttctgcattgcttttcttttataatgtctagaattatgctcttgagaggattttttctttttagtaagaatgaggctgaatgtgtagtttgtgtactgtgtggtgtggttgcagagtttggatttcttgtgattgggaaagaatttgatcagtatccaaagagtagggtgcgtgacataaagcaatgggaatggtttttagaggattccactaatggaaatagcgatgatgatgaagatggagataagaagggaaggaagggattagggaaaaagagaagaaggaagaaagggaatgagaatgatgattggagtgtggaaa

SEQ ID NO: 182273 - DNA, 247 bp, Arabidopsis thaliana landsberg
atgaacaaaaatgggtgtccaaaaccaaaggagacacatacgaagctgcgccaagcaaactataagattgttgctgattcacaacagatgatcgaggaagctgctataaccgcagcctgtaaagtcgcagaggcggagaataaaatagacgttgccaaactagcagcagaagagtttgagaagatgacaaagattgcagaagaaaatagaaaactcctggtcatagctactgagatgcatgaactat

SEQ ID NO: 182274 - DNA, 254 bp, Arabidopsis thaliana landsberg
atgcagtatctcaacaagttcaatcatctttcccaatatgccaccgatcaagtaaatactgatttgaagaaaaagaattgcttcatgaggggactcaacgaccggctccaacggaaaatggccacttgcctggatcttacttacagcagagctgtcagcacgtcactggtagtagaagccaagaacacaggccagggaaaatcaaagggatttggaggtgacagatctaatcagggacctgagaagcgaaccag

SEQ ID NO: 182275 - DNA, 213 bp, Arabidopsis thaliana landsberg
atggcgacaagtgaagaacctagtacggatgcctccataatatgttatgcgccaagcatgatcaccaccaatggtgtttggcaaggcgataatcctctcgacttttcgctacctctctttgttcttcagctaactttggttgttgtcgtcactcgtttcttcgtctttatcctcaaaccctttcgccaacctcgtgttatctccgagatcctt

SEQ ID NO: 182276 - DNA, 194 bp, Arabidopsis thaliana landsberg
atgcgtggatcagaagctaagaacaacgttccctgaagcatcatcagatcaagaatcaatgaatcattcgtctctcgggtccaataaggaattcaatttcggcacggatgagaaacatttgaccgttgatgaacatagatcagcttcgccgaagaacagcaatgattggtcttttttccctgtgatgcagtcag

SEQ ID NO: 182277 - DNA, 256 bp, Arabidopsis thaliana landsberg
atgagtttgaggttagaaaaacatgagcattatgtagatctcgtcaaacaacgtgatggcttggaatgcgatgtttgcgatcgatcgtatggtgatggcttctattgctctgaatgtaaatttacagttcacaggaaatgcgcggttgtgtttttgttaaaagatatattcgaccatccttctcatgttggacattatcttaagctcctcacaaccggagctcccgaccacaccgaccgaaaatgccatctctgtg

SEQ ID NO: 182278 - DNA, 154 bp, Arabidopsis thaliana landsberg
gttcttagctcttcctcgtcctagtcttattcgatacaaagattgcattgaaacagagagcaaccttgcaccactaggcgataaagactgtctcactaatgtccgaaagttatatgattctgctgttgcaagttactactcaatggagaacaag

SEQ ID NO: 182279 - DNA, 135 bp, Arabidopsis thaliana landsberg
gtcttggatctaaatcagatttcattttggctactagaaaacgaaagtgataagaggaagagagacttacgggacaattctgattcttggcttgactcacatagaaattccatgactctgcagaatcgattttaa

SEQ ID NO: 182280 - DNA, 149 bp, Arabidopsis thaliana landsberg
caaagcaattagttgttacctcggagtttggagatcgcgttcctaacgatcctgacgcaaccagtacaacacattcttaccttcagctcaaccgtctagtagtccacgagccacgaatgtcaaactcaaaaactttagttttcttatga

SEQ ID NO: 182281 - DNA, 670 bp, Arabidopsis thaliana landsberg
atgagaccggtggcctggtacgaaagactatccaaagctttccatgattatccttctctctccaaaattctcgtcgtctccaccatcaggtcagtgtaaccatctcatcgccgattcatctctatttcacatttgaatttcgctatttgaaactttgtgtatgtattgtgaacctatcctccttttgcatttgccatgaattcatctgcgtaatgagacttttcctatgcaagattttgttttcccgttcatggaacagagtcttgttatgtttacttgtcatatacgttatatggaaatctgtgtttacgagagcagagctgatgatattcataatcaaacaaatagatgactgattttagatctgctgttctgttctaattactatttcttgtttcatagtggtgggggacttatagtttactctgaggcaaatccatcatatagcaacaatggtgttgaaactaaaaccaggaagaaaaaagtagtgctgctcggaactggatgggctggagcaagttttttgaagactttgaataactcttcttatgaggttcaggttatatctcctcgaaactactttgctttcactcccttgttacctagtgtaacatgtgaaactgttgaagctcgcagcgttgttgaacctattcgcaacattgcgagaaag

SEQ ID NO: 182282 - DNA, 208 bp, Arabidopsis thaliana landsberg
cggtttggcaccgataaagctggattctcattcgccccgatcatcctcgtatggatcacattactgatcggaattggtctctttaatctgttcaagcatgacattaccgtcttaaaggcacttaatccactctatatcatttactactttagaagaactggtagacagggttggatttccctcggaggtgttttcctctgcatcactg

SEQ ID NO: 182283 - DNA, 52 bp, Arabidopsis thaliana landsberg
atgggcaaagaagagagacatcccgtggctcgtttggtccgccgtgtctcta

SEQ ID NO: 182284 - DNA, 3329 bp, Arabidopsis thaliana landsberg
gtcctggtcttagtactagcgaatttgatactttagcctcttactgtgtcaaggtaagttagtgaaacctgtatgtttttaaatcgctcttctttcaatttcttggtgggctgatgtctatctctgaatatatacatacctctgttaacgtagggtattgaagattcagaatcatcggtccgtgatgcatttgcagaggctttgggctcattgcttgcactaggaatgcatcctgaagcgcatgtaggcttattttactagtaatttgcgtccttgtcttcataattttgtggttatggaatttggtttttgtttgctaggtccaacctagaggtaaaggtccatttccaccagcaaagaaactggaaggtggtctgcagaggcatctgattttacccttcacaaaaggtagtgttatgacttatgagctattgaagacagaattgcaagccattatggcaatatgatgacattataaatgcaatcatgttgttgccacccgttttatactttttctatttagcctttgaaattgtgggagaacctttttagtccctagccactatatagaggcgtgcacagtaaaaataagaaagcagttataatggctcacatagtaaaagcaaaacatacctgatttgttcttttacagtaatttcatatcgccactagaaattagcatattgttacggcctcttgaaagattggtttttggcaagatttctgtgcgaaaatttttggttcattaactcttcagacttgggatagatataaatttttgctacaaagtttgtagtagatttttttcgtttttctttgtgcgaagcactaatttttgtttctgttataaataaaataatactaaaatcgcagcggttggatctcgggcaaagaatacacggtttggtttggctctgtcatgggtgttctttttacaggtaaacaaacgagattttttttatttttttccttgttcgttgattagatattgcatgtcagacttgacattgagacttattatcaattacatattttatgagcattgttaggaaatcacaccagttgttatcaagggttatatctgcatatttcctatattgccatatcataaaagacctgcatttttttctagtagtgaatcttttcgtcaagtcttgtgactatcttcactttttttatatacacgcatatctccaatacggcatcatggccttgtaaacttacaaagtgaactaaattttgcaggccattaggataaggtatttggattcagatagtgagcttcaagactattctttgcccatcatggacatgctgcggggtgactcctcaattgatgcccatgcactggtaagtcatgcttctttcattttcttgcaatgcctcccccaaccttttcatttggtcgtgcataagtttttcttacatacttctgtctttcaaaatttcgccttgcacctctattgctgcgttgggaatcattcatatcaattctctgcatagcttataaaaagagaggagacattgctaactgttatgaaaacattagtgatgttctgctgatcaaattccttaatctatattctcacttttgaaggcatgtgttctttacatcctacgggttggcgtaattgatcaaatgatggaaccaagccagagaagcttttccgtttttctcggaaagcaggtttgcaagtcagagctacatatttaaatattttaattaatgtttctacatcataatcaagtaagttacgttttttttttcctgaaactattgcagcttcagtcttcaaatgccagtccatcaatgaaaatagttgctttgcgggctttgtcatacacgttgaaaacactgggagaggtgaggccctactggcgtaaactcttctgattaatttatgtcatgaaacttctgttttctttaactccctaaagaaaatgttaagctcgattttttcttgcttgcttgcaggttccccatgaattcaaggaatttttcgatgatacagtgggtgctgcattgtcacattttttggaccttgtaagctttcacatgtattgtttgacagttgctctcaacacgagtccttttcatcccttttacttttcttggcagcatttatcagagaattctatttcttttcagcatatagatattattattacgtgtttttttgtctagtaatttcacagaaagatatgtttgtttgaatttcttcctactactggatgtcaaattgtttcatctgctttaaaagctaggcaaacaacatctttatgaatagaaatagagggttggaataaaccgctatcacagtaatctataggtacgtaaataagacctttatgcatagaaatagagggttggaagaggccgtcatcacagtattttctgattgattttctgaatttagtagcttgatatattgaaacaaattcggttttatgcagtgtttattagttttagctgtcatgctaacatgaatgtctgggtacattgggtcaaatgacaacccgatggtaattgtaaatgcatatttacaaacttaaacttgttttttaggtacgtgttgaggccgctttaactttacgtgctttggctgaggttgatcctacctgcgttggtgggttgacatcttttgctgtaacaactcttaatgctctacgggaaagtttatcctttgaaaaggtaatactatgactttcaatttatgtcaactgagtttggttttcttctttagtaagatgatatgccatttatttttatttaagtttcttttaagtttgaaatgtatattttaattgtatatttaattacacatgcatgcacggtctgctgcatttgtaatatgtatttctactaaatattctgtcagaagtaagcaagagattttgggtattagatgatctggcatatcttagtattgtatgagagtgtggcaacaaaacgagaaagtctgatccgaatattaatgaagatgtgaagtgacattctgatccaaatgcagaacaagaaagtctattactaataattaatatggtgaaattgaatatcaatatatcatgaaagacatcatagtttcccttcatatgcttatgacgtccttggccttcatctaattgaagttcttcatctttaagtctctataaatagacagtctctattgtaagctggagcaacttgatgacggggaatgactttgccattgtcattttctgtagggagacaaattgaaaactgatcttgcttctttacatgggcaagcagcaactttggcagctctagtctccatttcgcctggactctcacttggttaccctgctag

SEQ ID NO: 182285 - DNA, 168 bp, Arabidopsis thaliana landsberg
atttcttctattgtaaacattgcagacaaggagttagatgttatcgagatggcggtttatggagacgtgttacgacctggaaaagaatgtcgctgcaaaaccgtagctgagctgcttggtcagtccaagtccaaagatggtaaagccgcatgcgagttaccatcatag

SEQ ID NO: 182286 - DNA, 389 bp, Arabidopsis thaliana landsberg
atgcgtttcctgagattgatcatcatcagttttgcggcattattcatagtggctacccttatcggtgttttattgccatcgagggtattggtgtcgcgagcggtgaatattgcagcacccaaagattccatcatgcagtatgtgaataatatccgggactggaaattatggatggaaggcatggacgatgaatctgtacatattcattctcctttgaaagcagccctgggtaatacggaagtaacggttatctctgtcacagataccaccgttgtatcaacatggttgccccgcaagggcgcagtgcaaacggcaacaatgcacctgatcggctcatccggcgaaagacttacagtggtgcaatggcaatttgagcagaaactcaaatg

SEQ ID NO: 182287 - DNA, 534 bp, Arabidopsis thaliana landsberg
atgactcaaagtcaacaagtctccaattttacgggttgtgagagtggaagaggagtggtggtggtgagagtgatgaggagatggaggctagttgtgaggtctttgtctcttttttgttcaacaaaggttgttttttttgtaatatatctctataagatttttaattgctttttatagaaaactaaatcctaagatagtgtataaggaacccaaacaacaaattttataaattttatgatgaatttttggttataatttgtaaaattaatgaaattatcattaatggtgagattccagaaaatatgtttataggttatgaaataacaaagagcaatgttacgttttatgctcaattcacaacacaagatctttacaaacttttctaaactcaacaatcgaaactcaaatcagctcaagaaagagatcgaaacagagaacgaaagaaaacaacacaagagatttgattacccagttcaacaagatcggtatgatcaagcctacgtatggggccgaatcagttcggcaatccactag

SEQ ID NO: 182288 - DNA, 312 bp, Arabidopsis thaliana landsberg
gataaaaaagtttaatagaaggcatacgtgtgggggagaatctgggaaatctgctcatcccaaaaagaactgggtagtgggtatcatcaaggagaggttgcaggagaacccaaatcagaagactaagaacattgctgactctttttttcaagattttggtattgagctcagttattgcactataagacgaggcattgatgaagctaaaggaggacttcatacatcattcaaagaggcatataagtatgtgcctcattttgtgaataaggtagttgaggcaaaccctgaaagtatggtgaatctggtggtctg

SEQ ID NO: 182289 - DNA, 285 bp, Arabidopsis thaliana landsberg
atgtgctcccactgttacgtggcattcccaccgtttgaggtggcggaggacgatgaggacgaagtggccctccggtatgctgcccgcatgagtagcgggcgtgatttggttgaggaattcatcggttatggagtatggcccttggcgcacggctgggtgcttggcgatgtgtgccctcgccagatgcctaccttgggcgagcagttggcgcgaagtccggccttcactttggatctgcgcggccggaacccagctgcgttcgttcgtgaagtagaggatggagca

SEQ ID NO: 182290 - DNA, 923 bp, Arabidopsis thaliana landsberg
atgaaccgcttctctcgtgctcgttcatacatttccttggtgctgtttaagatgtccagctatgtcacttcccacattccatggaatcagtgcttctatacatctttaaaatctagtttaaagcctgcaagtgtgagtgtatctagtgttcattgctattcctcaagatcaaagactgctaaatcaaagatgtcaaaaagctctgtttctgtttcggattcggataaagagaaagacgcctttttcgttgttcgaacagggtgacattgttggaatttataaggatttgatcgattgtcaagctcaagttggatcttcggtgaattcatcttaaccttaacacaatctcttgctaatataaatacttttcttagatgggataataataacagaagttttcaatggcaggtttatgatcctccagttagcgtttataagggatactcgttgctcaaagacaccgaggagtgtctttctactgttgggttgaagaaaccactctatgtttttagagctttagacttaaaagaagatatgtttggagctcttacaccttgtctcttccaggtgagatgatattgtgatgaagtttaatgattatgagaaaaaagattaagctcattgcttatgtattcatttttttccaggatcaacttccttcagcttccatgtcagttgaaaagcttgctgagctagagccatctgctgatacctcatatgtgagtgttgtgatatgtttgtatataccttatttcatagttccagtgaattggatggatgcagaatgttttgcttaagttgatctgtttcttcttctcctcttgtggtaggaaacttgcattattgagtttgacggtgcatcaaaaggaaatcccggtctctctggcgctgcagctgtactgaaaactgaggacggaagcttg

SEQ ID NO: 182291 - DNA, 144 bp, Arabidopsis thaliana landsberg
atgctcgacttccgtgctccgttgctggggatatctcagcggaacttgcataaaatgcaacgcttcgacgagatccaaacgagagagatggaaagcaatactattagatgttctgtgcgacggctttcctccgaagcaacaaaa

SEQ ID NO: 182292 - DNA, 86 bp, Arabidopsis thaliana landsberg
atgaccggccacggtctgagtatgtcggatcagaccagtgtgagctcctcgaaagtcgggcagcgcggcgtcattgtgttcagagt

SEQ ID NO: 182293 - DNA, 286 bp, Arabidopsis thaliana landsberg
atgagagccggcctcctgtcggtctgcgcggttttcgtgcttgctccggtgctgctcctggtggccttttccgcgcgttcctacgccgcggcagggcagtcggcacgacccggcacgctcggaaccgcgcacgtcgtctcgtcgcggcatgacccgtccccgatcacgttttcgtaccaccctccttggcatcatcgctggtgccagtgtggtccggctgagtttccgtttccggtcgtgtgtgttcgcctgggtccgactgtgtttccgttcgtcgtcggcccag

SEQ ID NO: 182294 - DNA, 296 bp, Arabidopsis thaliana landsberg
aaccagaacctgtgaaaacgatcactgtcgaaacaatacattcggctgagagatctgagtttgagacagagaagcacacagtcgagaccaaggaggtacaagttgttgataagcctgtcatcgaagaaagaccagcaccagcgtaccatgacaagccggtgcagagcctagtcactggttcttcacctagagttattgatgttcaagtggatgatgatgctgatgattggttgaaggatgaagataatgcaggaactgttagtgccaccagccaaccatcttgtgcaggatgttga

SEQ ID NO: 182295 - DNA, 719 bp, Arabidopsis thaliana landsberg
gttagacgtcttttgtgctctgcaagacctgtggtagttcaaacggctgctaaccctactatatcagatcaggagcagcaacaggtacaaatctagtgtatgttcatttacatgtaattctttttaatcatttaatatgttgaattccttctattattctacttcaaacatatttctacgtctaaaaaaattttaggagagcatgtttcaatttatcatcaaaaagtacactttcgcatcacacatcttgtaattattttaccaaattttaatcaattcttaattacttatttaaaaactgaatttagatgcagctgcacttttatttctcgacatggtagaagccagtggttcagtttctgctgaactttctgttttagatcttcatagactccaattctctcttaagtgtttataatgttgctttgtttttttcgctggggtaggaccatctttggcgcatagcacagaggactgctgttctacccctcgggcgtggagcattcacattatcaacgatacatactcttttaactgaggtaatttgctatctatagtaggagctagacatggttcttatcacttgtaattactacttgatgatttatatcctctctgaaattttgcaggcgtttactgtaccaaagcttgttttagctggtcgactgccttctcaacaaaatgccattgtatgtaaaattgtggttatggtttattag

SEQ ID NO: 182296 - DNA, 307 bp, Arabidopsis thaliana landsberg
atgcgcgatgatattgccgaattaattgaagtaacccaaataattactggcctaaaaaaaggcatcattgaaaaagattactatgttacacgtctgctttgcattctttcccaagttcataacatctattttaaattagtttttgccggtggaacttgcttagctaaagcgcatcagctgactaaaagaatgtctgaagatgcggacttcaaaatacaacttcgcaacccatccgcccctcttaataaatcaaaatttagaacggaatttagaaagcttcgtgaacaaatcattagctcaataggag

SEQ ID NO: 182297 - DNA, 125 bp, Arabidopsis thaliana landsberg
ctgcagagaaaaaaacatccttttgccatagatcgaaactattcgctaccatcatcttcgaaaccacacctaaacccttcaaattaaagaccaaaaaatctacccgaaaagattcgtcggaatag

SEQ ID NO: 182298 - DNA, 896 bp, Arabidopsis thaliana landsberg
  unsure (1)..(896): unsure at all n locations
atggtgagctggcctcctgcttctaggcctcatagcccttggagttggatctttgtaatgattgttgcccaaatgtgggtcccccatatagttggtttagttagtaccgattaataaagttagttatttagttgggaaccttttacttctactttcctctttatttgagaagctgtgtttgataatgttgagaactagtgaagatccttgttcattcagtgtcatgaagaattatgtatgcctattcctatgctgaaagattgcgagatcaatactgatgtgtgaatgtcttccatagatgtctgacaacaggcaccgaggagggaggcgtgcccaacaggagcagcgtgtctggcaggaggaggagcctcatccctagccgctgcctcccccaccacccccaatgcctgtggagctgaaaggaaaataggcttacaccttttcctaattaattttggtggttgaattgcccaacacaaataattggactaactagtttgctctagattatgagttctacaggtgccaaaggttcacaacaaaccaataagaagtctaagaaagggtttaaataaatagagcaaaagacaaccgaaggctgccctggtctggcgcaccggactgtccccgacttgtagttgtgcttaagtttataattttcagattccgcctattcacccccctctaggcgactttcaattggtatcnnnnnnnnnnnnnnnnnnnnnnnnnnnnnnnnnnnnnnnnnnnnnnnnnnnnnnnnnnnnnaggaggtcatgaccggcgagaagcccgccacaagccacaggaagactccatcgggagagtccggcaacaaggggaaggtgtgccagcggagcaacggctacttcgcgtcaacgatcgtctgcaaatga

SEQ ID NO: 182299 - DNA, 2855 bp, Arabidopsis thaliana landsberg
atgggttgtacaagttctaagcttgacgatcttccggcggttgctctttgccgtgaacgctgtgctttcttagaagctgctattcatcaacgttacgctttagctgaatcacacgtggcttacactcattcgcttcgagaaatcggtcactctctccatcttttcatcaatcaccaccaccgtttcgtcgcttccggcggcgctaacgtcggtgattctcctcgacttaatcttcctcctcagagaaaaggtgaccttgacgacgaagcaacaaattccccaaaaaaacaaaagcttgcttcttctcaccacaaccacaaccacgctcactcgggttccggttctgattcgggtcatctcgaattcgattcagattccgacgaagatgaagaagacgacgacgacttggatttggattcgttgcatcaccactctcctccccaccaccatctcggcaatttccctattcccgaatcagcaccaatgggcggatacatggaacaacaaccgggttatataaacccgtacccgaatccagatatgatggggcatccttactctggaggaggaggaggagtaagttatatgcacatgaattacatgaagaacaagtccatgcctccttcagttgtctatgagcaaaggccaactagtcctcaacgagtctacataggcgaatcatcatcttcatatccatatcctcctaaaaattcatattttggatactcaaatccagtacccggacccggaccaggatactacggttcttcttctgcttctacaactgctgcagcaacaaaaccgccaccacctccaccgtcgccgcctaggtctaacggttgggattttttgaatccctttgatacttattatcctccgtatactccgagtcgagattcgagagagttaagagaagaagaaggtataccggatttagaagacgatgattcacattacgaagttgttaaagaagtttacggcaaaccaaaattcgccgccggtggtggtcaccaaccaaatcccgccgccgtacacatgatgagggaagagtccccgtctccgccgcttgataaatccggtgctagtactagcggtggaggtgatgtcggagatgcatctgcgtatcagtctagaccaagtgtgtcggtggagaaagaagggatggagtatgaagttcacgttgttgagaagaaggttgttgaagatgaggaacggcggagtaatgccacggcgacacgtggtggtggtggaggaggagggccacgtgcggtgcctgaagttgcgaaagagattgagaatcaattcgtgaaagctgcagagtcaggaagtgagattgctaagttacttgaagttgggaagcatccttatggtcgtaaacatggtaaagctttgatctttttacaatgttgttacttaaagttttcagctttctgtaattggttaagtaaagttttgaacttgtatttgttttgtgtcgtgtgaattggaagcagctgcttcgaagatgttgcacggtgttactccttcgttaccttctacctctggaggaacttcttcgtctgctgctgctgctgttgtgccacctacttatgcagatattgaagaagagcttgcttcgaggtcgaggaatctttcttcgacgttgcacaagctccatctttgggagaagaagctttatcatgaagtcaaggtaatggttgattttgtttttgtatcaaatctttgatcttagaacactgttcggttctgttctgttcctttgttctgaagagagagttgttctttgtgtaggccgaggagaaactgcgtctagctcacgagaaaaagcttaggaagctaaagcgtttggatcaaagaggtgccgaggctatcaaagtagataaaacgcggaaattagtgagagatatgtccacaaaaatacggattgcgattcaggttgtcgacaaaatatccgtgacgattaataagataagagacgaagacctgtggccgcaactgaatgcattgattcaagggtaaatataaacttgtcttctccaaatatatacaatgttctagatatttgcaattgtagcgctaatcaaatgttgatatcggttttaattaggcttacaagaatgtggaaaacaatgcttgaatgtcatcaaagtcaatgtcaagctattagggaagcacaaggtttaggcccgataagagcaagcaagaaactaggcgatgaacatctagaagcgacgagtttgcttggacatgaacttattaattggatattgggattctctagctgggttagtgcgcagaagggttatgtaaaagagttgaataaatggctcatgaaatgtcttctgtatgaacctgaggaaacacctgatgggatagttcccttttcacctggtaggattggggctccacctatctttgtcatctgtaaccaatggtctcaagctctggataggatatctgagaaggaagttattgaggcaatgcgtagtttcactacaagtgtgcttcagctttgggaacaagatcggttagatacgatgatgacggggcatggtgattcagagaagaaagtcaggaacatggacagagaagaacagaggatacagagagagattcaagcattggaaaagaaaatgattcttgtggcaccgggtgatggtaatagtctttcgatatccggcaacgttgtttaccaaagcgatactagcagcgatagtttacaaggtagtttgcaacggatttttgaagctatggagagattcactgctgaatctatgagagcttatgaggatctcttagagcgcactaatgaagaaactgctccacgggaacttgaggaagaagaggaggagtaa

SEQ ID NO: 182300 - DNA, 109 bp, Arabidopsis thaliana landsberg
ctactgggggaagataaatttaaaaaggagtgccacgtaagcattgaaacggccgtgtgggactgtaacggctatatgccacgtcggacccacgctcttcatttatgga

SEQ ID NO: 182301 - DNA, 365 bp, Arabidopsis thaliana landsberg
atgttagtctcaacgcttttgttacgctgcagcgaaggagtccggcgaagcttgcacctgaatgaccccgggtgagtggtcggtgagcaaatgcaaatggtcttagtgatgctggtctgacgggacagacccccaaggcccatcgccgctatggaagcttcagtctccatgtttcctttgtcgttcataatgtgaatattaaagaagaaggggaatcaatgatgaacgaagagggtatacctcattgtgtgtatataatcaatttattatttgaagaagctttaagactgaacaaatctttttctttttgtatggtcatcacgggaatgatgatggagtccatcaaggaccaactgtatccttga

SEQ ID NO: 182302 - DNA, 361 bp, Arabidopsis thaliana landsberg
gagtggttatagaagatggatttgagactgaaagagtaaaggaaccaagtttagctccaacacgaccttcaagctcaacaactcaatctagtacgctctgtgtagttgattggctagaacttaaaaggaagtctgatctccaagaagaaaccatccagaagctagcttgcactattgaagaatttagggataaattgagtcggatgcaaagggaagctattcaacctatactcggcattgaagctatatcaaagaagaaatttgtttcagaatggcctgaagaagaagactacccacaagaaataaaagaaacttacaaggaaaggaccaaagagaactcaattacagacctgtcaagaga

SEQ ID NO: 182303 - DNA, 62 bp, Arabidopsis thaliana landsberg
atgctgcaagcaaaaccgttcgttttagtcttcactatagagccacagattgtcaatcgtag

SEQ ID NO: 182304 - DNA, 195 bp, Arabidopsis thaliana landsberg
cgcgtcaacgacgtcacgctcatccgtcgccgtgcactagaggcagctcgacgcctggaggaaaccctccgcgctagggatggtcataccgacgccgatacgacaccaacaccgcccgatcatatccaagcagcactgcgcaactcggatctgaggcctatggtccagtctggcttggcagttcgatcgcattaa

SEQ ID NO: 182305 - DNA, 201 bp, Arabidopsis thaliana landsberg
acacatgaaaatagcgaggatattgtttttcttcagccattggacaacgaaatctacattttggtgaaactcgtccttacccaatatttgattcctcggcttcaagcacaggacagtaagagagactatctagaccgtagcagtggaagtggagttggattgtacggttgtccgaatgtgaagctgacgttgtcgcgttga

SEQ ID NO: 182306 - DNA, 55 bp, Arabidopsis thaliana landsberg
atggatgatggggtggatgtggatatgaatatgggtatggatgttgttggtgtgg

SEQ ID NO: 182307 - DNA, 286 bp, Arabidopsis thaliana landsberg
atgcagtcagcgcacaagcatggagacatggtcatgcgctatggcttttgcataggataccttcatcacatcaaaagacctgaccgcgtcgccaggctcaatcacagctatgcttatacgttgttgatagtgagctcgctgcagctgctaactttgatgcatgtccggctttcatgcagccacttgcctgtgctggtgctttgcaagttcttacagctgatgccgtgaacgcaatcagcaaacaatgtcctgcactggcctggatcgtcatgcagacaagcagggg

SEQ ID NO: 182308 - DNA, 214 bp, Arabidopsis thaliana landsberg
atgcgcacctacgactacttgaagaagcatggtgcgaattgggtcagtgaactcccatccgtgctatgggggaaccggataacacccaaccgagccaccagggagacaccattcttcctggtctacggggctgaagcctgtcttcccccggaaatcatcatgggctcccctcgggtccaggcttttgaggaatctatgcagggacggctgcggc

SEQ ID NO: 182309 - DNA, 351 bp, Arabidopsis thaliana landsberg
atgaagcgatcctattggtatgtgagtcggttcctcgcaatttacttgcaatcgttgcgacggatttgcgaggctatttatttctagtttgagcaaagctcaaaccaagccgcctctagacaaaccctaaaaaaaatttctctctcgttttctctcgcgtctccggcgccatgtcttcttctccagcggacctcctcttctccgtctgctgttcttcttctcctctgctgtcttctccgttcttcttcgccgtcttgttctagtaaaccctaatcgagtcttttctcttctccggcgagttggcgatctccgccgtgtcttcttcccatcgtcggtttctaaccaaacaag

SEQ ID NO: 182310 - DNA, 69 bp, Arabidopsis thaliana landsberg
ggaaatggacaaactgaggcgactaacgaaacaattgtggatgggctcaaaaaacgactcgaattttga

SEQ ID NO: 182311 - DNA, 405 bp, Arabidopsis thaliana landsberg
  unsure (1)..(405): unsure at all n locations
tcccaaactttctcttcgtcaatcgcggaaatgggaagttcgaggaaatcggagaaatatccggcgtggcttacagtgccgatgggatggcacgttcaggaatgggcgtggactccgcggacgtggatcaagacggctttatggatcttttcgttgccaatcttgaccaccaggattactcgctttaccgcaacaatcatgacgagacctttgacgataccgccggtnnnnnnnnnnnnnnnnnnnnnnnctatctcatgagcggctggggactgaaattcttcgatttcgataacgacggaaacctggatctattcctagcgaacggacaccctgacgatttaatcgatcttgtgcattcacaggtgacgtatgacgagcgaccaattctgttgcagtggaccg

SEQ ID NO: 182312 - DNA, 20 bp, Arabidopsis thaliana landsberg
gtgacgccgaaacaacatag

SEQ ID NO: 182313 - DNA, 153 bp, Arabidopsis thaliana landsberg
agaacatacaatgccaaaaggctaaaaaggcacacaggcctgaacagaacaaggcaaaagcccaacacaggcacgcaggccccaaaagaaagaggaagagaggaaggaaaaaaggagatagagaccttacccgaacaacctaaaccaggttga

SEQ ID NO: 182314 - DNA, 190 bp, Arabidopsis thaliana landsberg
ccgcagccgcacgcgtgcgcggggacgtatcacgaaaccgccagaatcaccggcggcgaacgagaccggaacttgggcaagaacgacggcgcggcacgcaagggctcggaaaccgccctgccgcgacgccgcaactgaaagccaaaaggacgagggaatgcgccgaaactggctggagaaacggcagcag

SEQ ID NO: 182315 - DNA, 503 bp, Arabidopsis thaliana landsberg
atcgcatggatgagcttgtagagaagagaatcaggggacgaggagcagacctcgccccggaggagggagagagagaagagcttgaaagagcaatcgagagcaggctcaataaccttagcatagccggtatcaagagagagaaggagtggctgaagaacggcatctgcatcggaggtagtgagaccgaagagaggcgacgaaggatcgggagaatcggagagagcttcgagcttgtcgagtacagacttacaggcggaaacaaggaaggtgtgcttgcgccaggcggcattttttatgatcttgtccaaagatggcccaatcacccggccgcatctggtggcgccaccaaggttctgcgacgacgacatctaacgcatattcgacttctcacggcgattcaaaatgataaaaggccaacccagaacccggggactttgtcgaaacgaaacgctgcgtttctttcattcttaattcttacctttcagcgttttgtatttgattaa

SEQ ID NO: 182316 - DNA, 80 bp, Arabidopsis thaliana landsberg
atgaataagaagtcttctaatctcctcccttctttgggcagcgaccctccatttgtgacgaacaaagagaccgatcaaag

SEQ ID NO: 182317 - DNA, 382 bp, Arabidopsis thaliana landsberg
atgcaggatatacaccacacaaaatggatcatcaagaggaagaagaaaattctgcaaaagggaaagaatctgaatccgagggcgggcttggcacatgtggtaaccagaatgaaacctatgcaagcaacaacaactcgcctcgttaatagaatttggggagagttttactccatttactctcctgaggttccatcggaggcgattcatgaagtggaagaagaggagattgaagaggatgaagaggaggacgagaatgaggaagatgatatagaggaggaagctgttgaggttcaaaagtctcatactcctaagaaaagtagaggtaattctgaagatatggagataaaatggaatggtgagattcttggagaaacttctgatg

SEQ ID NO: 182318 - DNA, 338 bp, Arabidopsis thaliana landsberg
atggagcggttaacatctcctcctcgtctaatgatagtctccgatcttgacgaaacaatggtaaaaacgcaaatcttgattcttcctctgttaagaacagaacaacgattttgagttttttcttttgcttttgatttttcaggttgatcatcataaagatcctgagaatctagctctattgaggtttaattcattgtgggaagacgcttatcgacacgactctcttcttgttttctcaacaggaagagctcaaacaatgtacaagaaactgagaaaagagaaacctttgttaactcctgatgttatcattacatctgtaggaactgagattgcttatg

SEQ ID NO: 182319 - DNA, 327 bp, Arabidopsis thaliana landsberg
atctccgatccatctcaacggagagagatattttatcgggaccatggattctataatacgacaaaacaccgtcctggagtacgaaccaccgtcgtttccatccttggccgtagtttacccatttatagaggattccggcgacgccgttcccagaagctggtcgatcttcgttcgtacgaggaccagcggaaagactataccggagatcgtggttgtgattggtacgtgtcgaatgtggaatgtttaacgaagccgatcgagtcgtggttaggtttgattttgcggcgagtggagaagacattgtttgaaaacgttcgaagaaattag

SEQ ID NO: 182320 - DNA, 362 bp, Arabidopsis thaliana landsberg
agacaaggtgcaaaatcgtttgaaggattctttgttcaacaaagatatggaatgcaacaaggaggaagctataagagcaatggatattgctaagaggaaagttgcagagaatgattacaacggggctaagctttttgctaacaaggctcaggatttttatccgaaacttgatggtttaagacaagtgatgatgttgatcgatgtgtatatctcagcaggagatacaattagtggaggagaatctgattggtatggaattcttggtgttgatcctttggctgatgaggaagtagtgaagaaacagtataagaggctagctcttttgcttcatcctgacaagaacaattgtgaaggcgcagagg

SEQ ID NO: 182321 - DNA, 124 bp, Arabidopsis thaliana landsberg
gtctttacatgtttgggatgcatttggagattatggagcattctggagcaaaacagacaatttaagctgcagcagcaatccggagacaaaaattgacgtaggtgtcgatcgacacaacccctga

SEQ ID NO: 182322 - DNA, 85 bp, Arabidopsis thaliana landsberg
atggccacctataaggctagttacagacgccctctcttcatagagttcatgacctctcgtgcagaaagatatacttccctcagca

SEQ ID NO: 182323 - DNA, 213 bp, Arabidopsis thaliana landsberg
atggcattcaccggatggtttctacgcgagcgcttcctacgaccgactggtgaagcggtcccactaacagagacaccagcgcgcatgcgaggtgtgggtggtggctatgtcaaggtgtggcccacatgtcatccgcaggcacgcaacggtgggctggggctggcgcagcaaacggaaatggagctgggccgtgagggtcaatacggcccatag

SEQ ID NO: 182324 - DNA, 52 bp, Arabidopsis thaliana landsberg
atgcagacgacattacttataatgcatgctgagaaagcaccaggcctagatg

SEQ ID NO: 182325 - DNA, 118 bp, Arabidopsis thaliana landsberg
atgcagccacggatgttgaggtctccagcaaggttcaacggcattagttctgctccacgtgctagctctaaaaaaggacaatccgaacagtcaaaacaggaaagagatggagcagcac

SEQ ID NO: 182326 - DNA, 986 bp, Arabidopsis thaliana landsberg
atgaccatgatacgaatcgagccagtaccctgtgccatcactctcgccggtacccccgaggattcgtcccctaccgcgaccacgagcacgaactccagctcctctaaccatctgcgctactcaagaacaaatggctaagaaactaaaacaaacgaatatatcacaaacaacttaccgtggaatctcatttaaggctcggagaagatgatgctaggactccaacaacacacaattgactaaacactccataatcaatcctcaatatgctaacaccgtagctcatcctgtgagaccccgtcccggacgtctcggcgtccggcgacgttgtactcaagttcgcgcctcttcccggccgaacctcttaatttttcgcgattcaacatagaattgcctttacgaggctaaattctataatcgctctcttattacacagcggaagtctttctaaccttagaattgccttgcgattcaactcttgtacaggtttcatcgtctttgtcccttagacttagatcaatcctttactcggtcaagacatgcatattgttcggtaaccattctaggcctaacaatcgcatattcctttatcctattttcacggtcgattcccaaacgtctatcctaactagtaagctacatcgtcacataccttggccaatatgcggatttgattccctagcccatttgtcgccttattctattcgttcaacgatttgtatgcgatcgtgaattgatgaaccaatccctatcgttacttagccatacaaccaaccaaccgctctggtctaagtacaacgatagagattggggatcgtacgattcccttggttcacgatggccgaatcaagctcttggcttattggtccatctgtcctccaaacgtacgccccttcggttccatggtggacgatagagccaatggcttatcgaatcatccatgtttccgttccggtcgtttaacactacgaccgcccacggtttactaa

SEQ ID NO: 182327 - DNA, 150 bp, Arabidopsis thaliana landsberg
attttaacagtcaaagtttttacatccgaagtctttacaacgaaattctttgcagctcaaacttttaaagtcaaatcttctaaagccataactagcagtcgctactattcggtccatgttgcttctcaaagatattgtggtaattggtaa

SEQ ID NO: 182328 - DNA, 113 bp, Arabidopsis thaliana landsberg
tggactcatacggtcaatcactctaaagttaggtgctccacaacgggtgagactactcgcttatgcgaaatatgcggtatacgggcttggctacaaaccaacttctgaaccag

SEQ ID NO: 182329 - DNA, 315 bp, Arabidopsis thaliana landsberg
atgaataaggcgaatcaacgcaaagaacgcaaaggaaagcccgtgccagaaagcgtcccggagcttgccgccgcgccgcggcgcgtccctgttttccgtgccgcggattacggccgcgaagccgcgcattttaccgccgccgccgcgcttgcgttcgccgcgggcgtgtgggtcgggccgctgacgctgctcggctgcggcgcggcggcggggctgctgaccgtcggtggcagcaagctgttcgacaagatcctgcccgcgatgttcaagaagaaggaagtcgcgcccggcgcggcggaaggtctggccgaggcg

SEQ ID NO: 182330 - DNA, 231 bp, Arabidopsis thaliana landsberg
gaacctggccttcagcattgctccaccaatcttggaaaatcatgtcctcaggcccaggtgccagatgttgcatccccactttacaccacacctgccaccaaatgtttctggagaacacacaagagagcaaaatatgttggattgtttcttcctgctgatcgcaaaagaggcatttgtcatgatgatccatacctcgccgggccaatctgtcagccgtccaacaccggttga

SEQ ID NO: 182331 - DNA, 420 bp, Arabidopsis thaliana landsberg
tatcttccaaagcgttttatgagggaaaatggtgtagacaaaagacgtggagagatgattctgatgaatgaaaagggcaaatcatggactttagatttgaaactaaagaaatcatgcggaacttccctcatcagacgaggatggagaagtttctgtagtgccaatggactaagagctggaagtatcattactttcaaactgattaagaaaagtggaactcttgttctatgtttgctctccaacgagccagaagaagaagtgtgctcagaagctaatgaagtagagtctctttcgacagatcaagaaagccatgaagagagtatccacaacgagaaaatctcaagaagaaagtctttactatccgaaaaccgatttgtaacattagctctaacaccttatgcaatccaaagttctctactg

SEQ ID NO: 182332 - DNA, 471 bp, Arabidopsis thaliana landsberg
attatgccaatatcgaatcgaagctgaaaaagacccaggccgtgcggaaccgttttattgtaagcttttccaacccgatcaaacgcatgctcgaaaaagagcacatcagattcgagatgaaagcgcgcaccaaatcggtgttttctatctggaaaaagatccacaagaaaaatattccttttgaagagatctacgatctttttgccatccggtttattattgagagtgagcctgagcgtgaaaaggccgactgctggcgtgtttattccattgtcaccgatttttatcagcccagtcccgatcgcctgcgcgactggatctcgatgcccaaggccaacggttatgaatcgttgcacactacggtgatgagccccaccggtaaatgggtggaagtacagatcaggaccagacgcatggacgagattgccgaacgcggttatgccgcacactggatgtacaatgagaccagcg

SEQ ID NO: 182333 - DNA, 167 bp, Arabidopsis thaliana landsberg
gatgttatcctcgaccaaacggggttagtcttggtcagcccatcttaatcatatcccggttagcggactctacgggttggtcaggtttaaccttgaatgacaaacttgtagttagcctacataataagacgacccgttatgcgggatttcagccaatggataaataa

SEQ ID NO: 182334 - DNA, 437 bp, Arabidopsis thaliana landsberg
ctcaagatgtcgggccccaacgggtcatcaccgtcggctccacgtaccgacacgcgtacgaaggcgacgtggagttcgtggagtacgccgaggcccttgccgaatccgaggccctcatcgccgacctggagagcctctccaaggaggcgccagatgcgaacggccatgccggcaacttcgagccagccgagacggtcaaatccgtccctctcgaccccagcaacgacgcctccaagcagatacggatcggctccgagctcaaccccaaataggaagcagtgctcatcgactttctcctcgtgaacgccgagcactcgctggatatccgagctagagcccgacccatgaagcagcctctgcgccgattcgacgaagaaaagcgcagagccataagcgaggagatccacaagatgatggccgcacggttcatcaaagag

SEQ ID NO: 182335 - DNA, 307 bp, Arabidopsis thaliana landsberg
gtacactaagcttgaaacctgtttgacgccgttgccggaagtaacaggatctgagatcaaagaagtagcgggtggacagttggcgagatggcctgagagattgaatgctcttcctccgaggatcaaaagtggaagcttggaagggatcactgaggatgaatttgtcagcaacacagagaaatggcagagaagagtgtcttactacaagaaatatgaccaacagctagcggagacgggaagatacagaaactttctcgacatgaacgctcatcttggaggtttcgcctcagccttagtcgatgatcct

SEQ ID NO: 182336 - DNA, 492 bp, Arabidopsis thaliana landsberg
aatgtgaatctgaaagtgatgataatgcagggtggataaagatgctgatggtagacttacagaagacgaagttagagaggtaagaaatacagagtgttataagttatatctgctctgtttcagtgttaactctgttttggtcttgttgttgtgtgtttacagattatcagtcttagtgcttctgcgaataatctatctacaatacagaagagagctgatgaatatgcagcattgatcatggaagagttggatccagacaatataggatacatcatggtaagtaattatcagctgtcttgacgatttgccatattatgtttgagacttgaagcatttgtggtgaatcttgaaacagttggagagtcttgagactctgcttttgcaagcggcaacacagtctgtgataacaagtactggggagagaaagaatctgagtcatatgatgagtcagaggcttaagcctacgtttaaccgcaacccgttgaagcgatg

SEQ ID NO: 182337 - DNA, 564 bp, Arabidopsis thaliana landsberg
atgctcgtacaactacgtatcacaataatagccagagtagtgtgtatgatgttaacaacaaaaaccagacattcaaagcgcaagactttgctattcaaggccaacacggaagttgggacgaatcttactatgccaacaatcagcagagctggaaacacttggcaaccagtaaatgtaggtaaggctgagcctgctgtaacttctgattcattatcacgcttcggaggaaaccagcaagtaaataatttgtacagtacagaatctgtggctgaacagtttaagccaaatacgattggagcccagagctttatccctcagcatatgaatgtggctagtgccacacaaaatggaccattgagtttctcaaacgatttgtataatagacagcaatcggtagatcatgctcaaaagtcttttcagaacaatcagcttttctccccaagtgtgggaagatcatctgataggcgtccaccacacgcactagtcagttttggatttggtgggaagctcattgttatgaaggataataatggttctctgcagaatacatcatttgggagtcag

SEQ ID NO: 182338 - DNA, 109 bp, Arabidopsis thaliana landsberg
atgaccttgaaagaaaatcaacgaaaagtggttttcacgaagtcttatgttgaggatagccggattgacaacgagcaggagcgagctaataaagcatcaaccgctatcc

SEQ ID NO: 182339 - DNA, 128 bp, Arabidopsis thaliana landsberg
cattaattcgatagtaatgaaaaaaacagcgaatcctattgtttcaaccttgttgaatcaaagggtcctgaatttacataaaataacgtttcaagaacacagcttcaatgcgaaagggaacggagttc

SEQ ID NO: 182340 - DNA, 337 bp, Arabidopsis thaliana landsberg
atgaagaaaacatcaaccagaagccaaagaggaagcaaaggtatcaaagggaagcatgtcctgcagatatgtgttctgcttggagtatgcatttggttaatctatcaagtgaagtattctcatgataagaagaaggaattttatgagaaagatgtcgagaaatcgacggtgttgttgtcagaggttgaagatggagtggtgaagcttgggaggaaagatcttcttcctaagaattataaccagaaggaaaacgagaagcacgtggaagaggatgaggatgaagaagagatcagtcatggaggtgaagagaaggagaagaagagtaaagtagagaatg

SEQ ID NO: 182341 - DNA, 461 bp, Arabidopsis thaliana landsberg
ttccggtgacggagtttcttgaatcttcgaaacccgattgggttcttcaagatttcgcggggttttggcttcctccaatctctcgtcgtctcggaatcaaaaccggattctttagcgctttcaacggcgcgacgctcggtattcttaaaccgccggggttcgaagagtaccgtacttcgccggcggattttatgaagccgcctaagtgggttccgtttgaaacttcggtagctttcaagttatttgaatgcaggttcattttcaaaggatttatggcggaaaccaccgaaggacatgttcccgacatccaccgtgtcggcggcgtaattgacggctgtgacgtcatcttcgtacggagctgttacgagtatgaagcggagtggttaggacttacacaagaacttcaccggaaaccggttatacggtcggagttttgctccaaaaccggacgaaaagtttga

SEQ ID NO: 182342 - DNA, 128 bp, Arabidopsis thaliana landsberg
atgtatggacattcttacactcgtgcattgaagaaaagaagaatatcaacggtcgacttcaagaagcatacactcaactttgtcacaagctctgctcacaacttaattgaaatgccacagaacatcgg

SEQ ID NO: 182343 - DNA, 142 bp, Arabidopsis thaliana landsberg
aggcattttccaccattagcccccttgtccttttggcaatttctataacaaatcgtcggaaatatcttaggcgcacagaagccaaacccaacatcacccccatattctttcagacactcgctatcatgtgcttctatctcag

SEQ ID NO: 182344 - DNA, 172 bp, Arabidopsis thaliana landsberg
gcatttcatcgaacagcttctctgcacaaacatcatgacccaatctcaagtaacaaccaacaagctggtccccaataaatccatggcggtaactcacactcttcactactttacaatgaagcaaacgacacagttcaatggagacacaagactttacagcagctataagtga

SEQ ID NO: 182345 - DNA, 1644 bp, Arabidopsis thaliana landsberg
atgccggaggcagagcataatacttacatgaatactatgttccctctctataggtaaagcttagtttgcctcttgtacaaatcttattttgaggtgaatcttttgtttagttgcactctctctgccttctctgttgttcctgcagcttgttcgggttcatcgtgcttcacataactatgtatgctattgatatatactattggaagcgttatcgagtaaattatgccttcatatttggttgcaagcaaggaactgaacttggttacagacaagttctatttcttggattcaccattggaacgtttgcgttgctttgtgttcttggaaatcttgatatggaagtaaaccccaaaaccaaaaatttcaagccattaaccgaacttcttcctcttttccttcttgttgtaagtttcgtaaatccaaatatttaagctttttttgtgcaaactcagctatataatggaactaactctatatgatgtttgttttaggctctgtttgtagttttaatcatgccattccattttctctaccgctcaactcggttcttcttcctcacatgtctgttacactgtcttgccgctcctctttacaaggtaaaagacttaaatttagcggcttatcaatgttggtaatcttgtatggttactgatgctttctcaatgtaggtaacgttacccgatttcttcttaggagatcaattaactagccaagtacaagctcttcgaagcatcaacttctacatatgctactatggttggggagacttcaaaaaaagagaaaacacctgcgaagcctcagaaatctacatatattccctatacattgttgcatcactcccatatctttcccgtcttcttcaggtactaaagtttcttcaaaagacacatacatgtctagagcaattagataatattatctctgttgttcaattggtgcagtgcatgcgacggatgattgaggaaagaagccttgatcaaggatacaacggagtcaagtacttgttgacagtcatagctgtttctttaagaacagcctacggttatgaagaaaaaaacacgaagaatcctacatcacaccttaaagtgttagctggttcttcctcgattcttgctgctgttttctgtacatactgggactttgttcatgattggggacttctgaacaaaacatctaaaaaccgatggcttcgggataaacttctcatcccacagaaaaaagtatacttcatcgcaatggtaagccgcatttaaaacatcttcgattataaaatctccaaaccatagaaacaactgaattcttgaaaactaaacttcagatcttgaacgttgtgttgagattcgcgtggttgcaaacgatactgaacttcgaattcgagttcttgcacaagcagacaacgcttgcggttgtggctagtcttgagattatgcgccgtgggatgtggaatttcttcaggtttacttactttacacattgttactttggtttcttctttaccgtttttttctatcatgggtttgtgaaagttttctttacaaaaacagggtagagaatgagcatttgaataatgtggggaagttccgagctttcaagtcagttccattaccgttcaactacgacgaagacgatgaaaaggacgactaa

SEQ ID NO: 182346 - DNA, 902 bp, Arabidopsis thaliana landsberg
gatgctctcgactttttcctccatctggtaggcaaggttgagcgtgctagcaacacgacaccagatttagacccctcgaggagcttcaagtttggaatagaagagaagatcctttgtccgtctggaaaggttggatataataagagggaagactgtattctttctttgaacattccgctacatgaggcaactaataaaggtatatcctgttcgtctgtctatgttcctcttcctttatcgtttggcgtgtttcttagttttgcttaatgtttggtgatcaagatgaattagaagcctttcacaagcaaaaaacaggaaaaggattggaagagaatgatatgtgagtcaatggacttaagtttaaatctgtttcatagtttcactgcttatctaagatttttttgtttattttcaggaggtcaagtgatgaaatagtacgcccacgagttcctttagaagcctgtctagcaaattttgcatcatcagagccgattgaagactactatagctctgctttgaagggaatgacaacagctatcaagtaagatattgttttttaccgagtgaattcttttgcaaccaagattagaatgaaagcaaggcttgacttttggttcccattttatgcaggacaactggtttgacatctttcccagattatttggtcttgcacatgcggaaatttgttatggaggaaggctgggtgccaaagaaacttggtctctttctttctgaaacaatgatccttataatgttcccctattgtccctgtatataaatacttattatcctttcttgatttactgtggcagatgtatacattgatgttccggatgttattgatatcagccacatgcgtagcaaaggactccaacctggggaagaacttgtgccagatggcg

SEQ ID NO: 182347 - DNA, 97 bp, Arabidopsis thaliana landsberg
ggatctgcaggaaaaagatgcccttccattacccaaagtggaaggggatgatcgtgcacaggcacgtgcacttgctactcttcattcacatcccgtt

SEQ ID NO: 182348 - DNA, 210 bp, Arabidopsis thaliana landsberg
caggaacaactaatgatcctgaaaagggaaagcagaaaatgaaaatggagatagacgaaggtacagacatacattttcttaatctattcatgttacttagttaaaggtgaatataaaatcatccaccttgttggcttgttcaactatatagataatgatgaagcaaatgaagaaaaggctacttcatcaagaatcaagactgaacaatga

SEQ ID NO: 182349 - DNA, 572 bp, Arabidopsis thaliana landsberg
atgaagacgggagccggcgcgggcctgctcttcatctcgcccctcgggaaacacctacgctacgtgctacgcctccatttcccggcgtccaacaatgtggctgagtacgaggctctggtcaacgggttgcggatcgccatcgagctaggggtcagacgcctcgacgcccgcggtgactcgcagctcgtcatcgaccaagtcatgaaaaactcccactgccgcgacccgaagatggaggcctactgcgatgaggttcggcgcctggaagacaagttcttcgggctcgagcttaaccacatcgctcggcgctacaacgagactgcggacgagctggctaaaatagcctcggggcgaacgacggttccccggacgtcttctcccaggatctgcatcagccctccgtcaagatcgacgacacgcccgagcccgaggcaccctcggctcagcccgaggcaccctcggcccagcccgaggcaccctcggttcggcccgaggtacctcggccccgaggccgagcactgcacgtcgaggaggagcagaacggggcacgcatgatcgaaattggcagaccc

SEQ ID NO: 182350 - DNA, 546 bp, Arabidopsis thaliana landsberg
cgccgcggagtgtcgcgagatcattgatctccaaaatgtgtcaacaaacggcggactgtcctccaaggacggctccccacctcgtcgccgacctggcaaggaaaaggtcgacgacggcgaggtggccgcagctgaacgggacctcgggtatcagtcacctgagggggacctgaaggatgtcttcaccggaggctcctactccgtggagacaactagacggatccccagagggaccctatgctccccggtctgcggggctggagcctgccttcccccggaaacccatctggattccccacggttccagacttccgacaggttcatgcaggaatggccatagccaaagacgagggctcctcgtcaaacgcagatggggacccagggtcgagacctaatcttacagtaagtacctgtcggcgtttcgagaccggggggtccctgggccgacgagtgaaatgtcgccgcgtgccccagctcagatgggtcgagcgcgagggcgagcgcgaaggggggagagcgaggccgccggagaccggcgtgagagag

SEQ ID NO: 182351 - DNA, 868 bp, Arabidopsis thaliana landsberg
atggaagatttggaacttggagcttttcttgcaccttgccgacctctcaagtttcttctcacaagaagaaaaggagaagaagacgttatggagaagatgaaaccccatcccacggatgagttacatgctaagtctgatggggagatcgagtcccatgcaacggatgaggcatgtgatgtacttgacccccataccattgatgcgtcactgactttactcaaactctttaccgatgattatttggtggttctgttcgagtccctcatcaaatatggattacttgaatcccttgagaaagcttgttgggggagaaataacaggttcttgaacttgaagcatcgtattgtggaaatgagcatgtgtttgccagctgcagtcgttgtgctagtcaagtctctaaattgcattgctacgaagcttccattctctattcctcctaagcaggagaaggttttcaaaacagcagttctctcctatgatctacctatttattatggccgtagttgtattctacatctcgcatatgagttactaaaaacagatgataccgtcaagagttctattgttgactgcttctggcatagcttgagcttctttgagcactgtgggtgtgtttattaccaggagttgatcgcacattggattcttgaaggctacttcgatcctgttagatcggttacgaaggcatatatggacggacatgaagttatgatggagcttatagaacgtggtttcttgaagatacatgaggacaatgtagttatgcccgaggttgcaatgaagaatttaatagatcttcggcgtagtgggctgtcaggcagatcacgaattgcacttgctaaagtttttggtcgtgccaagacacaag

SEQ ID NO: 182352 - DNA, 410 bp, Arabidopsis thaliana landsberg
atgacagctttgctagccaacaaagtggagttcaagtggacccagaagtgccaagaggcctttgaagcgctgaaagagaagttgactacaacgcctgtcttagtcttgccggatgtgcacaagcccttctcggtgtattgcgacgcttgctacactggcttgggacgtgtattgatgcaagagagaagagttgtggcttactcgtctcggcaactgaaggttcagtggtgcatgcactaaagacatggaggcgttatttgtatgggcagaaatgtgatgtctacacagaccacaagattctgaagtacatattcacccattcggagctgaatatgagacttcgaagatggttagagttgatcaaagactatgaactggaaattcactaccattcaggcaaagcgaacgtg

SEQ ID NO: 182353 - DNA, 1697 bp, Arabidopsis thaliana landsberg
atgaacagcaagtttgaagggccattccctaacttcaagaaactcgctgctctcaagtcactctacctgtcaaacaatcaattcggaggagatataccaggggatgcttttgaaggtatggggtggttgaagaaggtccatttggcgcaaaacaagtttaccggtcaaatcccgtcatctgtggccaaattgcccaagcttttagaactgagacttgacgggaaccaattcactggagagataccagagtttgaacatcagctacacttgttaaacctttcaaacaatgcattaacaggtccaataccagagagtctcagcatgacagatccaaaggtgtttgaaggtaacaaaggcttatgtggaaaaccgctggaaacagaatgtgattctccttatatagaacatcctccacagtctgaggcacgacccaaatcatcatcaaggggacctctcgttataacagcaatagttgcggccttgacaatactcataatccttggagtgatcttcttgcttaaccgcagctataagaataaacaaccgcgtttggcggtgaaaaccggaccatcaagtctacagaagaaaaccggcatccgagaagcagaccaaagtcgtagagacagaaagaaagccgaccactggaaaggctcaggcactactaagaggatgggtgcagcagctggagtggagaacacaaagctttcattcttgagggaagatagggaaaaatttgacctgcaagatctgttgaaggcttcggccgagatacttggaagtggatattttggagcatcttataaagcagtgctatcaagcggacaaatgatggtcgtgaagaggttcaagcagatgaacaatgcagggagggatgagtttcaagagcacatgaaaagattagggaggttaatgcaccataatctgctttccattgtggcttattactataggaaggaggaaaagcttttagtatgtgattttgctgagagaggaagcttggctattaatcttcatagtaagttttcgatatttctacacttataagtcgttagatttatcgatgcttacgagtcaaatgtttgtaggtaatcaatcgttaggaaaaccaagtttggactggccaacaagattgaagatcgtgaagggagttgcaaaggggttgttctatctccaccaagacctacctagcctaatggctccacatggtcacctcaaatcctccaacgttcttctcaccaaaacatttgaaccacttctcacagactatggattaattccgttgatcaaccaagagaaggcacaaatgcacatggcggcctatagatctccagagtatttgcaacatcgacgtatcaccaagaaaaccgatgtatgggggcttggcatactaatcttggagatcctaacgggaaaattcccggctaatttctcacaaagtagtgaagaggatttagcgagttgggtgaactcgggtttccatggggtatgggcaccaagtttgtttgataagggtatggggaagacaagccattgtgaaggacagattctcaaactcttgacgatcggattgaactgttgtgaacccgacgtgaagaaaaggttggacataggacaggctgtggagaagatcgaagagttgaaggagcgagaaggggatgatgacgacttctacaaaacgatagtgagtgaaactgatg

SEQ ID NO: 182354 - DNA, 315 bp, Arabidopsis thaliana landsberg
atggctgtaatggagcaagtctttgttatcccagcccctgaagatgttcgcactgagcgcacaatcgagatccaaatatatctcacactctttacatttatagaaagagccagaagacatgttgccacacccggagcagatgatgtgtcccggtttctgatcgtactggtgcagacaaaattccataggatgatccggatggaaatcgtgcgtgacgtcctgcggcagatgagagcaagctttacaaagattgaaatcgcaagggctacatgccaactcgacaagttcgtctttgtagcaaatgctgcaaatccc

SEQ ID NO: 182355 - DNA, 28 bp, Arabidopsis thaliana landsberg
atggcggaggaggaggaagaaggggaag

SEQ ID NO: 182356 - DNA, 846 bp, Arabidopsis thaliana landsberg
gagttcttaaagtcgttgagaagagactgcgaggaattatgtggagtgcttatagaggctttcgtgaggttcaaggaacataacgatgtgcagattttaaaagatgatgttgacctaatgttacgagattatcctcgtctaaaagaggagtttaggatgatcctactcgaccacggtttaatacaagatgagaaacgagatgagatgacgcgtggggaagaggacgagctgttcaaagatgatatgtactttcatgccatagaatcggccattaagtttgcggtggcggaggataatgagaagccggaggtgggtgtatatggagccattagacggttttacaaacaacgacgcagaaagttgccacgaggaatcatgaaagatccgaaacttggagttagaagaattttaccaaatttgcagaggaagtacaacgagttgctcaagaacagaacaaagtcgcttgagaaagtgcgaaaagtgaatgaatcattggttgtttttgattgggtacggtagaatgttgtgttttttttgttaagggaagtatttggtttgttagggttaattaggatattgtgtctactattctatttagattgatatttggcttttgaaacttgattaacataatgataacttgataaaccacatgttcaaaacagagagattcctaattatgaattgatttttactgtattaaattatgaattgatctgaacttacggacaggggcttgtgggcctatatcagcacgtgacactagccacgcgtagcggttctgctccaacaaaaaagcaaactcgctatctgtccaatcaggaacaaccacgtcatagctcctga

SEQ ID NO: 182357 - DNA, 2035 bp, Arabidopsis thaliana landsberg
gtcgagatatttgaatcagaatttgacatctcaaagatctatcaactccagtgcaggctcaaggatatttactttccttacatccaggtattcttagggtattgataatacaatatatcacaatccatgttaattgctagggattttgttaacggctttaattcgttcttaaagcatgttaatctttaccaaatatggatccggtgatgcctgaaaactgtgctataaatatggaaaaaatgatgagtttctgatcggtgatatatgttttctaatagttttgccttgcgaccattttcttggtgagtttttccttggctcggattaagtgtcactgttttaatttgctttattaacctgtagtgtgatgaactctccaaaactgggaggactgaaaggcctgtggcgtttcaggtttgttatcatcatcattggctaatcagttgacagttgtgttctcgtttgatattactaagattatcatttgtagctaaattttgtttcagatttgttattattattccaagataaattacttcaagtgttcttagatatactcttttcctggtattctttcaccttttcaggtcaatggggaagatttggctgagatagcaggtggagaggttgccattaccaacctacactccaagggtcaatttttttcatttcagattcgattcactcttttcggtgggaaaagaaaaggtaaaaacccctcttcagatcaagacgtttcctattagttaagctcctggctgcttttgcctcagtatccggtattaagtctatttaaaatacggctggtacgttccaatgaagagatatttttgtttgggcttataatgaaactgcagtgatggttgttttgtggtccaccaacacatacataatcttcttacactggaatttttagagagcctatatcatgtttgttaagagaaacgctgaaatgccctcctaacagaagcacaaaaattgcaatcccaagagtttatcatcattggattctgattatatatgtgttccagggacagctcaagaggcaaatgctcgcctcaagtttgtttattttccaatcgtccaggtataacaatcctttttacagaagaaaacattacctttggttaccttctcgaactgaacactttagaatctttgcagggaaaagaaagcattgagaaaattttgcagagtttagaagaggaaggatgcaaagtttctgaaagcttccagacttttggccgtgtttcattaagaaggcttggtcgcttacttccagaagtccgttgggttagttttctcttgtaactattatcatgctatttatggtgtagagggcttgcaagttctccgaatatgcttgaaaactagaatttaactcttgcgttgtttgtgtcatcaataaatgtgtaggattcaataccgtttatgcaaagaggaaacagagcttctactttgcagaaaagctgccgaagagtaaaatgctttgttggtatgaagtgctcatacattgtcagttgtatatgtacatctgttttttttttctttatgagtgtacactctttgtggttgcagatttggatgctggttttagcccaacgccctccaaagtgagctaaacactaatcctagattattaaacgtgtttagtacattatcatctgatcactgaacaagctttttacagactgaccttgcaagccaaaatcctttctcagtggctttaagaaactttggtagtaagtcgacggagaaagagaaggatgatggtcagtttgaaatccttttgcaatcttgttttttccattccttgtcgtaattggattataatgaattcttgtttttacagatgtcaatattgtgattcatagagaaggaaaatctgtcagctatgcgcatctggaggaaaaatatcaagaatgggttttggagatgcataatacccatgatgaagaagctgcatcgggtctagatgaagctgtcctcattgttggatccttggataaaaaggcccttggcattttgcgtgatg

SEQ ID NO: 182358 - DNA, 133 bp, Arabidopsis thaliana landsberg
gttgtatagacctgatcttcactaccgaggtgaatggctagggattcactacatagcctttacaaagattcccctggtctgtagttgcccattaggtttctccagtcatacaaacaaagtactcctccctaag

SEQ ID NO: 182359 - DNA, 1129 bp, Arabidopsis thaliana landsberg
  unsure (1)..(1129): unsure at all n locations
gaatctttatccaagattgctgaagacgcattacttaatgctatacaaacacgaaaacacggagatgccttatattattgggttcgcatggacaaagatcccagaaatcctctgcagaaacccttttggtcgatctgtgatgccataaatgctgggaattgcaggtagaaacactagagattctaaatcataatgtttgagactttggccatttacctgactctaagcaattaatgggctcggaacaaggtttgcttacaacgaagctttgaagaaaatgtacagcatcaagaacttggactcattgccaccaatgcccgacgatggagatacatggtctgtgatgcannnnnnnnnnnnnnnnnnaagatccttcttagagtttgtcatgttctcaaggtacttgtttaccacattacccattgattgtctcagtcttagcctctttggagaaagaagagtgcttaagagtgtgttttcccatctgtttgtaggatgtttgtggattcactagatgcacagatatatgaagagcatcatcgaacaaaccgttgctatctgagtttaaccaaagtaagaaactcattccttcatctgcgaaagttcatgtgtttttagatctaaatcagatcagtccacttgggttgggatttatgtgttcaatttctcacaggacaagcattgctattcgcgggtactagagcttctggtgaacgtatgggcttaccacagtgcaagacgcattgtctacatagatcctgagactggtttgatgcaagagcaacacaaacagaagaaccggcgagggaaaatgtgggtgaagtggttcgattacacaactctgaaaacaatggacgaagatctagctgaagaagccgactcagaccgtcgtgtgggtcactggctatggccatggactggcgagatcgtgtggcgcggtacattagagaaagagaagcaaaagaagaatttagagaaagaggagaagaagaagaagagtcgagataagctgagtagaatgagaagtagaagtggtcgtcagaaagtgatcggaaaatatgtaaaaccaccgcctgagaacgaaactgttaccggaaattccactttgttaaatgtagtagacgcataa

SEQ ID NO: 182360 - DNA, 674 bp, Arabidopsis thaliana landsberg
tttttctttcatataaatgatgtctatggatgggtcacaaggagtttgaaaaaatgtcgaggtacctttctttatcggggagtttggcttgatgggtcttatggagctgtgacttgtgttcctgcaaatgtcgagtacatgctcaagactaacttcaagaacttcccaaaaggtaccttctttaaaagccggttcaatgatctgctcgaggaaggtatctttaatgctgatgatgattcttggaaggagcaacgacggatcatcataaccgaaatgcattcaaccgggtttgtagagcattcctttcagacaacacaacatttggtaaggaagaagctgttgaaggtgatggagagtttcgcaaagtcacaagaagctttcgatctccaagacgtgttcctgcgcttgacgtttgacatcatctgccttgcgggtctaggtgctgacccggaaactctagctgttgatcttccccaagttccatttgctaaagcttttgaagaagcaacagagtctacactgtttagattcatgatccctccatttatatggaagcccatgaggttcctcgacataggatatgaaaaaggtctcaggatagctgttggggtcgtgcacgggttcgtcgccaacatgattgtggatcgtatctgcgagctaaagaaagaagaaac

SEQ ID NO: 182361 - DNA, 100 bp, Arabidopsis thaliana landsberg
ctgatagggtggtcaagggtttggaagataacgtattggatggggatgctcttgccagatttggtgctcgtgaatctgagaaattccgctttttgggagt

SEQ ID NO: 182362 - DNA, 1088 bp, Arabidopsis thaliana landsberg
atggcatttatgttgagtgatgatttgacaatcgagaatttttcttgggatcttccccggaaacgtgtcaaggatttaggttgcgttaacgtgttcgataagttaggggagggtgaaccagaagttggcttccgagaggtacttttattgtgttgttctcttagttttttttttggtttaatagaatgaaactttttgacttgtgcaatctcaatgtataggcaatgactttgctacgatccttattcacatcagatactccattgacagcaacattcaacccctttcatagttcaccatatccttctaagagagcatatgagccatcgagtccatgtgattcggttttaggccaagtattgtctttcaaagtgtatttgagtaaggaggacaacaagaaggttatttacgctgaatgtggtgaaggctttattgatcttctttgcatgtttcttgttcttcctcttgggtatatatgtcagatctctagtagggatggtgatgatgatgatggtctggggtgtatcggtaacttgttcagaagcttcaaaggcttaagtggtgacgaaataaccattccttggtattacaattgtagaaagaatcttcttggcatcacggtccaaaagccgccgagtttgttcaattgcatttcttatttggaagataatggtatggctggagattgcgaggatagtaggctcaagaaagtaagaccaatggatccaaaagctgagatcagtggccaatcaagaagtagtagtggtgggtttgtgaagagtaacaagaagtttcttgtgacagatgatcttataatcactccactgaattcagatcttactatgagggagctaaagaaactgaagataagtttcgatgaagtcaacatcaaatatataactatcggtaaaacagaggtatgcataaatatttagtcttttcttgtcccataagttactaagagatatggctaactcattgtctctatcttaatacaggctaccaatttattgaaagcttcctttgtgacatcctttgcattaaccaatggtctctcggacttgctgtcgaagaagctggaagagtaa

SEQ ID NO: 182363 - DNA, 1160 bp, Arabidopsis thaliana landsberg
atgagccaattacaaaagagagccccctcggaaaaacctaattcttggggaattgaaagtaagaaagaagtaaagaagaatgaggtgtttattagaagacgtggttggaaactgtggacctcaactgatccattctctcttgcgattttgcaacatatcctacattcgagactatacgataaccctaaacactctaactccaccacttaaacaccaaaatccccttacataccaagcgccgtctaccccgaatgacaccttctaatgagaaagtccatgccaaatcatttaaagaatgtaaagagttgactgacgtgaattaagagttctgtaggatcaaagcggatgcacaaggacaaaaaaggtgtaggactattgagcggccattctaacgcaacttttgtttatgtggtctgtaagatataattgagacacggtcactgataacaggagagttcccacgatattcaaacctctccaccagatttgttcttttattggcttgaggacaagcaaagtctacgtttgcgggagttgataacacgacttttagcccgttctagctattgatttcttatgtttcagagagaatttggtgccattctagagccaaataagaggataaacacgtattttaggtgcaaagaaggttttaagagttttgaagcaaaaggtatcgaaaggcaatcattccagtacttcagaagtttagcatccggccgacgtctccccatcacggcaacaaaatattttggtatgcatggagtcgaagtcaaatcgaaggaatccatgaagtcatttggaagatatgacccgaagagtgaagatatgtcaagaaccagccttttggaaataataagttcaacacacatccggccatggagtcttgaacccgggcagctccgagtagctcaccaccaaccattaggtcacacccaagtccttccctctttgtgccaccgtcattaggctccttccctgacttctcggcctgattacttacttatccggcggaatgatgttgatacccctaaacctaattcttggccctcaagtataaatacttgctctaagccctaaccctaggtgtgcgttcatcacaagcaaagactgccatcgtcgagggctgccaactcaccgtcgcacttcttgaagcttga

SEQ ID NO: 182364 - DNA, 688 bp, Arabidopsis thaliana landsberg
tatgaaaaagtgaatttcgattcgcttgttgaagctaggctcggtcttcgagtgggatatgaagagtcagaaaatccaatagaagtcccttttggcttccccttcccacttatagaatatgctatggtcggtgatgcaactgatctacttacgggaatacgcaatgttcaggttctttacttatatgcgagcactgttgaggtctgtatattaatcccatctcttctcacactcttttagtatttttagctacttagaaaattaaagaagacaaacaatggttttgttagtggcttattgcttaagggttcgagtcaatgattgcaaatgagtgatgatgttccaataattgatttggttttgtttcaggtacttacattctgctgcaaagcaataccgatattcaacaacctgactcgtttaaccattgaaagtaacacaaaagttggatgggattcattgccgaatctgctcaagaattgtccaaatctaaaagccctcgtcttccaagtacaaatcaaacccttttaagacatcatgtgacacatttttcagtcgtgagaaacaactatacataacgtttcatttgttgtttcagggactcctccacaaagctacggatagatgtggagacatgtgcccgtgcaaacctccggagaatattcatacttgcctatcatcaagtccg

SEQ ID NO: 182365 - DNA, 256 bp, Arabidopsis thaliana landsberg
gtgataagtctagagctatcgacaggtataccacttctctacatcttcaaagaaggcaaattcatgaagcggggaagcccggttggtccaacagaagctggtgtttatgcttataccaaggttatgaataatttatctcttctttatctttttagatttctctgtttcaatggttctgagtgtttctttgtgtttgcagagattggctcaatacagacagaagctagaggaggatagtgaagtaatctgtgcctga

SEQ ID NO: 182366 - DNA, 511 bp, Arabidopsis thaliana landsberg
gctcgacgtgttgctgcgccgcacctgccgcggcgtgttgcaggcgccggaagatgcactgcgcctgccggtggcacccggcacgctgatggacgatgcccagttgcgtccgccgcgccgcaagccgcagccgatcccgcgcagcgccaatgccatgcagcagcccacgcccgaacagctggcccggctcagcctgctgcgccggatgaagcgtgcgcggctggtcaatgccgaggacatggcccgctacgtcggccgccacctgccgcccgagggcggcatcgactccacgcaactgtccatcgcctcgatcgaggacctgcgtgcctaccagaccctgctcaccctggcgttgcgcagtcgccgcatcggcggcctgcgtcgcgaggacccgcttggccgcctgcagcgcggcttccgcgtggaattgctcgacgtgggcgaggcggacgacaacggctacctgcgcgcgccgcgcttcgccgtcacccggcttcggaagaccgcatga

SEQ ID NO: 182367 - DNA, 789 bp, Arabidopsis thaliana landsberg
atggtggatcttgttagcagtctaccagatgatctccttggtcatatattgtccttacttaccacaaaggaggctgctttgacttctattctctccaagaggtggcgctatctcattgcttttgtcccttatctcgagtttgatgactctgattttcttcatccccaagagggtaaacgggaaaaggaaaggaaatcgacagagctttatagattttgtggatagagtattggctttgcaaggagattctcccatcaagaaattctcactcaagtgttaaacaggtgttgcgtcacatcgtgtaaaacagtggatatgtaaaatggatttgtctatcaatttgtgtcaacatagttacatgctaatcgaaaatttcatgagcagaacactagttgaattaaaatttgaaaatcgaggagaaatttttgaagcagaggtctaaactacactggttagatgttggggacagaaacaataaaacatttcatcgagcaataactactcgagaggcagtgaattccataagagaaatagttacacgtgacgggttggttgtaactagtcaacaagatatccaaacggaggcagtgaactattttcaggattttttacaaacaatccctgcagattatgaagggatgtgtgtagaggagctagaagatttgctaccttttcgttgttcagaggatgatcataggttgcttacaagggtggtaacaggggaagaaattaaaaaagtcatattctcaatgccaaaggacaaatccccgggaccggacggttatacaa

SEQ ID NO: 182368 - DNA, 395 bp, Arabidopsis thaliana landsberg
gtttagaaagcctccaacagttacaagtcttgaaattacgaggaaataaattcaaccacacgctatctactcatggtaagtgttataaaactgttcttgcagaagtgacttatggcttaaagaaggcaatcaaatgtattctgggtttttctcctaagaatgtttattttgcctggcagtactgaaagatcttaaaatgttgcaagaactggatctcagtgacaatgggttcacaaatttagatcatggccgaggtaagacatatatagaaagtaaaacttgcttgctctatcctaactggtttaatctatctactttaactttttttcatagacgttgatgagagtagaagtgagaagagatttgattttagagaagttgttcagaaagtcgag

SEQ ID NO: 182369 - DNA, 574 bp, Arabidopsis thaliana landsberg
atgtctgaaggtaacaaagaggatatgaatatttttttattacgggggtggcttgattccgacggggatggtgattttatgagccttggtggtggtacgtttgtttttcttcttattttgtaattttaacaaatgaattgacagaatttgagtttacaacacagaatttacgccgtcgcgaggaacaacaccggtgcatcacaaattctgtgaccaaactcctcaccaaggagaggagaacaaacacggagaagaagaagaagaagcgtctcctaccgataacaagaagaggctcctcgaactctttaaagagacacaagacgaagaggatgaagaggaagaagattacgtggcagaaggcaaagcaagagcatgtctctggataagaacacctgttagatcttctgcgccggccactccttataataacaacaaagaaagacagcaaaaattcaagagagtgagatcagctgctcttggtcgctgcgttccgcgtttggtttcctgtagtagcttcactgatcggcgacggaatatgatgactagtcatgcccctattgacgtccaacgctaa

SEQ ID NO: 182370 - DNA, 1143 bp, Arabidopsis thaliana landsberg
acgtggagaacgaacgagacagagggaagagaatcatcggtgtggcgagcaatggatttgaagaaacggcgaaaggtaaaaaaaatctcggaagtaatgtgtatgtttcatagcactcgaaatttcgatctttgattttgttcgaaatcgataattgagaattgtcgtgcagattttggagaagaaaaagacgattcatgaccttataaaaagagcttcttccattgacgatcctctttctccgtttgattctttccgccgttaccgaagaaacggtaaatttgttcttctgctcaattttattttcgccagtttctcaaaaatatgggattttgtttatgcgaactgattatcattgacaatgatttgatgcatataaacttacttttacaattcctaatgttactacattatgaagtagatgtagtgttagttggaattcgtgctttttaacatggatttaattatctgtgaatcccttactcatgcagactttggtaacctatgatcaagtgtgctctgattagttgttagttagttatgataatgtttgtgtgaattttgttttcagtgcttacttgtttcgttttaagttcacagaagagtcttgatggttagctaattctgtgtatgtgttgttcttacgtcttgtagacttatctttgtacctggaatctggccgtggagatagactttcctcgtctgtgaaacatcacattcaaaaactcttgaaggtattaaagagaatgaagtatcattaaattttctgaacatactttcttagaaatttattctagatttattgttgtactcaaatttttttaccattcacagacgaacatggaagggttctatgggtctgattggcctatacaagcaaaggtgaagcgtaaggagatgtcttccgctgatgcacattatatctttgtgcgtgagctgcgttttggtaaagcctatgagacatctactcaaagaacttgcatggaagggtgtaatcagatagctggatttgtgcattaccggtttattttagaggaagagatacctgtcctttatgtgtatgaaatacagctggaatcccgggttcaaggaaagggactaggagaatttttaatgcagttgattgcgctcattgcttctaag

SEQ ID NO: 182371 - DNA, 440 bp, Arabidopsis thaliana landsberg
atgaacggtgacggcgccagagaaggcgactctgtttcacacgaaccatcaacatctaaaagtcctaaagaaggagaagagacgaagaaagaggaaaaaagcgaagaaaaggccaacacagttcctttctacaagctatttgcgtttgcagattcttctgatgtgctcttgatgatatgtggctcaatcggagctattgggaatggaatgtctttacctttcatgacattgttgtttggtgatctcatcgattcgtttggaaaaaatcagaacaacaaagacattgttgatgttgtctcaaaggtaaaaatccaaactttttttgaactttttgattgtgttcttagatcacattttagtactaatactgtgtcttcttatataggtttgtcttaaattcgtctaccttggacttggaagacttggagcagcctttcttc

SEQ ID NO: 182372 - DNA, 632 bp, Arabidopsis thaliana landsberg
ttatctccttgaaaaaccaaaagccaaaacaaaggagaagaagaagatgctgaaattcgatgaaccaaaatgcacaaacccatcctgtttcttctgcagcatgaaagataccaacccgtttcgtcgaagatcaaaactcgctgcaatcttcaaagagattcctcgtacggagtcaaaagaccatgtcttggtcttgagtggtttgtggaacatagccatgtccgagcctgacgatcctgagttcccgtcactaggtttgttcgagtgtatgtcaaaactcatacataaatcgatcaaaaacagtgtttggcttctcaaagaccagaacatattcattccttattacgcagctcatatcattggatcgtatgttatgaacaaggaagatttagctgccatggcggttgattcaaaggtctttcttgttcctgctttgttggagcttttgagagggaagatcagttgggttgagcagcgagccgcagctcgagcacttggtcatttagctagccatgagaagagttttgaagcggtttctttattcgaagaagaaattgtgaagcttgcaatggagatagctactaattgtttgaagaatgtttacaaaagctttcttggggttgaagataggg

SEQ ID NO: 182373 - DNA, 116 bp, Arabidopsis thaliana landsberg
gtgttgggctacccaagcaaaccgattgggctgttcataagacgttcaatcatcttcagatctgattccaatggagaagatcttgaaggttatgcaggtgcaggcctctacgacag

SEQ ID NO: 182374 - DNA, 273 bp, Arabidopsis thaliana landsberg
atggttggtgatgatattcgacgaggggtttactttgctcctgtatttgccgatgagactgatggaaaagatgctgctagtctgcgtgagatgcttatttcaactgtagaatctttgaagcctccacctgctggacctagtctgtcacagactgaaagttcaatagtggcacttagcatgctcaccaatgcattttgtttctgtccctggactgacatgactcatcgattgtttaaccagatgtatgcctggattccctggatagctgggcag

SEQ ID NO: 182375 - DNA, 1997 bp, Arabidopsis thaliana landsberg
atggcgacggagattctgagaacgaaatggatggcgatgacggcgagtatatggatccagtgtagcgcaggaggttcatacaccttcggaatctactcagcgatcttaaagtcaactcaatcttacgatcaatcaacccttgatacagtctccgtcttcaaagacattggaggtaacgtcggagttttatcgggacttgtatacactgcagccactttcaatcgccgtcgccgtgatggacgggaacgtcgaggaggaccttgggtggttattttgatcggagcgattttgaatttcaccggttatttcctaatgtgggcttctgttaccggtttaattaaacggcctccggttccggttatgtgtctatttatgtttatagctgctcagtctttaacgtttcttaacaccgccaatgttgtgagctctttagagaatttcgctgactatggtggtacagccgttggcattatgaaggtgagtttttgatgaagcttttcgatatattgaatggatctgtattgttggatcacgtctcagtttgtttccttgggacctaaagaccaatatttggctatgatgatgatcctggtagagtctaaatgaggaggctttggtaacatttggaaaaagattgatgatttgaactttggatcaatcgagatctagatcttctagttgatatatattgcgtagtaaatatttgttcttttctgataaaccttgcaaatgaggatgcaacctccacttttaagatgagaaacttcaactaaaccccaaagtatgttaatagtgggagattcatggtttcaactttggaatttttgattatagtgaagcatccaagcttacctctaattctttctttgcagggttttcttggtctaagtggagcgatactgattcaactgtacgagacattgtgcgctggagatccggccagcttcattctcttactggcagtaacaccaacagtgctctcactcttggtcatgcctctggtcaggatctatgagacaagcgtagccgatgataaaaagcatttaaatggtctttcagctgtatctctaatcatcgcagcttatcttatgatcattatcatattgaagaacacttttgggttgtcatcgtgggccaacattgtcacacttgtatgtctactcgtcatgcttgccttgcctctacttattgcgagaagagcacaacgagacggcatggaaaaaacagtaccacatgattattcccctctcataagcagtccaaaggcaacaacctccggtaaccaaagttctgaaggtgacagtaaagtggaagctggactgagtgagaacctgaatcttctgcaagctatgaaaaaactaagcttctggttgttatttcttgccatgatttgcggaatgggctcaggactttcaacgataaacaacatccgacaaataggtgagtctcttcgatactcatcagttgagataaattcattggtctccttgtggagtatatggaactttctcggtagatttggagctggttatgcctcagatgcattgctacacaaaaagggatggccacgtccattgctaatggctgcaacacttggaacgatgagcataggccacctaatcatagcctctggttttcaaggaaatctctatgttggttctgttatagttggcgtttgttatggttcacagtggtctctgatgcctacaatcacctctgagctgttcgggattcggcacatgggaaccatcttcaataccatatccgtggctagtcccattggttcctatatcttctctgtaagattgatcggttatatctacgataagactgcttccggggaagggaacacatgttatggctctcattgcttcaggctgtcatttattataatggcatctgttgcgttctttgggtttcttgtcgccattttactattctttcggacaaagacgctatatcgacagatccttgtaaagaggttgcatcatcgatag

SEQ ID NO: 182376 - DNA, 789 bp, Arabidopsis thaliana landsberg
atgagtgcgtcgatattactgtgtgacggcttcgatgtgcgtcgaattctaaccgggaaattaaacggtgatgaatcatcgacggtgaccaccgaggaagacgacgaagctgtgttttccggtgaagagtggtgtgcagagagttcttactgtttttacttcgttaagcaattcgcttacgatgaccctgagattaaagccaagattgatgaagctgatcatgaggtttatcattgtaacactgaccggattcacattgctaacagattgaaatccaaaagggtaagccttttttggttttgtttattttattacattttggaaacgttctgattagaaagtgtgtgtttttggtgtaggctgcgagattgtctctggttgcctcaatggagactttgatgagtatgaaaatgaatgaagtagagaaggaacaagaagtagttagagggaggatttacaggttaggtgaacgattaagtgagattaagatggaaattgagttgttggatgttcaaatggcttgtgtacttaatcaaagagataaagctgttgaaaggattaagttcttgaggatgcaacgagataaaggggtgagatttttccgaatctccttatatgtcaagtttgtttctttcttcatcaattggttcttaaagattgtttatttataaggtgtgttttgttttgtagaatgctgcattttaccagagccgtgttgttatgaagaaagctatagaattggctgcttctggaaatgttagagatcttgaagagctcgctgattccgag

SEQ ID NO: 182377 - DNA, 683 bp, Arabidopsis thaliana landsberg
atgcagattcaagcatggcaggacgaagtggaccgtgctcggcaaggtcaaagagatgctgaggagaaactttctttgatggaggtatgcttgttacttaccttggaattctttataacatgattttggttatttacacatgatctgtttgattgttataggctgaaatgcaaaagttaagggttgaaatggcagccatgaagagggatgcagaacattactcacgccaggtaatattatcagtttctgagagtctgtcttttcttgtcaatgtatcaacagtttctgattttttcgtttctcctagtctatacttatgggacttcctagctactactctttttctatcaagtggcttaggcagaactgatagttctctgttaaaccccttggcgtatttatttcattgaatgcaataaatttcattgcccagtaaaaattcttattgaatattttgagggaaagacccattgctcttcttgttaacacggtcttgttaatatgacgcattcattcgatggttgctaaaacacggtcttaatactcaacttattctgattttgctcgtcaagtggtacctttaatgcatatgattatgtaacgtgagtttaatcgttattcctctgacctagtaggagcatacagagctggagaaacgataccgtgaactaacagatttactg

SEQ ID NO: 182378 - DNA, 66 bp, Arabidopsis thaliana landsberg
aattcaagagtgctagctacacgacttctcaatggcgaattaaaacctgaacaagctataaagatg

SEQ ID NO: 182379 - DNA, 1329 bp, Arabidopsis thaliana landsberg
atatgtggctttcccagatgttttctctcaccgaatatcgctgatggcaagagtctagcctcttggaccgtaagttgcgcctcgttcggtgaaattgtcgacgacgcaagatatggatgaacagactcactcatgggctcaagcaacagttttcagatccatcatgttcattaatggaatccagcatacgtagttgcgatgtattcaagaaagctctaggtgctaagtggacgataatcctccgcctagcacatagaacgctttgtcggggtctaagcgattttaggacgtttaggcagttttagaataaaacaatgtatatttctatactactacaatgttgaaaaagcattataaaaattgaaaattatcaaatttttgaaaataaatttaaattttacttttaaaagtaaaataaaataaaataataaaaatataggattctttaaatacaatttaaatatattaaaaataatcaaaaatattaagatacatttagatccgtctagtctgcttaaacacgcctaatgtccgtctagtctgcttaaacacgcctaatgtccgtcttatccccttaataaaagcatagcccgccaaatctatcccaccgcctaataaaaccgattttaagaaagtcaaagcagcacatgggcgcctatcccgctttcttgaacacaccccaactttatctccatcttggcctctgcttcactattcatgttgccaattccaattacattgatgtctcgacattatgccttgtacgacaaaagacaccatccaagcatgatgtagagttgtagacatctttattttggtgttgcgataataattcccaaaccaatgtccaacgcttcactcaaagctcttcgactgagtgtttaagatctaattttttcggcatagtatctctaaatttgagtcatttttggtgtgacattggtcaccaccttagcatatcattatctctaaatttggtcaatagctctgtcgagtctctgccaaagcatctcctaaccacctccacccttcagatatggattggactttgaaagaaattcattgacctctctttgagatttcccgaatcaatgcgaagagcctcaacctatgtcttcgatctatagtttttttttactccttcctttttgaaattttaaaaacctttgatcaagacctcctcttatatggagagaactctttatgaaacttaccttccttggcttccagcttctaagtttagaaatgactcgagctgagaagggaccaaccatccccacaaccacctatgagaagattaacaccaaagccacatcagactcaccatag

SEQ ID NO: 182380 - DNA, 76 bp, Arabidopsis thaliana landsberg
agttcttgaagccaatcaattttctggaactattcctaaggaactagggaacctagtgaatctacaaggactgtac

SEQ ID NO: 182381 - DNA, 267 bp, Arabidopsis thaliana landsberg
atgattcatggtgagcaattcccttaaaaggaaacaaaagtgtgatcacttgattcaggaaaattaaggaaagtaatcaaattaatttttaaattgtagaaaaatgaaaacaaaatatccagctggaatagctcagttggttagagcgtgtggctgttaacctcaaggtcggaggttcgacccctccttctagcgtttttttggtctttttaaggaattttactttcacaagcccaaaaatccattattgaagcccatacgaaataa

SEQ ID NO: 182382 - DNA, 99 bp, Arabidopsis thaliana landsberg
atgccaacaccagaaccgacccgaggaaccgaaccagtgtcccaccatcttattgtccccacatgggttacaagctactgttacttagctcgacgttgg

SEQ ID NO: 182383 - DNA, 663 bp, Arabidopsis thaliana landsberg
atgcaaactccacttgttgattgttgggacttagaagcaaggttcttgagaaagtttccaggtgatgcagggtctcacaccgcgtcagtgaatcaaataccgttccaactatactcataccgggttttggaaaaagagaagatgaatccaaactcaaaagaaagctcagagactagtgaatctgaaagcgtttcagtggttgaagatccacctaatgccatgattacaagagatacaaagtcattgtgtcttgatacaatatctgaatactcagatacaagatcagtctactcggaagctcccatgaaaaaggtctcagctctaaagaaaagcggcgaaatggcaaagctcagaagaagtccaagcttaggttagtttcttcaccattatctctacattgacagagtttgagttgatagatcatcaaaaagacaactatctttatgttaatatattatcaatgcaggttcagaaaagttgagatcggcaggaacttcaacggtaaaagcaagatcatcgccaaaagtatcaccactgagtccatttggaagaagcattaaagcaaggaaggataatcgattgcctttgagtccaatgagtcctttaacccctggaatacgtagacaacagactggtcatgcttcagactctgagcttacttag

SEQ ID NO: 182384 - DNA, 470 bp, Arabidopsis thaliana landsberg
atggaaagccttgccgtctccttccaccgtcccaacggcttccacaatctcttcatcaccgacaccttccaccgccgtggtaacagcttcttccaccgaaaccgccggatcttcaccaccgggtcaagaagcgaccaacagtgaaaaacaacaacaaccaaagacggagtcgtttcaacataaattcagaaagggcaagtacgttagcccagtgtggaaaccaaacgagatgctatggctagcaagagcctggagagcccagtaccaaacccaaggaaccgggtccggatccgggtcggtcgaaggaagaggcaaaacccgtgctgaaaaagacagggaagtagctgagtatctaaaccgacacggtataaaccgggactctaaaatcgccggtacgaaatgggacaacatgcttggtgagtttaggaaagtgtatgaatgggaaaaatgtggagatcaagacaaatacg

SEQ ID NO: 182385 - DNA, 506 bp, Arabidopsis thaliana landsberg
cgattcagcaatctctagcgaatcgttatccccttctcaccaatccttatgtaatctcctcgttgattgaatcaattcccagtacaatcacgcagacccttttcgtatttggctctcttgggccacgacctgatcctttagctgtctcttctgctcggtctaagatccgagagatcaaagagaatgattctttatcgccggaagatgcggctaaggaagagcaggttcacgctgcggttgtgagtttagaggaagttcatgaaggatatgagaagcagttaagagatttggaggaggagattggtagggtttatgcttcgtcggttgaatcattgagcggtggtgatgaagtgaatgaggaggttttagcggtgattaaagacgctgaagatggtggagtcgttgaaaggattgatctttctgatcgtgagcttaagcttcttcctgatgctttagggaaaatcgtcggtttggtttcactgaatgtctctcgtaacaatctcaag

SEQ ID NO: 182386 - DNA, 1499 bp, Arabidopsis thaliana landsberg
atggagagcatcaacctgggttccgagagggagatatgttgggatgtgcccgtccgtgacgttatcgtttgggatctgaactggtaagccatatctcgttgaattggatgaattgggatccatgatcagtgttcaaaattgatgtgtaagttttggtgttggaatgatctatttccgtccccacagacgacgccaaatgagggctaagaacgaatggactttttgtattgattgtgacaaagcttttacaatgtgaaaggagattacaagtgtaaaagtatgtgtgaatgtaaagctggattgaatgtctcttccaagtcgtccttgctcccctatataggtctacgcacgtggtagctccgtccgggatctgcggagatcctcctgcatattcggcaggtcagttctgagatattaggtccggtccgcgtatatctccttgttagttcctaggttgttattcgcttatctcccttcatcaggtaaccgggcttagcaggcccaaatacccattcgcgtatgtgctcttcagttgcgtaggttctctacttggtgggcttggtgggctttgtgggttggcttggtattttcgtaggtggattcctggaggggaatccagctccaacaatgttaatgatggtactaagccgcatatgagatctcttagattcttatgcttaaggcttatggttgggaggttgtgttgagcaaggatattgatgattctatgtgtttgagtaaccatgggtcttgatgtgtggtgctcgtggtaggaggcagagaccataagcgtatcaagattgtggtatgtctaaccttcgtagtgaaccgttacttatgactccaatttgttttacaggaaaccttagtgggaaccattagagggatgctctggacgtagaaagccggtatagagttggttgctttttgcaaaacttaatgattttgatttttttgttggatttgagcgtgtatgctcaagggcccattgttaaaacgttttggatacttggtggtaagaagatttatatgttataaattattttttccctataaagagtgtgtatcattcgatattagtcttgtccggacaaacaaaactcatgatcatggcaagggttgaaaagcctaaaccgcgttcgtgagggatggttcatttggaacctcaattgggttgtctgtgtgagctatcatcgtagcatttccgggttgcccttgtcttgtccggccatagagcgattcaagggcgttgcaatttttggtttaagagcatggttcaggatgctaaccggacacacattttcttaagattttatcgagtaaatgagtctcaaaagcaactaggtagaccggtatgtcccgggttagtgggtaatgggttaggttttacccttgttgttgttgttgcagtttatgttggattggatcgagaatggatggtcgtgggggatcgtaaccaagattttaaagtgttgaagaattatggccgagctcagtaa

SEQ ID NO: 182387 - DNA, 85 bp, Arabidopsis thaliana landsberg
atgagatcagactgttctgaatctccaatgctaagtttctctacagctagaagtcaaggaagaaacacaagaccttttggaggag

SEQ ID NO: 182388 - DNA, 48 bp, Arabidopsis thaliana landsberg
gtatataatttagatatcgaacccgtggaggtcgcatttgcaacgtga

SEQ ID NO: 182389 - DNA, 10 bp, Arabidopsis thaliana landsberg
atgggcttgg

SEQ ID NO: 182390 - DNA, 73 bp, Arabidopsis thaliana landsberg
gggggtgtgcggctcttcctggtttatcctatggcggtttttagttcgcgacagtcatcgaccggtcttgcga

SEQ ID NO: 182391 - DNA, 390 bp, Arabidopsis thaliana landsberg
  unsure (1)..(390): unsure at all n locations
atggtcgaggccgcccgcgccgcgaacatgcgcctgctgggccccaacgccctgggcgtgttcaacgccaacctgggctactacgccttcttctccaccagcctnnnnnnnnnnnnnnnnnnnnnnnngcgcgtcggcatcgccacccagtccggcgcctacggcgcgcacctgctgggcctggcgcggcagcgcgggctgggcacgccgatctgcgtagccaccggcaacgaggccgacgtcaccctgggcgacgccatcggctggctggtggagtcgccggaagtcgacgtggtgatggcctacgccgaatccatccgcaacgtcgacagcttcctcgccgccctgacggccgcccaccgcgccggcaagccggtgatcctgcacaag

SEQ ID NO: 182392 - DNA, 510 bp, Arabidopsis thaliana landsberg
gaacagagaggttttgtggaggcacaagccgatgatggactacttgagatctttgggttaaagcaaggatggcatgcttcctttgttatggttgagcttatatatgccaaacacattgcacaggtacttcaattcaaacaaaccaaaccgtttttttttttgacaaaatagggtcgatctaccaaactagtattatatcatcaataattaacaagtattttagtttagtgaacttctccaaaccccatttacatatctaacatttacaattacactacataaatatggatgatatatgtctttggcaaatcgtggtagctaatgtgcaaaaacttgggttttaacgaacaggcggcagcgataaggctggagataagaggaggagactggaaagatgcgtttatgcaaatggatggagagccatggaaacagcctatgaccagagactactctacctttgttgacattaagagagtccctcaccagtctttggtcgtcaaaggagattga

SEQ ID NO: 182393 - DNA, 105 bp, Arabidopsis thaliana landsberg
gcgagcctcgtccaagttccaatcaagctagtccgacccagaattccctctgcccacgacgacggcgagcagcgaggacggaccgaggtgctcctgatgatctaa

SEQ ID NO: 182394 - DNA, 96 bp, Arabidopsis thaliana landsberg
gacgagatcgcgtttcgaaggcttctaccgagacgattaaggacgctttgtcgtcattatcacatccgaacgtgttttcgagtccttagagattga

SEQ ID NO: 182395 - DNA, 217 bp, Arabidopsis thaliana landsberg
atttgtagaagaccttcccgaggggaatcgtgcgggaaccataaaagacgcatgtggggaccacagtcataatcacaaaaccaaattgaacggtgacgagccgctgctgcttcagccgccacgcaccaaattaccccttcgttttttctttgctgctgacgcttccaaccgccacaaacaatcttggcttcgtttaaaccatacgtatcctaattaa

SEQ ID NO: 182396 - DNA, 128 bp, Arabidopsis thaliana landsberg
ggtatcaaatttgttgtttggaactcaccttattggctgaattgcttgttccaggaagctactaaaagagcccaagaaaaagcttttgaacgcatccggattctcgaagaagattttgcgaaggctag

SEQ ID NO: 182397 - DNA, 414 bp, Arabidopsis thaliana landsberg
gtttacaagggccaggtgctggtgggcggccacgacgtgcgcgacgtgaccctggacagcctcggcaggaccatcggcatggtgctgcaggagccgttcctgttcaccggcaccatcgaggagaacatccgctacaacaccgagaccgccaccaccgaggacgtgatcgccgcggccaaggcggtgtcggcgcacgacttcatcatgcggctgccggagggctaccagaccaagctcggccagcggggccgcaacatttccatgggccagcggcagctgatctccttcgcccgcgccctggtggccgacccgcagatcctgatcctcgacgaggcgacggccaatatcgactccttcaccgagcaggcgatccagaaggccttgaaggtgctgttcgccggccggacctgcatg

SEQ ID NO: 182398 - DNA, 401 bp, Arabidopsis thaliana landsberg
acagccgtgcagatttcgacaaaaccgaacgccccaacagtggtggcgatcgggaaggatttggtcgcgaacgaaaaggagcgcgcagcaaagaaggtgacaggtcaaagaaattcagccgcggcaactatgatcgttcggcaccacgacacgacagcgaaaaatcgtttggcggtactgaccacggtcaccaggctgcgggtaaccggcccttcaaaaagttcgatcgcggcggtgtaaaacgcggcggacaatccattcgccaggagcctgaattacctgcgccaacatctactggcggccctatgcgactcaataaattcatcgccaacagcggcgtttgttcacgccgcgaagccgacgaactcataacgatgggcctcatctccgtaaacggaaag

SEQ ID NO: 182399 - DNA, 58 bp, Arabidopsis thaliana landsberg
atgaaaattgaagatatctgtaaatcaatccggagaccaaagaatgaagtatataaaa

SEQ ID NO: 182400 - DNA, 110 bp, Arabidopsis thaliana landsberg
gacgcatacccgatcggattttacccgaacccgacccgctttacccgaatgcccgcccccctaatatgaagtgtaaaaataaagcaaaaaaactggtcgacgtcaaataa

SEQ ID NO: 182401 - DNA, 93 bp, Arabidopsis thaliana landsberg
atgatagacgaaaaagttctgattcgaaacctcacctgcgcagaggtttcgaaggaccttcagagagagattcagataatggcggcaagatgg

SEQ ID NO: 182402 - DNA, 404 bp, Arabidopsis thaliana landsberg
  unsure (1)..(404): unsure at all n locations
gcgcctgttgcgcatgcacaggataacctgccgtgcagagcagcaccaggaatatgcggacaatatgcgtagccagttttttgagcatgttttatttaacgcctttcggtacctgtttcaccagccattgaaccagttcattggctgccttgaaattttcgtattcagcgggcagtcttctgccatcggtatattcattgtatatccagggatcacctgttgcgaaaacagtaccctttcctnnnnnnnnnnnnnnnnnnnnnnnnagatcatcttttttcaggtaggcttctgcaggcgctttcagggtcatggaggaaacttctttctggtatatctttttcacagacggaagtatcctgttgcctgccggcacatccactttatcccgagaaaaatcactg

SEQ ID NO: 182403 - DNA, 371 bp, Arabidopsis thaliana landsberg
cgcggccacgctgcgccgcaagcgtcttgagctgataacccaaggggtaacgcgcctagcaggcaattacggcaaccgtaaaggtgaatcaaaaatcggcacgcagaaggaagtgaaggaattcgtgctggccatgctgcatgaatacccgcacgccagttgcgcgcacgtcaagcaagggctgcaggcgcgcttcggtaagcgggacgatatccgtctgccctccgatcgctcgatccagcgcttcatcgcccaatggaagcaagagaacgagcagctctataccgctgtccccaatccggacaaatggcgcaaccgctatatggcggcaaacaggcaatgcgtcggaacacatcgtacgcctcatccag

SEQ ID NO: 182404 - DNA, 296 bp, Arabidopsis thaliana landsberg
gcaaaccaccatattttgatggtgaacattattgtatgtggagtgataaaacgaggcaccatctaacctcactccacgaaagtatatgggatattgttgagtttggagcgcaagaccgacaggtgggcgacgaggactacgactccgatgaggccacccaaataagacatttcaactcccaagccacctctatacgtctcgcctccttgtgtcgagaggagtacaacaaggtgcaagggttgaaaagtgccaaagaaatttgggacgtcctcaaaacgacgcatgaaggggacgag

SEQ ID NO: 182405 - DNA, 182 bp, Arabidopsis thaliana landsberg
aggcaaagcgactggcagcttacacccttcgtccaacatactgcaagacgaaggcctacaacgaagtcgtcccgtcccgcgaggtcgtcgaccacgaaggcccatgtggaactcggcccattgtaacaggccctgcgtggctgtgtgtattacgggcccgatttgtacaggcttttctgtaa

SEQ ID NO: 182406 - DNA, 429 bp, Arabidopsis thaliana landsberg
aatcaacgagattgtgaggaggacgtaaagaagaagggtgttttacgcggaactcatcaaaagcaaacctttaatcctgaatcatgttctgtgaatttcgatgggtttaacaagaacactgaagaatttgatcttgatgaaatatttgattatgtgtcaacagctgaagctctatcgatgaacttggacatggacgatgtctctgtggtgaccacgaatcaaaaccccgtctctgcttctgaaactgttgaagatagagaattggttgttcacaaaaatatggatgaggacaatatccacgtgtctgatatggacgacaaggatacgatgctaatgatttctgacaagaacaatgttttacatgaaaacttggatgaattcgatcaagagctagatcttgatcagctacggattttagacaaactatga

SEQ ID NO: 182407 - DNA, 148 bp, Arabidopsis thaliana landsberg
gatcgatgatgatgatgaagacgaacaaaaggagaagacagtgcttgagttctcggagatgttaagcaaaattcctgatgaagatgctcacatgtttgccaaattgtcgtttctggggaatttggcttattcaatccctaaaatcaag

SEQ ID NO: 182408 - DNA, 151 bp, Arabidopsis thaliana landsberg
atgacgcaccccgtaagcacctttggctgatattctggcgctgttacaacaacggcatgggcgacctctccctcaggggcttgggcgtacggccaacccctcggtctttgcctcggctctctacgagaaatcaacaggcgcgaatcaataa

SEQ ID NO: 182409 - DNA, 319 bp, Arabidopsis thaliana landsberg
atggccggccagccgaataaagtggactcgtgcgttcagttacttggcgtacaagtgacgtattggtccggctggaaaggctcccgacgacgatgacagtggcacgcgccacccccttgcgtcaggggaaaagaccgcgttggttccaagaggttccttgaaaccgacagttgcccgcattgccggggacgggaatccggcaatgcaaggcagcctgacccgacggacgcttgtggtccattggtaggcgcatgcggggcgccgcgatctgtaccgtgccccgcgacggcccgatcagtctgcctgaccgtgcaagaag

SEQ ID NO: 182410 - DNA, 289 bp, Arabidopsis thaliana landsberg
atgctagcccgacgtctcgcttcgtgccactgcgtcggtgtttgcacaggcctgcgacatcccgtcttagctgtcagtttcagcccttctctggccgtgaggccgtgctcctcgttcgaccttgccatcggccgcttactcctgtcgggtcgtctgatgctgccctagtactcaccagttgaatgctgaactgaacaaggcgacgttccaatgtgtcgcttatcaagcgttcgatcgaagacttcaatcggagattgtcgtcgttctcacaaatattgaatcgagttaa

SEQ ID NO: 182411 - DNA, 1492 bp, Arabidopsis thaliana landsberg
taaattcagtgtggaagatattctccaagttctcatagtcttcatcgtggagtctctggagttggattttgcactactttttcctgagcggtatattcttctccgggttctacctgttcttgttgtcttagcaacaccatctgagaaagataccgaggctttatacaagagggtaaaactcaacagattgataaacattttcaaggtattgagattcatgttatacctgttttcgcattcacaaccaatataccgcaaagccttgtttccaagtcgctaattgtcatatttgttgtgtgtttttcggctatcagaatgatcctgtcattcctgcgtttccagatctccatctttctcctgctgcaattttgaaagaattgtcggtatactttcaaaagttttcatcacagactcgccttctgactcttccagcacctcatgagctccctccacgtgaagcgctagaatatcctttaatattttcactgttacttgcgtattttaactattatctggattattgttaaccgtacacatgctttgaaaattgcaagccttaacatattttacatatcagaggcactatttgatagtcaatcacattggagctctccgtgctgagcatgacgatttcacaatccgatttgcttcatccatgaatcaggtgctcaagctatctctatccctggagctccaattttcttgttcttattttgagtctctaggatgttgttctcacttgctttcatgcagttattgctgttgaagtcaaacgatggagcatatactgaatggtgcagagaggtcaaaggaaacatgtacgatatggttgttgaaggtttccaactgttaagtagatggacagcacgcatttgggagcaatgtgcttggaaattctctcgcccatgtagggatgcaggagagactcctgaagcctccggatcatattctgattacgagaaggtaatacttgtgaaatattttcgaaaagttttatcttttatggtaacaagttttggattcttttaaataggtggtgaggttcaattatactgcagaagaaaggaaagccttggtagaacttgttggctatataaagagtgtaggatcgatgctgcagcgctgtgacacattagttgcagatgctttatgggagacaatacatgccgaagttcaagattttgtacagaacacgttagccacaatgttgcgtaccaccttccgaaagaagaaagatctctcaaggtgaattggttttcctttattttctttctgtttcaagtccatgttctcttaaacttaagctttgcatattgttaacttatcatatgtatggttgcatttcaggattctttctgatatgcggacactttcagctgactggatggcaaataccaggcccgaacatgagatgccatcttcacaacatggaaatgatgaaagcagagggaatttcttttatccgaggcctgttgccccaacagcagtacag

SEQ ID NO: 182412 - DNA, 514 bp, Arabidopsis thaliana landsberg
atgacttggaggctttccaatacacgtgttttttatggtcatactagatctgatgatttagaggccagcatagctaaactcattgatggttttcaatcaccaagttcaacatatgagcataaagttcttcctttttggatcctttggcggatgtggaataatctgggttttaataactatagagaatcatgttcgaaagtggtattgaaagctcaagcagaaacaaagaagtggattttcagtaatggcacaaccgactcttcccgaaagagtacaagcacgctaccaagagaaattcttcattggtcaaaaccgaaaatcccctatgtaaaatgcaattttgatgcaagttttgatgagacatcttctcaagctcgtcgtgggtggataatacgagacaaagatggaatggcaaaggcatggagatcaagtgatcctaatggcgcaacatctccgttaatagctgaaacaaaggcgctccttgtcgcaatgcaacaaacatggatacgaggat

SEQ ID NO: 182413 - DNA, 241 bp, Arabidopsis thaliana landsberg
atgacaaaagatgatgccgaagttttcgctttgaggtggaacgatcgatatcaaacgtaacgaggagataaccttggaaaattgtttaagatggacacttcgatccaaaacagatttagctgcataacaatactaaattagtcggcttaacttgcataaacaactggattcaacactttttgtttttgtcttagctcgttaatggattgttctgactttttcattgctgacagcgacacgt

SEQ ID NO: 182414 - DNA, 535 bp, Arabidopsis thaliana landsberg
accggcatgtacaacggcaagcagatcctgacgccgaaggaagactaaggtctcccatcgtctctgacggttcgaaaagcgccgctcggttcgccgagcggcgctttttcgtcgcatttacgtccgccagattggtgctagcctctccgtatagggaggtaagcccatgctcacacgccggaatcttacggcgggactggggttgtcactggccgcatcgtcggcctgggccgagactgcgcccctaatacccgccaatcaaataacaccacagccggccctggcgcccgccgccgaagatccggtcctcatcctcgacgcctcgctggacgccgacgaccgtctaactgtcgaagtgacggtcaacgggcaggggcccttcaacttcgtcgttgatacgggcgccgagcgcagcgttctgacgccctacgtcgccgagcgcctgagtctgcctcgaggccccgacattctcatccatggcgtttccgacgccatcacaagtccgaccgcgcgaattgacagcatgcaggccggc

SEQ ID NO: 182415 - DNA, 241 bp, Arabidopsis thaliana landsberg
atggtttcggggtatgccgatagtcgcgtggtagctatctatggtccgtatataggtgggtcattcctatgcccatgtacttgatgcaatgtctgatgcacaataaccatatctgtcgtcattaaaagtccgatgtgattttgccctttagtgacttggttttgcattagactcgacaggctgcacgtctggccagatagtctaggtctggggcattacttcatctctggcgaaaaaaaag

SEQ ID NO: 182416 - DNA, 370 bp, Arabidopsis thaliana landsberg
cgccgggaaacaagcgaagaagatcgtcggagcaacgatccaagggtcgttaaagatcgtgaataaggccgacgagaatgccacaagcatcgccgctatcgagacaaacaatgtcgaaagtccagcgatcatattcgctggcagcgagaacaagaaatcgtcgaaagcgtatctcgcggtgagtatcccgaggaatatgaggacggaagtgcaggcggcgaagcaggagatcagatcggagacgatgaatatgacgaatattcgttcatgtcggtgaaagggtctaccgcctgagttgtcgcccgtgccgccggggacggtgaagattgccgcgaaggtgaccgagacgattatgagctcgcatacctag

SEQ ID NO: 182417 - DNA, 457 bp, Arabidopsis thaliana landsberg
tgcgactggaaaccaagtgctatacttcgtaggacttcagaattcatctccgaccattgcttgtgccttaactaatctcttaccagcggtcactttcctcctcgccgcaatattcaggttatatgaaattaatcttaattaaagtttccttcagacaatactcgtttatgattattgcttaacacaagacttttttcttttcagacaagaaaccgtggggatcaagaaggcatcaggacaagccaaagtgatagggacgctagtatgtgtgatcggagccatggttctctccttctaccatggtcacaccatcggcattggagaatccaagatccattgggcctacgctgaaaacatcacgaaacatggttccagttctggccattctaatttcttcttgggaccttttcttattatggctgctgccgtttcttgggccgcttggttcattatccag

SEQ ID NO: 182418 - DNA, 451 bp, Arabidopsis thaliana landsberg
atctagaagaagaagatatgatgactggaggagggggacccattgatcgaggtgggggagatgattaaggagagcgatcaatccgagctttcaatttgcccctcctaggggaagagttgctgcgggctggcctctctctctttttcgcatcaagtctgcaatcggttcgctgctcaacctatcccgggaagagggtcgaggagagtcacggcgaggagaacgatctcttcgaggtgagcgactgctacgactttcacggtgaggtgtaggtttgaaagcaccggcagatctcgccccttcagcgctgtcgtcatccactagtaaagttctgctgtactctttcttgtcgacagcagacataagaaacgacttgttcgcctcacaggcttccaccatcggtttggacaatgtcttgcaccgggaagcaacagccctgactgaagttcgttga

SEQ ID NO: 182419 - DNA, 276 bp, Arabidopsis thaliana landsberg
ctcgtcgtgggcggcacgggcaagctgagctccgcgaatgccggccactacggcaccggcgcaagcggcgtcaagggcacgccgaccggcaccgcgcagatcggcgtgggcggcttgaccctgagcgcggcgcccggcaactccgccaaccccgacaactacaccctggtgggcggcaccgacacctacgacatcgccaaggccgtcatcaccctgacgggcgtgcgccagtacgacggcaccatggccgtgaacgggaatggaagcgtcgccctc

SEQ ID NO: 182420 - DNA, 780 bp, Arabidopsis thaliana landsberg
atgaaagcgagatcaagcaaaggaggtttggttgcaatattggctctagttgtttattgcttcttcgagaatatgggtgagccaaagtttcttctcatgcaggcatataaatatataattatgtggtaattacataaaatttcgtagagtatatgaatatattcaatttttatgtgtgaactattttaactgtattttgttatgctagtttttgttgtctctaatgagaatactcaatcgtcaattattttaatgtataacaatcttctatgataatttatcgtttttgttagatgggaactcgatcgatgttccatcttatgaacctgttggaagttattccactggaggtttctttgctgtcgaaaacaaagacaagatgctaaaatcattcccatcttataatgaatatctcaaaagattcaatctagcctcaggtttgtttttttaaagaattccttaacattagtttcacatttcaagtattctactttaggtaaccatatatatatatagtagataggaaaaagaagtttatgcatcatcttcttatgcttatttgatgtatatattttacgcagtggaaatttggcaaacggtgagacgcaagtgtagagatagtttcatctccttgagcataaaatcattgcattttttcgtctcaaagtttacgcagttcagatattcaatatcaaccgtagctccaaccagtcgctcgtggacttctcgaattattttctgggtaacattgactcgatcagtctcgtccatggccaatga

SEQ ID NO: 182421 - DNA, 489 bp, Arabidopsis thaliana landsberg
tcacatgaacaataattctattagcgggcagataccaccagagcttggaagcctaccatccattgttcacatgtgagttggtagcagtagcaggcttaaatgattttacttgaaaaatgctatgttttttacctaaactcagttttcatgtctagaacatgctacacacgctttacctattcaatgtttatgaacatttacttttttttttcttttttcttacagccttcttgataacaacaatttatcaggctatcttccccctgagttatcaaacatgccgcgtttacttatcctgtaagtttatgtcacagtttctgttgatttccctggtcctgtcaccataaggactggttacccatgtgtttcttcttttcttttttttgacctttttcctcatgtttattttggcagacaattagataacaatcactttgacgggactacgattccacaatcttatggaaacatgtctaaacttttgaagat

SEQ ID NO: 182422 - DNA, 1894 bp, Arabidopsis thaliana landsberg
atggtggaggtgaaatggaagggacctgtctccggttttggattgggcttcgtcccattctatcggtctaatcgaccggttaaccacacgagctctaaaccgattgctttaggctcaaaccacgtagaatgggaggaagagttcgaacgcgtttgttgcattgttggcccatggaacctctccttcaatgtcttctacgtgagttttcttaattattctctttttagataatcaatttgatgtttaaaatgcaattagctgaaatcatctagttttggtataagggtgagaatatggacgcaaaaaacaaaaagtctttgatcggaaaagcatcgttggatttatcggagttagcgtcgaaacaagaatcgacggtggagagaaagcttctgatacggtcaaaaggttccgtactttcgaaggaagcaacacttatggtaattaatctggtcaattaaaacctaaacacatttttaattaattcatgaattattcttgttctcaatggttattaaattattctcggaaacatcatggaaaggttttaaagactttccttagaaagaacaagtaaattaattatcttatcctaaatccttaattaattaagacacgcggttgtttatttaaatcaggtcaacgtgactttttctgaggtaagaaccgaaccagacgactttatgcaacttggtcagatctccgttgactcagcaattccgaagaaaaagtcaacgagtcgtcgcggcggtggtagccatttcgactctttttcctccccagccaccgcgtcgagttcaggcggacgtagccccgtagttgaaaccgtgttattttcaagcccggatgagaaccagtctgaaccgggtcaaaaagccgggtttaattggtggaagagaagacggttaagcttttctatgacatggagaagagaaccggtacgcatttgactttctgaattttcaaactcggttcgattttgtccttaaccggaccggtttattgtttgcagagagaggatgaagttacgaagacatcaacaaaaccatcggaggaactagaaaaaccggcgacggagataccaatcgaggcaaacaaatgggtaatgaaggatttagtgagccgcgatggaaaatcgaagctgaaatcggaagtttacttagcgtcgattgatcaaagaagcgaacaagccgccggagaagcagcatgcgccgcggttgcggtggtggtggctcattggttccacgcgaatcctaagctcataaatccttcaggaacggagttcgattcactaatcacgcaaggttcttctttatggcaatctctttgcgacaaagaatcgtatctaagattgtttccaaacaggcatttcgatctggaaacgatcgtttccgcaaatttacgaccggttagggtttgtaccgataaatcgtttaccgggttattcagcccggagagatttgcttcgttggatggtctgatgtcgtttgatcagatttgggacgaggtagagaaagaagtagcgttagcctcaagtaatggtgaaactagggtttatattgttagctggaacgatcatttcttcgtggtaaaggcagatttagatggtttttgcgttattgattcgttaggggagagattgtttgaaggatgcaagcaagcttacattcttaagtttgatgattcgagtttgatgtatgagaaagaggaatcgtcggagaagttggtttgtgagggtaaaaagtgttgtagagaatatataaagagctttttggcggcgattccggtggcggagttggcggcaaaggaggagaaagggaatgtagtggatgtgtctcttcttcatgagagacttcagattgatttgcatcatattatattgactagtagtgattag

SEQ ID NO: 182423 - DNA, 312 bp, Arabidopsis thaliana landsberg
atggacaacacaacaaaccgaccgccgtctgccaacacgagcttgttaacaaccggaaaaaaaccagcgcgggagccactggaaaagatactaaacggagcgaaaaagtggacagttccagcaacgctcggaacgaaaccaacatcacatgccgagggtgcaggccaggggattacgggtatcggcccagaaacaacaggtataaaaacagaaacaggatttaataaccggaaaaccaacgatgtacaaaagagaaaacaacaactcatgagctatatgacgtggagtacatatacacaaagatatctaaag

SEQ ID NO: 182424 - DNA, 375 bp, Arabidopsis thaliana landsberg
tgtaggaacagaagaagataaagcacaagcatcaaagggtgccactgaaaaacaagaacgtgtcaatgatgatatcagaaaagtgccaagtccgaaggaaactcgtactccaccggaaggtgagaatagagaaaatggcaaagctgaagtattagtggagacggtaacacatgaggagattgttacggtatggttttgtttatttctttattagtttttaatttctgtctgagttgaacatatgggcatggtaatcttaggatataattttgaaccatggtttttttatataggttgaaacagaaactgtgttcaaggttaacaacacaggaaagaacccagtcgaagatccgcagttggaagtaggaggcagtg

SEQ ID NO: 182425 - DNA, 1362 bp, Arabidopsis thaliana landsberg
atgatacaggagaacagatttgtgaaattcttaggttttatgtggaatcccttgtcatgggttatggaagctgctgcattgatggccattgccctcgctaatagtcaagtaagacaaccacagttttgctaccattttccatccatgagtgtttatgaaaatgcaccttgaaactcatggtgaaaatggtattacagagtctaggtcctgactgggaagactttactggaatcgtttgccttttgctgatcaacgcaacaatcagcttctttgaagaaaacaatgctgggaatgctgctgcagctcttatggctcgcttggctttaaaaacaagagtatggctcttaaccttcctatgagccgaaacggcaaagttagctgcactttaatttccatattaccttaaatttgatttagatccactcttataggttcttagagatggacagtggcaagaacaagatgcttctatcttggtacctggtgatataattagcattaagcttggggatatcattcctgcagatgctcgccttcttgaaggagaccccttgaagattgatcaggtacgtccagaatatctagtctctattcttttagtgtgtactatgtaaagactttctctgacagaatagttaaaacatttattcctgcagtcagtgctgaccggagaatcactacctgtgaccaagaagaagggtgaacaggtcttttctggctctacttgtaaacaaggtgaaatagaagctgttgtgatagcaactggatcgaccaccttctttggaaaaacagcacgcttggtggacagtacagatgtaactggacattttcagcaggttttccttctttctttcccttttggttggatagaacctgattagtgaacttggaatctggaaaaaccgaatgtagtctttgacatgttttcttctaggttcttacatcgattggaaacttctgcatttgctccattgctgttggaatggttcttgaaatcattatcatgttccctgtacaacatcgctcttacagaattgggatcaataatcttcttgtactactgattggagggatacccattgccatgcccactgtactatctgtaacgcttgccattggatctcatcgactttcacaacaggtacatcccactttaagctgctgaatgcaaaaggaagtcctttgtttgttattctttaaaacagtttgttagcaataatctgtttcttcatgttctctaagggtgccattacgaaaagaatgaccgcaatagaggaaatggctgggatggatgtactctgctgtgataaaactggaacccttactttgaacagtcttaccgttgataaaaatcttattgag

SEQ ID NO: 182426 - DNA, 289 bp, Arabidopsis thaliana landsberg
  unsure (1)..(289): unsure at all n locations
atgatgctcgcgtacgttcagctatccgnnnnnnnnnnnnnnnnnnnnnnnnnnnnnnnnnnnnnnnnnnnnnnnnnnnnatacctcgtcgatgacagtctctacccagccctgcagctgtccaccgacgatttcgctggtaatctgcctaatcaaaccaatctcgcactaaaaggcatcatcggactccaagctatgtcgcaactatcgcgcatcgtcggcgaaaccgatgacgcaaaaaattataccgccgtagcccacgattacatcaccaaatgggtagacctgg

SEQ ID NO: 182427 - DNA, 124 bp, Arabidopsis thaliana landsberg
ggcatacaatttgttatgtttgaaatccacagcaaatgggtgggaacagtcttggcaggacgggttaaacttccttcacaagataacatgatagaagatatcactgagtgccactcactgagtg

SEQ ID NO: 182428 - DNA, 325 bp, Arabidopsis thaliana landsberg
atgggatgttctggcgagaatcaggactcagtacgaaagtttccccagtatccctctcaccaggactgccagctcgtcccaggacaggtcgtcgcccgggcctcgctggatcctgccgatgtcgttcgggccgtgaaccagcagcacaggcgtggtctcatctgcaacggcgcaatccagcgcttcaggaggtcgccgaccatgtgcatcgacgtcatgccgatcgtagccaagcccttgatcctgtccaatacagacaggaactctggcgccaaggacggcttggtcctccagagcttgcgatcgagcaccggcccatcgctcg

SEQ ID NO: 182429 - DNA, 81 bp, Arabidopsis thaliana landsberg
gtgcgattaaacactcgtcttctgtaccagcagacaaagttgaacttacttcgtgaagaaagcgagggatatgccaaattg

SEQ ID NO: 182430 - DNA, 121 bp, Arabidopsis thaliana landsberg
agagcaagcttttctaagcaaccatttgtcccgaattctctgcatatctccattttctgatagctgcaaaattgcagcggagacgtccacagccaatggcgagttacgcggaaatgcctga

SEQ ID NO: 182431 - DNA, 343 bp, Arabidopsis thaliana landsberg
gttcagacgcgaagagatgaagattcaagcatgggagaatcatcagaaggcgaaatctgaagccgagatgaagaaaaccgaggtaaactacactaacatagctacgtaagttcaagtcatgattgtgaacaaacttggaaaaacatgaatgatgatggtggagttcttgatattgtaggttgaagttgagaggattaagggacgagcacaagaccggttgatgaagaaactcgctacaatcgagcgcaaagcagaggaaaagcgagcagcggctgaagcaaagaaggatcatcaggcagctaaaacagagaaacaagctgaacaaatccgaagaacaggcaaa

SEQ ID NO: 182432 - DNA, 1175 bp, Arabidopsis thaliana landsberg
atggagaaatataaggcaacccaacaaagagggtgtgatatggccaaggagaagagaaggatgcgaagaggattagttgcaaagaagaagaagaaaccggagacaaaggcgagacgtgacggagagatgggatcatcatcaccggaaaggaaaaacattgagaggggaagatatgattcacaacagtaaaggcaattgacaaagaagaagatcaaagcatcctaggttagggcaaagcaaaacagaatcaaagaaggaagaagataacgggaaaagtgtagtttcaagttgtggtttacgagggagaatcccgtcatgacaaggagtatcagataatgagtaagatgtcgttgaaaagattaatttgtcaataatccatagcaactgacgaagtttaaatcgggtttatgactgagaagttatgagtgtttcttttgggccaagcaactacaaaaatattgcaaaactaagccctaaggagctgctccgagatgggttcttcacagcaacgtttggaggtcggaaactaatccgatcgggacgaaatttggatggttcactgaagagttattacggtgtcttaagggcagctgaaacaagtgttctacatcatcatgtggccaaggtgagggtgtgatctgcgggttcgattacaagtttctatttttatatttcaagattcattgcataggaatagatatgtttgcttagtaataatgaattgataattaggattgatgatatgatgattgttctagtattataggatgattgaattattgtacttgtgataacaagtaattatatgtgttatataagaaagtggaattaccatcttttgagatgatgaaaagtggaacagtggaaaatggtctacattaaattgatgggttctttgtagctcaataaaagactgacgagtccagtggaactagataggttcaaaggtcaggggagatgatcgaacctggtattgatgtagagagctttcttaagcaagaatgagatgtgtgttatagtcttgcatagtgatgcatactatatgagtgttgtgtctttttctatgtgattgctgattgtgttttaaaggtagaatcgcgtatcgtacttccactgggcggaaaagatcctctcactgagtaattctttactcaccccttttcctccaggtcacg

SEQ ID NO: 182433 - DNA, 512 bp, Arabidopsis thaliana landsberg
  unsure (1)..(512): unsure at all n locations
atgaatctctctgactctggtggtggacaggcaattttgtaagctagggttcttaatgcaatctctntgcaagactctaaattctccagttattgaaaacttttggcatgaattaaagttagaaatcgatcgtagactgaagactgaaattagaatgtttaggtctgatttcttttggttgagtagaactcaaacagaataaattttagagaatgctatacatttacgtctataatgattccatctctttagtcttgagcatagctaaaagtctatcaaacttcatctctcatcaacaagacaaaaacattcatcgctatcttcagaacaactttgagtggtgcgaattttggtggcaatttcttgaccactttcttctctttgtatttcttaccaagcactgaagcttcattagcgatagaattatgcttagatattgagggccataagcataaacttgacctgtttcctttctagaaccgagtctaacaccactaaagctaagaagcttc

SEQ ID NO: 182434 - DNA, 176 bp, Arabidopsis thaliana landsberg
tgggcaaaataatcgaaccaaaagtaccaaattggaaccaaaaagtaaattataaacttcataaccgaaagaacccactagaaccaatcctaactattttggatactcaaaaatacccgaaatacaattatatataccggaaatacctgaaaaatatccaaatggatcataaactc

SEQ ID NO: 182435 - DNA, 72 bp, Arabidopsis thaliana landsberg
catcggtgctatcaaagttgttaaggaacttaagaaggcaaacacatttctcaaagctggcaacatagaagg

SEQ ID NO: 182436 - DNA, 125 bp, Arabidopsis thaliana landsberg
cttacagccacaatctcaatgccttctaccgcgactttgcaagggcaatgattaagatgggagacatcagccccctcaccggatccaatggtcagatccgccaaaactgtcggaggcccaactga

SEQ ID NO: 182437 - DNA, 479 bp, Arabidopsis thaliana landsberg
atcaacaaaagcagcggacaccatgcacaaaagttaatgatggcaaacacaccccatgcaacgtcgaaaccagcgctctggccaaacggcagcgcatagaatccaatagtaaaagcaaacgtttggcgaaacaaattgatgatggttgagacctctgcggcttgcggcttatagcaatcggcaatgtacgaataggtaagagttgtgccagcctgaacgccgatggacgccacagtcatgccgacggccagggcaatccagggggcatgattcgagaccgacacgccgtggataatgagaccggcaggcaagaacaggcagagaggggccaagtgcagacgcgcctcgggcttgcggtaaccatcatgacgacgagcatatcggttaatcagccagtcggagatccagcccgtgcaagactcgccaatcaagcaggcaagagtcaagggaataccaagccagcaggccgttctgcttaa

SEQ ID NO: 182438 - DNA, 150 bp, Arabidopsis thaliana landsberg
gaggattgatacgagaatgtgactatactatggagggttatggaccatgtgggcctaacggacgtaacttatgtttagacacattttggaaaaatcctccttctcccggattagcaattagtttagaaggttgcacatgtgaacccagag

SEQ ID NO: 182439 - DNA, 276 bp, Arabidopsis thaliana landsberg
gttgaccttgaatcactgccagatacggctcctacagacagatttgttagtttacgaggcggttggagtttgttcggaaagggatctactggagaaatactactccggcttacatacaaagcatacgtggaggatgaagaagatgataaacgcatcgcacaagccatatatgcagatgcttccgatgatgaaatgtctgattcggaagaacctagctcatttgtgcagattgacaagattccttcagatgatattggtcaagagtcatttatgaac

SEQ ID NO: 182440 - DNA, 6563 bp, Arabidopsis thaliana landsberg
  unsure (1)..(6563): unsure at all n locations
aagctgttgatgaagagggttgaggataatttgggttcgattggaaatgcgaaggtgtggttttatgctctaggtgtgggtagttttgcgataatgttgagttatttttttagttattctcttttgtttacagtctcgtgcagtgcacaactcagtaatggagcttcggaatatttgcaatcatccatatcttagccaactgcattcagaggaggtaatggttttcatttatctggaagtgttattgtaaatgcaatgaagcactggttagcgcactatggacaaccctaatgaagggcatttcacttttattaggtcaataacataattcctaagcatttcctgcctccaattgtaagactgtgtggaaagcttgagatgttggatcggatgttgcctaaactcaaagcaacagaccatcgggtaatgatttctctcttttccctcatggtaataggatagttgtgatgattcaatgctcttaaagacgaaagcttattattgaagttgggctaagtgttttcaagtagtgtgctagagtaccttgcattgcgttcgcctctggaggattaaagtgtctattacgaaaagtttttgaaattatgttttgattggatgaagcattactgttttttttccctttatttggttgcttacttgcttctatatcacttcacgcaaaacatcaagtcctcaactataagattttctgttatttgtgaaacgcacatatatattagaatttgtaacttttttgcatttttaccttaaatttaatactgaagcttataaatggttgttacttttatttatggtatgcatgaattcccacaggttcttttcttttccacaatgacaaggcttcttgatgtaatggaggattacctcaccttaaaggggtacaaataccttaggctggacgggcagacatctgggggtgatcgtggtgctcttatagatggcctcnccccgtcgggttccccgtttttcatatttctgttgaggtgatgtatcatatatcatggctggctttctgtagttctaatctctatcgggatgattcatgttcatttttaatagatttagttatgttcctaaatactacaagttgtaaactcttttgggcgttcagtacgactgatatgtatttgtatgtgattgctgaatcattcatggaatttcagcattcgggctggtggagtaggagttaatcttcaagctgctgatactgtgatactattcgacactgactggaatcctcaggttagacctagcatttccatatgttaagttatagttgaatactgtggacatcaggccggacttgaagcagcatttattatacatttcaggttgatctgcaagctcaagctagggctcacaggattggccagaaaaaagatgtgcttgttcttcgttttgaaacggttagttttttatttattgtgctcaaggaaattaaacatctgaataaatgggttgatttgtgattggttgtaacttttaccctggtgtttttagtttatgttgtttcatcattgggctacataatgtagtgttgctgtcctaaatctatggctgttcaacatgacttatgaggcaaatagaacagtgcagtactcttgggagatactaattgtttcttggctttttccctttcaattgacgcgttattatataattaagctgtctgaactgtttgtttgtctttcgtccttaattatatcctaaggtgaattctgttgaggagcaagtcagagcttcagctgagcacaaacttggagttgctaaccagagtataaccgctggcttttttgacaataacacgaggtgaatcgagagacatcccttttatgcttcaagaagtttcaactaccaattctctaaaaaaattcttactttgtaacagtgctgaagatcgtaaggaatatttggaatcccttttgcgtgaatcaaagaaagaggaggatgctccagtattggacgatgatgccttaaatgatcttatagctcgaaggttaatactcttttgcatcgttttttatacagaataatttacttgcacaaattttaattttacaacagcctatgcatacgtggttttaaaataatcctgatagtttggttcctttgcactatgataaatctagaaattctaccaagattactgccaacaatttgtacaaagtattttactttctaactgtaaatatttgtcttctatattattttctattttcatagcatctactgttttttcatgtgttctgtgttaattgatagcttggcttcctttttaattcttagatgacaatctttttacatttccatgcatctcgattttcttttaactttcttgcagatctgacatttttgttatctttctagggagtcagagattgatatctttgagtccatcgacaaacaaaggaaagaaaatgagatggtatgcttgttcttattaactttattttcgggttatatcgttttatgatgtttatttgaaaaagatatggccgtgcaggaaacatggaataccttggtacatgggccagggtcagatagttttgcccacataccatctataccctctcggcttgttactgaagatgatttaaaactactatatgaaacaatgaaactaaatgatgtccccatggttgcaaaagaatcaactgttggcatgaagcggaaggatggttcgatgggaggcctagatactcaccaatatggaagagggaaacgagcaagagaggtttgttgacttttctctttgtaatatgatactgcatacagtattttcacttattactatagaatgacaaatattgcaacttcattaggttcgatcttatgaagagaaattaactgaggaggagtttgagaagctgtgtcagactgagtcacctgattcaccccaaggcaagggcgaaggaagtgaaaggagcttggcgaatgatacatcaaatattccggttgaaaattctagtgacacactactccctacatctccgacacaggcaattactgtacaaccaatggaacctgtaaggccacagtcacatacactgaaagaagaaacacaacctataaaacgtggtcgtggtaggccaaagagaactgataaagccttgactccggtatcattatcagctgtaagcaggacacaggcgacagggaatgctatatcatcggcagcaactggtcttgattttgttagttcagataaaaggctagaagccgcttctcatcctacttcgtctcttgccctgacttcgcctgatttatctggtcctcctggttttcaatcattgccagcatctcctgctcctacgccaataagaggccgaggtaggggaagaagcagggggcgtggagcaggaaggggaagaagagttgaaggtgtattgcatggttccaacagttctattactcagagaactgaaaccgctacatctcttgcaagtgatgcagaagccacaaaatttgctcttcctcgttctgcatctgagattgtttcaagagtccctaaagctaatgaaggaagtacttcgaatcctgaccaagtatctcccgtgcattctgccactactgcactccgatcagacaaagcagcagataaggacctagatgcaccacctggttttgattcgggatcccatgttcagacgctaaatgtacttgaaaattcatcggaaagaaaagcatttgctgtaaagaagaggcctttgatccaaggtgtgagctcccagcatccagggcctaataaacagccacttgacttgccagtctccactagctccactttgttgggtaaataaatcaaacatcactatgtagttttcatattcatctaggatgtgtagttatgacttgcatgaggatgatggagaacataatgctgatgggaatcttaatgccatgttattttggtaggtggtggcccagtgcaaaatcagaatgccgtgtcttctgtttgtcatggatccgaaagtccttaacaaggtcgaacatatacagctttgcaaggnnnnnnnnnnnnnnnnnnnnnnnnnnntctgccaatgagttctcaaccttctgatgctactctgccaatgagttctcaacctgtcggttctacggttgaaggtataaatctatgaagcatcgtaacttgcttaaaactgctctgatttctaaatcttttccgtattgtacatgtcatctttgcagctcaagaagccaatgttccttctcttccagcagccttgcctgctaagaggcgagtccgcaatttgccaagcagaggagaaactcctaaacgccaaggaaagaggcgtggccaacctttacctgcaaccgatgcctcttctgcaaggagtacaggattaacaccacaaatagaggtcaaggttggtaatttatcaggcaccaaagctaagtttgatgctgttgccaaagaacaaccccacttcagccagtcagttgcacccgatattcactcttctggtagtttgagtcaggaaattagaagagacacctctggtactggtggttctgctaggaaacaaactgctgatgtaactgatgttgctcgagtcatgaaagagatcttttcagagacttccctattaaaacataaagttggagagccttctgcaacaacgagaacaaatgtgcctgacgcacaatcccctggtgagatgaatttgcacacagttgagacccacaaggcagaggattcttctggtcttaagaatcaagaagctttatataacctgagcaaggcagataaactggtatcagatattcctcatcctgttcctggtgatctgacaacttcaggatcagttgcaaacaaagatgttgacattgggtcgtctaaggttgctgctgaaaatgagcttgtcaaaattccgggtggtgacgtagattcttctgtaatacaactctctttgggaaatactttgactgctaaatcgtctttggaaaagtgcactgcagatcagcttctgggagaaaaactgtctcaagaaggtgaaaccacacctgctagtgatggtgaaacatgtcacctggcagaagaaacggcatcttcattgagttatgttcgatctgagcctactgcatctgcgtcgacaactgcggaacctctacctactgacaagttggaaaaaaatatttcttttcaagatgaagttaaaactctcaatggtgataaaagagaagctatcctcctaagttcggaagagcaaacgaatgttaactccaagattgagacaaattctgaggaacttcaagccagtagaacagatgaagttccacatgtggatggaaaatctgttgatgttgcaaatcagacggtgaaagaagatgaggcaaaacattctgttgaaattcaatcgtctatgctggagcctgatgaactgccaaatgctggacaaaagggtcacagtagcattgacttgcagccattggttttagttacaagcaatgagaatgctatgtcccttgacgataaagattatgatcctatctctaaatctgctgatatagaacaagatcctgaagaatctgtttttgttcaaggtgttggtaggcctaaagttggtactgctgatacacagatggaggataccaatgatgccaaacttctagtgggttgttcagttgagagtgaggaaaaagagaaaactcttcaatccctcatacccggtgatgatgctgatacagaacaagatcctgaagaatctgtttcggatcaaaggcctaaagttggttctgcttacacacagatggaggatacggatgaggcgaaacttctaatgggttgttcagttgagagtgaggaaaaagagaaagctcttcaatcccatatacccggtgatgatgctgatacagaaaaaaatcctgaagaatctgtttccgttcaaggtgttgataggccgaaagttggtactactgacacacagatggaggataccaatgatgccaaacttctagtgggttgttcagttgcgagtgaggagaaagagaaaactcttcaatcccatatacccggtgatgatgctgatacagaacaaaatcctgaagaatctgtttcagttcaaggtgttaataggcctaaagttggtaatgctaacacacagatggaggatacggatgaggccaaagttctagtgggttgttcagttgagagtgaggagaaagagaaaactcttcaatcccacatacctggtgatgatgctgatacagaacaaaatcctgaagaatctgtttcgaattttgataggcctaaagatgggactgctgacacacatatggaggatatcgatgatgccaaacttctagtgggttgttcagttgagagtgaggagaaagagaaaagtcttcaatcccatatgcccagtgatgatgctgttctccatgcgccttttgagaacacaaaagacagtaaaggagatgatttacatggagagtctcttgtttcctgtccaacaatggaagtgatggaacagaaggggtttgaatcagagacacatgctcgtacagattcaggtggtattgataggggaaatgag

SEQ ID NO: 182441 - DNA, 2668 bp, Arabidopsis thaliana landsberg
atggccggaggcagcaccaactggtagggggcgcgacgttggagatgcgtcgtgggaggaagactgactaccttgacatccccctcaaggatagtatcaagggatggcgtttggagtggtttatcatggagaatcacgagaattccctccccccacggtcaggaagacagccggatgttcgtactccgagttggaccgagtccctacagactaggaggtggctgaggcaggggctctgctagctgaagttggattgttgaaggagaggggtctgactgcagaagctgtggttgctgactttgtcttcaagaatattcagccgttgaaagacagggcgcacccggcttatctgtatcgaggcctagccgactcaactcgggttaccaacagaagaattccctctgcagacttagtgaaccgacttgagatgatccttagaggcaaggtgtcaaatgttggtgccccagtggcatactcggcctggaacctgcctcctcccaaagccttcaccctttttgtgtcgaatcctcctgtcactgatggcagtttgggccttagagtgtggccctctgctgaagaagttagtgccttggttgcctcgctcggggagattcctgatgatgaacgataggtccattttgaggtgcccctgaaccctagtgatgtagagataagcgctatgcttgatttgctggctgaggactcttctgacgctgctcctgttggggcgttggcagtagcgccctcccagaggctgatactactttggatgcacagaaacctgtcagtactcgcccgaggcgcccttgccgagccaatcagcctgatccttctgctgatgagcagaagaagacaagaagacgcctccggcgagtatccagctttgatcaggacgttggtacctcggttcctgctactgaagaaatgccagcgactggacttattgatgctgaccccaatgggtgtacccaatcggctgctgatccaatgtgggtgctccacctgttgctgatcccaatgggggtgctgcttgtgttgccaatgtggatgatgaggaggaagaaaatgaagctcctttgactcggaaaaaacagtcgacagctcatcgcgagcggtggaagtagtggagttccctctcctgctttgtctgccctcattggtttgcaggaactgtccctggccaactttgatcagactcttgaggatatggtcccagaggatttgttatcggaaccggtggatgatggtgcaatggaggtttgcgttgacgtgcctgatgctggattgaggtcatcccgtgcctcgtcgaccttagagcgtgatctcgagggtcgggagactgacttggatcgtcctgatcctatggaagtagctgagggcccgtcaaccttagaggtggctactgcagagagcttggatcccttgaatagtgctgacacgtgcccagcccccgagggtgtcgccggggaggactcagctcgggtgaggagtgtaggccactacccagcccccgagggtgttgccagggatgacccggctcgagtgggcagtgcaaccttgacccagcccccgagggtgtccgagcgaggtctccttcctgcacttccatggatgttcatgtgggttcacctccacactctggcggcatggtggtggctcaaactccggatcagggggtcgctttagagggcagcatccccactggtctggcgttaggctctgctgaatgtactgagctcgttcctgctggtctgctgcaagctgcttcgggtggtggtctggcacctggtcatcagctgatttctcctgacttggggatccttcgcttttttccaactccaggtgctgtgctgtgctttagtttgatttttatgttgcatgaattgttgccattatgttcatcactcttcttatcaggctttggtggatggaatggccagccagctgaggtcgcagggtgcttccatcctagaagtggcttcatctcttgagcgttggaatccggtgttgcttcatcgtcgtgtatccgagttggaggcaactaatgctggttagtgccctttcttcttcttccttgcctttgttcgtggattgttttaccttctgacctcatttcgtttgattacctcttgataggaatgactcggcagatcgcagttcttgaggaaaaacattcccaagatcaagctgaaatggctcgacggtgcgctgacttcgaggaaaagtactctcaaagtcagaccaaactaactcaggtctctgctgccttagatgatgccaatgcactgagttcttctcttcacgctcagctcaattctgaaaaggtgatttatgagactgtgcttttccttgttgtgctcctattacttgcttggtttttgaggtagctgtcttttgtttgcaggaagaaaaacgtatccttgctgcttctcgtgacagcctcgacagattgtatcgcgactctagcaactcgttgaccatcctggagaggagtcatcgcttcaccatggaggagttagacaaccatcgctgtaagctgcaggaatccacggatgaggtgatccggctcaagcaattgatatcgtcgaaggatgctactatcaaagaactccgtgcttccaagaaatccatctcccaggagctagaaaccgctcagttggctgccaag

SEQ ID NO: 182442 - DNA, 663 bp, Arabidopsis thaliana landsberg
ctagagagagaagtttcgcacgctcaagacaatgccaaaagactgagtagtgaagttctggctggagctgcaaaattgaagactgtagaggaccagtgtactcttttggagagctcgaatgaaactttgaagctagaagcagatggtctaacgcataaattagcagctaaggatcaagaaatttttcagaagcaaaacgagcttgaaaagtttcaatctttaatcgaagatgagcactctcgatttttagaaatcgaagtcagccttaagactttgcaaagtttgtattctcagtcccaagaggaacaaaaggttatcacttcagaacttcaaagcaggattggcatgttgcgggacttagagactcgtaatcttaagttggaaggtgacatcagctcagttaaagaagaaaaccaaaacttaagtgaactaaatgattcttctatgatcttcctggagactcagaaatgtgagatttctagcttgaaggagataaaagaaaaacttgaggaagaagttgcaagacatattaaccaaagcagtgcctttcaagaagagatccgtcgtctgaaggatgaaattgacagcttgaataagaggtatcaagcaataatggagcaagtgaatcttgcaggtttggatcccaaatcccttgcctgctct

SEQ ID NO: 182443 - DNA, 441 bp, Arabidopsis thaliana landsberg
atgagtgtcacacctggtgggccaatcatgatcgacgacaaggcggtgacgggaaagccagtttcgcaggatccaatagtgaagaagaaggatccagtaaagacgggaaagccagtttcgcagatttatgtagatatgatggacttagttgattatgatcaaatactttattacttatttgtgacaccactgatgctattaataaacccctcgatctatgtattacttattagtaaagataccacctacatttcttcctccattgaagcctgatccatgggcgagtacaaactcggtgtatctgtatccatgcagacgaaacctcggccgataccaaatatgagcaccgacaatggtggacccataatgatcgacggaaagccggtgacggggccgttagatccaccggcaccggtggtgaaagatgcggagaataagtag

SEQ ID NO: 182444 - DNA, 46 bp, Arabidopsis thaliana landsberg
atgatccatcaagctttagctctccctcgttctactctcaccagag

SEQ ID NO: 182445 - DNA, 597 bp, Arabidopsis thaliana landsberg
gatacggatacctcactcgtcaccttccgtgaaaagtaactctcgctcggacaagcaattctgttaccgacaaataagtccagatactcgaaacaacaggaaaaggaacgcaaccttacaacacgactacagtatgtttgggcctcggcggtcgcagaaaacatacgcacactacaagataacccgatcctgcaggctcacatcttgacagttgaagggagcagtagcaccctcggcgtcaactacaccttcggcgaggttcggcctagcctcggacggcgacgcggtcggaggatctccactccgaaggacgacatcagcaccacgcccgggccatcgccgccagggtcttctctaggaatccggctcgagcaaacggctcgaccggccaccccgaagcctcattcagctgtcccccgaggacatcagcccggctcatggcctcggcaacccgactccggcatcggtcccaccagtggacggcccggccaggctccggccgacgaagcttcttttcgagccaactctgcctctgttcatgctgacaccgctgcctccggctccggctcatcgcagagtggccgagggttcctttaa

SEQ ID NO: 182446 - DNA, 1106 bp, Arabidopsis thaliana landsberg
atggctctgatgcgaaccaggagccagttgaacgtatcttcattgactccaccacctcctcctccgtctccgatccctagagccagaggctctcgttgcgctgccagcgagattctcaccgagatcattgagcgatcgattcaggttcctgagctcacgcttccggaatctcattctggaggtgaatcttgcggctcacgtcatctgatcccggcggagattgattttaggttattggcgtcgaggagagaaggttcggtggatcggttggtgcgatcggcgagagagtttggggcgtttcgtgtgagttatcatgggatatctggggaggagctgaggtctcttgtgagggaatcgggtcgggttttcggagttttggagggaagagacaccgggtttcaccggagtgttgtcggaaacagagacgagatcgtgtgggtacggtcgtggaaggagaggatggaatgggcgcgcgagtatatcggaccggaaagataccgctgcttcaggtattgggcccttaatgggcctttctgtcactctctgtttgattgtgttatggagagatctttggtagatgaagtactaattagagctaaataacaatttgtgaagaatcaatacaaaaaggctataacattcgttttggttatacaagtttcgtttgaactagtgattacattttaaaaatatttgatgaacattgcatttccaaaaaaataattagtgattgagaatttggttccaatttcttgaatctttaatttggttgcagccaagaaatggagaatgtagctgataaacttgaagatatagcgaggaaactagggcaaataatggtagagaactcaagaagaccaaatgataagaagatacaaagaggagaatctgtgcttagcgtttacaggtacaatcatgaaaatgtaactgagcaaagccctcctttgcccaaagagaggaccgaagaaatgcttcattatacactcagccttcaccttccggctaagaactgcgagttccgcgtcaactcagggaaaggtccactttctttccatgctgatcccgacactatccttgtcacttttggtcgtcagcttgaggtatga

SEQ ID NO: 182447 - DNA, 2889 bp, Arabidopsis thaliana landsberg
atgatcctgagtcggtcactgaatctcaccatcagatattgtggtcacttcttggaaggtatgatttagtacttctacataggaacttttggaagatatacatacatatctcgaaatatctcagattactttgttgattttcaatgattcagcaaagaggctgttcttgattcaatagtgtatagttatcgacacggcttttcaggctttgcagcgaagctcactgagtcccaagcccagcaaatttctggtactttagagttgaactcttttctgtttcttgatttgacttaaaccaagaagttgtttttttttaaaacaaatcaatgccctttcttgaaacagaactgcctgaagtagtacaagtcataccaaatacattatacgaaatgacaacaacaagaacttgggattacttaggtgtatctccgggaaattcagatagtctcctacaaaaggccaatatggggtacaatgtaatcgttggagtcatcgacacaggtatgtgcatatcgaaaatatgtttgattctctcttaaagacatgattactaatagaaaacattaaatgtggtgacaggagtgtggccagaatctgaaatgtttaatgacaaaggttatggaccaataccaagccgttggaaaggcggctgcgaatctggcgaacttttcaatggctccattcattgcaacagaaagctgataggagcaaaatactttattgatgccaacaatgcccaatttggagtcttgaacaaaacagagaacccggactacctttccccaagagactttaacggtcatggcacgcatgttgcctcgactattggtggttcttttctgcctaatgtaagctacttaggcctcggacgaggaaccgcaagaggcggtgcgcccggtgttcatatagctgtttataaggcatgctgggttcaaagagggtgttcgggagctgatgtcttaaaagcaatggatgaagctatccatgatggtgttgatattttgtcactctctttgcagactagtgttcctttatttcctgaaaccgatgcgagggagcttacctccgtgggagcattccatgcggtcgcaaaggggattcctgttgtagctgcagctggtaatgctggccccacggctcagaccctttcgaatgtagctccttggatcttgacagtggctgcaaccactcaagaccgttcttttcctacagccataacactagggaacaatataacaatactggtatacttatgttctgttttactatatataaactataaaatttactgtttttatgtagtttaaaatcattatactaaaatttcctctttgtttaatgtagggtcaagcaatatttggcggttcagaactcggttttgttggtcttacttatccagagagtccactttcagggtaacacagaattacatatttcatgttttaatcatttgcttgttcagtacgttaaaaacccgcgagattgcgtctttggacatgacatagcttttaacttgcagtgactgcgagaacctctctgccaatcccaagagtgcaatggaaggaaaagttgtgttgtgtttcgcagcatctacaccgtcaaatgctgctataaccgcagtaataaatgctggtggtcttgggttaatcatggcaagaaatccgacccacttgcttcgtccacttcgtaactttccatatgtttccgtagatttcgagctcgggaccgacattttgttttacatacgctccacaaggtatattttccaaacactcacaatatcttttacaaacacattgactaaacatattgtgttttgtttttttagatcacccattgtaaacatacaagcttcaagaacactttttggacaatccgtgtcgaccaaggtagcaactttctcatcaagaggacctaattcagtctctccagcgattcttaaggtagataataccatttcatacatttctaacatcttaagattctctgttttgtaaccgcttctttgttttgtaaccgtttttttctgttattgcagccggatatagcagcacctggtgtgaacatactagcagctatttctccaaatagctctataaatgatggaggttttgctatgatgtcagggacatcaatggctactcctgttgtttcaggagttgtagtgctcctcaaatcattacatcctgattggtctccttctgctatcaaatcagctattgttaccacaggttcttatcatcatcaaaaatgttgttataacagttttcttatcaaaaaacttattcatccgaaggaacacattttaacattgcagcttggagaactgatccatctggagagccaatattcgcagacgggtcaagccgcaagctagctgatccgtttgattacggaggaggactcataaatccagagaaagctgtaaaaccaggtctcgtatacgacatgacaacagatgactacgttatgtacatgtgctctgttgattacagtgacatttccatttctcgagtcctcggaaaaaaaactgtctgtcctaatcccaaaccttctgttcttgatctaaatttgccttccatcacaattccaaaccttagaggcgaagtcactctcacaagaaccgtcactaacgttggacccgttaactcagtatacaaggttgtaatcgatcctccaacaggcgttaacgtggctgttacgccaacggaactagtgttcgactctactactacaaagcgatctttcactgttcggttctcgactacacacaaagtaaacactggttactattttggaagcttgacttggactgatactctgcacaatgtagccatcccagtttctgtaagaacacaaatcttgcaacgatactacgacgaaaactga

SEQ ID NO: 182448 - DNA, 373 bp, Arabidopsis thaliana landsberg
atggaagatcgcttgtcgaaattaatccgatgtttaaacgaagagaatgttccagaagaggaaagagggagaaaactggaaacaaaggaatataattccaaatctattttggagttagtcaaggaggttgtaacgaagttagagacgttccaggaatctacgaagaagaagaagatggagctaagtagaagtgtggagttcttggaagaggagaatagagatatcaatgtcttgttaagagctgctttgtttgagaaacaaactgcagagaagcaattgaaagagatgaatgatcagaagggattggctttgctggaaaatgcaagaagagggttgcaaagaataggttttggttttgggttaggagaattca

SEQ ID NO: 182449 - DNA, 61 bp, Arabidopsis thaliana landsberg
atgccggaaaatcctgatgattttcgcagatcaatagcgtttgtcaaccggtatcaaaaag

SEQ ID NO: 182450 - DNA, 320 bp, Arabidopsis thaliana landsberg
atggagattttcaaaaaggctgaaaccgtgcgtttacgtagctaccacgacaagtaccttctagcagaggaggatgaagaatccgtgagccaggacagagacgggcggtctatgaacgcaagatggacggtggaggttgtagaaaaggcggatgtgattcgtctcaagagctgctttggcaagtacctaaccgcttcaaacatcccaatgttccttgggatgactggcaagagggtgacacaaacgctgccacggaggctagactcatcaactgaatgggaacccgttagagaaggtgttcaggttaggctcaagacaag

SEQ ID NO: 182451 - DNA, 1074 bp, Arabidopsis thaliana landsberg
atgaaggttgggcctaaaggaggattggctgagaaagtcgtggacgaggtcgaaggtcagaaagttatgtttgcaaaccaaatggatatagatgaagaagaggatgctatctacttcaacgatagcagcgatacgtaccacttcgggtattataacatcacttctctaataatttttttaattaaaaaaaaaaaaactgaaaccaaaaaaattggataattttagtgttctatgttgagaattgagatggttagaaatgataatttgcatgtttgtattttataattttacaaattgcaaaccacaaatgaaaataaaatttctccttctaacgtttgaggtttacaattattagataaaatctttgttttaaattatacttaagattgtagcttcatcatctgagaagaaagatagtaattaaccttcaggtttttaatgttcgctcgtgtttacaacttttttttttttttttaaacgtataaagtaaaagaaaaatgttcttaagacaacaaaatcttaatgtggggatattttgaaaatgattttttttttataaacgttacattattatttggagcagggacgtattctacgcttttctgtgcggtgaaaagacaggaagagcaattcgatacgacaagaagacaaaagaggccaaagttataatggaccgtcttcatttccctaatggtcttgccttaagcaaagatggttcgttcgtgctttcttgtgaggtcccaacgcaacttgtgcatcgatattgggccaagggacccaacgccgggacccgtgacatatttgcaaagctccctggctacgcagataacatcagaaggaccgagacaggggatttctgggttgccttgcattccaagaaaactccattttcgaggttatctatgatccacccgtgggttgggaaattcttcataaagacgttgaagatggagctcttggtttttctttttgaaggagggaagcctcacgccgtggctgtgaaactttctggcaagactggagagattatggagattcttgaggatagtgaagggaagaatatgaagttaataa

SEQ ID NO: 182452 - DNA, 1071 bp, Arabidopsis thaliana landsberg
cttaagaactttgaagaaacaagacgatcgttaaaagaggcgcctctagaagaaaaccggaaacgagagctatcaagtgcactccatgtttatttcaaagactggctttacggtaagaaaactttctctgaatcgatccctactttactttattgatatgcatcattcattaggttttgacttagtctatgtttttgttgcgacagcatctggaaatataaggcaactctactgcctacaaggtgactaataagaataatagaccaagcggaaagtgtcttgttcatgtagagctccttcgatcatatttggcatattgctagtgaagaaaccccaccccaagaccaaaagaaaaaagaaaaaagagaaatcagcctgattcagtgatttgtagtttggaaccaatacttcacaacgtaacttatctgcacagaaatactctcttaaagctttcgtttagattattgttttcttgatttctgcttttctttccttgacatttcaatccatcgtttttgttcccttctctattgaaaatctcatcttcaaatagagcatgatgacttgaattgttataagttataacttgtaagcaaaactgttttgatagatagtcttgtcttggtcaaatagatttaagtggacgcaagagttaggctactaccatggtaggtgcaaatttctgaagaagttttagagctccaaaatttctcatatttgcagaatctcatattcgtagaaacatccaaacaatgcaacataacatgaacatctcaagatacaaaaacagaaggacatgggatggaacagagatatccatgagcgcaggatccagctaataatgagttcttgctactttagtcattgtaatgtgtgctccattgaagaaatctctcttagctctaaagttctgcaccaactgttcaacaccaatgaacacctccaatggcagcaaaagtcagcccgtggcttcccatcatcttcaacgttctgatgagtcctggaagagcaacgtttctttcaatacgagggacgtctttccagttgcaaaaccagtcacagcatctttga

SEQ ID NO: 182453 - DNA, 264 bp, Arabidopsis thaliana landsberg
gaaatcaggcaagaagaagggtttcttcttgtttctactgatattgcagcaagagggattgttctcccagaaacaactcatatttttaactttgatctcccacaaacggttacagattatctgcaccgagctggaagagctggtcgaaaacccttttctgacaggaagtgcattgtcgctaatctgatcacctcggaggaaagatttgtcttgcaaagatacgaaaatgaacttatgttcagctgcgaggaaatgatgttgtag

SEQ ID NO: 182454 - DNA, 368 bp, Arabidopsis thaliana landsberg
ccttgcaggacgtatatcgcccttgcataggctaaaacagcttgtgtcattagatgtgagccagaacagattctcaggcaccgttggccatgaaatcctaacattccctgagattgcacgcatcaatgtgtcttttaaccagttcatatccatagaggttattaaagttacaggatcacgcctgcgcatgcttgatgctgaaggaaaccatttacaggggcaccttccgctgaacctggcaacttatgaaaacctaaaggatatcaatctacggagcaacatgttctctggcgatattcctaggatttatgggaaaagactggagaattcatggagaagcttatacttggagaacaactacctgtcag

SEQ ID NO: 182455 - DNA, 1657 bp, Arabidopsis thaliana landsberg
atgagcggaaggagatgtgatcggaggttgaatgtgcagaaagtttcagcggcagatgaactcgaaactaaacttggatttgggcttttctcccaaggggaaacgcggctcgggtggctactcacgtttgcatcagtaagtcacgttttgtgacttccctagtagttagttctctgaatactgaaaacttctaagtacactcactgattggttattatactacgttgttggcagtcatcttgggaagatgccgatactgggaaaacctttagttgtgtggaccttttctttgtcactcaggtcagctgtggtcattgctactatattagctgctttcttcgtatcacttgctcaaccctttttcgtttctttccaggacggctcttcttttaagactaagtacaagttccgcccttacttgtatgccgccaccaaagtatgtatggtttctctctgtactcgagtgtttcatcctatatgtcaactaaactgcaatgccctttttacaggacaatatggaactggaagttgaagcctacttgagacgccgatatgaaagacaagttgctgatattcagattgttcacaaagaagatctttatcttgtaagtcactaaagcataactccttttacgcagtttgcaactacctgttgattactcgtttctttctctctatatagaggactcatgtcaattacatttgctacaacttttagttattttcctcttcttgcaacttcaaattgagcagctctagtaataagtccaaaactgatcttgcttccatgtgctcaaatcatctatctagcctgccaaaaacgttcttgtaactcaaaaaacgtttgctagtaaatgtttaagtgtttaatgcttcttctttagtggcaacattatgcaagatatgaacgttttcagtacctcttgtttggttgtcacttttgctgaccttttctttgacctaccataccaatttgagtttcttgatttcttatgttcatgagcagaaaaatcatctatctggcctgcaaaaaaaatatctcaaagtatcatttgacactgtgcaacaattggtggaagtaaagagggatctgttgcatattgtcgaacgaaacctcgcaaaatttaatgcacttgaagcttacgaatccatcttgtctggaaaacggtaaggcaatgtatttttgttcttataaatttccagagttcttacaaatttatcccttaaaactatgttgttccttagttataatttccaagtcttggaatgtagagaacaacgtcctcaagactgcttagactctgtggtggacctccgcgagtacgatgttccttatcatgtccgatttgcaattgataatggtaacctatttagtcaaacttttaatcctagtttagccctcaaggttgtcaaaatcatgatgtgttctcgctgtccagatgtgcgtagtgggcaatggtacaatgtcagtatttccagcactgatgtcatactagagaagaggacggatcttctccaacgcgcagaagttcgcgtttgtgcattcgatatagagacagtaaagcttccattgaagttcccggatgctgaatatgatcaaattatgatgatatcctacatggttgatgggcaaggttttctaattactaacagaaag

SEQ ID NO: 182456 - DNA, 274 bp, Arabidopsis thaliana landsberg
atcgtgaaacaggagtggccggcaaagtggaaaagctttattcctgatttagttatagctgctaagactagtgaaactatctgtgagaattgcatggctattttgaaagtaagttcagtcttaagtgcctttgcattaattaagttcatggtgtacttaaataacatttcttcttgtttagctcctaagtgaaaaggtctttgatttctcaaaaggagagatgactcagcaaaaagataaaagaactgaaacagtctctaaacaggcaagttag

SEQ ID NO: 182457 - DNA, 229 bp, Arabidopsis thaliana landsberg
gatccgtccaacgggagattatggttaccagttacccaatggcccgcgtgcaacaggggtaaatgcccaattgctggtgtcgtatgaagtgaaggagaacctgttcctggaagcttctgcgctgatcaggaattataaatcgggggttgctgaaatagcaaacaggaatatgtcggtatttacagctggtatacgaatgaatatgttcaggcgggagtatgattattaa

SEQ ID NO: 182458 - DNA, 1383 bp, Arabidopsis thaliana landsberg
actccaagatagttgccggccaggtcgagaaagactacgcagcaaaggaccccgcacttatgcaatacctcgcggccatcgaagtctcgagagacaattcaagggattcaccttgcagcatgtggatagggccaagaacgaggaggccgacgcattggccaaggccgccgccaagggcgagtccttgccctccgacgtgttctttcatatcatcggcacgccagccgtccggagccccgaagggctccaaataactaatgacagcgagggccaccgcatagtcaacctaatcatgaccgaggactggcgagcaccaataactctgttcctacaggggtactatcatccaaccgacatcaacgaggccaagcgcctcaaacatcgaagtcaggacttcgcactgattgagggccaactctacaagaaggggtcagtcagccaatgcttaaatgtgtcaccgagatcgaaggcgtccaaatcctgcgtgaagtccacagtggtacttgcggctctcacgtcaggccaagggccctagccgcaaaggtgatctgccaaggtttctactggcccgcaatgatctgcgccgcaaatcgggtcacaaggtcctgcgaagcctgccagaagttttctcctcgatcaggcagcccttcgcaattcacaaaactgatcgcccacacatggcctctccagcgctggggcctggacatcgtcggcccctgccacggctcaggggaacctcaagttcactttcgtcgctgtcgagtattttactaaatggatcgaggcgagggctgtatccacaataacatcaaagactgcacagaaattcttctggcaaaacattgtttgccacttcggagtaccgtctgaactcacagttgacaacgacaagcagtttgacagccaagacttcaaagatttctgcttctccattggcaccaagcttgccttcgcctcagtataccacccgcagtccaacggagtcgtggaacgcgccaatggcaaaattttcacagctgtcaagaagatgctcctcgacgagaaaaagggcaggtgggccgatttgttacctgaagaggtctgggcgctaaacacgactgagtgcagggcgactgggttcacccctttccgccttctatatggatcagaggccatgactccgcaagaaataaaacatgggtccccacggacagtcccgtcagctgtccccgacgtggacgaaccaacttccaaagatctcattgacggagaccgggtcttcgccctacaggccctaaacaaataccaagcccagaccaaagcatggcgcgaccacgcagtcatcccgagggagttcagcgaaggggacctcgtactcgtccgtacagctcggacggagtccag

SEQ ID NO: 182459 - DNA, 441 bp, Arabidopsis thaliana landsberg
cgcatcaaggcggccatccacgcctacaacggttggctcaaccaggtcaaacgacgcaacgacgtcgtgggtctggccacggctgtcgtggttgacgggcatgttcgctacgaacgcaccatgggctacgccgatgccgccaccggcgcgcacgtcgaaccctacacggtgtttcgcctggcttccctgtccaaggctttcgccaccgccatgaccggcctgctggtgcagcgggggcgcctgtcgtggaactcgcgcctcaaggacatcctgccgttcttccagctcaaggacatcgatgacacgcgcaatgccaccgtcggcgacatcgccggccagcgcatcggcctgccgcgcaacagatacaacccgcgcctggaagaccacgtgccgtacacaatgctagtgcggcagctgtatcgcatcaagccgatctgcaac

SEQ ID NO: 182460 - DNA, 99 bp, Arabidopsis thaliana landsberg
atccgcatatggttcagcttacggaaatcatatcctaagttacgaaattgccattgcgagcaccgctctgataatccttaaaaagtttgtgcctttaca

SEQ ID NO: 182461 - DNA, 199 bp, Arabidopsis thaliana landsberg
attatctacgcggccacaacctattccaagggaaccttggtaaccgagacggtcacgatccattccacttcaggggaaccctttgtgatgcctgaaaccactattggttgtggccacaacagctcatggtttaaacctactttttcgggcatggttggtctaagctggggaccttcatcgctcatcactcagatgggcg

SEQ ID NO: 182462 - DNA, 1133 bp, Arabidopsis thaliana landsberg
atgcccttgatctctcgttggttcaaggtagatgaaaaggtaaggatttaatctgttttgtgttgagaaatcaattttgattctaagtgtttgattagctcactgtgctacactgtgtggttgaatccatttgatcttgggttatatatgatgaattggagcagagattgtagttttacttagtttgctagtgagataatgtgagggttatgaatattttggtttcagtgttcttcttgcttacatatgaatcacagttttagtaggtggaatggtggatactgtttcgtatctattgttcataagcttatactctgctgttagaaatttaaagtgatgaactttctcttgttgttttgaggattgaggtagatgaaacggttaagattaaatctgttcatgtttttatgatgaatctaagacaacattttagtttacttagtttgccaatgagaaaatgtgagagatatgcataattgctttccatgttcatatttttttcttcggttaatttagtgcaattcaacagaggaaggtttgacattttttggtctagtaatatatgaatcagtatgtggtcagaggatagtttaacagtttcagtgttctaactcacattataaatcatagttttggtaagtggatgctgtttcagattctggtcatgttcataggctcaatcaacctttgatcttagcaatataaagtgttgagctttatatcttgttgaatcgaggtagatgaaaagtgaagatttaatccatcttgtgttgaggaatgaatcttgattcctagtttttgagaagcttcagtttcttacagtgtgtactgtgtggttttacccgtttgatcttaggttctatatgataaatggaagaagagattgtagtttattataatttaatcttatgttctatatttgttttcaacggttaattcaatattttgtgagaactatatgagtagttgcaaaatatgaatcacatatacattgagtggatactgtttcagatttggtcatggtcataagctcaaatgtagctcttaagtaatttaaagtgatgaactttatttttgttgcttagaggtggatgaaaggtgatgatttaactcagcttgtgtgtgaggaatga

SEQ ID NO: 182463 - DNA, 525 bp, Arabidopsis thaliana landsberg
gcattccgggagatcggtaaacaaacaggctattctttctttataaatcatcaattactgaaagaagccaaaccggtgagcctttctcttaaagatgccaccctccaagaagcattacaagcttgccttaaaggccaaccgcttacctatgccatcattgacaaaacggttatcctcaaggctaaaaaaacaaatgctgcctcattactcaaaccagtgccgacttcttatctattaacaggctctgtgacagactctgccaataaaacccctctttcaggcgtaacgatccaggtgagtgggactactactggtactactacggatgttgatggtaaattcagcttgcaagtaccggataatgcggtgttggtagtgtcatttctcggctataagcataaagaggtacgcgtgaatgggcggcacgttattaatatagtattaactgctataacaacaggattaaaccaattagtagtaattggatacggcacacagaaagaaaaagatttacaggggcaataa

SEQ ID NO: 182464 - DNA, 408 bp, Arabidopsis thaliana landsberg
atgctgttcctgtggctgtccatgctgggtaccgtggtggcgttgcggcgtggcgagcacatgcgcatgacggcactggtcgatcgtgtcgggccgcgctggcaggcgtttctggacgctttcgcgcaaaccgcttcgcttgcgttcctgctgctggtcatcgtctcggcctgcgattatgcgcaaggggaatcgttcatcatcacgccggcgctccaggtcaacgacctgtggcgggctgccgcgctgcctgtcggcctgggattgatggcgctggtgtcattgctgcgcctggtccgggtgcgcgatgtgggtacagtgttgatggcggttgcctccacgctcgcgctggcaacgggtttctggaaggcacaacccgtgttcgcgggcctgggcaatgtcaacctg

SEQ ID NO: 182465 - DNA, 128 bp, Arabidopsis thaliana landsberg
atcctcgctttctatatccggagaaggctaggtggtttgatctctaccgtacacgtgtacattctcccatgtcagttgattacgtggccattgaagcgttgcatcggtgtgtaaatgagtgggaatga

SEQ ID NO: 182466 - DNA, 349 bp, Arabidopsis thaliana landsberg
atggtgaagctccagaaactgattgtattgaacttgaaagactgcaaaatgttaggtgcagttccagaattcctagggaagctgaaagctctgcaagaactggtgctatctggttgttcaaagctcaagactttttcagttccgattgaaaccatgaaatgcttgcagatattattgcttgacgggacagcacttaaagaaatgccaaagttattgcggttcaatagctctagagtggaagatctacccgaattaagacgtggtattaatggcctatccacattacaacgtctatgcttaagcaggaacaatatgatcagcaatctgcaaatcgacatcaatcaactcg

SEQ ID NO: 182467 - DNA, 584 bp, Arabidopsis thaliana landsberg
  unsure (1)..(584): unsure at all n locations
atggcgccacgcaggtccgcgccctgcacgacacggtgctggcgcaggtgtcacgtcccctgtccagcccgggatggcgtaactgcggacnccgcagcggtgtgcacacccgcagctacgtgcccgcgcgcgggcactggaacgccgagtcggccggagcctggaaccatctgcagtcccaccgccagttcacgacgctgtcgctgaccccggtcggcgggggacaggcgctggctcagccgctgatcacctacctggtgcgaggatcggagactttcgacaagacctccggattcggtctgcgatcggcgtcagggcaacaggtggccgccctgagccgctgtcttccggtcgccagccgcgttccgctgttgtcgcccggcgcgatcgtcggtgagcgtcaccgcctcgggttcggcattcccgccgggggagccgggttgttcgtcggcagccgcccggacaagacccgcgtgttcgtcgccgcaccaccgtcgagtgagcccctgtggctgtccgggccgccgctgttcgcccaacagatggtggcgaggctgaacacccaggaccgccgcatcgccgtg

SEQ ID NO: 182468 - DNA, 39 bp, Arabidopsis thaliana landsberg
atgattgattcacggaaaacactgagaagattcgatttg

SEQ ID NO: 182469 - DNA, 220 bp, Arabidopsis thaliana landsberg
atgcaggatcggcccgtggtgagcgatggacgaccctgggcaatgcatgattgatccgcgataggtgtgtgatcgacgaatgggcatgtcactgatcagcttccgatcaagcaggagggtaagatacttgtcagatttgtggtcaagaaacggccacgttgttgagcagcttaggacccaagctgttgcatcatcgagcagtttcggacgtatggattag

SEQ ID NO: 182470 - DNA, 1772 bp, Arabidopsis thaliana landsberg
atgcctgtgccagatgatcgggttccgcctcgtggtcagcctcttgcttatcccgaggcggttcaacttctcgaccctatcgagcctgagtttaaaggagaggtaaatttgaattctttatcgaaaacatctacaccatccatttcaatttgaaaaaacagaggaaacagagtattaaagttgattcatcttataggtggatgataagtatgagtactcaatggagagtaaagacataaaagttcatggatggataagcacaaatgattcagttgggttctggcaaatcactccaagcaatgagttccgttctgctgggcctctcaaacaattcctaggctcccatgtcggtccaactaaccttgcggtaagaaataataggtttcgtcatatatcgattcataatttggatagaagatgaatgatagttgatgtgtgtgaaatggaaacaggtatttcacagcactcactatgttggagcagacctaatcatgagttttaaaaacggtgaagcatggaagaaagtatttggacctgtctttatttatctcaactcttttcctaaaggagttgatcctctcttgctctggcatgaagccaagaaccaggttagtcatacatctacacacatgttcatgttcatatgtaagaacaaaagagctgagcaatagatttggttgttgtttcagacaaagattgaagaagataagtggccttataacttcaccgcttcagatgattttcctgcatctgaccaaagaggatctattagcggtagattactcgtaagagacaggtacactacttgcttcattatctcttgaatctacgtcgttttttgtttacataacagattcctaagtggatagtttggttttgtaacagattcataagtagtgaggatatacctgcaaatggttcctatgtgggcttggctgcaccaggagatgttggctcatggcaaagagaatgcaaagtaacttccttaatctatcatatattcattctccctcttgttaattaacaattagattagttataagttttggtcttaattacgttgacagggttatcaattctggtctaaagcagacgaaaatggatctttttctatcaataatgtgagaagtggtcgttataatctctatgcatttgctccgggattcatcggtgattaccacaacgacaccatttttgacatttctccaggttcgaacacttctaataccacaacgattctaattcatatatagatacaagactaagaaaaagtgaaatattggaaacaggctcaaagattagcctaggagacttggtgtatgagcctccaagagacggttcaactctatgggaaatcggtgtaccagaccgaagcgctgcagagttccacattcctgacccgaatccaagctttgtaaacaaactatacttaaaccattctgataaattccgacagtacggattgtgggaacggtattcagaactgtaccccgatgaagatatggtctacaatgttgatgttgatgactactccaaaaactggttcttcatgcaagttacaaggttagtttgtgaccaacttaaattcaaaacactaccattatgaaactttgttaaagtataaacattggatttgtaggaaggaagcaaatggaggatataaaggtacaacatggcagatcagatttcagttcgacgataaaatgaaaaacgtaaccggaaacttcaaactgcgaatcgctttagccacatcaaacgtagcagaattgcag

SEQ ID NO: 182471 - DNA, 68 bp, Arabidopsis thaliana landsberg
gtaggaaagttttcgacacagaaaccaatccatggagcttggatttacgtattcttcttgagttatag

SEQ ID NO: 182472 - DNA, 1528 bp, Arabidopsis thaliana landsberg
atgaaactacttacggtgaatgatgatgaagatgaaaatatgaattttgtctgttgcgtgagagattccaggcgcgaagagccgattgatgaagaagaacaagtagagctaaatgctaattaaattaaaattgaattttgtcttgttcttttgttaattgtaacctaaaaaatgggtattaattattaaagtaatgttgagaaaaagggtataaatatcagtaatatattgtcactgaaaaataaattatcacttaattgaaataccctataatcagatttttctttgataattaattaattgaccatctttttctctttttacataattaaattgaccagatttatttttatttttatttttttgggaaacagttattttcttttttccaaagtaaaaccaacaaacaaatttgaaatatgtctcaaaaatatagggaatggaatgtaattttcatttcatgaacataaaacaaattggatatagattgttaaatagaggggctcaaatgtaaaaacgttaagagttgaacaaaaagtaaagttgaaggtgacgacgaacccaaaccccacagcttcgtcagtcgccgccggtgactcaaccgaccacgcatgatcggtaagtaatttatcgcagttctgtatcaatttttcgattcagatgcgaatagacttgatggcttctggctttgcatcaatttttgctctttatcatatacactgctcaacaacagtttcaatatgatctttgaacagtttacattactctgtatatgtaatgtctgtgtttcgttatatttttctaaattgacttgacttcgtgtgtatcactacttttaaaaagaggaatttgacgtgcgtctctgtgtctgtttctctatatgagtctgatatagagctactacagatgtttaatactcaatatagttgaaagagaaggaatcagctttaggaacccatgcaagccacttttagttgcaatctaccaacctgaagaaggtgctatccaagagtaaccgtgttgccattaatttaaggtattgctggagtgtatgaatcgatgataaaaaatattgcctggctctttttgataattctctgttctttctctttttaagagttttgaagatcccgtagcagcagttggaattgctaaacagttgcaagaacactgtaatgaggtttttagaatggtaaaagagacagaaacagcaatgaacactgtaatgttccttctacttctgagactttgtactctcctcttggatatattcaaaggtgatgctagtctccatactggttctgaaatgttactcaatgacaatgtggattagccttcagatgactctgagaatggtgattatgatcctgaagcgaaggaagacggaaatagcattagtggcttgggaaatgctagcgatgaagatggcaacataacttcaactagcttgagctgctcttctataggattcggcagccgtgttttagaagaactgtcatacgtacacttggaaacagggtccccttag

SEQ ID NO: 182473 - DNA, 86 bp, Arabidopsis thaliana landsberg
atgcagacgaggagtacttatgaaggaccaagaggagcttctggttatgatgcaacatttgctcccccgaaacaggaactggtaac

SEQ ID NO: 182474 - DNA, 191 bp, Arabidopsis thaliana landsberg
ggcgcaggaaaagcccaacgtccatggtggccccgtcggtccccccgcgacgatagtccgcaaactccgccaggtccggaaggaagcaacggtagtggatgattcgggtgccggggtgtggctggcggggccgccgccatttaaagccagcgttttccgaagactggaacacacctcgctgcggatgactg

SEQ ID NO: 182475 - DNA, 133 bp, Arabidopsis thaliana landsberg
atgggaagggcgccgtgctgtgagaaggtaggaattaagaaggggcgctggacggcggaggaagaccggactctctccgactacattcagtccaacggcgaaggatcatggcgttctcttcccaaaaatgccg

SEQ ID NO: 182476 - DNA, 110 bp, Arabidopsis thaliana landsberg
cgttcatgaatgctacagtcgtgccgcgagaagccagcagggcacagaagtcaccgtgcccgactatcacttcatcaagcgcctcaacttcgccttcaatgtgttcgaag

SEQ ID NO: 182477 - DNA, 412 bp, Arabidopsis thaliana landsberg
gacgtatacggactcacagcaataaatatctacacacacaccaaacacaactttaagtccaaattcatttcagaagatttagatgaataccgagtgtcaagcattcaagcggcttctgaaagaactgtccaaaaaggtagataggctcttctagtgactttagttccagggagttcaatgagttgaagatctgttcaaaccacagttaagaagttgtaatatatatcagtgaacactcgtaaaagtcaaattaaatcacatgagaccttccaacagtcaccatagaatccaaggatcccttccttttcgtgaggaaacttgctcgtaagctcagcgatgaaatcatcgtattccctatgaatccgaacagaaagattattggggagatggaaatggacagtggtaggatcag

SEQ ID NO: 182478 - DNA, 309 bp, Arabidopsis thaliana landsberg
atgaaagccgctcactaccagacaaccccttttgccatcgcaatggtgcgtgatggctttctttttgtggccgtcgtgaagatggcctggtggctggcgccggcgccggctttcccccaaatctgaatctcatgcaaaagatcaagtgcgccatcatcggccccggcaacatcggcaccgacctgctctacaagctgaagcgctcgaaggtgctggagccggtgtggatggtcggcgtcgatccgaccttcgagggcctggcgcgtgcgcgcgaacacggcctgaagacgacccgccagggcggtgacg

SEQ ID NO: 182479 - DNA, 247 bp, Arabidopsis thaliana landsberg
atcctgggactcgatatctgtgcagatacacgagcaggagatgccacaagacctggaatatctggtggccaaaagaggaggttgacaacaggtactttcactttcttacagcttctcatagttttctgatcagagcttttaaatatctatgtcgactattgtaggtgaaattgttgtgggcccagctactactctgttaatggatgaaatatcgaatggtttggacagctcaactacgttccagata

SEQ ID NO: 182480 - DNA, 859 bp, Arabidopsis thaliana landsberg
atgaaagactttggtgataaaatgcactgccaattccaagaaattatccgtaccttactagatgcaaatgcattgtctggtggagctcaggtgcatccttgtttcctttcaataccttattttttgataatttgaacggggtggtattcttcccctgatttgtgtaccgtttttgaatctgtgcatagttaagcttgacaaaaataagttccaagtctttctcttactttccacatggtcttgttattcttgcatgttcctgaataagtagaagagactatattcaagagtattattttaaaatgttggcgttactaatactttgtattcagtgtacatcatgatatctgctagaatgtttaaaaggccctggaattttgtgttcccttacccatttgtctcctcgaatctggtagatagacattcttatatctattgtgtacttgatgcattccgttttagcagagagcaaatatcatggatattttctacgagaagcatctacctgagttagtggatgttattactgcctcatgtcctgagaagtcgagcaacgcatctgaaggtgctgccagaaggattttcacaaagcctgaagtcctgttgaacatatgtgaattgttgtgcttttgcattatgcaagatgcatccaggacaaagtaattatgatcctcagtttggtaattttctgattcattctcatgctggcatttattttattgtgcaatttcttcttgtctgcagatgcagttttctccaaaacaatgtgactgaaaaggttttgcatctcacacggagaaaggaaaaatacctagtggtcgctgctatacgatttgtccgtactctcctctctgtccat

SEQ ID NO: 182481 - DNA, 150 bp, Arabidopsis thaliana landsberg
ggaaaagctacgctaaggcaaagtgttgcccacttcttgacggcttagtgggtcttgacgcggcggtttgtctctgcaccaccattagagcgaagcttctcaacattgacctcattatcccaattgctctagaggttcttgtcgactgtg

SEQ ID NO: 182482 - DNA, 84 bp, Arabidopsis thaliana landsberg
atggatttgggcgatgacatgctgctgaattatgtgaaaacttctgccttgagcgagaaaggcaaagccgccatcgggaagctg

SEQ ID NO: 182483 - DNA, 489 bp, Arabidopsis thaliana landsberg
atgcttttaactaaaaggtctctaaacaagaatgatactccaaagaaaggaaacgtacgtgtaatctgtgccctcggggaaaagagcaagccataaagcgtctcggggatccttaaaactcgaaactatctgtctcaagtttgcttcatcgacttcccatctcctctcaacaggaataaactcaaagaggtgaaacgcccaaccaaagagaggtaatttcatcaaactactcttaagcacatatttgatattcccaatctggcctttacgcagtgcaagatcccagaagtacatccaatcaacttctgttcggtggtttgcaatgagcaatactcgatcctcgcaaggaaccttatcaccagagaagataactttggttttgttaatcttctcaaagaggaaaggccacaaggcgagccacgagccaaagaagaaggaaacacatttacggctatagcgaatgctgaaaagcctcaacactacagctga

SEQ ID NO: 182484 - DNA, 2084 bp, Arabidopsis thaliana landsberg
ctccgttgtcggaatcaaacccagtgggaagattcaaaattgacagattgtgttgtcgaatctcttcaaaacgtgagtgtctctgtttatcgactaggtttttgcgtttaagtctattggactgttttctgtattgtttcgaccaattgaatcatctttctcagaaaatccaacactctttgcttgagttttgtgatttccttggcgttgtcttataatttttgattctgtagttgaattaatagttggcatccgaatttgttttctccgatttagggatttgattttgaaattgcagaagaaaattttaaagacaagattgttagttgttggatagtgagaaaatgtttactaataatcaaagacaagaagaacgtactggaaaacatggaacaccaaggcttcaatatcttcaggtctcttcaagaatcttttttttttaacctgtttttgagtttttaataagaatgtaagaagcattgttggagttgagtttgtattctttttaattacaggagcttgtgagtcagtttcagaatgcaactgatgaaggtatgaactagtttggttttagtcaacatctcttcatgcttttgtttgaacatttagaaagtattgttgcataagactggcttgatactttcttgtgattgatgtatctttaaggcattgctgatttgtagtatgattttgaggactgtgtgtggctacttaagtagaagatgtatgaataaataaataagcagatgcggttcgtgttaaacattagtttatgggcacatatctaggtttcataacatgtgcaaacatgacaatagattagcaattaaagtccaacattggcactataagccttgtggcaaatcgctgtcatcactttcaaatgcatctataagattttagatgtagcaagcctaatctagtatatctctggttgttttgtcacttagttttgtcaagttatattaacatgattaatgttttgcatctgcagaaacaaaggagaaaattgtagcaaacttggcgaattttgcatatgacccttacaactacactattttacgtcaggtaacctcgagagtatgctcatgttctatcgttttccataaagaaccctaatactctcttctttaatcttctcacgatggaaatgttgctggtgtactcgagcagctaaatgtcttggaactattcgtagactgtctaacagagccaaatgagaagcttgtagaatttgggataggaggaatatgtaacgcttgtgccggtaaaaagcctggaagattatgaatgtagcctgatacttaactgtttcttgctgttaccataattgcaaatactgatcatcgaaccaaatgctctttcatgtcttgtgcagagccaaaaaatgttgctaccattgtcgaggctgatgggattcctctgattatcaaatccttatcaagccctgtcaggaacactgtgagtacacctcatttatgtttctctggtgtttaaatgaaaactcaacaattatttgatttatttttggctttctaataggtgaactatgcgcttggggctttgtactacatgtgtgactataacagagcaacaagagaggagattttgagaccagaagtggtggatcttatcgagaggtacgcagctgctgaatcagtcagtctaagctttagtaacttggctaaggtgtttcttgacaagcatgttcatgcaaacacatgagattcatatgtaatgttaaggaaacaagcattgctgattttgattggctccttttgagatgaatgagaaaagagtttcagtttctttccctattagccaaagtgttaacagacgcattcagaactcggctcttaaattcttaatcactcaagattcttcttacacaaaactcctaggacagaaccaagcgctagaagacttgctgaagcaaacactagccagacgattataaatgaacgagtcatccgtcataaaacaacaaggcatctgcaagacttgacagagaatcaacatctgaacaactgtaagtataactttcattccctgctctagacgctttaatgacttgtgcaatttag

SEQ ID NO: 182485 - DNA, 4429 bp, Arabidopsis thaliana landsberg
atggctactcacgctgaagaaatcgttctcgtcaacaccaacatcctcaacgtgaacatgagtaacgttaccaaactcaccagcactaactacctcatgtggagccgccaggttcatgcgctcttcgatggctatgaactcgccggtatttctcgatggctctacacccatgccgcctgcaaccattggcacagatgcggttcctcgtgtcaatcccgactacactcgctggagaagacaagacaagctcatctacagtgcaatccttggagccatctctatgtccgtacaacctgcggtgtctcgagccactacagcggctcagatctgggagacacttcgcaagatctatgcgaatccaagctatggtcatgtcactcaactccgtacgcagctgaagcaatggacgaagggtgccaaaaccatcgatgactatatgcaaggattcatcactagattcgatcaacttgcgcttcttggaaaacctatggaccatgacgagcaagtagaacgtgtgctggaaaatctgcctgatgattacaaaccagtgatagatcaaattgccgccaaagataccccaccgtctctcacagagatccatgagaggctgataaatcaagagagcaaacttcttgctttgaactcggcagaggtcgtaccaatcactgccaatgtcgttactcaccgcaacaccaacaccaaccgtaatcagaacaatcgtggagacaaccgcaactacaacaacaacaacaatcgctcaaactcttggcagccatcgtcttctggctctcgatccgataatcgccagcccaaaccctacttgggccgatgccaaatatgtagcgtgcaaggacacagtgccaaacgctgccctcaacttcatcaattccaatcaaccaccaatcaacagcaatcgacttctccgttcactccatggcagccccgcgccaatctcgctgtcaactctccatacaatgccaacaactggcttctcgacagcggagcaacccaccatatcacgtcggacttcaacaatctgtctttccatcaaccttacaccggtggtgatgatgttatgattgccgatggatccacaattcccataacacacactggttctgcctctctacctactagttctcgctcactagatcttaacaaagttctatatgttccaaatataaacaaaaacttaatctctgtgtatcgcttatgcaacactaatcgtgtctctgtggaattctttcctgcatcctttcaggtgaaggatctcaacacgggggtcccattactccaaggcaaaactaaagatgagttgtatgagtggcctattgcatcgtctcaagcggtatctatgtttgcgtctccatgctctaaagctactcattcttcatggcattcccgtctcggccatccttcattggcgattttaaattcagttatttccaatcattcacttccagttttaaacccctctcataaacttctttcttgctcagattgttttatcaataaaagtcataaagtgcctttttcaaattcaacaatcacttcgtctaaaccattggaatacatttattcagatgtgtggagttccccaattctttctattgataattatcgctattatgtcatctttgttgatcatttcacccgttatacatggttatatccattaaaacagaaatctcaagtcaaagatacgttcattatcttcaagagtcttgtggaaaatcgttttcaaacaaggattggtacactttattcagataatgggggcgaatttgtggtcttacgggattatttatcgcaacacgggatctctcatttcacctctccaccgcatactccagaacacaatggtctatcagaaagaaagcatcgtcacatagttgagatgggtctcaccttactctctcatgcctctgttcccaagacgtactggccgtatgctttttctgtggcagtttaccttataaatcggcttcccacaccgctacttcagcttcaatcgccgtttcagaaactttttggacaaccgccgaattatgagaagctcaaagtttttggatgtgcctgttatccatggttaagaccgtacaatcgtcacaagctagaagacaaatcaaaacaatgtgcattcatgggttattctcttactcaaagtgcttacttgtgtcttcacattcccactggcagactctacacatctcggcacgtgcagtttgacgaacggtgctttcccttctctacaacaaatttcggtgtatccacgtcacaagaacagcgttctgattcagctccgaattggccatctcatacaactctacccacaacaccgttagttttgccggctcccccgtgtttgggtcctcaccttgatacgtcgcctcgtccaccgtcgttgccgtctccactatgcaccactcaggtatcgtcttctaacttaccttcctcttcgatttcttctccctcttcctctgagcccactgctccaagtcataatgggccgcaacccacggcccagccacatcaaacacaaaactcaaattcaaatagcccaattttaaataacccaaatccaaacagcccaagtccaaatagcccaaatcaaaatagcccattaccacaaagcccaatctcatcaccccacataccaacaccttcgacgagtatctctgaaccaaactcgccgtcctcctcatcaacctctacgcctccgttacctcctgtgttacctgctccaccaattattcaagtcaacgctcaagctccggtcaatactcattcaatggctacaagggcaaaggatggcattagaaaacccaaccaaaagtactcttacgccacgtcactggctgcaaattcagaaccacgcacagcgatacaggcaatgaaagatgatcgttggagacaagcaatgggatcagaaataaatgctcaaatcggcaatcatacatgggatcttgtaccgcctccaccaccatctgtcacgatcgttggttgtcgttggatattcactaagaaattcaattcggatggctcactaaatcggtataaggcaaggcttgtcgccaaaggttacaatcaaagaccgggtcttgattatgcggaaacctttagtcctgtaatcaaatcaacttccattcgtatcgtcttgggtgtggctgttgatcgatcttggcctatccgtcaattggatgtcaataatgcatttctacagggtacacttaccgacgaagtatacatgtcgcaaccaccgggttttgttgataaagatcgtcctgattatgtctgccgcctcaagaaagctatttacgggctgaaacaagctcctagagcatggtatgttgaacttcggacttatttactaacggtgggttttgtgaattccatctcagatacgtcactttttgtgttgcaacgaggtcgatcaattatctatatgcttgtctatgttgacgacatattgatcacagggaatgacacggtcttgttaaaacatactctcgatgcattgtctcagcgtttttctgtcaaagaacatgaggatctacattattttctgggtattgaagcaaaacgagtcccacaaggtcttcacctcagccaacgtcggtacacacttgatcttctcgctcgcaccaatatgctaaccgcgaagccggtcgcaacaccaatggcaacatcaccaaagttgacactgcactccggtaccaaactgcctgacccgacagaatacagaggcatagtgggcagtttacaatatctagcattcactcgtcctgatctctcttatgcggtcaaccgtctgtcacaatatatgcatatgccgacagatgacaattggaatgccctgaaacgtgttctgcgatacttagctggaactccggatcatggcatatttcttaagaaaggcaacacattatcattacacgcatactctgatgcggattgggccggcgataccgatgactatgtctccactaatggctacattgtttatctcggtcatcatcccatctcttggtcctctaaaaagcagaaaggtgttgtgcgctcatctaccgaagctgaatacaggtcagtggcaaacacttcatctgagctacaatggatttgttccttattgacagaacttggtattcaattgtcacatccaccggtcatctattgtgacaatgtgggagcaacttatctatgtgccaatccggtgtttcattctcggatgaaacatatcgcgttggattatcacttcatccgtaaccaagttcaatctggtgcacttcgtgttgtccatgtctccactcatgatcaattagcagacactcttacaaagcctctgtcccgcgtcgcttttcagaacttctctcgcaagattggagtcatcaaagtccctccatcttgtgggggcgtattgaggatatga

SEQ ID NO: 182486 - DNA, 261 bp, Arabidopsis thaliana landsberg
aatgggaccgggttcgccttccctgctgtctatggcgccgccggtaataccgggaatgatctgttcacagatcactttcctgccgttggctactacggttaccaaacgacccacaagcgtgatatcgtacgattgccattctcccgcgcttttggccgccatttcattcggtgcaagaaaaccgtatatggcgctgaacctgtcaacaagcggttcttcgcctttgctgtcttccacctgcacttcatacctgccccttaa

SEQ ID NO: 182487 - DNA, 732 bp, Arabidopsis thaliana landsberg
atgaaggccatttccttggatccagattatacgaaaaagcaatctaagagatttgtagctggtggcttggctggtcacttgtatatgaactccaagaagtggttcggtaataaagatcaggtttgtgagaatgtgggtagattacgttttggaatagaatctactcaccgtgaatttgataagaggctagttttgtaggtgctgcattctggggaaggtccaattcattctgtgaagtggagaggaagtctcatcgcctgggctaatgatgttggtgttaaagtttatgatacagccaaagatcagcgtgttacatttattgaaaaaccgcgaggaagccccaggcctgaggctttactaccccacttggtttggcaggttcgtataaataactcattttgtcagattacttctttgattgtgaattcatatgtaacagcgttgatttgaagggttattttttattgtttccaggatgacactctccttgtgattggttggggaacatcagttaaaattgcgtcgattaaatcagaccagcaacaaactggaacttttaggcagattcagatgtctagtctaacccaagtagatattgtggcatctttccaaaccagctattacatttcagggattgctccctttggtgattctctggttattcttgcttatatacccattgaaggagatggtgagaaggaatttagcagcaccactactctatcgcgtcag

SEQ ID NO: 182488 - DNA, 209 bp, Arabidopsis thaliana landsberg
ccgcggcggaattgaaggcggttctagctttagagaccaaggacggcggcgccgtctccattatcgtgcgcacctgtacgttgcgcaagttaatcttttgtcaacgacacggcattgaaagcttgaggaaattgagaagacgaggaagaagaagaagaagaagaagagatcaagcagacgaatttacgaagacaattgtcaaattttaa

SEQ ID NO: 182489 - DNA, 850 bp, Arabidopsis thaliana landsberg
atggacatttttcggaccattgtccattatggaccgtccaacttggcccataaaaaaaactgtccatacggacacgcccaatggtccctggacggaccatttgacagctctaactatgaaccattgatctgtagtgtgggaactaaagtcggacttgatgagattgcgtttaacctgagaaatcagacttctgtcattgttggacctagtggtgttggaaagtccagcttaatcaatatattgagaagtagctatggtggtgacattaaacacgaagaagtgtttaagcctgtaagtttttttttttttgtcctatttcattctatagctaaaccttttgttttttaccatatcctcatgacaatgtataaaggccaaaacaagaagaataaaaaaaagtggtttgaagatcagagtgtaggggaagtttcacatagaaatggaagaggtaaacatacaacccgaaatgtaacgctacttcctctttgtggaggtggataccttgctgatactcctggctttaacaagcataagttgctgaaagtaacaaagcaaaaacttcccttgtgatttaaagaggtttgtaccctttttgcttgtgcccatttccccatatgtgagactgattgattgtgcactgatggtgtttcttactctttccttagatacggaaaatggtcgagggaggaaaatgtaaatacaaggattgctcgcatttaggggtacaaggctgtgctgtgacaggtggttgggaaaggtatgattactttttacaactgcttgatgagatcaaaatcgatgaggagtgtcaacttaagaagtatggaaccaaaagggaaggtggtgttag

SEQ ID NO: 182490 - DNA, 176 bp, Arabidopsis thaliana landsberg
gcaaagcaacgtccggctggtgtatgcatccctccaagagaacctatgcaagccgtttttcgttgtcgagaaggagcaggagcgcttcacttcacgtaccccatttaacgccaacagctcgtcctctcctgtcctgtcctgtccttctctcacagaccgaaagcctcagctccctt

SEQ ID NO: 182491 - DNA, 1217 bp, Arabidopsis thaliana landsberg
cgaatcggtagatgacaagttggtcactatcaaaagacaaggtgacattgaagaaggtttcacgtccgagattttcggcgacacgagaggggcgagcttgaattgttcgtcggcaaggagatgggtaattgcggttatatcgtcgggtgggattggagataaaaagttaagaaagctttggtaaacactgtttcttggagacgggatcataatgccgttattcctcaaattttcattttcatgaataataactttaatatggtattttggaaaaaatttagaaagatgtggtatttttgttagttttttctttttcttattatacccttaaccagaataatacataaataataaaaataaaaggaaatacaatttagacctaaaactgaaaaatatcttacgtagtagctctttagggttcgctcttctcttttcttcttatcattctcaatggacaagtcaagtaagaaatccaccaccaaagtaacaatcttcgtcgccttaattaattatggttcccttctttgttgttagtagttttactctattaatggcttcttcgcaaatttaaaagaccttgatttggttttgcaactttaggatgaagcaactcctgctgtgattaagcccacgaaaccattaaaggaaggtaagaaattgagtttcttttgtgtcgctctctctttgctacattaaaagctcctttattgctcgtactgctttggcttaggggatacgttatttaattgatctttgagcttgtgttctctatctgctgaactctgaagtatgtcgatttttaaaaacattttattgattttaacgtttttgttggtttttcttttaggtaagagggagccagaagatgatttagagaccaaagtaaatctgtagaagcaaaagaaaaactttgagaacaaggttggattcagaggaatcctattgttcttgagagagtattaattaaattcattctttctcttgttaattttcttacatagagttttaatgatcgaaacactatgtaacaggagacaatggaaggattcaccaactttcttcaggtgatggaaacaaaggtcgatttgttagcaagaaaagtggatctattgacctcaaaaatggacttgtgtgcgacaaatgtagatttgttgacctcaaagatgaatttgtgtgcgacaaattcagatctaaaggcgatgttaacctcaatgaag

SEQ ID NO: 182492 - DNA, 252 bp, Arabidopsis thaliana landsberg
atgcggcttcccgacccgtttatgcctgcacgcatcaagtgcttggccttggttagattctttggaacaccaatccccgtctcgtaagcattccccaaccaccaggcgccatcggaatctccctgcgcgtaggctttacggaacaaagtgatcgccgcggcctctttcaccttgtccttgctggcagcaagcgcgagtcccaacttcacttccgcggcgggatttcccgctgcagcccgccgtcgaagtttg

SEQ ID NO: 182493 - DNA, 522 bp, Arabidopsis thaliana landsberg
atgaccctgctgcgcggtctggccgactacctgccgctgatggtgtgtctgatggttcacatctggccaggcgaagccaacgtgatcggtccggaattgtgtgcgcgacggcgaataactggcggaggccgaaatgctgtgcagagggaccacctgacgccaacgagaattccttcttttccgacgccattgacgctacctaccgcaagctgggcttccgagcggaggtggatcctgccgttgatcgagctgcccaccgtgtgtgctaagccctaggacgaatacttcgagcgctcctgcgaattgcacgacaggtttcccggctacgcattgctgtccaccgagtgaacaccaaacgcgccgaacaccgtttccgaagaaagctgcgcgcgcattcgtatgctgttcgaccagctcaacattccggtggacctacacctgcacgataccgttcacgaagaggaggaacaaaagcaaagcagcggcttgcgcccgttgcattgcctgcagaagctgggcctg

SEQ ID NO: 182494 - DNA, 300 bp, Arabidopsis thaliana landsberg
  unsure (1)..(300): unsure at all n locations
atggaggtgacaggtccgttctcacnnnnnnnnnnnnnnnnnnnnnnnnnnnnnnnnnnnnnnnnnnnnatgtcatacagcctgcatgttccatcgtctgatccagtcccaaatctatacccatccggagaggactttcttcctggtaatcctgatgctaacctaaggaagagctgtaatgccatcttgatcagagaaggagatgatgtgtgggaagaattggacactgaagacgagttggagctcgcagttgcagagatggtgtcgaccgacaccttccagtgtctatatttctcttga

SEQ ID NO: 182495 - DNA, 180 bp, Arabidopsis thaliana landsberg
cttccagggctcatatcgatatccgcaaagtttgttcccacagtaatgaaccttatcaagaaccttgcagcgcaaggcgaacgcctcactgcagctaatccagagaaccgtcgttcgagcaacaacacttcttcatcagaaaatccaccagatcacaaaagctcctcaaaagaggactaa

SEQ ID NO: 182496 - DNA, 306 bp, Arabidopsis thaliana landsberg
atgaagcagatcgcctcagaggtcgaggagctcctcaagggcatcatcgccaagagagagaacgcgctgagaagcggcagcgcggcgggcgacgacgacctcctcgggctgcttctggagtccaacatggagcactgcaggggtgacggcagcgacgccgccagggccggcatcaccaccgacgacgtcatcggggagtgcaagctgttctacttcgccggcatggagaccacgtcggtgctgctcacgtggaccatggtcgtgctctccatgcacccggactggcagcaccgggccagggaggag

SEQ ID NO: 182497 - DNA, 1277 bp, Arabidopsis thaliana landsberg
acccagaagctgaagtttctaatgacagcttaagatcagcggtcagaaaaacgttgattgaatatctgtttgagtgcagtgatctggacaccattccaaagtctttaatggaagctctttcattggtcaacagcaggacggggaatgtagagcataaggtatgtccaagggaagcaattgaggaggagacagagtgtatattaaatgtgagtgctcaagtgaagcaaatattttgccaatgtattccaaattatgaactcgatcaggacttcggtgatgcttatatggaggagctagaagacagtgatgataatgatgatgatgatgatgatgatgatgatgatgatgagaattgtaatttatttgataacaagaaattaggtaataaagaagagagtagatgccgaaacataaagcttgaagtcaaagacactcaagacgatgcaatggagtcctctgattcggatcatgaagaaagtggtgcagaatgcttggttttggacccgactgattctacacatgaaacaaaccagcatgatttcagctcttctgtcaatagggtggttgtaagagacctgccagagagtattacaagagtctatcctagatctctatatgtcactcccacgtccaataaatcaatagttatcagtgatagacatgacatagctatgagcaaaacccgagtcaaggttgagagggatattgagatggaagtagataatcagtttagctctcggtcattgttttctgttgaaaacataaagtctgatgatcatggtgagcagaagccacgaagaagaaataaaaaccagtacctagcaatccaagaaatttctgatgagacaagcttggttgcacataacctaatcggccgcttgctagagaaatttgcagaccgtcaacgtctaaacttagaaacggatgaacgttcatatcttggaggtgaatccaggcttcaagaaaaagtagaaggtgaggataaaagcgttttttgtcttgtacaaattcattttgcctgtgttaatgtctacatgaagtcatgaactaattgagacatcctaagtttgcacctctaactttaaagcatttttttctttggtaaacaagctatatgatcctgaagacatcgcctcattttcccgagtcattttcttactgaaattacccttgtgtgttgcagtgagtgaaaaaaagcaagcttcatcgcaggcgaagtcagatgaggcgatcattctttcagttgtcaaagagcaaataacgtccctagaagagag

SEQ ID NO: 182498 - DNA, 129 bp, Arabidopsis thaliana landsberg
gacaaccccgttacagcttacgaggctaccatcgtcgccaacctccacatccagacagccgttgctcccaacgttcgatcattggtgattgtcatcctcgcgtcctccttcaacaattatgcctgctga

SEQ ID NO: 182499 - DNA, 365 bp, Arabidopsis thaliana landsberg
ggctccaagtgcgaggcgcgggtgtcctcgacctgaacaccgagcgaccgcaacagatctcgcacatgcgacgggttgcgcagatctgtcgtaccccggcccggcacgtgccccaggacgagctggtcgcgttcggcgcggatccggacggcgtccgcttcgtcggccggacgtggcccggcgatgtcggtgatgagtcgctccaggaccggtcgatcgaccggcaatccgtgctcggcgagctcagcgcacagcagtgcagcgccggactcgctcgtggcagtgctgaccgcatgaggccgccgggcgagcaacgcttcttgcgcggcggccgtccgcaacgccagctgcaccaggtcggccag

SEQ ID NO: 182500 - DNA, 2062 bp, Arabidopsis thaliana landsberg
  unsure (1)..(2062): unsure at all n locations
atggctccactgagtccaagagtagtggtgaaggtggatttgaagaagaagccatggcagcaggaccagccattgcacaatagatggcatccggagataccaccagtagcagaggtcaaggctggtgagtttttccgggtagaaatgattgatgcaatgggaggtgttatcaaagacaatgactctgcaagcgatatcaagaacctagtcctaactactgtaagtgggttttgtgagaaacatgtgaaaaatcaataatgaaacaatgagtttacttttaaagaaaaacaacttttggtgatatattgtacagactcatcacctgagtgggccgatcaaagttgtggatgaggatggtgttgcagctaggccaggtgatcttcttgctgttgagatatgcaacttgggtcctcttccaggagatgaatggggattcactgcttcatttgatagagagaatggcggtggtttcttgactgaccatttcccttgtgcgaccaaagctatttggtactttgaagggatctatgcctactctcctcagattcctggtaagaagaaaacaattcaatgtcttctatcaagaaacttagtagcataaccatgtagctttccttgttatgattcgttctgttgaatattcaaatgctaatattaccccatcatggcaggagtacgatttccgggtttgacacacccaggagtcattggcactgcaccatcgaatgaactcttgagaatatggaatgatagggaaagacaattagaagaaagtggtgttgagtccctaacactatgtgaggtagtgcatcagcggccattagcatgcctaccaacaactaaaggatgtctcctcgggaatgtacgctattttctgatgctataacaaagttttttgaactgtataaatagtgcttacctctgaattcccagggattcttacataatcctcttgtagattgaagagaggaacaccagaatgggaaaggattgcaaaggaggctgcgaggacaataccaggaagagaaaacggaggaaactgtgacataaaaaacctaagcagtggctctaaaatatatcttccagtgtttgtagaaggagctaatctaagcaccggtgacatgcatttctcacagggtgatgacgagatctcattctgtggagccataaagatgagtggatttctagaactcaagtatgtacataagttcctaattgcactgtaaatagactctatacggttttcttagatgtccctgtttttgtctagtgttactatgaaattctgaccagataccattatgtaactcattaataggtgtgaaatcattagaaacgggatacaggagtcccttacaccaatgggacctacccctctccatgtaaacccaatctttgagataggaccagtggaaccaggttctcagagtggnnnnnnnnnnnnnnnnnnnnnnnnnatgagagcggaaaacagcattacctagatgcaacagttgcttacaaacgggcagttctcaacgccatagactatcttttcaaatttggttactcaaaagaacaggtacttgtctttgcagcttgatgtttcttccagaatctagttgatcacacaccaaacatccataaattaaaactacaaagacagaagtgatcaagagaatatggtgtgaacaggtgtacctcttactctcatgttgtccatgtgaaggaagactatctgggatagttgattctccaaatgccccagctacactagcaatacctacagccatctttgatcaggtatcaattttgcccctctgttctttgcataagtcaaaaagcttctgtataaacctcttgagtttactctgttcttcaccctcgtctctcaataatttgttagcaactgaaaagataggaatgcaaatatgttaattgcgtttgtatgttaatgcaggatattaggccaaagaatcggaaggttccagtaggacctcgggttgtgaggaaaccagatgtactgaagagcacatatgatggaaagcttccaattacaaagaatccaagttcttcctcttag

SEQ ID NO: 182501 - DNA, 86 bp, Arabidopsis thaliana landsberg
tttcccgtaacaagagaattaatgcaacaaggacttcatggacatcattaacatcaataatacgtcgaacatcaatgtttgatttg

SEQ ID NO: 182502 - DNA, 378 bp, Arabidopsis thaliana landsberg
ctcgagcagctggtcgccgtcggtcgagaagacccgctgtacccgccagcggaagcaaatctgatcgagctggacgaccaggaactggatgcgggtcctcgcggccccctggtccttcggttccagagccccgaggtactgctccagttcctgggccagctggtcgaacatgcccttccagccggcggctatccggggatcggacgccgacgcctcgtgccacggaccctggatcgccgcgtgccggtcccaccagccgaacgcgctggcgagccagtcccgaatgaccgcgcgcgagttcgtcgtcagcgcagtgtcgagccgtcgccagtaacgagcggcttcggccgtgacgtcggacaggagttcctcgagtaa

SEQ ID NO: 182503 - DNA, 1248 bp, Arabidopsis thaliana landsberg
atggaggtaaatggtttctgagatcctatttagcttggtgtgacttcagcgctcatcgtttcaaataaacttattgtgatatactgacattgtgtaggttttggttcgcttggttggagctgatgatcatgtctatcccaattttccggatgtgatgcgatacttggctgatagcgatttacttgaaatgatcgtcgacaaattaaatccatctgtaagtagtaaaattttaggttattccaaaacaaaaagagacttgaggctttattttggataaatcttaatgatttaaaatttggtacagtgagaggctaccgaataagaaaaaacataactgggatttatcattgccaatgttttcgataccatttacagtctttttctacaacctttgtacttgaatcagagtcctcctgaggttaaggcaaacgcagcagaaacattatgtgcaattactcgaaatgcaccttcagctctagctacaaaactctctagccctgggtttgttatctttgctttcatatttgagtttcacaggtttttgcggatatatacaatagtctgacatggtaaaacctgttaacttctttctgcagcttcgtttctaggatatttggtcatgctatagaagattctcattcaaaatctggcctagtccattcacttactgtatgtatctctctgttagatccgaggagatctgctgcttcatcgcctttcttcaattcttatagaggtcaaaatatgtttgagtctcctgtcccagtgacccaggagactattggtgccatgctacctaaactcggtaagttggtttccagtgctatagaatcttcccttgaaacgataagatccttcttttatcttaatttgtgccggatgcatatgaatcaaagcacattgcaatgcttaccttttgtgattattttttcagtttctgctgacccatgactctattgctctatttggtctgttccattttgatttatgtggatagtgctaaactgggagttcattaattccatggttgttgggattccttcatagacttccttggatatgtaggaaatatgtcttgcaagttttgttaaaccaaggcttgtcttctcattgtccgtatatgaacaaaatttaatctcttgtgctgcaggtgacatgcttgtgcttctcagtgtaacgtctgacagcaaagtcttacctacaacatatggagagctgaggccgcctcttggaaagcatcgcttgaag

SEQ ID NO: 182504 - DNA, 468 bp, Arabidopsis thaliana landsberg
atggcgaccgggatcgtgtcgatcgcggccgatctgctgggattgacgccggtggcgtttggactgttctggttcaacctggcggcttatgcggtgttgtgggcgttgacgatcggacgcctcacccgctatccccaagccatcgccgcggactttctggaccacacgcgttgcggcgggtttttcacgaccgtcgtggccacctgcgtcatcggcagccaatggctggtgctctacaacgcaacgggggtggcgctggcattcggcattttcggcctgatcctctggtttgggatcacctacgccattttcaccatcctgaccgtcaagaaggagaagccgagcctggccgacgggatcaacggcggctggctgctggcggtggtggcgacgcaggcggtatcggtcatcctcagtcaatgggaaacggcagtcggcgggcacgacccggccctctttctgtcgctg

SEQ ID NO: 182505 - DNA, 171 bp, Arabidopsis thaliana landsberg
atacatcatcagatgtggtggttgccgcagctgtcggaaaaggcggatacgcaggaggattgtactgtccgggaccgggacccggaccagtttgacggccagtgtatggctgggaagacatccaatggtcaagccaattccaagcccattggtttctatcaggcccattag

SEQ ID NO: 182506 - DNA, 2245 bp, Arabidopsis thaliana landsberg
atggaagcggcggtgagaactcttgctcaagctgacaacaaccgtgttcttgcaacaacaaaagacaacttttcaaaagacgttgatgatgaggatgatgacgttgaagataactcgtttgcaagggatcatgttcgacaccaacgtgatgtcacgtaacttactacacgaaacataagaacaattggtttctagatttatcggtggtttgcgtctacaattacagaattcatttctccaagtaaaccccatttcggtatctgaagctcaccagcaagctctcttaatcgaaaaacaagccgttaacgcttcttcttcatggaattcttcaacaacaggtcaatgtggaggttcttttattgatttgggaaacaataagcaaacaaaggttactcttcaccaacctatcccgccacgagcaattgacgcaggcgaaggtacaattgcccatcgtagtaaccgtcttgctaaatgttttggatgtggagaaaaagggcatagaaaatctaattgtcctcatcaagggagatgagggctcttcatcagagatgacccgatatacgatgaggctgtagaggatgaggaaaaggatatgcaggttgagctagtttcaggtgatactgggatgatgttgattacacgtagaagcttcttgatgcccaatagtctcgaagagctttggctgcgtacggacattctttgctcgacttgcacaatacgtggaaaagtttttcgcctcgttatcgattttggtagttgtaccaatgccatttcagaagagactgtttataaattcgccttgtctattgaaccgcatccagctccatatcgcttggcgtggttacaatcgaaaacagataagtgtatttctaagtgatgccgtgtattgttttcatagggagaaaattacaaggatatactttggtgtgatgtcattcccatggatgcgtgtcatctttttgggtagtccatggcaatatgatagacgcacaatgcatgatggctttgtcaacacttacagcttcacatttgaagaaaaacgcatcccattattgcctttccaagagacttcaaacaagagtttctgtgaaaaagttgcggaccaggctaccaaaaaggtcggggaacacaaacctcctaagtattgtactcgatcacaatttttggctgctactcaagagacggatacgatgtcggctccgccgacgaccatggatatgtcatcttcttcaaatgcagctttagcttttcctaactctctccacgatgttgctggtttgtttcatgaggagattcctttagtggttcaggatgacaatgctcattcgaggtcaaattttttctcacccaagagacctgatgtagcgcatcttctcttatcaaacacacttgagctttacgtgtttgatattggtctatctttcttatttttgtttgggctttttacttgggctttggtgttatttcttatttactttttgttctttgacggtgttgctttctagggttttaagtcttatttaaggttacttctatggatttgtaaatgcagcttttggtttatgaataaaacatagaagttcttctcttctaaagtctttgaattctatgttcttttgaaccattgatacaaaagaacaagaaatcttagctatgaatctgctctttagaatccattgatatttaaagttcttttcatatttgatcctgtattacacgacctacaatgaaggacagctatatcactgtcttgatacgcttatggttaactctgactccaaacacgagcaccatgtatcaagacccaatacttcaagatattaggagacatatggttaattaaacacatagaatcatcaatatccttacccaaacaacctctcatatataagcctttacatataaaaatctaaatgataacttatacggcttaatactaccattcacaccatcaattaatattcaatactcatttaaattcacgaaatcaatcaatgaatgtaagactatgtaatcaaaccatatctagaactcaccctaaacgcacacaaccaagcaagcaatcaatcacccacataaatacctgttaagtcaggatattgggctgcgagagatctgtctcgtcctacttgtggccccccttttcagggaccaggtgtttcggcacttcaggcacaagtatggaagcttaaaactacgcggaagcttatgcatttcgcgtggcaatgtatctctggttgtctag

SEQ ID NO: 182507 - DNA, 135 bp, Arabidopsis thaliana landsberg
ctcaaaaaccttttgctttgacaaacccacccgcacaagccgaagtattcgggataagcaccggattcagcgaaagagattttgctatttcacccgatggaactgagattttttatacgctacaatccccacaag

SEQ ID NO: 182508 - DNA, 253 bp, Arabidopsis thaliana landsberg
atgttcgaatctgcccgatcattggggatcaaccccggctgtactaccttgcgggtaactgtatcggatgattactctaccaatcaaaaatctataactcttcagtcaacatatccacccggtgtataccgtaggtcaaagatcctatgatttacggatgagttcaggtgaattaattggtgataccgagcatgtgtcaaatggccctaaatcaagtggccttcgttttctaggagagttctatttgccttaa

SEQ ID NO: 182509 - DNA, 123 bp, Arabidopsis thaliana landsberg
aatatacgggcggggcccagggcgatttggttttggccgggtcacccgtgcaacacagaaacaacacagccgtaatcgcgacactgctgatcgcgtggacaccgctggtgaactgtacaccag

SEQ ID NO: 182510 - DNA, 906 bp, Arabidopsis thaliana landsberg
attaataatgccagattacaagttgttgatctgataggaactaccctgcgactatcaagccttgatcttgcgatctcgtacgtgttcaaaggggaaaaatcggcctcagtagcagctacatccaaagttcaaggtgaaatactcgctccagcactcacaaatgcgaaagtaagtgtgatgctttattctttgagtattggcctaactggggacatgttggtcatatatatgaggtctgagatatagtcactattcatgcagaaagtaaatattgtctaacaatgtcttgttgtgacctgattgactttacatttcactgtttgcaggaattgcttggaaaatatgctgaatggctacaatcaaatactgcccgtggcgggagtctgtctctgaaatcattcgaaaacaaatggccaacatatgtcaattcaaaaacgcaattgggcatagacacatatgacttacttcagaaaaccgataaagtcagcttgaaaacaatacagaacttgagtgccggaaccacatcaaaacgattggaacaagatattcgagaagtggtgagcttcaagtattaaatacttttagtctaagttctaactagaattcagtcgattaaagtgtcttgatcttcatcattgtttaattgtgtcatctgttcaatccgaacctatgatctgacggagatgttaattcagtaccgtattttcccagatacttcgtctcgctattcaagaatcaatctaagtgacacttttgacatagttgagttttgcttgccttttctagttctttgtgacagttggtgggcttggagctgcaggactgtctgcatcacttctaacctcagtgctaccgaccacactggaagatcttcttgctcttggcctttgctccgctggagggtaa

SEQ ID NO: 182511 - DNA, 523 bp, Arabidopsis thaliana landsberg
atgataggaataagtgggatcgaagataaagattcaagaagaacaagtggggtcgaagataacgatttaagcagcgaacttcaagcagagaacttcaaaagctcttcgaggtcaagaagagaacttcagaaacaaaacccactacttcgagatcgacgagcttactttgaaatcgcgagcagatccaaatcgtgtaaaagagaacaagagatttcagatcgtgtaaaagagaagaagagaaaaattttagatcgcggcgtaatcgtgttggctttagggtttgatttgttttttgtgtgatttcttaaagatattaagcgtgtttaggtcatttgttacattaatcgcagctttttaatcgttgccgctgaattaaatcagcgttcaaaattattcgctgcagcattttgacgtaagtacgtgcagcaacaaaatgtacaacgtaatctgcgtttgccgcaaccgtaactacccgcgacgacgaaacgaacaacataattctaatttcggtataatggaatga

SEQ ID NO: 182512 - DNA, 121 bp, Arabidopsis thaliana landsberg
aacatccatctcagcgatgatactgagagcacagtcgggttggttctcgaggaagccctttactcaatggatgagtcaacagtcagaatactttcttcctttgttttgatgaacctcaaag

SEQ ID NO: 182513 - DNA, 84 bp, Arabidopsis thaliana landsberg
atgttcttcacaagtattcgtgtagattacctgctggaattgttttttgtcatagagacacctacgaggagctattctcagatg

SEQ ID NO: 182514 - DNA, 74 bp, Arabidopsis thaliana landsberg
aattcatagattgcactaacgactgcataactagcacggcttccacacgtcaaatgcgggaacttaagccgtaa

SEQ ID NO: 182515 - DNA, 169 bp, Arabidopsis thaliana landsberg
atgggtttcaactgtgatcttattgacaagtcagccacttgtgaagctggacaccatgagttttggaatgaaatgggtgttggaacgtccgagggtcccttgtttactaagttggagtgcgtaatggatattagcaaggaatggagttatgagaagaggttgatggttg

SEQ ID NO: 182516 - DNA, 426 bp, Arabidopsis thaliana landsberg
gatatggaggaagcgatggcaatgcagccacttggtatgtacttcccggcgtcggagtataccaagaagatgaagttagcaacgagatgttatatctcggaggtgttgaagaccttcgctgacttggaacatcctctaacgaatgttgaaaataattattttatggagcatccgagtttcaagcacatctaccacctgccttccggatatacccacaagttaatggggatgtggatgctttttcttcgaacggcatctattaagaagaagtgcaactgcaaggcctatccagctaattatcagagtgctggtaatatgaacttcgccaacaggtacttcaaaaccggggtaattagacgtgaagacgtgaaaaccaagctaatggagatggaaccggctagatcaaaggatacggggatcctctag

SEQ ID NO: 182517 - DNA, 886 bp, Arabidopsis thaliana landsberg
atgttgcatgtagctctcgctcatgttatatccaatgttccggtaacagtcatattggacaataccaaaaaggtgagccttaatttagacttcgtcttttgtacctttttaaacagtttcttattagacattggtctgtgcagctacaaccgttgatactggaaggcttgtctgtcttaagcttggactctgtggagaaagaaactcttttcagtctattactggttttatctggaacgcttactgatactaagggtaagttagatgctgggatacaaaagcttattgcattatataaaatcttgcttcatttgttgaagatcaaacaattcttatatgattcaaattcgtttgcgcccactgataatagggattgtgtatatggttgagttaatgcaatagttgataagcctcaaaaagacattttatattcaattttgccgagaattaaccatttgatctgtttgcaggacaacaatctgccagtgataatgcacatataatcatcgaatgcctgatcaagcttacatcatatccgcatctaatggtgacaaatcattttcttttctatagcatcttcgttttttccaacggaattgattcttgaatcttctaatgataatatgtccacgttaaatggtatgcaggttgttagagaaacatcaattcagtgtcttgttgcgttgttggaattgccgcatagaaggatttatcctttcagaagagaggttagttaaaagatctaacccacatgtttttagtgtagagtaagaaatgtgtctaatgcctttggaatttatttcaaggttttacaagcaatagaaaagtcactcgatgatccgaaacggaaagttcgagaagaagctattaggtgcagacaggcttg

SEQ ID NO: 182518 - DNA, 576 bp, Arabidopsis thaliana landsberg
atgagacatgcaaggaaaaagtttatcagcaaaaacggcagtttcagtggtgctatgactgaattggtgaaacccaggagcccaaacaaaagcagccgaggaatttcggtgtggtatgggaacctaagtgtttcatatgactcctccttgttcttaacaataacttttgctatcaggttccagataagacctataggttgcatgatttcacatgccaaaccggcccaaccagacgtgaaacaataggtcatgaagaagccagcctgcatgtagtcaatgaatattttcataccgttaaccttatagaatataacaaaattgaatatagtcacaagtgtaaaaggaacactgaaaattacctgtgctggaacaagtttcgcaagttgtgcaggtacgtccctcacactattcaagacggtaaactgcctgataacagagcctgacagaatattgacgaagaacacattccagatggtgaagtataaaattttgagacatgcacttttctttcttagactccgagaaacacatccctctaaggttgaaaagtacatcatcaatggtggaacggcataa

SEQ ID NO: 182519 - DNA, 822 bp, Arabidopsis thaliana landsberg
gcagaagatcccttagaagctgacgagtggattcgggttatcgagcaaaagtttggtcttctccgatgctcagagacgcagaagccgttgttcgccgcacaacaactccatggtcctgccagtacctggtggggaaattttatggctattcaacctgacaatcatcaagttacctggaatgagtttaaagcagctttccgtgaacactacatccctgagggagtgctgcatatgaaacaagaggagtttatgaagttacaacaaggcggagatactattactcaatatctcaacaagttcaatcacctgtcgcagtatgccatcgaccaggtgaatacggatttaaagaagaagaactgttttatgcagggactgaatgatcggctacaaaggaaaatggccacatgcatagatctcacatatggaaaggctgtcagcacggccttatctgttgaagccaagaacacaagttctgggaagaataagggattcggtggtgagaggcctaaacagggccaggcgaagaaaccacggtttgtgatccgaccttcaagccaaaatcgccctttttctcgtccaccttcatttcccttcaaacagcctatcattatccgccccaacaatatccccactaccccaaaacagccgggtgccccaggcatcgattccctgccttgcctagttcttcaactgggtgctttaattgcggcaagtcgggacacttcatcaaagactgaccaaattcgaagcggaacaactccaattatcagcaaaacccgggaagttctagccaaggcgagggaaacacgacaaataatgtag

SEQ ID NO: 182520 - DNA, 846 bp, Arabidopsis thaliana landsberg
gcgaggagggcgttgagagcactgaaggcattagtgaagcttcaagcgttggtgaagggacacatagtaaggaaacaaacggctgatatgctgcgtcgaatgcaaacgctggttcggctccaagcacgagctagagcttcgcgttcttctcacgtttctgactcttcccatccgccaacactaatgattccatcttccccacaatctttccatgcacgatgcgtttcagaggctgagtacagtaaagtcattgccatggatcaccaccacaacaaccaccgttcaccgatgggttcaagccggttattagaccaatggaggacagaggaaagtctatggagcgcaccaaagtacaatgaagatgatgacaaaatcctagaagtcgacacttggaagcctcacttcagagagtcaccaaggaaaagaggatctctagtggttcctacaagtgtggagaacagtccacaattaaggtctagaacaggaagcagcagtggtggttcaaggagaaaaactcccttcacgcctgcgagaagcgagtacgagtactactctgggtatcaccctaactacatggctaacactgagtcttacaaagcaaaagtccgatcacaaagcgcaccaagacagagactacaagatttaccttcagagagtggttacaagaggtctatacagggacagtattactactacacgcctgctgcagagcgatcgtttgatcagcgttcggataacgggatcgcgggttacagaggagtttctgatgggttagatcgaaaccaaagtgacaaatcgaagatgtacacttcgtttttcagttctaatcctcttttctttcaatag

SEQ ID NO: 182521 - DNA, 370 bp, Arabidopsis thaliana landsberg
atgcacgtcgtaagtcatttttaaaccgtccaattttgtacgtactccagctgcccgcaagtcagcggcttgaaccaaaatttctatctaaaccgcgaaattcgccccttctgagccagaatgccgcgaataaagatgaagataactgttaacagagcacgcttgttatttctcttgttgattatagtccaggtgagacgttagttcccaatttgtgcttcttttttttaaagcaattttttggtttagattttcgtcccagcactatcgtcaagccagccatcttcacagcccactacaagacccacaactcaaccatcttcccgtccgtcaaaccagccatcgactcaacctacaacacaaccgtcga

SEQ ID NO: 182522 - DNA, 297 bp, Arabidopsis thaliana landsberg
atgcaggaatgtggagatgttcatggaaccaattttccacatagagcacctaagactagtgagtctgtcatgttcataagatttatgtcatcatgtgattcacttacttacctattgtggtttctcatttgtcttctgatgcagagaactatggcgtttgcagtgagtattgctgagaagatagtcactttcttgagacaagcagaaaacacaaggagacaagcaatggcactcctgctacttgttcttctgctgcttgctgcagccgctttctacgtcacacgtctgagattctga

SEQ ID NO: 182523 - DNA, 933 bp, Arabidopsis thaliana landsberg
atggcgaacgaccaggagatgagtggatggactgatcttctccattcttcgactaagcttctggagcaagcggctccttcttctcagtttcctcctattcaggtgcttctactaaccaccactcttttcgatttcgaacctccgtttgtctgttggcttctattatcacgatgagcttgattcgtaatgatatatccgtggtttatagaggaatttggatcaattggaagcattgtcgaggaaactcaaagctaaaaccctaagaaacgaagctccttcacagtctattgctgccactaggtactacaacttcgattttctctttcttcccctaggtcttgcgttttagtgagtccccgagaattcaatattggtcactcaatttagccactcaagagtattggagtgcgagattgaagttaggtccgacgagcttaacatcgtagaatcctctggtcgatagtttgattctggtgtcttcatttttacttggatacgcagactacttgcacgggagggaatcaatgcagatcaattatctcgtgatcttaagtcatttgagttgaaggtgagaattttctctatttcctatctatatctactagcttatgttgctcttctgttctttggataatttgacattttatctgtgtactgaattacctttgcctaagtttttcttttggattgttaatagacgacttttgaagatgtattccctgcggagacaacaagtgttgaagaatacctgcaacaggttttctatatctaaatgctcttcgagaattcccttttcttagattacactacagattgttctatatgcatcttctttgtctttaggttcatgaaatggcaatggtatcggctatacaggaggctcagaaagataatgttcgaagctttaacaactacatgttgaaagtgttggag

SEQ ID NO: 182524 - DNA, 216 bp, Arabidopsis thaliana landsberg
atggcaacttcttctcgttcggagcgatttccgataacgccgagtacggcggctactaatagattgacgattacgcctaattctagggttttgaaaagccctctcactgaagaaatcatgtggaagcggctcaaagatgctgggtttgatgaacaatcgatcaagaatagggataaagctgccttaatcgcttacatcgccaagctagaatctgag

SEQ ID NO: 182525 - DNA, 950 bp, Arabidopsis thaliana landsberg
atgatgttcacgatttcttgttttatggaaaacctactgcagacagcagcaaagaagaggtgtcgaaagcacatggttgaaaccgatgagtatgtttcctgcaactctgaaggttttcttttggactccgtcacaatttctacagcctacctgaaaatgaagaatctttgtctaatcataagcaatgagatagaggctgatataaagatcaccaatgagcatgtactcccaaggtaaaatgattcaatccgaacaaagaacttacaattgtcatctggttttcatcttgagattatctctgagtcttgatattgatttggtcttatgttctcattaccttgtttatcgttcaagctcaatcgacctagcgaatatagctgctgccgtatacagcactcagctgtgtcaccggctcagagcatttctgtcagcagttccaccatcctgcccactgcctcatgtcaatgagcttctgatagcagtttcagattttgagagaaacctcgattcatggggaatcaggttagacattatcatttcggaatcaatcagagtatatgtgggaactcattctttctctttaaccgtttcattttactttacgcagtccggtacagggtggtgtagactctagggggttattccacaactacataatggtttggatacatgatatggaacttagactacttgacagatgcagagcagaaaaggtaaccatcctgataattttgcattgatccttaaaagcacaaagcctatcatctgatatcatctgattgtaattagcaacggatggcttgttttggcaggttccatggtctggtgtaataacaaatcactcaacatccccatttgctgaagacatatatgagagaataaaagattctcttatagagtatgaagtggtaattagtcgatggccacaatacacattgatcttggaaaat

SEQ ID NO: 182526 - DNA, 1066 bp, Arabidopsis thaliana landsberg
atgcccaagatacttcttcataggagcctcgggtcaacccttgttactctggcacgcacaaagaatctcagtatgcgtttactacaaggtatggcccgccttctaggtgttctgtcgagttggtttactgtaacgttagcaggatagttactgcagcaccttagtaactgggtggagccagacaaacttgcccagtcccataaagcatggaaagctggacaagagccaaaaataccggctggtgatttgggttttataaataactaattaatgtctagtcatatgattattcacttgaacacaactcttcttttgttcacatggcagctattatcgaggtcttccccttgcttccacatgctgcatcaaaatttctagatgaacttgtaaccttaaccattgatttagaagcagctcttcctcctgggcaagtgtacagtgagattaatagcccataccgtctaccgcttaccaaatttttgaatcgatatgcggccctcgcggttgattatttcctttctagattaagtgaaccaaaatatttccgaaggtgaggacaatgtcttatgataagctttcgttcaccgcatcttgtaagaagtttactataagcttggagtagattttctaaatatgctaactatacttgctatttcctgtaaaaacaaaactcaggtttatgtatataatccgatcagatgctggccagccgttaagagaagaacttgcaaagtctccacagaagatactgtcatatgcctttcctgaaatttcgccaaaacctgatcctacattgagcacgacggcttcaactcctcctgctacatcatctggagatgaaaatcatatctctgttaaattagagagttctaatgtggcatcaacaaaggctaatatagcatccgatgcatactttcaggggctctatctcatcaaaacaatggtgaaactgatacccagctggttgcagagtaaccgcagtgttttcgataccttggttctcatttggaaatcacctgcaaggatatctcgtttgcagaatgagcaagaactgaatttagttcag

SEQ ID NO: 182527 - DNA, 1747 bp, Arabidopsis thaliana landsberg
gtctttaaccagctaaatttgcctccccaattttctctctccgacgagaggggagaggtattactagcaagtagcccatgggatattctgcctcctagccacaggataggcacccctcaacctttgttcaaggagttggtacgtagctctctgattttatcgatagaaagccagacttgttgtatgttataatgccatgtagcattttatttatattgaaacaatatgatcacaggaaaacgacgaagtggcacggtacagagaaaagtttgctggaagtcagtctgatagacgtgctagggatgaagcagcaaatttggcggatcaacttaataaaacaaaactttcaggttctctattatcattctcaaaatactgttttacattctttaggcttttagtaacttgattatgtactgaactgctgtttattctcccagatgccaagaaacaaaaggcatcatcaaaaggcggaggaaaacccaaacctcaaccagctgctgatcgtgaaataactatggcaagacttgatatccgagttggtaaaattgtgaaggctgagaaacatcccaaggcagatgcattgtatgtagaagaaattgatgttgggggtggtgaaattcgcactgttgtcagtggactggtcaaatatatacctcttgaggaaatgcaggtttgttcaatcaacctagtcatttgtttccttcccgatatcagtatgtaatatacattccaattgatctaatattgtttctggacagaatcgtatggtttgtgttctttgcaacttgaaaccggcgaaaatgagggatattgtgtcacaagcaatggttcttgcagcttccagtagtgatggaagcaaggtagagttcatacgagtctttgacctgtttgtagttctgctaaattcatttcgattgtatataacaaattgtttttgctggaaacatttcaggtggagttagttgagccccctaaaactgctaatattggagagcgagttacatttcccgggtttgaaggcgagccagacgatgtcttatacccaaagaagaaagtatgggagacgcttttggttgatctaaacacaaaagagaatctagttgcttgctacaaagatgtgcccttcactacatctgcaggtgtatgcaaagtttcatccatcaggaatggcacgatccggtaaaagcttacttgagccataagcaaactaatattctccatttctatctttctctgtaagagaaacgaaattcggagattttcatttgaaaatttgattctaattacaaacatgttcttgtaaacttaaagcttggtacaattgtggttattgattgatgttgtgagaaacattcagcttttttaaattgggcccagacgcaaagcaaccacacaacttacgatttcaaatcttttatggtactagttgaggttttgtggatgttgatgtttttcttaattttttaatattctaggtctcgtgtttaaaaatagtcgcatcattctttttttctggcggttcgtaattgtgttcccttgtaatactgtatagggttgtatacaatcgaacgtttgaagtgatcatgtaattcaatcataaatttaaatctttggttattgaaaacattttaagcattctatttttattgacctttaagagattttggcattttattggcttgagttcactgagcgtttccaagttaccaactacaccaacccttcggattcaaatctgtgttga

SEQ ID NO: 182528 - DNA, 57 bp, Arabidopsis thaliana landsberg
atgaagagtctttacctacactctcgaggacatcttgtaaggttggacatcagtaag

SEQ ID NO: 182529 - DNA, 173 bp, Arabidopsis thaliana landsberg
atgtatcaagggaacaggaatgcgggtgaacgatgggatgcaagctattccgaatgcccctgtaccactcttgtgtgttactccaacggatctcagcgcctcgatgtggaaggaatacaggatcgtacagccatggatgattccaaaatgcaagcaccaactggcgctgcaga

SEQ ID NO: 182530 - DNA, 450 bp, Arabidopsis thaliana landsberg
  unsure (1)..(450): unsure at all n locations
aaacgacgagtagccgctacctcgcaccatgaacctccgccgattcaagttttggtcgatgattcggcaagcatgaataggttagagggaggggagggcagcgctcctagcgctgaattacccgcgccggtaagcgnnnnnnnnnnnnnnnnnnnnnnagactgtagccgcttgggttgcatgccgaaagtgacgcgcttgtcggagctatccaaggacacggagcggggatttactcctcttggccgtgtcatggagccttggctttataagggcggcagtgatccgtggcttttaatcagtgatggtggcgattcgcagcctcgcgaaccttggagccaaaaccttcgcaacgccggtcgatcccgttcggccccggagccgactcgtgggatgatcgtcggaaataagtcggatgagcgagcgaatgtgtggatagcgacggcaaac

SEQ ID NO: 182531 - DNA, 877 bp, Arabidopsis thaliana landsberg
atgacaaagaaggatattctttacgatacagtacttgctcgtagttttagcaaaactgatcagaagagactttgctttggagctttcattgcctctcttctcttggtcttcactctttgcactgtcgttaaaccttatctcagccctttaccaatcggtaagtctcttaccacgatttgccgaaaagccagataacgcaaaaacaatcattttaacgtgtatctctttctttctttcttcagtggagttacagttatcagttggcactggtctaaggatgctgagtataacagaattaactaccaacactacaatctccaaagaagaagttatttcaggtcaatatacttcagaattttctctacaattgtcttgttatggtttttagtcattttctgtatagtatgatacagtttgttcttttgattttgtcctgactgaatcttcagagtgcaataaaatggagaaacctatctgtcactgtaacacactaggaagcaaagagttttgcgatgtaagcggcgacgtaagaatccatggtaaatccgcaactgttcttgcggcggtcacgtttgcgttttccgggaattccacgtggtatatgagaccttatgcgagaaaagaccaagttcctgccatgaaacgcgtgagagaatggacggtgaaattagtacaaaacgctagtttatcacgctgcgttaggaatcacagcgttccggcgattcttttctctctcggaggcttctcgttaaacaatttccatgatttcacggacatcgtgattcctctgtacacgacggcgcgtagattcagcggtgaagttcagttcctcgtgacgaacaagaatccgttatggattaacaaatttaaggaatta

SEQ ID NO: 182532 - DNA, 1233 bp, Arabidopsis thaliana landsberg
atggttcattttgggcctccagccgagaaattttcactggagacgcccgaagtgtggtccacagataataaaaactttgatagatggatttgtcagcttgtgtactgtatgatcgctttatgtgaggatgtcccaataaggtatctatttagttccagtttaccatagttatctatttaaagtatacaagtaaaatcttgcactgagtggatcattgttgctgctttgtttgacaggttatgccagaacatagcattgctgaaagctgaaatctctgagcttctattccctagtgttgttgttagtcttgcgggacggatagggatggatatcaatttacatgacttaattacgtcacaggtatctcatgaattttttggatataccaataatgcttcttttttctacttgcttgcattgtttcttctctggatatctctgtttttcgagtcaaatcctcttctcttgtgttccctatttctcggttctgtctttattagagatttacttactttaatgttgccatcttgacctcttctcgacttttgtttacaactgaaataattttctttatagaactatggttgttgtttttgttgatgagttaagcattatactcgtgatttgctcattctagttgtatactgtaaggtaaatcctctagcctggtggctgcgtcatgtttttccattagggtcgtgtatgttgcagaaacagataatttagtggtcactttggctaaagcttgtgatccccattggcaggtgaaagagcatatcttcactgattcaaacaagctaacaaaatcgaagcaagttatgttaaatactctgaatgaactgcggatgtgttatgtcctcgaaagatcgattttttctgggcaaacaaagagagaaaaggttagggtattgatttcatgactgacctgtttgctgtaatgtttttaagttcttgagaaaaatggttatcctgcatatcaataacagagaaaattatgctatccatgggagtgcttaaagacattctgctattctattttttctttacagtgaaatctgtatcatatgggattttcttctataaaagatccggataatatatgagagatgaccaaaactaacgtttggaatgctcttacagaattcaagatcttgttccacagctgctaagattagagatgtggaaagtggatcaaatggaatggcagcgtccataactactaattgggagaag

SEQ ID NO: 182533 - DNA, 509 bp, Arabidopsis thaliana landsberg
atgcatcgtagagcagcaattcaagaatcggatgacgaagaagatgagacttacaacgacgtcgttcctgaatctccttcttcttgtgaagactcaaagatctcaaaaccaactccaaagaaaaggtttgtgaacttttttttggctattattacgaattgttttggaaaacaagataaatgatctgaaaatgttaataattgttgtgtagtaggaggaacgtagagaagagagttgtctcagttccgatagctgacgtggaaggatctaagagcagaggcgaagtatatccaccgtccgattcatgggcctggagaaagtacggacaaaaaccgatcaaaggctcgccttatcccaggtaaacagactctttttttaattaccgttgtgtcctttttgtcgttttaatcagcggcggcttagaaatgagaaagcgtagattagccttgacggtggttgggctaacgtacgcatctcgtagagttttgttgaattacggacgcgtttga

SEQ ID NO: 182534 - DNA, 546 bp, Arabidopsis thaliana landsberg
atggagaaagagagggacttgtcagaaaatcttaatgctgtgatggagaagctgaaatcctctgaagagagacttgagaagcaagcaagagaaatagacgaagctaccacaagaagcatagagcttgaagctttgcataaacactcagagcttaaagttcaaaagacaatggaggattttagtagcagagatacagaggccaagtctttgactgagaaatcgaaagatctcgaggagaaaataagagtatatgaagggaaattggctgaagcatgtggtcaatcactgtctttgcaagaagaacttgatcagtcgtctgcggagaatgagttactagcagatacaaacaaccagctcaagatcaagattcaagaacttgaaggatatctggattctgagaaggaaaccgcaatcgaaaagttaaaccagaaagacacagaagctaaagacttgattacaaagttgaaatcccaagaaaacgtaatcgaggagcacaaaaggcaggatcttaaagcatctggagtagctgatactagaaaagtggag

SEQ ID NO: 182535 - DNA, 593 bp, Arabidopsis thaliana landsberg
gcgggaagaaaaaatggaagagtgtttgttacatggaagattgcacgcgacaatctacgaagttgatcatctccatgctgaaggaggtagatcaggtttcttaggatcggtattgtcttttgtctctctctcatttataagttgtttagagatacaacaacaaaaggtttccttcaatctgtctttaatgttctgtttttaatctttccagatactagcaaatgtagaagaaacaatcggtgttggcaaaggagaaactcagctttacgctacaatcgatcttgagaaagcaagagttggaagaacgaggaaaataacaaaggagccaaaaaacccaaagtggtttgagtcttttcatatttactgtggtcacatggctaaacatgttattttcactgttaaggatgctaatccgattggcgcgacgttgatcggaagaggttatattcctgtggaagatattttgcatggagaagaagttgatagatgggttgatatcttagataatgagaaaaaaccaattgctggaggatcaaagatccatgtgaaactccaatatttcggtgttgaaaaggataaaaactggaatcgtg

SEQ ID NO: 182536 - DNA, 1620 bp, Arabidopsis thaliana landsberg
atgggtgtaaatgaagatttacaagttgatcttgacgatgactcagaattcagtgttctgaataatatggagttcaatgggtttaggaacaatgaaaggctggaacttgatgaatcagaagatgatgggtctgcaattttgttcaagggtgttgataagtcagcccaccactgcaatggcaaatttccagataattcacccattgacttcgtagatattcaatatgataaattggggatagatgaaaagatttatctggaagcccagtctcttggaatatccatagacctaatggcatacgctctagtatcttagttattgtgaaacctatttatgctatgtacttttgggtcttactgaagtttgttattcttcttgtgttttcttacagcctagtatctcaaacgtggaggatgaaggtattgctgacgaaattaaaaagttggaggaggctatctgcaacgaggtcattatttcatcaaatattatatttgttgtttcattatggttttcttgtctccattgcgagttattaagtaatttagggggattctgatgtttcttaagaaatccttgtaaaaggaccaaagtaatatttttgtgtcccatgtttactttctctagagaaaaacaccctttgattgtctctatgttatttttttcagggttctaagaagaaagagattgtggataggctactaaagcctgccatcgagatgaaagaacttcaggagaagtacgaattttcccttactctgctttttgggcactccattgtggatctgaattatgatctgacggtttttcatctttgttttttttttctttccatagggagcttgatcaacttggttatgaaaagctcatcgagatggcatatgaaaaaagcaaggtaaattgactgtaaagttggctcattttcgattttgttttgcttctctggcactgccaatttatacgtagttatttgttaataactttgtttccttcttttacaggcaagtcggcgtcatcacaacgctggtggaaagaattccaataacaagatttcaaagcaggctgcattggcttttgttagaaggacgcttgaacgatgccatcaattcgaaaagacgggcaaaagctgctttagtgagcctgaaattaaggatatgttcattgcggggttggcaacagctgaagatactctcatggacaaggagtataatacgtcaacttcaagtatgttctattgcctacataaaattacggaagctcttttaaatccatatcctcttcactaatttgtatctctctttctttcccttacagcgcccatgggctcacagccaagctcttcgctggcactcattgggcagaactcggagaactatgccaaatcttctgatgttctaccatctgaaaatgctttactagaacaaacgacggggaaagaagatacagcatggtccaatagggtcaagaagagagagttgctgctcgatgatgttggtattgggacacaactctcaagtaatacaaaggggaagagaagcgacagggacagagatgggaaagggcaggcttcatctagaggcggaactaataagatcggccggccttccctgtccaatgctaagg

SEQ ID NO: 182537 - DNA, 1153 bp, Arabidopsis thaliana landsberg
atggaaattccggatgtttctgttggtcgtggatttgaaagaatgcagtctgtgtatgatgagatggttgatatgataggagttcaagatgcaaaggataaattagacatgtatttgaaagaaaaggctgagaatccgaagagtaatatatttggtaatgagaatgatgtcatggattggtggaggcgcaattctggtaagttccctgtattatcagaaatagcaaaagacgtatttgctatgcaagtgtcatcagttgcatcagaatctgcctttagtacaagtggacgccttttggaaccaagtagaagttgtcttagtcattacaccattgaggttttgatgtgcacagaccaatggatgaagttagagatgaagttaaaggagcaagctgctatgagtaatccacatgtatattatgactttgagacgcaagatgagctggagaaaggttagttctactttatgtctttattatacttgtagctttgttggctttcagttactgaaattttgttctttaaataatttttagagtttggaaatttggaactcaacaggagtagcaacgttgaagcactataaaactcatagtcgggttttaggtaataattctcaattgcttcgtatgcatttatctctgttttaagtgcttttggtattgatctatcttcttttcaaaataacaacatgttgtgtttctgatgtttgttgattgatgctcgtatgtttttttatctctagtctctaatacactttgtcttttattgtttcaggtatctttaagacaaagcttgaaatgtttgtgttttgttttcctttttaatttagacaatgaatctgtttgtgtttgctttggtttcagttaagacaaggcagcaatttatctatatgttcgtgtttggttttaattcaaacatgcatcactttatctatatgtctatgtctgcagtttggtttcagaatttagacaatttgcatcgtctgcataagtaaaattggagttgacattattgttttgaaaaatttggttcttttagataaattggttactaaatacccgattttaaccgatactcgaacatacttgaaaatattcggttattcagtggttcttaagtttaatagaggaaccgaactgaactcgaattag

SEQ ID NO: 182538 - DNA, 2379 bp, Arabidopsis thaliana landsberg
gaatgtccatctggcacttataagaacgttactggatctgataaagctctttgtcatctttgtccggctaatgatattccccatcgtgctgtatatgtcacagttcgaggtaattatttggaacactgattgagggataatgattttttgctgtaatgtgttcccctgtctttgtttatattatccttagtgtgtctgatacacaattattgttatgttttacttgtttcttgacaggtggtgttgcagaaacgccttgtccatataaatgcatttcggatagataccacatgccacactgttatactacgcttgaagagttaatatacacatttggtggaccctggctgtttggtgttcttttagtagttgtgctcctcctactagcacttgttttcagcgtcgccagaatgaaatttgtgagcggtgacgaattgcatgggtctgccccgacccagcatggctctcagattgatcactcatttccattcctcgagtcgttgaatgaggtttgcttagtctttatcttttatcggagtctggatgaaagtttttgaagggagataagataacatgtgaatggaaacataacaatagcgccagacttttttgttgttgctattagatggtcgtcctaataacagatacatctgaaatatctcgtcggaactcacaagaaagaaggagaaattttgaaatagattgcgatgcataattattatcctgtgtttgcgctcttgtttcagtagattataaacaattgttaaggtgctccttttatagttgatgtctttgttgtaatattaattttgtgtttaatcgtatcaggtgatggagacgagcagagtggaggagtcacagggccacatgcataggatctatttcttaggtcctaatactttcagtgaaccttggcatctttctcatacacccccagaggaaataaaagagattgtgtaagttattagctgttgattgttttggtgataaaatgttctgaacgtagtttttgaaatacttaggcctctcctgaattttctgtaggtacgaggctgcgtttaatgggtttgttgatgaagtcaatgttatagctgcatatcagtggtgggagggtgcgatttacattatgctttcagttctagtctatcctcttgcatggtcatggcagcaatcacgccggaggctgaaatttcagaaactccgtgactttgttagatcagaatatgaccattcttgtctacgctcgtgtcgttcaagggcattatatgaagggctaaaggtacatattcatctattgacttatgctctcaactgactacctttagaacattgtaaatatttagcaagaaagacaaaaggccaatcatagtttgtgagaattggtcgagcagtcatcatagttctaataggatcttagtcaagacgttggtgcttgtgttcttgaaaacaaggctccatttcattgtttacagatggcaagaaaaaggattgtagtatatgaatcatgagaatttgtgctgtgcaggtagctgctactcctgatttgatgttagctcatctagatttcttccttggtggcgatgaaaagagaagcgatcttcctcctcaggttcatcaaagacttccaatgcctttaatatttggaggcgacggaagttacatggcctattactcactccaaagtgacgatattctgaccagtcttctgagccaggtctgttttttgtttcatatagactgattaatgaggcgtggtattttactgcttcacatgtatagtttattgcctatgactgcaagaacgtaatgaatttatccccttttatagttggtcccaccaaccacttggtaccgctttgtcgctggtctgaacgctcagctacgtctggttcagcaagggaaactgaggtccacgtttcgctctgttatgagatggattgaaactcatggaaaccctgctttgaaaagacatggtgtacgtgttgacctagctaggtttcaggcattgtcttcgtcgtcttgccagtatggaatccttgttcacaccattgcagatgaagtagcatcaacaagaagtgatgatgaaacagaacagcagcatccatggtaagaaatgtcactttgattctctctgctgtttatttgccaaagatccagacgttcattgagttttgaatatgcagggggacacaaattgaaaatcactctggtgatttcagggagaattttcaacctctaagaagcgaaatcaaccacgtgaggcatcgagagtgtggagaaatcatagacattggaagcttacaatttcttaaagaagaaaaagatgtcctttccctcatctccttcttgattcataacacaaaacctgttggtcatcaa

SEQ ID NO: 182539 - DNA, 398 bp, Arabidopsis thaliana landsberg
atgcaagattttgatggcaccaataactccaagcggtttagcgtggctgaacaggatgcaggttttgaaaactataagagaaaataagcgcaaaagaggttaagtgtttgttattaataactgatagttggataatactaattttattcttaaatgtcgaaaataatatgtttttgcgtgctgttaacgatgatttcgtgtgcttagttatcactgattcagagtcggaagatgatgacgatttgtctaaagagtcgtacgcagtggatggttgtgaagatcttgaggatcttaagccggacatgattacaaagaaaattaaagtcaaaattgttcgaaagtttgtatgcccggcgttacgccatagagtggtggaatttatattttcagattctaag

SEQ ID NO: 182540 - DNA, 612 bp, Arabidopsis thaliana landsberg
atggccacgttccagatgaatcatccagaagtatattatctagagacgacggaaacagaggataatgatagagaattatccgtgagcctcttacgagattactattctttcaatctccagcctcttgagtccgattccgttgtgaatcctggtagtgttacaaaggttttagtcaagtggaacgagaaagagcatgagaaatatgactcaagctacttgaatgatctacctaaggttcataaaaatgtcttggcaaagaagacaatgcaagagggaatatctttgttttcatgcttggaagcctttctagcagaagagcctctaggaccagatgacatgtggtattgtcctggttgcaaagaacatagacaagcgaacaagaagctagacttgtggaagttgccagatattcttgtgttccacctgaaacggttcacgtatagcagatatttcaagaataagattgatacgttagtgaacttccatattcacgatctagatcttagcaagtacgtaaagaacgaagacggtcagtcatatctttacgagctgtatgcgattagcaatcattatggtggccttgcccctgcccactacactgcttacgctaag

SEQ ID NO: 182541 - DNA, 243 bp, Arabidopsis thaliana landsberg
aatgcacctgaatcaatcgtcggcgccactcctttcacggataagccagttatgtctacagaactgagaagaagccatggagaaggaggagaagaggagagcaatacctggatggaggagaccaaccactttggctatgacgtccacgtaggatctcccttgccacttatttcccactacccagacaacactctcgtgtttgacccatgtttttcctttaccgatttctttcctctgctttag

SEQ ID NO: 182542 - DNA, 157 bp, Arabidopsis thaliana landsberg
atggctgcaagaagactcaaaggaaaagacagcaaagcagttaccgccatagccattgataaagataagaacagccaacacgctttgaaatgggctgttgataatatcatcatcgattctccaaactgtatccttctccatgttcaaaccaaactga

SEQ ID NO: 182543 - DNA, 289 bp, Arabidopsis thaliana landsberg
gccatcgaagaatctccgtgttgtgtctcagcttccccctgggggtactcgacctctactccttcgtcgcggccagcaccgctccgattatactcgacctctcttcttctgctgcggccagcaccgcggtcacgtaagctacgggactagagaagtcatgactgcagcattcgctatactcgaccacatcgtcattcgctatactcgaccacatcgctatactggagtgtattgttgttccttcaaagccagaatctatttccatcagctcttcatacttatctcctga

SEQ ID NO: 182544 - DNA, 1964 bp, Arabidopsis thaliana landsberg
atgttttggttaatcgcagcgactgctgctacgggatatatagctaagcagttgcagaatgtaaccaaaggtaaagataacgttcttgaatcttcttctgaagatgtgaagccagaatctcctcctggttgcttgcttagcagattagtaagagtcaaaaaggctaatgaaaataagtttggggatgagaaaatgctatcagatggggataatccagatgcatctacgagtggggaaagctcaggatattacgaaactaaccattcagatactttgttcggtttgatgcccgagttcccggagatggaactggggacttggaaaaccagtggtaatcttgtaggtgacacacagttgaattcttcatttaggagaaaccagcggttcaggcgattaatcaaacctttgagttcgatggatagctgcttaatgtctcggtttcatagagaacaaatgaccatagaagattacatgactagcccatttccatcacctcacgcttcagtttcaaggccattacttgtcactgatggtactcgagtaattagcaagagtgctgcagattctttgtggctgagccaacatattgttctcagtgaagataaggctacattaagttgtggagtccccggagtggagtcttcgattgagagagtgggaaatgagaagagcaagagtagaaaacatggtaaagttgttgcaatctttgacttgtaattatttatactaaatgattgagtagactgtccatggcatttaagtttctttttttcaggactaggtgatgcaacaatgttgttacaaatcgggatctcgattggcatcatgtcctcatttatggcaagccaagccgaagtgagcaaagtcaaacaagagctgaagcaaacagagaacttggtgcatgatttagaagatgagcttgagatgaaagacacgttgatagtgaaggagatagatattgaaaaggcagctgagagttcagaatctataagtaatattgaagcagagcttgaagcggaacttgaaaggctagaaattaacatgaattcctccaacattgagacaagactctctgatataatagaggtgtgttcgtctacacttttaactatgctctttactttgccttgcctgaatcaccaccaaaaactcaaacaagatattcaaaagttcaattttgatttttgttgcagatggagccggattgtgaggtagaatttgcacagggtgaactgagagctgatcgggttaaagggaagcgtttagatgaaactgagtccaaccaagacccaagtggtaactccacacctgagtcaggaaactatgctgtctcacctcgcgaattgagcttgcggttgcataaagttatcaattcacgtcttgagaaacggattggagagctcgagactgcactccaagagagccaaaggaaggtagagcagctagtcatggaatcagaaagcaagaagaagtcatggtcaagattatgggaaacccgtgaagtgatgacctataagagtgaatcaaaaatcccagttgctatagagcacaccaagactaatcttgcggagatgcaacccctggttatgaacttaactggggaagcacttgatgcattcaatgagtcttacgacgaattgatgaaaataaacgatgactcggaagatgatgatggtgattcaccattggagatgcaagatagcgggatccaccaagaagatttatcttcaacaaacaaaagctcaccttggagccatcacaaggatgatttcaaggtgcaggagcaggagctgctagaccttattggtattgaagacgaagaagaaaaaagcagtgactttgagagtgaaatggagaagcaactgataaagcagattgttgagaaaacaaaacaagggtctcctgttgtgttgaatgcacagaagatcctatttctcatggaagaaactgaacataatctgtaa

SEQ ID NO: 182545 - DNA, 169 bp, Arabidopsis thaliana landsberg
atggccaaattcttcattgtcttccttgcctctgccctatgtttcaccaccctcgttcacttcaccgcagctgatgccgacgactttgacaaattccacatcaagggctccgtctactgcgacacatgccgtgtccaattcatcacccgtatcagcaaatttctcgagg

SEQ ID NO: 182546 - DNA, 501 bp, Arabidopsis thaliana landsberg
gtgatagacgtgtgcagtgataattgtttgatttattggagagaagacgaaggccgcacttcatgtcgtttttatcgtaaacctcggtatcaggacactagtggaagagttcccataccatataaacggatgtggtatttgcctttagcagagaggttgaagaggttgtatcaatcagagcgtacaacaggatcaatgagatggcatgctgaatatacatcagacagtgtaatagcgcgcccatcaaatgtagaagcatggaaacattttcaatcagtgtatcctaactttgcgtatgagccaatgaacgtttatttgggtttgtctacagatggttttaatccttttggaaagcatggaagggagtattcattgtggctagttattgtgacaccttataattttccgccatctttgtgtatgaaacgagagtttcttttcctaaccattcttgttcctggtccagatcatcccaagaaagcacttgatgtgtttctatag

SEQ ID NO: 182547 - DNA, 127 bp, Arabidopsis thaliana landsberg
tcctcacccgtccccaacttccatcgtggttcgagatgaccggattatgattttggtttcagtaatagaagacaatgccaattcggtggatttgctttatgacattttttggtcccaaactaagtga

SEQ ID NO: 182548 - DNA, 501 bp, Arabidopsis thaliana landsberg
  unsure (1)..(501): unsure at all n locations
atggactcgatcggtgggcatgacttcctacaccgaatggagtctactcaataaatcaagctactatgaagctctcaatattgaggaacannnnnnnnnnnnnnnnnnnnnccctgaaacctatgattagaaggcaaggctatggaattcgaagtgtccacctaagatcaaactgtttctatggaaagcattgcaaaatgccttacctgttggagagaatctgaagtcctgagatatcctggaatcagctcgttgtatccattgtgaagctgatgaggattcgatcctacacctcttcttcaattgtcaatttgcaaagaaattatgggaattggcccccttcaagaactcactaaacttggagcgaatctcaagcttcatatccggtttcgaagcctccaaattactaacatgcctccctccaatcgggcttggagaaggatttttggcaccatggattctttgggtgatttggacggcaaggaacaacaagatctttaa

SEQ ID NO: 182549 - DNA, 1894 bp, Arabidopsis thaliana landsberg
atgtcaaatcgtggtggtggtggtcacggcggcgctagtcgtggtcgaggaggtggacgaaggtctgaccagagacaagatcagtcttctggtcaagttgcttggccgggtttacaacaaagctacggtggtcgtggtggttctgtttccgccggtagaggtcgtggaaacgtcggaagaggtgaaaatactggagatctgacggcgacgcaagttccggttgcttctgctgtttctggcgggagaggtcgtggtaacatcggagatccgacgttttctgttgcgtcttcgtctaagacggtgtctgttgcttcttcatctaaagaggaaagtaagaatacggaggtttctgagaccatgtcgaaccttcagattacttcgacggagacgaaacctgaaatgacgtcacttcctccggcgtcatctaaagcggttacgtttccggtacggccaggacgtggtactttggggaagaaagtcatggttcgtgcgaatcatttccttgttcaagttgctgatcgtgatctctaccattacgatgtaagtttccggccattttttctcgacgaatctgtacttgtttgtcgtttttatgtgtcgatttcaaatattgtcgtttctatttcatcaagttatagtgttttttgctttttgttgttgttcagtttttgtaaaccttgtacgtcaaaagatgaacttttttttgtcgtttgtgttcatctgaagttgttctttcagtgagatttctgactgaaaatttgttagtttctgcatcattggttttttttttttttttgctttcattcgacgaatatactgttgtttgttcctttttattgctgatctgatgtatttcacaaagttcctagagagagttttgacatgatgaatctgcggttgtgacttgttttagtcatatagagattttttggctaaaagttattgttattgtgttataggtttcgatcaatcctgaggttatatcaaagacagtgaacagaaacgtgatgaaacttctggttaagaattataaagactctcacttgggagggaagtcaccagcgtatgatggaaggaaaagcctctatactgctggtccattaccttttgattcgaaagagtttgttgtgaatctggcggagaaaagagctgacggttcctctgggtaatgtcttgttttaactctttgtgaatgtgtttgtatcgccttgtttttcatagttttttttggcattgtgactccttttggcaggaaggacagaccgtttaaagttgctgtaaagaatgtgacaagcactgatctttatcagttgcaacagttccatgatcgtaagcaaagagaggctccatatgatactatccaagtgcttgatgttgttcttagggataagccctctaatgagtaagaaatctgaaatttgcataaacttcagtattgtcaaaagctatgcataaacttaacatttccctgttttgctttctgttcagttatgtctctgttgggaggtcttttttccacactagtttgggaaaggacgcaagagatggtaggggtgagcttggagatggtattgagtactggagaggttatttccaaagtctaaggctgactcagatgggtttgtctctgaacattggtaagaatatgcttaatgttatctggattggtgatgttgattaattcttataaatttatttgatttagatttgaataattctactttatggttttaactgcagatgattttgattcattatagccgtgttgttttcttatgatgcagacgtttcagcaagatcattttatgaaccgattgttgtcactgactttattagcaagtttctgaatataagggacttaaacaggccacttagagactcagatcgacttaag

SEQ ID NO: 182550 - DNA, 424 bp, Arabidopsis thaliana landsberg
atgggaggcagtaagatgtccaatgactatgaaattgatgtcgaagctgggatgtcttctctttctatagtcaacacacccattgaagcaccaattgtatcatcttacaatgaccggatccggccattgcttgacactgtcgacagattgagaaacctgaatgtgatgagagaagggatccagcttcccaccattgtggtggttggagaccagtcttcagggaagtcgagtgttcttgagtcgttggcaggaatcaatttgcctcgtggacaaggaatctgcactagggttcctctagtcatgaggcttcagcgaagctccagccctgaaccagagatttggctggaatacagtgacaaagttgttcccacagatgaagaacacgtcgctgaagctatttgtgctgcaacagatgtgatagctg

SEQ ID NO: 182551 - DNA, 187 bp, Arabidopsis thaliana landsberg
tggcggcagaagaaggtcatcggcaacaaggagatcgaggacatctttgccaagatcgcacgtatcccgcagaagaacatctctagtgaagactgcaacgcgctgaagacactggaatgggacttaaagatcgtggtgttgggggaggataaagaaataaaagccctaaaaacggctcatcaagatg

SEQ ID NO: 182552 - DNA, 152 bp, Arabidopsis thaliana landsberg
caaaagaagaagacagattcaaagttggcgacgaaccttgggctaacgactttcattattatcatcaaagtcgttggttctgtaattgggctagcgactttcattattatcgtcatgttgttgatccgtcagatgaagaggaagaagaataa

SEQ ID NO: 182553 - DNA, 298 bp, Arabidopsis thaliana landsberg
atgcgaaaggtgctaattaagcttgacagtgaagaggattcttatcaagttttggaaaattttaatggagattccttggttgggaagaagtatgaacctttgtttgattacttttagcgatttctcaagtgtgacttttcgactagtagcagatgattatgtcatgaatgatagtggtactggtattgtccattgtgctcctgtctttggtgcagatgactatcgtgtttgtcttgagaacgagataattaagaaggttagatttgacaacatcttccttatatcaccacctttaaca

SEQ ID NO: 182554 - DNA, 138 bp, Arabidopsis thaliana landsberg
ctgcccggaaagagcaaagcggttgagttcggtgggtttcagacaagcggcccctccattgtcatccacactctcctcttcttcgccttcatcaccatctccctcatcgcccttcacatccacatctacgccgcctaa

SEQ ID NO: 182555 - DNA, 709 bp, Arabidopsis thaliana landsberg
atgatgcgttccgttgacgtctacgtgaaaactctaggccctcccgtccgttcaattctctactcgatctttacctctcagcaaaaaccttcgtcgctgccttcgcttccatttcacttttcgttgcgttcgtcgtcgaatattcccactcgttgtttctccaatgtcgttgcgaaatccaattctccgatttacgattttcaaggattccgaaatctcttcactgagagggctatctcttcgtctacgacgacccccgtcgcttctgctcagccgcagcagcttcagaatcagaatcagcatccagctgaggttgatgaagagatttctatgggcttagaggacgaagccaagctttctattcctgtgcgagcttatttcttctccactaggtataattttgttcacaaactttaaaagtggatgtatttgccaatgtgttttgatgattgaagtagtttttggattgtaaattgtgtgcagcgttgatttgagaagcttaatagagcagaacaagcagaacttcatcccacctacttcgcgtatgactaactatgttgttcttaagtttggcaatcattctgatctcactgtaagttcaatcttatacctttattcagttttatgaagctgaggtaccttctcattgtgaaatgttgattcttctatggattgtttcaggatactactcgaggacgcataagtggga

SEQ ID NO: 182556 - DNA, 1191 bp, Arabidopsis thaliana landsberg
atgaacggagaaatctctcgtccgccggagctaatatcgtcccggaatccttgcaagagttttgagaatgcaatacacaaagcagctcaggcagagctcgccgagctagcgaaaagcgacgcgaacggcggcggaaagagtaaagtgaaaggaccttggttgccggagcaagatgaggctctcacgaggcttgtgaaaatgtgtgggccgaggaactggaatctaatctcccgtggaatcccaggtcgctctggtaaatcttgccgattacgttggtgtaatcagctcgatcctatcctcaaacgaaaacctttctctggtaaaacacgattctcgatcttctttttgattctccttgattccagattcctgctttggtcgatttctctggatttctctttatctatgtctagtgttagctattgttgattcaggatctttgttgtggtacttgattcatatgattttctcagtagtgctaatgagaagcggtgttttagcttatttttgaaaaatttgtgagagatttgtagattggtctgttttgctggtgattttactggatatgaacttttcttcagaatcagattcttatgtatatggagatggtttaataggttttagcattctcttggattcaagatgtttatgttgtaattctttagagatgtggtttttgatgattagtgtgtgagttatgtgttttcacatgtttgtataatgtttttatgaaaatgatttgaaatgcagatgaggaggagcatatgataatgtctgcacaggcggttcttgggaacaaatggtctgtgattgctaaactcttacctgggagaacagataatgccattaagaatcattggaactctaatcttagacgtaaaccagcagaacaatggaagattcctctattgatgtctaatacagagatagtatatcaaatgtatccatcaatggtcagaaggatatcaaacgcatcccccaaaaaacatctacctcaagaagaagaaaccggtgtattaagtgatgataaaatggatgatgaagcaaaggagcctcctcgggagcaaaatagtaaaactggtgtttatcgtccagtggctcgaatgggtgctttcagtgtctgtaaaccaggatacatggctccatgtgagggacctttggttcaagcatcaagacctgactcattggctg

SEQ ID NO: 182557 - DNA, 721 bp, Arabidopsis thaliana landsberg
atgaacaaaacgtcaagttctatgaatactaaccgttatgatgaggtaaatggaagagcagtgtgattagatccacccgtaatggattgtgttggaaaccaggatatcctcaactttgtcggtttgctatctggattttccaatagtcggattgagttgacccttctgcattcatcaaccagaaaataatctaaagaaatatagatcatgatttctaattagactaaacaaaaatgtttttttagaaaacaaaataaaatgactcataactctaaacacaaaaaataataagaatcaaaaataaaagcatagttaataagcgcctctcccagacttaaatatcattgtccccaatggcattcaaatccgaagagagaagaaaacataaaccaaaaataaaagaaataaaaagaaaaaaaaatcataccaatgggttccctctcactaagcgcttaattagagtcaataggttcacttggaggagttcaggacttggatggaggggtggaggacttgtgttgcattcgcgccttccaaggcggtatgtaaacagatcggccttgtgcagcagttggtgttaatcgacacagttgtttgtgtcgattcgatactctctccgtttcctgcaagatcaacagaaaaaactagctttcgcgaaactcgatgctcgtttaccggtgaagcacacttcgaagaatataaagaaataatcgaaggataa

SEQ ID NO: 182558 - DNA, 89 bp, Arabidopsis thaliana landsberg
gtggcatagatcctctagaagaggttctaagtagacgtcaatgttattaccaggttgttgtgcaccaggaattagcaaagtcaacatga

SEQ ID NO: 182559 - DNA, 1271 bp, Arabidopsis thaliana landsberg
  unsure (1)..(1271): unsure at all n locations
atgtctggagaagatgctaccaacgcttcattagccgaaaccctcaagaccatgcaacaaactatggccgaaatggcgcagaagtttttgaatgtggaaaaaaccgtcgaaacactgcaaaaacccaggtatcactcagtcaaaatgttagcactattcagtttcgtgttcgttctttgaatgaaggcaattcctttggagtttgaagaactatcttcggttccccaaattcccttccgtgaaatgcagcaagtaatcaaacaaccccgtatggtacaaaagcggacatccaaccggaagatggtgaaacgcatcccgaagatgacaaccagttcgcgaatcaacacgagcaagaaaatttcaatcagttcgaaaccaagagagaaggaagccgggannnnnnnnnnnnnnnnnnnnnnnnnnnnnnngctacaagctcggaatcagatatcaaccgggtcatcgaagaagctaggcaaacaccttttatcccgcaaattgctagcttgagaatcagagattctcgaaagcttaatctagaactgtacaatggtttggaggatccaaaaagttatctcgcagcttttctaattgttgcaggcagggttgacttggatgaagccgaaaaaaatgcgagatacttcanactcttttctgaaaatctgagcagacaagcgctaatgtggtttacctagttggaaacagggtcaatcagtaacttcaaagaattgtcaaccatgttcttgaaacagtattccattcttatggataaaagcatttcagacaccgatctttttcacaagggtcgaatgaatcacttcggacttttatcactaagttcaagaatgtactttcgaagctcccaaggatttcgcaacacttagttttgtcagccttacggaaaggtttgtggcacgattcaagattcaaagaggatttaatacttctcaagccggaaacaattcaagatgtgcttttccaagcaaacaactagatggaagtagaagatggaaaaaaaagctttgcgaaaaggaataagccaacaaaaccggcggtcaccttccctaccaagaaattcgaaccctcaaaaaatcaaggaccaaggaagttcggatcacaacctttcaacaataacgtcgagaaatagttccaaggaaagggaaaatcaaacacttgggtcagagaagaaagtttatactgcgactatagtgtctttaaaacgcaactcgtgtaactatgggccagcggagacctttccaaattcaacatag

SEQ ID NO: 182560 - DNA, 80 bp, Arabidopsis thaliana landsberg
tgaaccggataggatcaagttcagatcacatcgccgccgacgagctgtgcgctcggattcgtgctcgcgttggcaattaa

SEQ ID NO: 182561 - DNA, 1145 bp, Arabidopsis thaliana landsberg
atggtacgaaatctgaaatgtagctcagcacgatatactctaattcttctaatcatcatgaaaattgatctacaaaatcctcaccttgagctggttatctttggcaggtggtacgcgaagagatttttgcatcctgatgttgtgtcagcttatgagtacatatttatatgggatgaagatcttggagtggagcatttcaatgcggataagtaagttattacttgtctgaagtagcagaacaatcttatattttacattttgtgatggaattctattaaaacttcaggtacattgagttagttaagaagcatggtttagagatttctcaaccaggcttagagcctaacaatggactcacatgggaaatgacaaagaggagaggtgaccgggaagtccataagtaagatctccttctctaaccattcttctttgcctttctttcaaatttggttctgaattaagaaatgtgttgttacttactgttgaacagagatacaaaagagaaaccaggatggtgtaaagacccacatttacctccatgtgccgcgtaagtctctctttgaaacgttctctttagagcaactcaagagtgtttagtcattgtcagtactgagttttctgaaaaaaattccctctcacaggtttgttgaaataatggcgcctgtattttctcgagaagcatggcgatgtgtgtggcatatgattcaggttcgtcgatctgtagatacatagtcctagtcttagtccatcaaaataatgcttgctgttttgatcagtttgtttatgtttctgatgcagaatgatctgggtcatggatggggtctcgactttgcgcttataagatgcgttgaagtaagttgtttttgcccccaccttgcttaccttaataacacaatattctcttgactgatgatgaaaatttgtgtgttttgcttttgcagcctgctcatgagaagattggtgttgtggattcgcaatggataatacataaagtgataccttcacttggaagtcaaggaaagtcagagaatgggaaagctccatggcaaggagtgagagatagatgcaaaatggaatggacaatgtttcagaaccgattggctgatgctgataaagagtatcttgggaagatggtgaaagattag

SEQ ID NO: 182562 - DNA, 323 bp, Arabidopsis thaliana landsberg
atgtacgtgacgagaacattgtcgcagttcagaaaatatcagaagacgctctcggaagagtcaccggaaggtccgttctccggcgttttggttatcacagatgaagaagctgaaacagaggatacgttctgtttcgggatgtgtacgaggacaaaaatagagaagcttccgttacctcaggacaagatcttatcagttgttcacttagacagttctggtaacagagagacttcggttaagaaggtcttgttcataccggctctcgatcaacctttgtcttccaatcggtattacgttgttcacgctagaggcagacacaaagg

SEQ ID NO: 182563 - DNA, 15 bp, Arabidopsis thaliana landsberg
atgcttgacatgttg

SEQ ID NO: 182564 - DNA, 63 bp, Arabidopsis thaliana landsberg
gtggagcatgtattacttgagagactgacaaactttatgactgttgatctacaagaagcaaag

SEQ ID NO: 182565 - DNA, 578 bp, Arabidopsis thaliana landsberg
gcaaaacccacctggaagtgtatctggaaggcatctgggaaacgcagcacatcgtcttgtttccaacagcttacagatgggaacagaccgatatcagacaccaacagatgtcccggctcctggttatggctacaatcctccgcagtatgttccaccaattccttaccaacatggtggctatatggctccacctggtgcacaaggctatgctcagccagctccttaccaaagccgaggtgggtaccaacctcgtggacctagtgggagattcccatcagagccttaccagagtcaatcacgggaaggtcaacatgcctctagaggaggggggtattctggtaatcatcagaatcaacatcaacaacaacaatggcatggtcaaggtgggtccgagcaaaataacccacgagggtataatggtcagcatcatcatcaacaaggtggtgaccatgaccgcagaggaagaggaagaggaagtcatcatcatgatcaaggcgggaatcctagacatcgatattgagcaggatggtactactgctgaatctctcctaaccgtatcaaccatcaggtgtagttga

SEQ ID NO: 182566 - DNA, 14 bp, Arabidopsis thaliana landsberg
atggccgggaaaaa

SEQ ID NO: 182567 - DNA, 908 bp, Arabidopsis thaliana landsberg
aaacaatcagcaagatctattcaacgtctttggctcaatgtttacggtggttctattctctggaataaacaattgctcaacagtgatattttgcgttgcaaccgaacgaaatgtcttctaccgcgaaagattttcccgtatgtacaactcatgggcgtattcccttgctcaggttaaaactttttctcaatcaaaccattaaggaacgaaaattaacaactcagccattggttttgactttaaggcttaagtttgcaggtgttggttgaaattccatactcattgttccagtctattgtatatgtgataatcgtatatcctatggttggctatcactggtcggtctacaaagtgttttggagcttctactcaattttctgctccttgcttatcttcaactatttcggcatgcttttagttgtggtgaccccaaacgttcacattgcttttactctccgctcttcattttacgcaatcgtcaatctctttgctggttatgtcatgccaaaacctgtaagtcctctcttacctctcttcaccaagtttgtgaagttcgattcttattatgtgaaagaaagaaaaagagttagaaacagcatcaagatatgagattttgagagtttttgttgttgatgatgcagaacattccgaggtggtggatttggatgtattacttgagcccgacgtcatgggttttgaacggattgctcacatcgcagtatggagatatggagaaagagatattagcatttggagaaaagaagaaagtttcagatttcttggaagattattttggctacagatatgactctttggctcttgtagctgttgttcttattgccttccccattctcttagcatctctatttgccttcttcattggtaaactcaatttccaaaagaagtga

SEQ ID NO: 182568 - DNA, 1114 bp, Arabidopsis thaliana landsberg
atgaagaataacacgttcgatctcgcagagctcgacgatggcattggaataaatgacaaggtagattatcttccattcataaaccatagtctatagtagtatggatccagaaaagtagaaaaatgaactgtggtttataaatggtgtataaaaagcagtccaatccttaaacggatttgtccactccaaccgccgcaattatacaaactcttagagtgttaaagcataattcggaaacaattaacaaaaaaatcatatcacatcgagtctatcttaaaatatattcgatcttaaataggggttaatttcaaaaggtgtttgctttagatacaagttgtatatattggtctatttagttatcattaacttttcatgatcgttaattctgtaattattattttttgttttgtggattctttagtaattagtactaatatccatgtgactcttccatgttctcctatacccttcacaatatatatatattccaataactcttgattaagtagaccacatccggtcattttgtgagtaaaccatttttgttttgattacacattcgtaagacgaaatgtcatttgttcctcaattctttctcatgaccaaaacgtcaattacaagagaagtaataagaaaattttctccctagtctctttattattcatatcttattgttataaaataaaacacatatatattacacatatcttattgttatgttaacttttcttcttttggttttgattctttttgatatgttaactttttcgttatgttaacattgattgccagatcgtggagacaaggaaatgaggtcttgtatatacaaattaacaggtttccctaagaaccttgttaagaagacacaagaaaaaaagatagagaaaacaagttttggtgtggtgaataaacaatatggagtaccttcttccgatgatactcgtagtttccgtactgttaggcgttgtgtttgtctcacttattgttattgtttggatttactttgcccgcaagcaagcacgagataactccaatttttttgatgtcccaccgatatagttatttcgccatttaacaattatgttatttttttggttttgttctttagatttga

SEQ ID NO: 182569 - DNA, 117 bp, Arabidopsis thaliana landsberg
ctatatgatgacgcaagggtcgagaagtatgtagaccgcagaagaaaaacgaaaactgttgaattatcaatgagactccaaatcgaaaccgaaccgtacaatatcataaaattctaa

SEQ ID NO: 182570 - DNA, 209 bp, Arabidopsis thaliana landsberg
atgaaaatcgccgagatctctggagatcgaagaaaatttgagaaattcgattgggaggatcgagatctgttcatgggtataaatctttgttttttttctttctagaaacgagtagacatggtgaagaagaagaagatgaaggatcggcggtgaagatggtttcacgaacttttcgttttgacaagaagagagggaacagaggtggctag

SEQ ID NO: 182571 - DNA, 114 bp, Arabidopsis thaliana landsberg
tgccatttataatgacaatcttggtatagttgcacagtcactcaatgccacaattggaaacacgggattgtacaagaagctgtactacgtcgaaggcaacggatttgagatggg

SEQ ID NO: 182572 - DNA, 190 bp, Arabidopsis thaliana landsberg
atgactgtgccgacaaggacacatgagagcaccgacgtcgtcagcatcactaccggctacggcagcgacacctttagctgcgacactaacaccatatcgctctggcagagaccgttcaccttctggacctacctcccacaactctctgcgaccctctgcgagtggcgccgtgtccgcgatcgcggccaca

SEQ ID NO: 182573 - DNA, 388 bp, Arabidopsis thaliana landsberg
atggcgcaactgcaaaagagcattgacgcggcgtcggatgctgctgccagcgccaagttcggcaagatgtctctcgacgccgatgcggtgacgcgctcggtcattcccgaaattgctaaaatcgagcaactggaaggcgcactatccaagctcaacgccttgaaggatgcgcaatcgtccgctggcatcagcaatctgccggaaacggaatccgccacccgcgctattgaggtgcagcttaatctgctgaaagagcagaccgccgaatccgaccggcacaacgccaaggttctggaaatctctggcagttatcagggtgtttcgacgcagacggcgctaatccttgaaaagcaacagcaacaactcgccgtggcatcggccataacgg

SEQ ID NO: 182574 - DNA, 180 bp, Arabidopsis thaliana landsberg
atgaatggagtaaacctaaaaagcagaacattgatgagttctgcagttaaagaaagatcattacttgatgcttatgatgacgagtatgggggagtaatagtagatcatggaaaattaccatcaaacccttatgctttcgcttctatgcttcgagcttctctatccgattggagaagaaag

SEQ ID NO: 182575 - DNA, 107 bp, Arabidopsis thaliana landsberg
gtgaggtccctgacgacggcagcgcacggaggagctccggcgagcgcgtagaccggccgagcggggccacgaccggtgctcagctgcggcctaaaccaaattcataa

SEQ ID NO: 182576 - DNA, 489 bp, Arabidopsis thaliana landsberg
atgggaattgctctaacggtcgtcactatcctgctagtgctcacgttttggatatattggaagagcctgtcggacagccgcgcgctgcggtcgtatgcccttctgatccttcttgacgagggcgtctaccacgcgcaacggcaagggctaatccagctggttgagacctcgtctgccaaaagcgcgaacgagctcgctacgaaggtcatgttgtcggtcgacgatctggccaaccggctagccaagacctcaacgccgggcgtccacgcggggttgtggcagataaagaaggcggcgctggcctccgggtaacagtgcaaccgcgcgccggctagtcgtcgaattctgagaacgggccgcccacgtccaacatctcgacgctcaggccgatggggtttggcacttgctgcttcgtcgaccgtccgaatgcactggccagcaccaccggccgccgtgacggttcatcgagcttccagtgggcaccgataa

SEQ ID NO: 182577 - DNA, 1355 bp, Arabidopsis thaliana landsberg
atggagaacattggtgacgaagaagagaacttaaatgacagagaaaaaattaaagcagaagatgatgagtcagatttggatatcatgcttatgttattggaaaatgcaacaacgagtacttttgttgatcgtcccgttcgtcgatccgtctcaagagttgggtataattatatccaaaatgctcttacagttaatcctgcgcatttccgccagttatatcgtatggaaccagaagtgtttcataaactttgtgatgttgtaagagtgaagacatggctaagagatacacgatatatatgcgtcgaggaaattttggctacttttttactcactgttggccaaaactcaagatactgttacacaatggacacatttcagagatcaagttattctacaaacataaattttcataaggcacttaaggcattagctttcctcgcaccaagttggatggctaaacctgaagttagagtacctgcaaagataagagaaagtacaagcttttacccttatttcaaggtaatttatttatataacgttactatttattgagattgactagcatataaaaatttctattaatatatataggattgcattggagccattgatggaacacacatttttgcaatggtaccaacatgtgatgcagctagttttcgtaatcggaaagggttcatatcacaaaatgttctagctgcttgcaactttgatctacaatttatatacgtccttagtggatgggaaggttcagcacatgattcaaaagtacttaatgatgctttaacaaggaacactaacaggctacaagttccagaaggtatttattttctatgtatccataagttcttctatattttatttaagaagaataatttatcttgtattttttaatttacaggaaaattttatctagttgattgtggatatgcaaatcaccgcaagttcttagctatcatcttcaagattttagaggtcaaggccgcgatccaaaaacccagaatgagctgttcaatctacgtcatgcttctttgaggaatgtcatcgaaagaatctttggtattttcaaatcccgttttctgatttttaaatcagcacctccatatccttttaagactcaaacagagctagttcttgcttgcgctggattacataattttcttcgtcaagaatgtcgatcagatgagtttcctcctgaaacaagtattaatgaagagaatagcgatgacaatgaagaaaacaactatgaagaaaatggagatgttggaattctggaatcccaacaaagagaatatgctaacaattggagagacacaatatctcataatatgttgatggatgctacaggagcttga

SEQ ID NO: 182578 - DNA, 234 bp, Arabidopsis thaliana landsberg
gtttatgcatccgggggatcaagctggattatcgacagcggatgcacaaaccacatgacaggggagaagaggatgttcacctcctatgtcaagaacaaggattcccaggatacgattatctttggagatgggaaccaaggcaaggtcaaaggcttgggcaagatagccatcaccaacgagcactccgtatcaaatgtatttctagtagagtcgcttggttacaaccttctatct

SEQ ID NO: 182579 - DNA, 86 bp, Arabidopsis thaliana landsberg
atggggttaacacctgaacagtctgcacaccagggacaaatcaacggagaaatggacatgacagactgggagaacattcatttcag

SEQ ID NO: 182580 - DNA, 136 bp, Arabidopsis thaliana landsberg
atggcaactggagtaacactggagttggtgtcgtctgaaattattggaaatttatctgatgaagaaacgacagttggatatcaaccaactagatacgacttatttcttttttttgctgtctttaacattcttcctc

SEQ ID NO: 182581 - DNA, 105 bp, Arabidopsis thaliana landsberg
atgaaaagtaaagaagaagaagaagaagaagaagaggaagatgatggaggagaagggcaaaaagggaagagatttttagaaaagttaaggagaagagctgttttt

SEQ ID NO: 182582 - DNA, 62 bp, Arabidopsis thaliana landsberg
atggtggccaggaaggttcggtggatcgcggctgatcagattggcccatatattcgcaagag

SEQ ID NO: 182583 - DNA, 349 bp, Arabidopsis thaliana landsberg
atgcaagaggagctcaacaatttcacgaggaatgaggtatggcatttagttccacgtcctaaccaaaatgttgtaggaaccaaatgggtcttccgcaacaagcaagatgagcatggtgtggtgacaaggaacaaagctcgactcgtggccaaaggatactcccaagtcgaaggtttggatttcgatgaaacctatgcacccgtagctaggcttgagtcaattcgcatattattagcctatgctacttaccatggctttaagctctatcaaatggacgtgaagagtgccttcctcaatggaccaatcaaggaagaggtctatgttgagcaacctcccggctttgaagaca

SEQ ID NO: 182584 - DNA, 279 bp, Arabidopsis thaliana landsberg
tgattcgaaccatcaagatgaccttcccccccccatccacaaacgaagggcggtttggacgtcctcggaggacgatgccttcaacaaagatcgaggactttctttatttcggcccgaatgagacggaggatattcagcgtctcaacaaacagagggcttttgagaaagccgagaagaaaaagaacaataaaggccagagggcgatagtgccaaatcctcctggctcgactttgtgcaccgagcggttgctttcggatctgagggctcgattcaatctag

SEQ ID NO: 182585 - DNA, 43 bp, Arabidopsis thaliana landsberg
atgaaaataaaagaggaggagattgaaataaccgccaacacag

SEQ ID NO: 182586 - DNA, 1594 bp, Arabidopsis thaliana landsberg
cagagtggatgtaggtttgtggtgaaaacgaggatatcggggacatctttggtgcgcatttactttgaacagttcatctttaaacttccaaatcaagaggtatatttagttgctccatcaagccttttgtgttggttttctgcttgtgtatagttttgattaattaggatccttttggtatataattgacaaagcagcctattttggaggcaaaaggaacggctgtgtggcttgacaacaagtaccgtcctactcgtgtcccatctcatgtacgctcatattttggtcacttccagtgtcaacacttggtcgattgatccacattctagggcatcacaaaatttatgacctatatattttggtttgttacaatttcgatttgatgcagaaaatataaatatccataattttacagaccaaaacatagattcaaactttttttttttggacaaagattcaaacttaatacctattaaaatgaggcaaatcataatactaaaatctgaagagcaaaatatatgaaccactcccatatatatgcgtagatatatgtatacatataattatatatatttaaactgtatagattattatatctaggtttaaatttttatgaatttgtattcatcacattaatcctaaaatatatcaatagtgcttttttgtttgttgaattttgaaatttgctatatattaattattttaaaaatcttatcacgtaactggtgaaaaaaacaaaatctgaagtaatcaatatcggtcaaaatatctatcttttgacataagtcgttacagaacgggtatggataaaaacaaatggccgatcgaacagaggaaactaatcaaaaatcacacaaattcatgatatccgctctatgtccactcctgtgacattcttatgatttttgtacatgttgtgaaactcgttctcttttctttcttttattcatattatgttatatatctctttgtacatccaatttatccattaaatttatatttcgtcttataatcgtgtgggtttctatagtcaataatactatgacttggcgccatatatatttgtatatcttcagaaaaaatgttaaagtgtttttaagggcaaaaatattaaaaaatttataaacttttaaatttgggacgatttaatcttcaacttcactgaaacaaataaatcgtaaagttttttatgactttctaaataataaataaagtttttgttgacttgccatttgagtcatgtcgttaaataggttaacaattttattttttacgacgacgtcgtttattgcagagacaaaacgacgtcgtttattgcagagacaaaacgacgtcgtttattgcagagacaaaacgacgtcgtttattgcagagacaaaacgacgtcgtttattgcaaggacaaaaacgacgtcgttttatgtgttaaaacaaatttaaaccctaaatctccatctatcacaaaccgcagacccaacaatcatcttctctatctccatgtgggctctcttggtgaatttactcttcaacaaaagaagaagaagatgatgagttataagaagaagatgagttataagaagaagatgagttataag

SEQ ID NO: 182587 - DNA, 407 bp, Arabidopsis thaliana landsberg
atgaaatggtacagcacagaagttgtaagaggcaaagaggactattcaacggctgacgcgatgttgcgatttttcaagcagcatggggttgctgtacgtggccacaatattttatggaatgatcctaagtatcaacctagatgggtgaatgctctgtctggtaacgacctctacaacgctgtgaaacgaagggttttctcggtggtctcacgatacaaaagccagcttgcgggttgggacgttgtgaatgagaatctccatttctcctactttgaggacaagatgggtcctaaggcctcatataacatctttaagatggcgcaagcttttgatccaacgacaaccatgtttatgaatgaatacaatacgttagaggaatcaagagattcagattctagtctagcaag

SEQ ID NO: 182588 - DNA, 652 bp, Arabidopsis thaliana landsberg
atgatcgcagaaatttacttgaacaacacctatagaatggaacgcggaggagcctgcaccgtctgccccctcgaccccgggagtcccttgtttctgtccggcgatggcttcgagcccgccggtgtcctctttccaaacgcttgtttccacttcccttcgaaagataaaaaggaggcgtacgactttatggacaaggtaaatcctctctcgttctctttttcggaacaagttttactcgttttttaaccagttcatattctaggtcgtcgacaagcatcgccgcctgtgcgatgaaaggcagcgtttgggcctcaagaggcaaacgctagaggcccgaattgcccgtatcgagaggaagataagggctatggagagcgacccttttcaatgggagtggaggaacttcgactgcgtggcgaagatcccgcacatgctccggatgtaccttcgtgctcgaggccaagtctccggtcctgtaaacgttccggttcaagtgatcccgtctgacagtgaggacggtgacgacgaggaggaggacagtaacccctggaagcgcgtgaagaatgaacccgacgtggacgacaaaaacgaggcgtccacttcgaaccccgaaccggcgatgaaggagcttgttcctgagccccttccctaa

SEQ ID NO: 182589 - DNA, 84 bp, Arabidopsis thaliana landsberg
atgtctcgtactgctgaaggagcagctgccgtgcaagatttagattttcattctttaggttctcaattgagtccattggctatg

SEQ ID NO: 182590 - DNA, 440 bp, Arabidopsis thaliana landsberg
atggcatcaaaaacctttggcacggctctgtgtacgccgaatgatgaatgtgtaagtgacgaggaagaagatgaaggcactgggcttactaatgggctgcgtccgagacagtcctcacgtgtaaggaagcccaataagaagtatttggattaagagagacttcgtctccacattttcaagttctgcaaataagtgtggaagtggtctccctaattgttaggaaccattatcacctctttcccattatttcccaaattgtaggactggtgttcactccattgcattgttgttttgttcttctatttaagaaatgaaaaagtcaaaaagaggcaatatcgattgcccaaaaatctgagtctcattgttctttctttcaagctttcttttaccttcggtactaaaattgtgatacgacgaggtcatatctatcaccgaaccag

SEQ ID NO: 182591 - DNA, 348 bp, Arabidopsis thaliana landsberg
aagggcctcgcaaagaagggcgtcctcctggagggctgcgtctctgactggatgttccatcgtggcctgccgcgcacgaactactatgtcgagcgggaatgggcggaccagatcgccggcatcgccagttctccggatgccttcagcggcattgtcccctgggcgcgccagatccgtgaaatcggtatcgagcatttcgtgattggcaccgattacggtatccgctccggcccgacgcccgtcgaaggcatgcgcatcttaatcagttcgctccatcatcttcgaatcacccccgaagaaatccatcgtatggtcaagaccaatcctcgaaggctgcttgacctttga

SEQ ID NO: 182592 - DNA, 1004 bp, Arabidopsis thaliana landsberg
atggttgaagtaaagcctgtgctttgtgatgtcatgtctaaggaagttggagtgagctcggttgaggtagagcccaatgtttgtgttgagatgtctgcaaacggtggggatgaaccagcagtaaaagattcagaaccggttgtttctgaaaactcgaggtctatgaaagctgagtccgagccagttgatgtgtctgatgcgtatgttgcttgaaaataaaatctgttagaatgtttacttgtattttgataactacaaaactaatagtctgaatatcacaataaaaattaattcattatatttacaattttaacgacttatatgcgactattgtttcccgacttacttatgtgttaaataacgactacagtaacgactatgtgttagagtcgccatttagcgactatataacgttgtttttagtttagtcgtaaaacagtcgctaaatagtccttactttgtcgctaaatttgacgactacataaacagtcgccatgtatagtcgttataacctgttttcttgtagtgtaaagaaggataaatttcagtggtctgaggcagctcaacaagcctttgaacagttgaaacaggtgatggtctctgcacctgttttgagcttaccggattttacaaaagtttttattattgaatcatatgctttagggacaggagtagaagcagttctgttgcaggacaaacgacctattgcatattttagtcttggacttattgcaagggaacaactaaagtcggcgtatgagagggaattaatggcaattgtgatggctgtgttaaaatggaaacattatttactgggaaagaagtttatcgttcatacagatcagagaagtttaaagtttttgctggaacaaagaggggttaacatggagtatcagcgttggttgactcgcttattagggcatgatatggagattatgtacaaaccaggtctagaattccacagcggttcagttacaggagttatattcggagattgcagatga

SEQ ID NO: 182593 - DNA, 254 bp, Arabidopsis thaliana landsberg
atgattcggaactcattccgtgatcgtaaggaaggatactctagcaaggcagttgtcactaggtatttgaagtttatctcttccttatgtgttgcatatagtaatgccaatcttcccctaaagtggcaatagatcttaaagagttcttcatgcggttcttttttcttaattcttaggtgtgttagggacgaccagtcatctgttactgttaaactgtattatcttcgcaatggaagtgccagagttggattttg

SEQ ID NO: 182594 - DNA, 75 bp, Arabidopsis thaliana landsberg
tctatagaacatcacagtgtgtgtgattcgtcggtatcaaaaatccgaaatattaaaaggaaccctgagatttga

SEQ ID NO: 182595 - DNA, 201 bp, Arabidopsis thaliana landsberg
atgcagaatgtaggtaacctggtaaatgggtatggtgacgaatggggactcaatcatgcatataaaccggcatttgcgttcgactgcggaatagaatccttaacggcaatggctgtgcagggtatcctatggtaccagggagaaagtaacgcgcaacaggcaaagcgtgtaaatgaatatgcatcgctcatgcaattaatg

SEQ ID NO: 182596 - DNA, 270 bp, Arabidopsis thaliana landsberg
ggttttcgatatcgatcatgaaggccgaccagtcaattttagagcgtttggatgctccgaccaatgctcctagttggccagttggcacagatggtctgtgatatttcctttggaacttgtataagattgtaaattcttgtatcatctattttattttatttcgaggttggatttttcctttttctgatcaagccagatctctctacaggaagccggccaccagcaaagatccccgttccacttccattccgatcaaccggaaacgaagag

SEQ ID NO: 182597 - DNA, 399 bp, Arabidopsis thaliana landsberg
  unsure (1)..(399): unsure at all n locations
aaagcctcagccgagaacagcagtcttcagctgtgtacggaaggtctagggtcagagagttattgcggcttggaagatgaaaaagtcaacggtgatggtgacggtgatgatgatgagattgaagtgaagggtaaagataacggaagcaacgatgaggaggagtgggaaccacgaaggaaggaacnnnnnnnnnnnnnnnnnnnnnnnnnnnnnnnnnnnnnnnnnncttatagaaaagaagggaggcttgtgttggaagaagttaggattccaaggagagagttccttcgtgcaagccgcgaagatggtcgactcaggttgaagttggttcaacctgaggacgaccatgacgaagaggaagagaatgagaaagataaacatgtcgacgaggatgaataa

SEQ ID NO: 182598 - DNA, 879 bp, Arabidopsis thaliana landsberg
cttatcaaaggaaggccgacacaaatcgtaactggacgtggccatttaacggatcagatgacaaagtaacatttcacgagagcgatactaacgactttgaacgtccgcacaacgatcctttggtcatcacactaaccatcgatgatttcaacgtcgaacgagttttagtggacacgtggagtacactggatatcatttttcttacgaccctacgagaaatgaagatggacatgacacaaattgtactaactccgcgacctgtgctcggattctccgagggaaccaccatgactctcgggaccatcaagttaccagtacgagccaaaggggtaacgaaaatcatcgatttctctcttacagaccagccgaccgtttacaacgcaattatcggcacaccatggttgaatcaattccgaactgtcgcttcgacatatcatctctacctgaaattccccacgagcaacaaccgacgcgaatcataagaaatctaagctgggccgagccaaagagaaagcagcaaaagatcgtggaggctcgggaatccacaagaccaatccccgatccggtaatctccatctgccttgatgacgaaaaacccgagcggtgcgtggaaatcggcggagacctaggaaaagaattaacagctgaactcaccttttcctcagagagaacgtcaatacattcgtctggtccccagaggatctccctggagtaagcgtcgatatcgtagcacacgagctcaacgtcgacctgacgtttaaacctatcaagcagaagaggagaaaattgggtcgggagcgagcagaagccgtgaaagccgaagtagagaaattactaaggatcggctccatcaccgaggcgaaatatcccgattggctc

SEQ ID NO: 182599 - DNA, 84 bp, Arabidopsis thaliana landsberg
atgaagacggcaagagatgcagcaaatctcatttatgatctatctgaagaatcagcgtcatcgatttggagactcgaaccataa

SEQ ID NO: 182600 - DNA, 1859 bp, Arabidopsis thaliana landsberg
ggttggatgatttcaggtcacctctggaggaactcttgattgtcttacggaacagtgagaaacaaagggctacagccattgggtatgttatgttaagtcgttgtactttgttctggctgaataaaaccttacatgcaaaactgaactcgagagcctagaattcaaactgctcattcatttctacctaacatgcaactaatcctagagcgcacctatgcatatagctaattgcaatattattgttgtgtaagaaaattttgatttcctttatgacgcaatatagttgtctgaactaaggtatattttgcggccacataaatgatgagttctttttaactctgtttctttttcaggtaccggatgcttgtttatttaaagtactgctttcttggtttggcttttccaccaggtaggattctgttatggattcaatgcatgttatgatctgcaatcgaccttattgtatccagtgacctatacttttatataggcattttcctctcacaaacttagttggagttttatctgcaggacatggaactctaaatcctacacgatggccatcacttaggagtgagctgattcagtttctactggagaaatcaaatgcccatgattctagtacatgtgtaacatctcgattgaattatttgaacctctaccatctgctagaaatggatactgaagccactttagatgtcctaagatatgcatttgtagaaaatgaaatggtgaagcatgagagtcaccttctggagtacggtgaagtaagtatagagtccaagactgatggcagtttacccgaagttagcaacgatatactaatccagaatcttgtagatgctctagttcatgttcccgactggggcgtaagcaatgaatctggcgatccaaatgattcaaaatcagataaaaattggccttccaaggaggatacaagtcatctatttgagtttgttgcatattatgcagcacgtggtagagtgagtatttccaagagcgtattggcacagattttagattacttaacatcagaccacattcttccaacttataacgtgtcttctaagatgagagagaaccaattactaaaccttctgaaagctgtcccggagactgattgggatgcagattatgtatcacagctttgtgagaaagcacatttttatcaggtatcctcttggtagccattcatcattcccctatagcgtgcttgcaatgctttattttgggatgttgtccttgatctctgttaatggtttccaaattccccaggtttgtggctatattcatattatcgatcgaaggtacgttgcagctttggatagctacgtgaaagaggcagatgaacccatacatttgttttgctatgtgaacaagatgctgtcacagttgagtggagatgaattcactgcctttcaatctgcaataatttctaggattcccgagctccttgatttgagcaggtaactttaggttgattttactctctctctctctctgttgagtaggtctagtggactaataatattggatgtctggcattttgcagacaaggagcattcttcctgattatttgtaatttgaaagacaccattaaacgcattcaagagcagctccattctcatccaagaagcttgttcctgtatctcaagactgttattgaggtttacttgtctgggagtcttgatttttctcgtctaagaaaacatgaagctgtagatagctcgggtgaaaacattagaagggatatacccaaagaggcgaagatttatttggaaggactcaatgactttcccaaattcatccaagataatccagtcaatgtgactgatgacatgattgagctttacgtggag

SEQ ID NO: 182601 - DNA, 709 bp, Arabidopsis thaliana landsberg
aatggtcgagtgaggagctagcagatctcttggatttcaaatgtgcagaggaagataaacaaatgcttacagtggaggtaaccaaagaagagataaagaaagttttgttcacaatgcctagtaataaatcccctggtccagatggatttacttgtgaattcttcaaagagacttggaaaacagtggggaatgattttgtggtggctatccaatctttctttaaaaccgtatttctaccaaaaggagtcaattcgaccatcttagcactgatacctaagaaaaaagaagctgtattcatgaaggattacatgccaatctcatgttgcaatgtcttgtataaagtcatatcgaagattttagcgaatcgcctcaagaccattctgccaaagtttatttctgcaaatcagtcagcttttgtcaaagaaagacttctaatggagaacctactccttgccactgagatcattaaagattatcacaaagacacagtctcttcaagatgtgcgatgaatattgatatatttaaagcctttgattcagtccaatggagttttttgctcaatacgctgaaagctctagacatcccggagaagtatattcattggattcagacctttgtaacaacagcctctttttcattgcaagttaatggagagctagccgaatatttcggaagcgaaagaggactcaggcaaggctgttcactaag

SEQ ID NO: 182602 - DNA, 894 bp, Arabidopsis thaliana landsberg
atgaagaaaatacttttggtcaatatcggtgcacatcgttcaacgtcaaattttggtgaccagagcaataaagtaggatagttatggtgtttgcaacatgacttatgttactaacggttgcgttagactagtgatttaagtacaggaggtagatccatatgctccctagttcgatttttggtaggaggtatgctttacgctatgctataaggtattagcaaatgccggtcttggctattggggagattaaggtttagatacaaactccttttagttaacaaaaaaaacataataaattacttgttgctcaaaaaaaaaaaaaagagatataaatgacttatattcgttcagaaatatctgtatgtaattacaatacttcgtataattaacgaaatacttttaaaatttgaatgtgtgattatgtgataacgtctctttcatataactgccaaatattttccttaatttaatcctcgaagctttcatgtagctgcatataagccagctgtagataaataacgtaggatgtagtcttttttttttctttaatttaatgtatataatcatcttttaaattattgagttttgaaaatgttacatgcattcacaaacagaaaaataggattataaaaatattaagcttgtcatgtggaactcgcttgtggaaggttcttaacttagtaatccaagatataatgattttacataaatttgggtttcgattcctagaaacactctcttacacattataaatgcaaagcgtatctgaagtttcagtgcactgcagtctataattgtgagtcaaaggtaagctgtctaggggatataccgctgatacaacggtttgttgtggatccatgtattgtggagaaagctgtcatcgtgaagttgtaa

SEQ ID NO: 182603 - DNA, 419 bp, Arabidopsis thaliana landsberg
gaagctggactgatcggtctgatgttggaccgattggtcggtctgtctctggtcgctggattgatgcacagacctatatgtctgacgttggaccgatcagtccgtctttgtcgcctgatcagtgcggactgatcggtctaatcatgtaccgatcggtcggtccgtctctgtcgcccggatcagtgtatggactagaccgatcggtctggtcctcctttgtcctcgattcaacttctctcgtcctttctcgacccgaacaagctcaaaaccatcttttcacctcaaaagttcctaaaacctgcaaaagactcaagacacaaccgaaaacacacaaaagacggactatgacacgacaaataactcaaaacgaatggactaaagacatcaaaaacacaacatatcaacttctccagacttag

SEQ ID NO: 182604 - DNA, 4491 bp, Arabidopsis thaliana landsberg
  unsure (1)..(4491): unsure at all n locations
atggattcgctaattatcgaagaagaagacgaagaggcgttggccacgctcgtccctgttcctccgcggcgtaaaacgcattcctatagcctacaattcgatcacaagcctcaccatcagatccgcaaacacagcctggacgaggttcctagatccgctacattagcatccgaagccgtttatttcgattcctccgacgacgaattctccaccggaggtaacatcacagaaaacgccgctgatgaaaccaacgccggagctgaggagtacaccatcgttaatcctcctcccaatgtcggtcttggggatgacgacaccgagccattacctgaatttatcggcgctggtggcggttccgggatatttaaggtcccggtgcgcgcggcggtgcatcccggacgtccgccgtgtcttgagctgaggccgcatccgttgagggagacgcagactgggagattcttgaggaacattgcttgtacggagacgcagctttgggctggtcaagagaatggtatcaggttttggaatttggaagatgcgtatgaggctgggtgtgggattggtggccaggtcccgcgaggggatgaggatacggcgccgtttcatgagtctgttactacttctccaacaatgtgtttggtggctgaccaaagcaacaagcttttgtggagtggtcacaaggatggcaaaatccgggcttggaagatggatcagagctctgtttctcatgatgatgatgattctgatcctttcaaggagcgtgtctcctggctagctcatcgtggtcctgtcaattccattgtcattagctcttatggttagttgtttttgctttagactatgattgattgatctgaaaaatatgttctttctctaatcttgcttatgcttgtggttgtgatgtaggtgatatgtggtcatgttctgaaggaggtgttataaaaatatggccttgggatacgttagagaaatctctgctgcttaaaccggaggagaaacacatggctgctctattagtggagagatctgccattgacctaaggagccaagttactgtaaatgggacatgtagcatatcttcctcagaagtcaagtttttgttagctgattcagtaagagctaaagtgtgggctgtgcagtcactnnnnnnnnnnnnnnnnnnnnnnnnnntttatttttctcacattggttgaaggactgggtcttttcagtcacttgttgatgatcattatgagagatttatgtgcgcagggatgctcggagtaaagaccttctgaaagttttaaatgttgacgggcaagttgagaatcgtggggatctgccacctatacaagaccaacaagttgatgatgaaatgaaactgaagttcttctcagcttcaaaaagggaaaagccacagggctttctgcagcgatcacgtaatgccataatgggagcggcaggagctgttcgccgagtcgccactagaagtgcaggagcgttttcggaagatactaggaaaacagaagctatcgtgttagctgtagatggaacaatttggactggaagcataagtggcctaattgttcagtgggatggaaatggaaaccgcttgcgagatgtgaatcaccatcaccggcctgttttgtgcttttgcacttttggtgatcgaatatatgtgggttatgcaagtggctacatccaggtcttggatttagacggaaagctaatttcaagctgggtttcacacaatgaacctgtgataaagctagcagcaggtggtggtttcattttcagtctggccactcatggtggagtacgaggatggtatgtgacatctccaggacccctggacaacataatccgaacggaattgtctcagaaggaaactttatatgccagacaagacaatgttagaattttaattggtacctggaatgttggtcaaggaagggcttcacatgatgcacttatgtcgtggctgggctctgtcacttcagatgtaggcattgtcgctgttgggttgcaagaggtggagatgggggcaggcttccttgccatgtctgctgctaaagaaacggtaactccttttattccatttgactttatttggactaaaactttttccacaacgcgaagcacttgaaggtcaaagtatcacctcatatttgggacgcgtgtaggttggacttgaaggaagtgctgtggggcaatggtggattgatgcaattggaaaagcccttgatgagaaaaacactttcgagcgtatgggttcaaggcagttggcaggacttctgatatctctttggtaagtgaatgttctgtcatgacatgttgcattctcgtgcttgtcattcaacacttttgcaaggttttcaatcagcagttgtgtatcatctatgattaaccaacctattgtgtgctgtaattttctgctttagggcgaggaaggatattagaactcatgttggagatcttgatgttgcagcagttccatgtggttttggccgtgccattggcaacaaggtatgtcttacttcaattcccacttcttcaaatctgattatgatactacatacattcaggcctttaggattcagtacttcagtttttatttgttcttgtgaagttgcaaatgagaaagttatatatgaaatgtgttgcttacttacaatgtttatgacccactgaatgataacacaattacaggaaaaaacttagccttttgccacaatgtgtaatctcttctatctggctaagatgtagatgacaatgcgatatagatgttaattcaaatttagttctctatgaggtacttgttccgtttacacgcattaatgtcctacttgtcaaatagggaggtgtaggtctgagaatcagagtttatgaccgaataatgtgctttgtgaattgccacttggctgcacacttggaggcggttaatcgcagaaacgcggatttcaatcacatttttcgattgatggtcttttcccgaggacaaaatctaagtaacgctgcagctggtatggtgccgtacctgtttttgtcttgctcacttggcttttccacatatttattttggctgctttattcttctggtttgccatgggccctctctcttgcagctggtgtctcaacttcagcttatacaacaaagagtaacactgtatgttcttatcatatcacctttactcctgagtttatgttgtttgctccttaaatttgtatttaacatgtttctctgttttccagattccaagcaccggcgctgaagaaatcaagtctgatcttgcagcagcagacatggtcgcattttttggcgatttcaactatagactgtttggtataacctatgatgaagcaagggacttcatttcacagcgatccttcgattggctcagagaaagagaccaacttagagcagagatgaaggttggaaaagtcttccaaggaatgcgcgaggcattaatcactttccctcccacttacaaatttgaaaggaatcgctcaggccttggaggtaaaagtggatttgatacataagatatgaatttgaaaaaattgaagcagttttgctctgctctgttctctgcattttttcctctgttttgtaagagatggtggctccaaaaaactgaatctttctgtgctgtgtactctccaggatatgattcaggggagaaaaagcgaattcctgcgtggtgtgaccgagttatatatagagacactcaatctagcccattctctgagagcaatttgcaatgccctgtagtttcatcagtcataatgtatggtttcatgacgacctttctgatgtttctcgctttttccggtctcttcaatgtgttttctccattctaacttcccacctgcgtgtttcaacaggtatgaagcttgcatggatgttactgagagcgatcacaaacccgtgcgctgcaaatttcatgcgacaatagctcatgttgataaatctgtgcggagacaggaactggggaaaataataaggtctaatgagaagattttatccatattcgaagatttaagatttgttccagaaacttctgtgagcaccaacaacattgttcttcagagtcaggacacagtcatcctaacaatcacaaacaattcacccacgagccaagccatatttaacattctgtgcggtggccaggctgtagttaaggatgacggagaagatgctgactacaatccacgaggctcctttggtctaccacgctggctcgaggtattaaattctctttcgacgccaaatgaagattcttgtagtattcaagatttagtgatatacaagaatttttttcttttaggtttctcccgcagcagggataataaatccagaaggatccgtagacgttaaagttcatcacgaagattttaactcaatggaggaatatgttgatggaatcccacagaactggtggcccgaagacactcgagataaagaagaaatcctaatggtgaacattcgaggaagctgctcaacaacattgg

SEQ ID NO: 182605 - DNA, 652 bp, Arabidopsis thaliana landsberg
atgaaggtatgtctcctgtgtactcaacaacaagtaataacttcgattctcttgtgaaagagagagacttctctttgtgatgttaaggagttctcttattgtactcagcaaaagatcctgataagaattgctatgactgatgacacaactcgagcaaaggcaatgaaaactgcggttcagtttaaaggtaacaatgatacaaacactagagaacttgatgattgtaattcttgttgaatctaaagatttatcgcattggtttataggcgtgaacgctgtggaaataaagggagatcacaggaaccagattgaggtgaccggtgttgaagtcgatatgattgctctaatcaacacactcaggaaaaaagttgcatttgcggagcttgttagcgtagctaaagttgaaccacccaaggatggtgacaaaaagccagaagaaaagaaacccgaagagaagaaacccgaagagaagaaacctgaagagaagaaacctgagccatgttgtcaaccatggcaaaaacctgagccatgttatcaaccatggcctcatgatggatatggtgtgccatcttcctatccctacccgtgtgatccctacaatcagatcggggaacccgtttacaatcaagatcccaattgcaggatcatgtga

SEQ ID NO: 182606 - DNA, 345 bp, Arabidopsis thaliana landsberg
atgatttccggaaccatcaccgaccgttccggccgaaccctttccggccagaccgttctagcgttctattactcggtgcgccacgcgcggccgttgtcggtcggcttcaactgcgcgctcggtgccgaagacctgcgcccgcacatccagaccatatccggggttgccgagtgccacatcagcacgcaccccaacgccggcctgccgaatgccttcggcgaatacgacgagaccccggaacagatggccgccgtcatcggcagctttgcccgcgaaggcctgctcaacctggttggtggctgctgcggcaccacgccggcgcatatcaaggcaattgcggaagcg

SEQ ID NO: 182607 - DNA, 242 bp, Arabidopsis thaliana landsberg
atccacacagagctgctcagctaaattgggagatgtgtcgaaatattattgatggcctagctcgagggctacgttaccttcatgaagaatccgggctatgggtcgttcaccgcgacattaaacctggaagcattctattggattcagatttgaaaccgaagatagtgggatttgaattggcgaggacgttgcaacaaggtgaaaacgcagctgaaacaactgaaattgtcggtaccgtgtaa

SEQ ID NO: 182608 - DNA, 1403 bp, Arabidopsis thaliana landsberg
atgcaggtccatagattagctgttaatgcccttctgaaaagtgacctggtgagtgaaatggaaggaggcggctttttgggtgtgaattctagaggaagtagcttaaacgataatggcatttttgatgagaataatggatgtgcgcaagcatttcgtgtcctgaaacaattgatcaagcgcttgttgcatgatgcgtgtaattctggcaatatatatgctgattccattttgcaacatctgtcttggtggctccgcaggtatcattatatcatattcaatttattcttgaattgttagataccaatcagtaatttcatattttacgtagcccttcctcaaagcttcacgatccagctctccatctcatgcttcacaaggtaaatgacatttactgttttgtgcttttaatatggtataaatggcttgtctgaatctttctctaccaactcatttagtcgaatctgtagcttacaagttatatctccttgcttcagaatccctgtcataactcataatttccaaatccacgtcttttgcattcaagatttcttaatccatttgacatattgcggtttttctcaatattgtaggtcatgcaaaaggtgtttgcgctgcttttgactgatttgcggaggttaggtgctataataatatacgcagacttctcaaaggtcattattgacacagggaaatttgatctatctgctgctaagacttattgtgaaagcttgctcacagtgatggggagtaggttggttttcttcattccccactatatacttgtatgactaaatctctaatggacctcattttcatgtcttatgctttgccaccgacagagatatctttaagttgatcttgcttgagccggttcactactggcactcgttacttttcatggaccaggttggcattcttatgtcttatacttccctcttgtattatcttttcaactacatggttaaacgaactacaactgagaagtaaaatctactaaatttccatctaccttcatgagttcttgtgttacctttttcatgatatttttctcttatcgtgacaaaccatttccttaacattgtagcataactacgctggtatccgagctaccggagatgaaatttcaggtgacgaagtgactattgaaccaaagtggagcgttgcacggcatttacccgagtatattcaggtttgcagacagctaatccctaatgttcagtattaagctaagcggcgtggaccatttcatcttgaacgctcatgcatctcatctatcttggcagaaggatttcatcataattgttgccacgtttatatttggcccctggaaatttgcattagagaaaaaaaggggcagtgcagagagcttagaggaagatatggtagaatatctcaaggaacag

SEQ ID NO: 182609 - DNA, 334 bp, Arabidopsis thaliana landsberg
aatctgaaggtgaaatgtggggtacgaggtcacactggaccaggctgtaatgcagttggaatgcttgaccgtatgtttctaggaatccagcatttgtacagaaaacctgtatatgcacgaaccaaggttctagattttaacccaagtcctgtttttctcaatctttgttttatgtccatttcatttgatctcttatatcttctcagcaatgcagtataaattatccaaacaatggaccattaccgccagacgctccttcttggtgtcaagcgccttttgaccccgaaggcctcttaaggtctctgcttctactctccaaaaaaaatattaaata

SEQ ID NO: 182610 - DNA, 320 bp, Arabidopsis thaliana landsberg
atggcccataacatccggtacgttaattgcaattgtaatccagtctcacatgaaaacgggatagaattggatctaacccaatgaaccgggaatctaaattaaaaattaaaattgctctaataagacatgttaatcatagaatgctaatcatgcttccgttatgttttccctccgtgaacactaaatggagaatcatcatcaatatgttaaggatgtgtttgtttgggctgcttcggcaactttcgctgcttgttagattgcgacttattgcgagcatagatgtcatggaagtagaattcgaaatacatcgagaagattaa

SEQ ID NO: 182611 - DNA, 1342 bp, Arabidopsis thaliana landsberg
ttatcaacttcaaaaacttggggctcaacggcactatatctccacgatttgctgattttgcgtctcttcgtgttattaatctctctcagaataatcttaatggtactattccacaagagctcgctaagttgagtaacttgaaaacactggatgtttcgaagaatcggttgtgtggtgaagtacctcgttttaacacaactattgttaacacgactgggaattttgaggactgtcctaatggcaatgctggaaagaaagcatctagtaatgctgggaaaattgttggttctgttattgggattttgctagcttttgcttcttataggggttgctattttctttttggtcaagaaaaagatgcaatatcataagatgcatcctcaacaacaatctagtgaccaagatgcgttcaagattacaattgagaatctgtgtactggtgttagtgaaagtggattcagtggtaatgacgctcatctaggagaagctggaaatattgtgatctcaatacaagttttgagggatgctacatataatttcgatgagaagaatatacttgggagaggaggatttggaatagtttacaagggagagttgcatgatggaacaaagattgcggttaagagaatggaatcttcgattataagtggaaagggtttagatgagtttaaatcagagattgctgttcttactagagttcgccaccgaaatctagtggttcttcatggttattgcttagaaggcaatgagagacttcttgtttatcagtacatgccacaagggacattaagtaggcatattttctattggaaggaagaagggttgaggcctctcgagtggactagacggttgattattgcattggatgtggctagaggagttgagtatttgcatactttagcacatcaaagtttcatacacagagatcttaaaccttctaatattcttcttggagatgacatgcatgctaaagttgctgattttggtttagtccggcttgcaccagaaggtacacaatcaattgagaccaagattgctggaacatttggttatcttgcaccagagtatgcaggtatggttttatgcttattttgtatgttgctactcgttctaaactcactaaatgtaaaatattgaaatctctatgtacattgcagtgaccggaagagttacaacaaaggttgatgtttacagctttggagtcatcctcatggagctactaacgggtcgaaaagctcttgatgttgcacgatctgaggaagaagtacatcttgccacatggtttaggagaatgtttatcaacaaaggctcattcccaaaggcgatagacgaagcaatggag

SEQ ID NO: 182612 - DNA, 462 bp, Arabidopsis thaliana landsberg
atggttgatgttcttgaaagatttttggaactcttcgatcacatacctgccttcatcggtggaattatcgtttaccagcacgatctcatgcgtggtcttgtaatcctgcaccagtacgccgggcaggttgcgggccaggttttcggcctcgtccctggcgcagatcactacggaaacgggatggtcgttctgcagttcgcgctgtttttccctgtaaaaagccagccggcagaagaagtacaggtaataaaaaagctggatgaaaataacagtgcagaaggaacagaagataaccagggatacgatgggcggtatgaacatgcggcaaaaataatgattccctacttttgccggatggctgcattgacattccggttagaagcaaacgaccctggatccaaggccagggccggcaggatccggaccgaccacggtgaaatacttaccccgatctttatgccg

SEQ ID NO: 182613 - DNA, 101 bp, Arabidopsis thaliana landsberg
atcataaaagtaagcaaaatgttcccaatcatctagatggaaaatataaactggactatgaagttaaacatgcaaccgaagatgaatatttagaacaatga

SEQ ID NO: 182614 - DNA, 150 bp, Arabidopsis thaliana landsberg
gaaactgagaaatctcgagttcaaatcccagaaaatgactttacgagctacaataagatagatgtgaagaaccgacagcaaaattcaaaacataaacaatccaataatcgcgtcgattcgcagaagatgactcacagagatggagcttaa

SEQ ID NO: 182615 - DNA, 691 bp, Arabidopsis thaliana landsberg
gtgtagctgcttatgtcaagacactacgtcctgattggtctgcttctgccatcaaatctgctatcatgactaccggtaattatcaacatcaaatcgaactattctctgaagaaagagtttaagttaagtgagatccgaatcaatcctttttgtttttaatgcagcttgggcaatgaacgcttcgaaaaatgcagaagctgagtttgcatacggatcaggatttgttaaccctacagtggcagttgatccagggcttgtttacgaaatagccaaagaggattacttgaacatgctttgctctttggactactcttctcaaggaattagtaccattgcgggtggaacctttacttgttctgaacaatcaaagcttactatgagaaatctaaactacccttcaatgtcagccaaagtgtcagcttcatcgtcttcagatatcactttttcaagaacagtcaccaacgttggggaaaagggatccacttacaaggcaaaattgtctgggaatcccaaactcagcatcaaggttgagccagctacactctctttcaaggcgccaggggagaagaagtctttcaccgttacagtctctggaaagagtcttgcgggtatttctaatattgtgtcggcatctctgatttggtcggatggttcacacaatgtgagaagtcctattgttgtgtatacttag

SEQ ID NO: 182616 - DNA, 384 bp, Arabidopsis thaliana landsberg
atgggggcggaatacgcgaatgcccacaacattccggcgctgatcaccgaattcggcaacagcaggctcatcggtggcctcaacgacttcctcacggaggccaacaaccagcgtttcggctggatgtactggaactacgaactcgcgatgggcccgaaccgcgtcgacggtgcgatcgacgatcagatcgacaaccccgtcctgacgacactcgccgagccatacccccaggcgatcgccgggaccccggagtcctggtccttcgccgacggcatcttccggttcagctactccaccgagatggccgacggctccggccacttcggcgccggcacccaaaccgagatctcggcaccggccctgcagtaccccgacggctaccaa

SEQ ID NO: 182617 - DNA, 300 bp, Arabidopsis thaliana landsberg
atggatgggtttgtattgcatcttcagaatgaacagaaagaatctattatgagagtggaagaagctggtctgcatctttactcaaatagagatgtagatatgtaagtgctttttgaccatgtttcttcttactttgcattagctttaaacagattttgtttttgaagatatagagatttggttttttggttcaggcttttggatggggtgccacaagatcccgaaaagattgtttctactcctacaaacaagtctcatcggttacatccggatccggttgatgcgattagtatatcatga

SEQ ID NO: 182618 - DNA, 135 bp, Arabidopsis thaliana landsberg
atgaaattaattcagatcaaacaattcaaattcaaaaaagctatggaagattaccacctgcatcgtcgaggaagaagattggccaagcatagatctgaattttgtaaggtgatggagaagcaatggacatcaatg

SEQ ID NO: 182619 - DNA, 369 bp, Arabidopsis thaliana landsberg
aacagagccaaagcacttaaagtactatgtgcaaggctatatgaaatcgaaaggttgagaatacagagcagtcgatcaaagctacggtcagatcaggtacatatcaaatcaacaaatctttttctcatgttttcagtcaatcttacattatcaatgtctaaatcccatgaacagattggcagcggagaccgatctggacgaatccgtacatacaattttccacaagggcgagtaacggatcaccgtgtgggaatcactcaccatgccattgaggatatgatgcagggagagaatctggacatgttcattgatgcccttctcttgcgccaagaaatggacgccattgcttctttcagctccacttcatga

SEQ ID NO: 182620 - DNA, 86 bp, Arabidopsis thaliana landsberg
ttgtaaaaaggaactacactgaacctgaacttgtggtaaaaggaaggcggatcacaagcaccagtctcaacaagtttcgattgtaa

SEQ ID NO: 182621 - DNA, 460 bp, Arabidopsis thaliana landsberg
gttaaagtgcttgattactcagaaccagggcttcagctttatgggttctatagaactcctgctctggattgttttgtcaactggtctgaatcccgagtgttatctatctcacatgaatcttacaaggtagctttaagattctcagtactgttttctttaaaatgtatatatggctggtttttgaacttcatgagaacctttattgtattgattagaagtgttgtctttgtatacttcacattgatattttgaaatcaaagattcaatctttaattagtacctatgtttagtcaagaatttattgtagctttgattgtcattgaattctcttttagacaatttattgaactgattcatttctctcagggatggccatattatctcaacagagggtcattgttgaatattacatataccgttaaaccacaaggttctgcggttcagcttgtggtcgatgaag

SEQ ID NO: 182622 - DNA, 62 bp, Arabidopsis thaliana landsberg
gtcaaggatatgatggatcttgaatctgtgcatatggcttatctaagtgaggctttgcgcat

SEQ ID NO: 182623 - DNA, 386 bp, Arabidopsis thaliana landsberg
gcggcgtgggagtacgcggtggtccgtgatcgactcagcgccgaacgcctcggcccctacctgctcgcgaccgatcaagacctggcagcagcgttcgcgctctacgagtggaacatcaccgcggccgcgagcgtgctgtccacggtcgccatggccgaggtcgtggtccgcaacgcgatggacacccacctacgtcgctgggcgactgcccgccgcggcggcacatcgtggctcgacgctgcgccgctggacgcgcagggcagggccgacgtgaccaaggcccgcgggtacgcgcagcgcacccaccgcgggggcggtccgctgccgcacggcaaggtcgtcgccgagctaaacctcgggttctggcgctacctgaccgcctcccg

SEQ ID NO: 182624 - DNA, 125 bp, Arabidopsis thaliana landsberg
agctggagatattggtattttcagcagcgtcctggttttgctggcccagagaagcctgctcttttttacagcctatgatcaggaaacaagtgacacaggcgagtgtcagaaagctaccaataaac

SEQ ID NO: 182625 - DNA, 57 bp, Arabidopsis thaliana landsberg
cccctcgtgaacttcgctcatgatgatttcgacttcggatccgaaaatgcaaagaag

SEQ ID NO: 182626 - DNA, 295 bp, Arabidopsis thaliana landsberg
actgaacctgattcagacatgaacattgtctctaccccttcaaatgcaactataaatcaggtaataactctaacgttccattacatttaattttcaagtgcttatgtattttaaaattttgaattttatttttgtttagattgacactgaatcttccgaggcggctaactatgaaaacagcaactcgtctatcaagacttctaagaacacttcatcgaaagataatgcagctcaaaagtcatctacaaagcctaaattgttgtccacggctgagataaagaaagaaaaaaagtga

SEQ ID NO: 182627 - DNA, 973 bp, Arabidopsis thaliana landsberg
gcagtttgcaggagagccacattacatgagatgatcagagactatgatcaagcagctagtgatctccagagacttatcagcattctcgtaaagcaaagtgataaaacaaaaacgccagagacatctgtcgatcgtgcaagtagcagggaaagaactaaagcaggcccgtcaacggttgtctgtgatggaagaaaaatctaaagagggaattcatctggatttcttcctaatcatgtatgctcacttttgacaaagtcaattatcacattcatattattggagacctggttatcatttattttatacatatattcagtataattgtatgctcatattgaggctatcttctgttctcgttttgctaatttgcaggggagtgaagacatctgactctgctgctgatatcaaaaaggcataccgcaaagcagctcttagacatcacccagacaaagtaatctgtgttttacttactgataatgatccaaatcattattttcaatcagctgatgtgttctctttgatgtgtgtggactcaggctgcacagattcttgtcagaagcgaaagtgaaggaccatggttgaaggagatattagaagaggttcacaagggtgcagataggctcttcaaaatgattggagaggcatattcagttctttctgacccaactaaggtttggtttctcgcctattatgctgttaaaccttaaaatgcgattcatgtttgtcccctatgaacacttactaggaatagaacatcctaggacctgccgcacagaaatggttactgatcaggtttttgttgtaacagaggtcggattatgaacttgaggaagaaattagaaaagccagggcatctagagaaagctacaggagcagaaaggctgcagaagcaagtagccctccatatcagacaagcaggcgatactggaaggacagttggaggacaaaccaaaacacgccttcttggtggtag

SEQ ID NO: 182628 - DNA, 159 bp, Arabidopsis thaliana landsberg
gactttcgcaggaataccgcttcaatgaacactggacaaatgtaacggctatatatgggatggtttcagaactacaaaaccctttcatcaccaattatgaaatccgtaacgaacagacttttggcggacgtacacgtactacctatgctttccgtgcag

SEQ ID NO: 182629 - DNA, 1121 bp, Arabidopsis thaliana landsberg
atggctaaagggataaatgtagaagagggaaatgatctatctacctgctcaacagttttgccagttatttcagatggcaactttggagaaccagccactggagcaacagctgtgctcgtcctaataaataacaagaaacatattaaagtaacatcagcaacaacataatcaaggtgaatgtagaacatgtacagccgttttggtcattatgtgctggtcaaaatatgaaaaaagcatacccactacttgaaggaacaacaagagttgtctgtgttgtagtagcagaactagtagcaggagcagtagtagaagtcgaagatgggagacctgaacaacaacaatatttccttcagaaagaaaagaaaaaactatagcttctgatcggtaaaacaactgggcaggtatatatgtattcatgtcatagactataagcagaaggcaagccaaagcataataacgcgtatatatagattaaggtagatcaagtacatcgatcacatatctaatcctaatcaatgattcccataattctctaaattgttattcctaatcatcgtagcaaatgggataggcaaaatcacaaacaaatcctgagacaaaacataaaaacaacttactgaatgagaatgcaggactagtagtttgtggttgtgaagatgatgcaggtgttgatgtcttcggtacagcaaacccagtaaaagagttcgtagatccagtggcaggagtcgagctagccaaaccaaatcctgtagtactgaatgtagcagcggagctagccggagtggtgttggttgcagatgaagtcacaccaaaagaagggaaagccattgtagaagcgggagctgaagaagctggtgcactagtagcagccggagtcgaagaagaagtagtagtggtggttgcaatggaaaacactgctccggatgtgctagatgcaggtgctgcggacgttccggttgaaaggttaaaacctgaattggcggatgtccaaatgagaaggaggacgaagatgaagccgtttgtggaggacagaaggagtggtggagctggtggtcgacttgcagtgcttttcaagaaagagaacccggtagaagcggagaatggagaactgaggcattcga

SEQ ID NO: 182630 - DNA, 478 bp, Arabidopsis thaliana landsberg
atggcatttggtggcacaagcgtaaaagccatggagttgcactggaatcagcatcaactttcagagttaaccaacactttcgacatcatagttgcaagcgattggtaccttgctctccattttagtcttccgctttttcgatatgtttttttctcatcccttatcatgacacatatttttatgattcaacagtacatttttcaaggaatttcataaggaccttgcgagaaccatcaagatgctgcttaaagccaaaaaagcctccgaagcattatttttcactcctaagagaggtgactccttggaaaagttcatgaaggagattaaggacattggtttacactacattttaactgaaaactacgatgcacaagtttggaagcgccatgagacgcttgtgaaaggagacgaagcttggcctaactatgacaagaatcattgctaccctttacttattcaaattactaatcatatttag

SEQ ID NO: 182631 - DNA, 177 bp, Arabidopsis thaliana landsberg
atgatgctcaaggatctggcagcaattcagcagcatcaccaccagcagcagctggccgcggccgccgccgacgagaacatgtctaacttgacctccgcctccggcgaccaggccagcgtctcgtcccaccccgtcccgcctcccgccaagaagaagcgcagctccccgggaatccag

SEQ ID NO: 182632 - DNA, 223 bp, Arabidopsis thaliana landsberg
tttcattacgttttttatccaaataacttctgagcccgtgtttattctgagattgagttactttactcttcttggtttttcacgaaccctagccacagtcggtgtacaacaaatcgagggtgaacgagttcgagaagagagacgtttgagagaaacccagtacaccaaatgggtacactataatagtacaccaagtgagaacactagaacagtacaccactag

SEQ ID NO: 182633 - DNA, 2105 bp, Arabidopsis thaliana landsberg
atgatgagtaaaggaaagttcttgaaagccaaagtactctcaagagtgttctctgaggatcttgagagagtaaaaaccaaaatactcgatcctcgtggacaaacgatacgaagatggaacaagatttttctcatagcatgtttggtttctctattcgtcgaccctttgttttttttcttaccggtcatgagaaatgaagcgtgtatcactattggagttagacttgaagtggttcttacacttataagatctttggctgatgctttttacatcgctcagattcttatacgttttagaacagcttatatcgcgcctccttctcgtgtatttggtagaggtgagcttgtgattgattcaagaaagattgcttggagatatcttcataaaagcttttggattcatcttgttgctgctttacctttacctcaggtatatatatcttcagcttcagtgattcatatatgtgattctccaactctctaagaatcttggtttgttatgttttcaggttctgatttggatcataatcccaaatctaagaggctcaccaatgacaaacaccaagaatgttcttagattcatcatcattttccagtatgttccacggatgttcttaatattcccgctatctcgccagatcattaaagccaccggtgttgtaaccgagaccgcgtgggcaggagctgcctacaaccttatgctatatatgctagcaagccatgtaagttactcaactcttagctatagggtctactgtatctatcgtaagactaaatgtagcagattaggtctgttctgttttttcttgaaaagaaactgaaaatggagataactgtttccaggttttaggagcttgttggtatttgctagcagtagagaggcaagaagcttgttggagacatgcttgcaacatcgagaaacagatttgtcaatacagattctttgagtgtagaagattggaagatccacagaggaactcttggtttgaatggagcaatataacaacaatatgcaaaccagcaagcaagttttacgagtttggtatattcggagatgcagtaacatcaactgttacttcatcaaagtttataaacaagtacttttactgtctatggtggggcttgaagaacctcaggtgaattaaacagttctttgcagatttaactccattaggttatccataacatgtttttatatattctttagctctttgggacaaaacctcgccacgagcacttacgctggcgaaatccttttcgccatcatcatagcaactctcgggcttgttctgtttgcattgcttattggaaatatgcagacttatttacagtcaacaacaatgagacttgaagagtggaggataagaaggacagatacagaacaatggatgcatcatagacaacttccaccagagctaagacaagccgttagaaaatatgatcaatacaagtggctagctacacgaggagtcgatgaagaagctttattgataagtcttcctcttgatcttcgaagagacataaaacgacatctctgtttcgatcttgttcgccgagtaagcctctcttttgtgtttttatcaattcttgatatacctacttgatgaaatcttttactaagagttctttgaaataggtaccattgttcgatcaaatggacgaaagaatgcttgacgcgatctgcgagagactaaaaccggcattatgcacggaaggaacgtttcttgtaagagaaggcgacccggttaacgaaatgctcttcatcattagaggccatttagattcctacacaaccaatggaggcagaacagggttctttaactcttgtctcataggaccaggggatttctgcggggaagagttgcttacatgggcactagatcctcgtcccgttgtgatcttaccgtcttccacacgcaccgttaaagccatttgtgaagttgaagcctttgcattgaaagctgaagatttgcaatttgtggcttcacagtttagaagactacatactaagcaattgagacataagtttcggttttattcgcatcaatggaggacttgggcggcttgttttatacaagctgcttggagacggcacaggaagaggaa

SEQ ID NO: 182634 - DNA, 90 bp, Arabidopsis thaliana landsberg
atgacttatagaccgccgctgacactagtcgacagatgcctgatactctttggcttcatcgccgaccacgcaaagctcattgggcaaatg

SEQ ID NO: 182635 - DNA, 385 bp, Arabidopsis thaliana landsberg
ttcctccatcttctttgtctcgaacttggaagcaccaagtcttcccgagcttccatgggggagatgttcgaaaaacctttcttagtcacgtcctagaggcgttcagaggaaagggaattgacccatttattgataatagtatcgagaggagtaagtcaatcggtcctgagctcgtagaagctatcagaggatcaaggattgcgattgtcttgctctcgaggaactatgcttcttcgtcgtggtgcatgaacgagttggtggagattatgaagtgcaaggaagacttgggtcaaatagtgataaccattttctatgaagttgatccaactcatataaagaaacagaccggagattttgggaagggttttcaaagaaacttgcaaag

SEQ ID NO: 182636 - DNA, 434 bp, Arabidopsis thaliana landsberg
acaagggttgttgaagaaggctttaacatgacgaaacattcttgcaatatcgctagacctaatcccggaccacaaggtaaaggtcttggcacattatatcagagagtaacaaaacaatttgctttgaatgaagacaaattccaatcatctttataactctactagtcccatatgggtttaccttaatctataatgtgacttttctatatagaaaacgctgcgttgccacggcatcctgtggatcttgaaccggtagatgtattctacaaaggtagtttgcctgagtggccaccagaggatgctttcaatgataataaacgattttacgtggtaagatatattgtcagtttcacgtatgcctttgctcatgacagtccagtagtagtgatgtgtttgattttgcaggtgaaaaaatcagagctgctaacacatga

SEQ ID NO: 182637 - DNA, 1296 bp, Arabidopsis thaliana landsberg
acccttttctccacgatccttctctctctcaaccctcttctcttcttcttcatcatcgtcttcaatggagaacaacgaagcaactaatggctccaagtcttcttctaattcattcgtgttcaataagcgaagagctgaaggatttgacataaccgataagaaaaaaaggaatctagaacgcaaatcccaaaagcttaatcccactaacactattgcttacgcacaggtcatcatcatagacttcttcgttgttttttccaattttggattcttaatctctcacaatacttaaaaatccgatctttcagatacttggaactggaatggatacacaggatacatcatcttctgtattactcttctttgataagcaaagattcatctttaatgctggagaggtaaattaaaatcgcttacagatttttcagcagtttaaagtttgttacttgatcacttacttgtgaattgaatgtgttttttagggcttgcaacgtttttgtacagaacataagattaaactatcaaaggtaagtttcctctgttttctctttgtatgtgtgatgaggtgagttttaattttgatgatttggtgaatttttttttacagatagatcatgtatttttgtctcgtgtttgctcagagacagcaggaggacttccaggtttggttccagctgtgacttttctctttgttgcttgacctttttagtttatggtgggtgatgctaagttttttcatgttttgatttgaataggtcttctactaactctagctggtattggtgaagaagggctttcggtgagtattattgacatatttttgtgtgtttcttcttgtgtatgaaattgctgaagtattgtttttttgttacaaaggtgaatgtatggggtccttcggatcttaactatttagttgatgcaatgaagtcgtttattccacgggcagctatggttcatacacggagttttggtccctcgagtactcctgatcctattgttcttgtgaatgatgaagttgtgaaaatatccgccattatcttaaaaccgtgtcattctgaggaagactctggcaacaaatctggcgatctctcagttgtatatgtatgtgaattacgtgaaatattgggaaaatttgacttagagaaggctaagaaggtttttggtgttaagcctggtccaaaatatagtagacttcagtccggtgaatcagtgaagtcagatgaaagagatattacggtatacctgcgattaccaatgactgtttttttcctctctctgagtggagatattgtatga

SEQ ID NO: 182638 - DNA, 864 bp, Arabidopsis thaliana landsberg
caatcttttgcggctggacggcctgcatccatggcttccccttcgcaatcgcaccgcttatgtggaccctcagtcaccgattctgggggcggaagctttgacactttgaatcgtgtcatcgctgacctttgcagccgtggtaatcctaaggtaatgaagaacattgtaaagtattctccttttttatgctttagtagaaacccatataacccttttgcttttattgcttatctgacggaatctctctgttcttgttaatggaaaattcgaagttttagttcttataggtctggcaatttgtgggttttgatctattgttgttggtttccatcaagtatgcgacttatttatgatttttggttgttgtattaggagggagctcctttagcgtttaggaaacacgtagaggaagcagttcgtgatcttagtggtgaagcttcctctaggttcatggagcaattatatgacaggattgctaatttaattgagagcactgatgtggcggaaaacatgggtgcactcagagccattgatgagttgacggagattggatttggtgagaatgctactaaggtttctagatttgcgggttacatgaggactgtgttcgagttgaagcgtgatcctgaaatcttggtgcttgctagtagagttttggggcaccttgctcgggcaggtggagcaatgacttctgatgaagtggagtttcaggtaagattgtttgtttccctccccttcctatcactgtctcggctcatagttgctcaattcttgatctcgttttcacagatgaaaacagcttttgattggcttcgcgtagacagggtggaatatcgtcgtttcgccgccgttttaatattaaag

SEQ ID NO: 182639 - DNA, 136 bp, Arabidopsis thaliana landsberg
tctcaaaggaggtttgaaagggaaaaggtggacttggaccatgaaagacttccactgcacttcgatgagagggtaacttattccaagttcatctcatgtactcttattgcctttgtgttcttatttgaagattttg

SEQ ID NO: 182640 - DNA, 31 bp, Arabidopsis thaliana landsberg
ctttgatcatcgtgagagacgccccgaataa

SEQ ID NO: 182641 - DNA, 2066 bp, Arabidopsis thaliana landsberg
atggcttcttcttcttcttcttcgtctcgcacctggagataccgcgtctttacaagcttccacggagcagacgtccgtaaaacatttctgagccatttacgtaaacagtttaactacaatgggatcacgatgttcgatgatcaggagatcgagagaagtcaaaccatcgcacctgctctcattaaagccattagggaatcaagaatctcaatcatcttgctatcgaagaactatgcttcttcgagctggtgtttggatgagttgttggagattatcaagtgcaaggaagctatgggacaaatagtgatgacggtcttctacggagtagatccatctgatgtgcggaaacaaacaggagaattcgggagggctttcaatgaaacgtgttctcgaagtacgaaagagaagaggcgaaaatggagtcaagctttgaaccatgtgggaaacatagctggagaacacttccaaaactggtttgtttgttttcttttaattaattttgtgaatattcttttttcttaaattgatatgcattatcaattttacattgtgatttttaattatcacttgttagggacaatgaatcaaagatgattgaaaagatttcaagagatatttcaaacaaactaaatactacaatctctagagattttgacgatatggttggacttgaagcacacttggaggaaatgaagtatttgttagatttagattataaggatggagctatgatagttggaatatgtggccctgcaggcattggtaagactactattgctagagctttatatagtttacttttaagtagtttccagcttagttgttttgtggagaatcttagtggaagcgataatagaggtcttgacgagtatggttttaagctgcgtttacaagagcaacttctttcaaagattttaaaccaaaatggtatgaggaaataccatttaggtgcaatacaagaaaggctatgcgaccaaaaagtgcttatcgttcttgatgatgtgaatgatctaaagcaattagaggctttggctaatgagactagttggtttggtcctggaagtaggatcattgtgaccacagaagataaagggcttttggagcaacatggtatcaacaaaacttaccatgtaggttttccatctatagaagaagctcttgagatcttttgtatatatgcttttagaaaaagctctccacctgatggtttcaaaaagcttacaaagagagtaacaaatgtttttgataaccttccattgggtcttcgtgtcatggggtcatctttacgcgggaagggggaagatgagtgggaagctctattggacaggctagaaactagtctagatcgaaatatcgagggagcgctaagagttgggtatgatagcttgcaggaagaagaacaagctctatttctccacattgcggtctttttcaactacaacaaagatgagcatgtgattgctatgctcgcagacagtaacttggatgtcaagcaagggttaaaaatcctaaccaataaatcactcgtatatagatctaccagtgggaaaatagtaatgcacaaattactacaacaagtgggtacaaaagcaattcaaagacaagagccttggaaacgtcacatcttaatagatgcgcatgagatttgttatgttcttgagaatgatacagtaagttattttacttcgagttaaataattctttagtaaagtaggtttttctttttttcctgttgtactaacatattcttcatttggggtatattataggatactagagctgctttaggcatatcgcttgatacatctggaatcaacaaagttatcataagtgagggagctttcaaaagaatgcgtaatcttcgattcctaagtgtctacaatacaagatatgttaaaaatgatcaagtggacatacctgaggacttggagtttccacctcatctacggttgcttcggtgggaagcatacccgagtaatgctcttcctactacatttcatccagaatatcttgtagaacttgatttgaaggagagccagcttgagaagctttggcaaggaacacag

SEQ ID NO: 182642 - DNA, 341 bp, Arabidopsis thaliana landsberg
atgtctacaaatctccaccttgccaccgcggtgatcctcctcctcctgaccgcgagccaaagcggtgtagcaatggctcagagggttatgggaggcggacgcgatccatgctccgtgtcagatttcaaagtgttgtgcagatcagtggttaagggccaaaagaatgttaacgcagcgacggaggtttccataagagagctgatgaaaagaacgatcaaggccaaagaagccgccaagattagccggaaaagtggaggagggctcaaaacttgctactcaaactatgatagtgcactcgaaaatctacaaaaggcgttgaaaaacatcaaacaaaatgatgg

SEQ ID NO: 182643 - DNA, 80 bp, Arabidopsis thaliana landsberg
cgaactgtttccactaaccgtcaacaacaatgctcacactacttgctaatccactcgctggctagtcacgtctccaacac

SEQ ID NO: 182644 - DNA, 234 bp, Arabidopsis thaliana landsberg
atggcattcaatggcaccgaacatttcaaaaagaatgagctggcgaatgttctcgagaaaagcggtgtgaaccttggcgccgatctcaatgactacacttattttaatgaaaccgcgtacgagttgcatgtgccgacagatagaccaatgggctttaaacaaggcctacagatactggaagactgggcgcatggtgaaagatctgatcatggagaaattgacaaggaacggggg

SEQ ID NO: 182645 - DNA, 145 bp, Arabidopsis thaliana landsberg
ccaccgcaagctccgtatggtagtcaagtaccccgacacccagtatttccctcagttgatcgccagcgagctcgaatttcacagttcccccaatttggttttctgccaccgtgaaaacgacctcaccacggccagcgaaattccg

SEQ ID NO: 182646 - DNA, 377 bp, Arabidopsis thaliana landsberg
gtacgagagcatgcagcagcagttctagcaggcctaatgaaaggaggagatgaagattttgctgcagattttcgtgatagatcctatgcagaggcaaactcaatccaaaagagaagaaatcggaggttttcctttcttcccttttaagcatttttttgtctcaatttttgtcttccattatggaaacgcaaatgaaaataatatatagtaagctgtgatttgcatatcttgtcttcgattatgtttttaacatgatcctgagaattgtaatcgatttttttcaggaaatcaagttcaactcagtccattgcgggggtgcatggagccgttcttggtttggtagcttcagttttgtctgttccttatgacatgcacag

SEQ ID NO: 182647 - DNA, 152 bp, Arabidopsis thaliana landsberg
atgactgtaacgcagttgttagtaacggatgtgcggatgagatgcaagatccgtctgttcatccgtggggaggtctcaccacaacacgtgatgggtcgcttacgcttcttgattgctatttgtatgcaaagtctctcaaaggacttcaaaat

SEQ ID NO: 182648 - DNA, 470 bp, Arabidopsis thaliana landsberg
ctttagataatgcactggtctttgaaacacctaaaggtgggacagaaagtcagctaatgcttcgtccaaaatatccaccactttatcttgaaagtgaatatcttaatctcgagagtgacaacgtagaacctcttgtcgtcgttcatgattcttggaaagttggagatttagttgattggttgagagatgacatttattggtctggagaaattgtggaaatgagaggtaggagagcatgtcaggtatgaaacatgttgctgttgtgaagtttgtcattgttctttagttttatggttttatcagttgtctacgagtaactaaaatttgacaaaatttttgttgtttttttgcagatcgaattgcttcctaaaccagaaggggaaggagatagttatcaagatttgtgtaagaatttgcgtccacggttggattggtcagtggaagatggttggaaagtgccttgcactgcg

SEQ ID NO: 182649 - DNA, 207 bp, Arabidopsis thaliana landsberg
atgaaacatcacttggctggattgaataatagaagtgcatgcaaaaaggtttcttccgaggttcaacattcgatgagaaaatcatgggaagaaaacaaagagaaaccgaagaaaataatcgttgtggatcttgatatgcaagacgatgaagtaaatgttggtcaaagttctcatcaatcttgcagttcttcaagtcgaaaaagaaag

SEQ ID NO: 182650 - DNA, 176 bp, Arabidopsis thaliana landsberg
aaaacctatatcaggactcgtcaagaaaggaggaaactcttacgaattatgaagtaagaaccttgcaagagaaaacgattagggaaagcgacgaagaagatgatcggagagagaggtcgaagctaaagtatcgttctgaagaagccgatgaacgagtcaactcgcagctgaactag

SEQ ID NO: 182651 - DNA, 268 bp, Arabidopsis thaliana landsberg
gtccataaattccacaaagtccacgggaagagcagaccgtgtccgattccagttggcgggacattgacaagcaatcgagatacttccaaacccatcttcatgcttgtgattcgagaagctgagagtgacgtcttgaatggtgctttttcccagacccgaagagcaaaggggcaaatgaagaacatgtgtaggcacgattcatcctcaccacaacgagggcagttagcaacagggttaatgtcatggatcctcagattttcgccaacag

SEQ ID NO: 182652 - DNA, 397 bp, Arabidopsis thaliana landsberg
atgctggtgctcttcaagcccacactaaagaatgattttgatagagctggcgatgttctcattatccgtcaacccctcagatcaaatgatcttgttgaagctggtggtgatcccgaagttgttgattttatcaacaatactgtttacatgagtaaaggtcgtcgtcatgtcaaaagagttgtggatttgataaagggaggtaactacatggatgtgaaaccagttgtctacattgcagcagcaaagattgcaagtctcacacgagggcaacccatcagtgaacttaagaatatccttaagcaaactcctgaagaggtgaaggaggataaagacacaggatcaaaggtttctgagaaagttcttgagaagaaggaggagaaggaggggaaatccggac

SEQ ID NO: 182653 - DNA, 727 bp, Arabidopsis thaliana landsberg
gctccaccttcagatgttcaggacaaagtttcgttcataatcaataatatctctacaacaaacattgaatctaaagggaaagagtttgctgaaattttgccccaacagtattatccttggtttgcacagtacatggttatgaaaaggtactgatagttgtattcttcatgcaaggtttctttcttattttttccctccaagtgtgtaatacctgatagagcgatgtgtttaatacctgatagagcgagcatcgagccgaattttcatgatctgtacctgaagttcttggacaaagttgattccaagctgctgtttaaggagatacttcaaaatacttacgaaaattgcaaggttatttttcttcacacaagtgatttgcggtgataagtgtactttttttcagcaaatttttctcttcttaatttcttttgttttgcaggttcttttgggctcagagctcataaagtcgagttctgaagagcgttctcttcttaaaaatttaggcagttggcttggaaggttgaccattggaaggaattatgttttaagggcgcgagaaatagatccaaaatccttgattgtggaggtaattgctgctatttcctttaaattgatctcgttcatttgtaatacacagtcaaattgtagatatgaactttgttttcgcatcctttgacaggcctatgaaaaagggttgatgatagcagccattccgttcacttcaaag

SEQ ID NO: 182654 - DNA, 98 bp, Arabidopsis thaliana landsberg
aagaacctccgtctaatgggtatacggattgtccacttgctacaggcagtgaacttggcagctccaatgaagacaaagttctctatcggatattatga

SEQ ID NO: 182655 - DNA, 64 bp, Arabidopsis thaliana landsberg
atgaagtccaaagaggagaaggattatgtggatatgcaatgggctttgtggttttatgaatgcg

SEQ ID NO: 182656 - DNA, 355 bp, Arabidopsis thaliana landsberg
aatattcagctgagaatgaaactgtgatagagagatctgtgctgatacatagagcggtgttgggctctgttgagcgtctttttgccatattgttggaacagtacaaaggaaaattccccttctggcttagtccccgccaggccatagtttgctctgtttcagaggattatcgttcctacgcagacaaggttatacattcatgactgtactcttaacgagtttacttgcagagtcttcttatatctctcttcctaatttcctttgtttgcgtatattcaaacaggtgagagatcaaattcacgaagctggctactatgttgatgttgacacaacggatagaaacgtcagtgacaag

SEQ ID NO: 182657 - DNA, 499 bp, Arabidopsis thaliana landsberg
atgccaaatgaagacattatactcaaccacggcatctatatttacaaccttataagtctttggcagtgcatagcctctagcaaacctgaaatcgccggtacctccgatgatcggcaactctctctcctccagcagtatcggattccgtccatacaacgcagcggtgctgccgataaactctccttccgtgaacacaaagttaaagaccattgtaaaaccaaacgttttcatgtccgtcgatgcgtacaacccctgagctctccccacttccttcgagctcagctcgggtccctcagtcaacggggcgtcaacaataagaaccgcaccgaatacagtagcggaggagtttgttcccggggcttcagcgactctgatggtggtgggtttgtcaccggagatgatgtcatggaagtagaagtggaggtgtgtgagtttatccggcttatttccttgaaacggagtcgttttggagtaaggtttggattgtgttacggtgttg

SEQ ID NO: 182658 - DNA, 172 bp, Arabidopsis thaliana landsberg
gtacccattcttgggttcttacaaggtaggctcgtgcccgggttcactcgtgaaagaaaggttatagcggtaaagtaaagaaaatcctcccttcttgcttccttagggtacgtcccctatcgcctttcattcggaaaagctcgagtcattatccttcctgtacttcaagtga

SEQ ID NO: 182659 - DNA, 757 bp, Arabidopsis thaliana landsberg
atggggagcgtctccgggttcaaatcagacggtaagccatcccaagagcaagttttcataaacttccggggagtggaactgcgctacaactttgttagtcatctcgagaaggaattaaaaaggaatgggatcaatgccttcatagacacagatgaagatatgggccaagagttgaatgttctgctcaagagaatcgaaggatcaaagatcgcgctagcaatattctccccgaggtatacagagtcagactggtgtctgaaggagctggctaaaatgatggaatgcaaggagcaaggcaagctcgtggtgattccaatcttttacaaggttgagccttccactgttaaaagacaggaaggccagttcggtgacgaattcagggatctggtaaagtacattgataaggagacgaagaacaaatggaaaaaagctttagagtccactcccctcttaataggactcttggtaaacgagaataggtaatacttataattcatatacttgagatctcaaaaagtagacctagctcgaaccatctaacttttctttgttggcagcaatgagagtgaaatcatctccagaatcgtcgacgaggttaagaaagccctgagaaaaatttcaagggcatctctcaacaatccaccagaagtgaccgcactttccccgacaatacaacagaaaaaacttgaaagctcttgcggaattgatatacgtctaaagcagctagaagaaatgttaggctttgaggaaaaaactc

SEQ ID NO: 182660 - DNA, 400 bp, Arabidopsis thaliana landsberg
catcttattagaggtagtggaagtgtgggtgaaatcagggtggtgagtttgagaatagaggaagaaacggtgtacaggacgccacgagagtgggaaattgttgcagacttggaggaagaactcgtgagttagttgaaatttggtggaggagagtttagagacgagacgtgaatcaggtgagttctgttgctggtagagaattgtacagactcggagaagatggtcttggtttatcggtgtgattgtggttggagttagctcggtggagaagaagcggtggttgagaatgaagcatcgccgaattgagtttccgatgttaatcatcctccgagaagtcacgacggccacagccataagtttcccggccaatggagaaaacaaaagacaagaactaaattaa

SEQ ID NO: 182661 - DNA, 146 bp, Arabidopsis thaliana landsberg
gtcagaatggccaccggaaggcttcctcatgggtggagatctccccaattttccggtcagtgccggggtcatctccattgacttccactgcccgtggtggttcccgggagtttaaggctaacctaagcttagaatcttattcttag

SEQ ID NO: 182662 - DNA, 983 bp, Arabidopsis thaliana landsberg
atggggaagaagacgaagaagcctggtaaaggaaaggagaaaactgagagaaaaaccgccaaagcggatgagaagaaagctcgtcgagagggcaaaaagctttctcctgaagatgacatcgatgccattctcgtaattactctctccctcagattctgtattggtttaagcttaggaatcagtgttttgggttctgctctgttcatagttttatggagtatagtgattaaaagaaatttcttttagtataataattgtaacaacaacaacaacaaaaagttgatatttttctatcatttggatagagctggtggcagaatttaggggtctctaatatttgatgttgtttaccagttgaatattcagaaggaggaggctaagaagaaagaggtccatgttgaggaaaatgtggcagcaccatctcctaggtcaaactgttcggttaggctcttacttttttctttttcttaaaggttgaaactttcttgatctaaagctattgaattttgccaaatctgggctgattgatggacatttatgcagctcactataaatcctttgaaagagactgagttgatactctatggcggtgaatattataatggccagaaggttagctttgcacaatcttttttcttcagagttttgattttctttgttaaggagtgtttgattatatagtcatatgataatgattggtttccatgtaaatgcagacatatgtatatggtgatctctaccgatatgatgtatagaagcaggagtggaagttagtttcaagccccaatagtccacctcctcgcagctctcatcaagcagttgcttggaagaattatctctacatatttggtagatgaaaagatctttagttattttcttgcattttcattcctttcgagacatatttgcaagtttctttctttttgtcgattagggtggtgaatttacattctccgaatcaagagcgtttccatcactaccag

SEQ ID NO: 182663 - DNA, 141 bp, Arabidopsis thaliana landsberg
atgtgtcacgcagctctcaagtatcttaagaaaggagcgcctggaagagactcatcaagcggtggaggttcgattattaacattagcgcgactttgcactacacggcttcttggtaccaaatacatgtctctgcagccaag

SEQ ID NO: 182664 - DNA, 698 bp, Arabidopsis thaliana landsberg
atgagaatgaggtgggtgaaatggcatacaaagtgtgtgtcgataaattgaaaagtttgggaattgagttcactcctatcaaagaatctctcaaggatactgttgttagccttaaggagaggagtcttcttatatgatctttgacatggactccttgtcatatctttatttttcttgagatttttaatattaaatatgatgtctattgtctaagctttcacttaatgaaatatttgattataatcttctaatattaatactaccaaagactgtttaatttaaatctgagagagtggtaaaactgcatccttctctaagaacactgtctaaaacgaaaatggtaaaattgtttttattatttttttattttttttttggtaaaatgtgaagatgcatgtattaatttgaccttcaagaacctagatttcaaggcacaccattttaatttagcttatcaaactagcatactgatatcaaaaacagtctaatatagtaaaaagcaacctataacatatcctggtaacgttaccagttaataccactgttagtaccaaattttacccaatagacaaagaatcctccatatgaaaggcaaatcttacctaactcgatcttcctactcttaaaaattcacaatgtttcttccaggttccagctactaagtagcccaatgacattctacaaacttcatcgacctt

SEQ ID NO: 182665 - DNA, 1525 bp, Arabidopsis thaliana landsberg
atgtctcaactcgccagtcttattatggatatcattgctggtacatacaaggtcgtagatgaaaaatacagcaacgccttctttgacggaagaaactgtgagttcccagcaaagtatttaaaatccatattggtcatatgtgctaaaaaagtagtttagtgaagcgttatgatctgttagcttgttgagatcattgcccgtttcatattttctaacacccttaagctaatatatcctgtaagagcaattttactccctacgatgagtcataaaccacttggtttgattttcgaaaattcttgcttcgttttcttagtgactgaagcagatatggagggattaaagcatgctttgaaacttctttctgaggctgagaagcagctgagagtttctaatgaccgttcaacatggttcacagcgactttgcttcagctgggatcaatgccttctcctggcaccacacatacaggaagtagtagaaggcaaagctctagagcaactgacgatgacccatcaagcatttcaagggaagtgatggcttacaaacagagaataggagggcttcgctttagtaagtcagcatctccagcttcggttataaaaaggaacgggaatcattcccatgaagcgaaaccattctccagggttatcgataataactgctataaatcctcctcatctagccaaatgatagagagcgaagcttctgttgcctcacatgaaaatagcatcgcaagcaccatgatgcttaatcaaagaagttcagagaaacttaacgatatatggagaaaatgtattgaacgatgtcactcaaagacactgaggcagctgctctatactcatgggaaacttatatctatcagtgaagttgagggtaaaaagcctaaaagtttcttcttttctcacttttttggttttctcctttcaaaagatcctaataaaatgaacatgatttgcaggtattctagttgcttatatcgcgtttggagaaaacgatatcaaactgagagctgaaaggtttctaagcagtatcacaaactcgattgaaatggtactaaggcgaagcgtagaggtcaggataattctcttgcctgaaaccgagttactcgttgtccctcaccaaacccggaaaccagaaatgaccaacaaaagtgggcatctaaataacatcgctggtttaaatgccgaaaaagatgttgaagttggtagcagcgtggaaagcagatcaaaactcccgatgcaaaggatagaatcaatcatccgagaacaaagattagaaaccgcgtggttacaaaccgctgacaaagacacacctggatcgataatacgggtaaaacccgaaaggaatcagattctacctcaagaagatacttatcgccaaactaacgtagcttctgctatttcttcttctggcctaaccacacatcaatgggtagatgagttaaacaatgaagttaagcttttgaaaatcggcgacaatggtgagcttcacgagaatctaaccggtacaagaggacagcattga

SEQ ID NO: 182666 - DNA, 316 bp, Arabidopsis thaliana landsberg
attacagtcaaggaatgccataatgaggaagcacagtgtgcatatgtcattgacaaaataattgaaatcactaatgatggctcaacaccatgttgttcccatggagatattgctattctttataggaggcaggtcagtccttttcttttccttgatgacatgctgttagaatgtttaagattttaacatatttacttatgtgttggtaaaccatgaatgtactgatattcaggtgtcaggtaaagtgtttcaaaatgcattccgccagagaaaaataccatttaacgttcatggtgttgctttctacaggaaaaag

SEQ ID NO: 182667 - DNA, 1055 bp, Arabidopsis thaliana landsberg
accctgctggcaacagacgtgggaagtgttatgttccaagctttcatgtgtaggatgcggcacataatcacttcttcaaagcacagttcacctgttagtctgactaggcttagcggaaactttttccttaaccagctgccaaatgagcctagtactctgacagacaacatatctgcaaggaacgagatatataagaaagatatacctaccagaatagctggagattttgacggaggaatgttggatagccacatgagtgcaccagttggcgtatggcggactgtttcagtcccaaaaacagcaaaacctgctagttcgccaaatattgaagcagggtcatccttgccccatagttcatttagcgaagacagcttactttcttatggtcaaaggcaaccactgcaggatctcctagatggaatagcgctacttgtacagcaagctacctcttttgttgatttagctctggattcagattgtggagatggaccttatggctggcttgcattggaagagttatggagacgggaattgtcgtgtggtccctctgctggccatgcaggttgtgggggaactttggcttcctgccattctctggacattgctggtgtcaagcttgttgatccactctctgctgaggtaagctttgaaaatggtgtaagatgcatgtaaatgaggctatccaatgtttgacgttcttaattgttagtttgggctagaaatattaagtggtcacagatttgtcgtataaaagtttgagcttattgatatttctcttgcttctacgtcttttcttttctgggcgactgttggttatagacaatgatacattatgtcagtttaaacctggttatgaagctttctttttttatttcaggtttttccttcgtctgtcattactcttctgcaatctgacatcaaaacagctctgaaatctgcatttggtcagtcagatggtccattatctgttacagattggtgcaagggccgaaatcaatcgggggatggaggatctatttctgagggatttactgctgagtcagccctgagtgaag

SEQ ID NO: 182668 - DNA, 2149 bp, Arabidopsis thaliana landsberg
gctgctccagtcataattgtgggttcacatgtgtgggttgaagatccacatttggcatggatagatggagaagttactcgaatagatggtataaacgttcatgtcaaaaccaagaaggggaaaaccgtaagtttctataaggttacatctttattattttacttcaatcaatgagcttgtacgtggcctcgacctttgggtttaggctaaaaaagagtaggaataagtccgttgataaatttagatgtcgattaatgttacgttttatcttggaatgggatactgtcatagtcccgttatatccctagatcggcaggtttttaccttctgcattcaaggtagatgtaggttattgtgcttttagtgttttgatcaaaccaagtaacataataaatagagaaaaataccttcaaagaacgtttttggtatttactgaatgtcttaaggcaagtttatactcagaaatatggagtgcataaaatgaagctttcaggctttctagtcggcagttatcttgatatgttgtgagagctaattttattgaaaccgttacacgtgatagggaaacagcttaatgtgataagatgcagcatgagacgtaaaaacatgatttacgttgtcattttatatgttgttgcacatgatatattttcatgataagttctttgctgtcaagtatagatgttcacacttccttgttggccatggttctcctcacatatccccatgttgtatggatttcaggttgtgacaaacgtatattttcccaaggatactgaagctccatctggaggtgtagatgacatgacaaaactttcatacttgcatgagcctggagtcttacgaaaccttgagacaagatatgaacttaatgaaatatacgtaagatattttatccttttttttctaacatctcttactttttgttgctgcaaaggaaatcatttggtataagctatgatactaataagttttgtgttacttctgtagacatatacagggaatatcctaattgcagttaatccattccaaaggctgcctcatatttatgaaactgatatgatggaacaatataagggaattgcacttggagaactaagtcctcatgtttttgcaattggggatgctgcatacaggtttgtgcatgttcacgtccatcaatttatcgtacttctatctatttcgtgagataatttactgatttggtcacggtgtaagttattagggcaatgattaatgaagggaaaaacaattcgattttggtaagtggagaaagtggtgctggtaaaaccgagacgacaaagatgctcatgaggtaccttgcctttttgggagggaggtctggtgtagaaggaaggacagttgaacagcaagtcttagaggtttgtttatttttttcatgaaaaatgaggatgattccatatatggctgtatacagcttaatgtgtatatccccaatggcacattgcagtctaatccagttctcgaagcatttggcaatgcaaaaactttacggaacaacaattcaaggtacgttcttcatctttccaaatctggggcttatcagctaagttcattaattagaaatagttcatactaggatttattcttaaatgcttggttcctaagtttttttttttaatgttgttaattgttcttccgattatgccttaagaaaatcgtattcattgttacttgacctttttcattcttcttgatgttacccacctcgcagtcgttttggtaaatttgttgaaatccaatttgacaagaatggaaggatatctggggcagctattaggacttatctgctggagaggtcccgtgtttgccaaatctcagatcccgaaaggaattaccattgcttttatcttctttgtgctgctccgccggaggtatcttataatttgttttcttctaattgacacattaagtgcatgtcatccgatgctgatatcgtactcattttttttcttctattttcgggtttattttgcaggatataaagaagtacaagctggaaaacccacataaatttcattatctaaatcagtcaagttgctataagttggatggtgttgatgatgctagtgaataccttgaaaccagacgagctatggatgtagttggaatcagtaacgaagaacag

SEQ ID NO: 182669 - DNA, 836 bp, Arabidopsis thaliana landsberg
atggtgaaagttgcattgaagtatctctgcaatcgcgatcgagagttggtgattgaatctgaaccacgtaacagtggttttgtcaactcatgtatttaaaccagggtttagaactggaagattcacctgatcaggagcagtgagtatcgcttcaacatctcttagaaactgtccgtcgatatgaggcaccatgtcgttaaaatgtgaggatgaaacgtctaaatgatgagttcaagtatctgatttatagaaaagaaaagacaggtaaaggaatgcgagaggttcgtgtctgttcgtttggcgggaaaaatttccgtactgcggctgagtttggcggcaaaatatattgttacggctgagttatacccaagatatgtaactattatacggctgagttgtcaagaattattaaaaaggacaggtaaaggaatgcgagaggttccgtgttttggcgggaaaatatttcagtactacggctgagtttggcggcaaaatataattgttacggctgagttatacccaagacatgtaactattatacggctgagttgtcaagaattattaaaaaggacaggtaaaggaatgcgagaggttccgtgttttgaaaagaaaaaatttccgtactacggctgagtttggcggcaaaatatgttgttacgactgagttatactcaagacatgtaactattatacggctgagttgtcaagaattattaaaaaggacaggtaaaggaatgcgagaggttccgtgttttggcgggaaaatatttctggctacggctgtgtttggcggcaagatatattcgttacggctgagttacagacaagacatgtaa

SEQ ID NO: 182670 - DNA, 75 bp, Arabidopsis thaliana landsberg
atgaatttcaatgaaagtgaagaaatatttgtagcaaaagacacacaaaaattcaaaggcaaaacggaaataaag

SEQ ID NO: 182671 - DNA, 87 bp, Arabidopsis thaliana landsberg
atgaaaaagtccggaaagctttccaatcttttccgcgctgccgtgcttgcgccgctgcttttcgcggcgcccgcgcttgctgagcag

SEQ ID NO: 182672 - DNA, 118 bp, Arabidopsis thaliana landsberg
aatcaaatcatcaaagaggccctaagatttgggaacccgtacttaaatctccctttgagggtagataaacggttcacggataaggactaccataaaacagaccgtcccaagtcgaaag

SEQ ID NO: 182673 - DNA, 396 bp, Arabidopsis thaliana landsberg
ggtacaaacgtcgagctccattttctttcaaattctacatgatgtcgctgtccagtggtgcttttttctttgttcataattttggctgcacgcggtacagttaccagccatccgatgcaaacttttcaggttcgagttgatgaaacattttgtcgccttttggatgtgatttgttctattactagagtagttaaaggtaactaagagtgactgacttgtggtgcattgttttttgttttccaaatacaagttgagtagagtataaatcttactttgctgattgaataatgttgcataggagagaccaccagtgagcccttctcacctcgcgatgacagtgcgatggattgctgattgccttatttaccctcagatgctttcgaatactttcgatga

SEQ ID NO: 182674 - DNA, 435 bp, Arabidopsis thaliana landsberg
atgatgtgtgatgggggtcgatgtgttagagttttatttgtgtttttggaggagtcaacagagaatgaggatgatgagattgatggtgagccatgtgaggaagaactgagagtagaaaggaatgtagctccgtttgctgaagaagatgaggatgaagaagagtttgactaccacaatactcctcctaattctgatgatgaaggcgaagaggagacattggtgagatgtaagcgaggaagtggttaattgaagatgtaccaagtgtttgaaagcttatatgagttccaagaagctttattggactattatttaaagactggatataacatttagttaacaagatggcggaaagacaagaagttagcacagtgtggagtacaagatgctgaacatctgtgtgattggaggatacattgcttgtacgaagagtacctt

SEQ ID NO: 182675 - DNA, 976 bp, Arabidopsis thaliana landsberg
atgggggtttctcttacttcccacaataaccctcttcttcgccacttatctccttcctcttcctgggtttctcgttcctcctctcgcctctcttcttctccactcccttccttcctctttccttgccgtcgaacccttcttcaaaggtttgcacttttttcatcttttatggcttttagtatattttgagactacacttgattatcgattactttgctctgctctatgctcaattttacttgattgtcgattactatgctctgttgtatgctcaattttaccttattattgactaatttgctctgctcaagcctcagttttacttgattatcgattaagctactctgttataggctcagttttacttgattgtacattaatttgttctgttctaagctcattttgttcttgagtatcggataaagctgcttctttctaggctcattttgttcttgtggggtttgttttgttttgctagctctgtttgtgactgcttttgaatcttttcaggaaactagcttccactgatggaaatgtcggttattgtactactacagtttgtcagggatttcagcattcgggtcatcaacggtcgtcttctgttgtgtttaacggagagtgggaacttcgatcggaatctaacaaggtaaggatggttcctaagattatcaaggttggaaatcagacggaggtagctgaaactcatcaagttcctggaactgtaagtgcttggagggaagaagcaaataagcttagagaaagaaatggtctaatcgctagaaaccttgatgacaatggttatttcaatggctctgtcccaattatatctactgctccgtcttatgaaacctctcagaagattgattatgacttcaagcccagagggacctctaggtccacaactgctacactcaataaggaattgattggcattacccaatctgaacctgttgtgtcatgccaaggaaggttttag

SEQ ID NO: 182676 - DNA, 424 bp, Arabidopsis thaliana landsberg
atgacggtgtgctccgcccccgacgcgacttcaccaccgtccaacgaccaagaggtaccgtccgttttccatcccgtaccttttcggttcagctttgatccacccagcgaccccgctacggtgagcgccttcgtaaaggcgtatccaaaccttctggggtaccacatgtggttgacctgggaccgactgacagccgtctcaaccttcggaccagcgggttcttaggaagacgacgcgcccgacttctgttgggatttctctggacttggcaaccccagtgccatgcgggactttatgaccgcatgcgactactgcctttccgactgttccgacggtagccgtagcctcggcgacgaggactgcggcccaagtcgcgaatgtttccacgtcgatctagggggtccctctgaaggcaaccatctcg

SEQ ID NO: 182677 - DNA, 11 bp, Arabidopsis thaliana landsberg
atgggccaaag

SEQ ID NO: 182678 - DNA, 6101 bp, Arabidopsis thaliana landsberg
atgaaagcgatcgtgatctcggagccaggtaagccggaggttctgcaactccgtgatgtggcagacccagaagttaaagacgatgaggttctcatcagagttctcgctactgctttgaatcgtgcagatactctccaaagacttggcctttataatccaccacctggctcaagcccttaccttggtctcgaatgttctgggaccattgaatccgtcggtaaaggcgtctctcgatggaaagtcggagaccaggtagatatatattcctgtgatttcgtttctggaaattagggactaatcctcaattttggttttagggtttggtgtctctgtgttaagttatccgagcttggatttaggatacagaacatttgaatacactgctcagtgctcacactcatgttcttaatgatttaggattcataacatctgaatttgaatgacttggtttctgtctagttgcaattcgtttacatttgtttagctgttgaggcttcttatagttttgtgttggattggatttagttttactctaggcttaagcaagtaaattacttttgaagtataaagttattgtcttggattacttctgactgtctttgtctcaggtgtgtgctcttctttctggaggaggttatgcagagaaagtttctgttcctgctggacaaattttcccaattcccgctggtatctctctaaaggatgcagcggctttccctgaagtggcatgcactgtttggtctactgtcttcatgatgggccgtctctctgttggtgaatcattcttggtatttcaacttctcttctctttttatgtataaaaacagtttctatggtctggtaaaagccaatccttttacggtcaattctagaggcttttatctattactttgctttgcatttgtcttctctcttgggctgttttgttttctttcttgtctatgtccttgctaatgtttgatagtatctgaaattttagattcatggaggttcaagtgggattgggacatttgctattcagatagctaaacatctgggagtgagagtatttgtcacagctggttggtctgagcttcaatatattgataacctttatgtacttttttccgaaattgttcaaattttcttttaactaacagggagtgatgaaaagctagctgcgtgcaaagaactcggggctgatgtttgtataaattacaaaaccgaggattttgttgcaaaggtaaaagcggaaaccgatgggaaaggagtggatgttatcttggactgcattggggcaccgtatttgcagaaaaatttcgacagcttaaactttgatggaaggttatgtattatcggtttaatggaaggagccaatgcagaaataaaactaagtagtctgcttccaaagcgtctcactgtcttaggtacttaacacaatcaatcaatcatctctcaaaatcaatactgagagtctgagacctattgataattcttgatctgttttgttcctacaggagctgcattaagaccaagaagccctgaaaacaaagcagttgttgtaagggaagtcgagaagaatgtctggccagcgatagaagcagggaaggtaaaaccagtgatttacaagtatttaccattgtcacaagcagcagaaggtcatagccttatggagagtagcaaccatattggtaagattctccttgagacttgattctctgcaaagggagaaatgttcagagacaagagtcatggtcaataatcaataaaatctggtcgattctgttcatagatatctctttacaagagttctgtttgttggcttttatgtatctctgatttggtcaaaaagacactgtaactatggaacatatatagtatcaaataagctgttgtataccaaacattgatttcgaagtagaatatgattttgtaagaagtttttatttattttgggcttaaaaagtgtatttatttttgttaattgtttgatttaataaggatttaccacctgaggcaaagaccatgaatatcaaaggcaacaacagttttgacttctctcgttttcatcggtccgtttgtacttcttctgataaaaacaaaaattttgcaaaatctaacaacaaaatctttgattcggcaatctttgtacaaaaaaaaatcgaacctttgcaatttttacagaatgagttcgtcgctacgacagtggtttgctagagtactcgtgcttacacagctcatcaatggagctctgtgttggggaaaagaaggtcactacacagtctgcaaaatagccgaggtcaaaattgattcatgtaattagattctgagctcgaactctaaagttgctgaaagcactgtgattcatgtaaatttgatatctttggtaccaaattaaagatcgaattagctctgcaactgtcacaaatactctaggagattactgttatggtggagtctagatagatactaaacctttgatttggattgaaaattttctgtagacaaggtagtaccttttgtgttatctttgataatgccatttttagtcctcagagctactttgaggaagaaactgtagctgcggtgaagaaacttctacctaaatcagctgatggagatctagcatctgtttgctcatggcctgatgagattaagcaccattggcaatggcgatggactagccctttgcactatgttgacacacctgattacagatgcaactacgagtattgtcgtccgtttattcttccctcttccaattgcttacctgttttcatatccgaaatccaatctatatgttgtgtttgtgaaggggattgccatgatactcataagaatcaagaccggtgtgtgacaggagctattttcaattacactatgcaacttatgtccgcttctgaaaactcggatactacagtccactgtgagtgataatattatagtgagtctgattctaaagcttctgtttgagttctatggagcatagagttgtgactagtctttgtctgcagacaacttgacagaggctctcatgttcttatcacattttattggagatattcaccaggtaaatctctttgccatttaaatgaatcatatcagaacaaggtctgtgtctgaattatatgtaatctacgcagcccttgcatgttggttttctgggagatgaaggtggaaacacgataacagtccgctggtaccgtcgcaaaacaaatttacaccatgtaagtgtttgttatcgaatgctgaaagaaaaagttatctttcctgattggataaattattcttatgatcttccaatgatgaaggtctgggataacatgataattgagtctgctcttaaaacatactacaataaaagtcttccactcatgattgaagcacttcaagccaatcttacggtacaatcttactttctttatgaagctccagtgccagtatgtttataaatccgtcaactcacattgattgtttcctttaactgctatcttcatatagaacgactggtcaaatgatgttccattgtgggagtcatgtcaacttaaccaaacggcctgtccaaatccgtaagcatatataaatatatcattttctgtcaagaatcaagatacctatatgattagttctttgcagcaatgttaaacgcagaaagatggataaaattttgtgtaaagagatctaaaaagttgatggatcgcagagaaatatggttgtagctttcatattgattttcctaattacatcattgtcgagtcagtattgttttggattcttttcaggtacgcatctgaaagcataaatctagcctgcaagtatgcttataggaacgctaccccagggactactttaggaggtatactctctcagcattgaactcaaagtttcttggacatattagcttatctttgaacaatcagtgtatactctgaaacaagatcttagctttctttacccatacatgttcatctcagttatagacttgtatgcaatactgtgatcttcgagacttctctcgtgtttgttctgcagatgactatttcctctctcggttacccattgtggagaagagacttgcgcaaggtgggatacgcttggcagccactcttaaccgtatcttttcttcaaaacctaagcatgctggatcatgaaactgagataaatattcccaagaccactctgttagctcctttttttttttttttttttttttgcacaactctgttagctcctttagctcatgtaatgcttagtttttggagaagctatgcttgcttacttgataagttgatatcacccaacaaccatatatcttgatatctttattaataaacacagtttttcagaaatgttaaacagctggaaaacttccggttacttgcttgggtcgagactcactttaaatgactcaagagtaactatatacaatttgagtaaacaaatatttatgaacgtggtgacaaaataaaaactattatttttttgtttgttgctattccaccataatgaatacatagtaccatcaatggaagtataagactatactccatggagtagaaaaaggaaaaattcaaggctctttggcttcttctttcttctctgcacttgaatcaggttctcattgtttatacactaaaaaaaccttttttgcttactcggtgttgaaaaactgcttctctgtttttaactttggaaagaaaaaagtagaagcttttctcagaatgggttggtcgttgagaatgtggattgtgagtatactcgtgcttacacagctcgttaatggagctctctgttggggagacgctggtcattacgctgtctgcaaaatagctcaggttaaaatttccttaacttactttctaaagcgtagctctaaatttatcttagtaaatgatctatgtgagtatagatctgagagatttcgtacttgagtgagtgttgtaagatacttgaatatcaatttaatactctattgttaagactgagaggaaaaaagggaggctttttgttttgttttgttttactgtttcattgaatctactaaaaactcttctttggacctttgtgtgatatcttgattaataccatttttcaatctttagagttattttgaggaagatactgtagtttctgtgaagaaacttctgcctgaatctgcaaatggtgagctagcagctgtttgctcatggcctgatgaaatcaaaaagctcccgcaatggcgatggactagtgctttgcattttgctgatacgcctgattacaaatgcaactatgagtactctcgtgggtcttttattgatcttttctttcaaatttcactcatgtttctgtttgacgttggtataaaagtatatgtgctttgttgtctttctgtgaaggggactgtcctaaagactggtgtgtgacaggggcaatcttcaattacactaaccaactaatgtctacttctgaaaactcacagagtatagtccactgtgagttagagttctagtgaattctgatacttttgtgtgtgagttatatgaagcatcataatagtgtgacttggtgtttttttttgctttgcagataacttaacagaggctctcatgttcttatcacattatatgggagatatccatcaggttaattgatccctttttgcaagtttagactaatcatattagacaccaagtgatgttctgaattatatgcatttgagactactctgattattgcagctgagattaatgtataggaaacaacataatatatatgcctaatccttattgtggatttggatgttttcacagcctttacatgaaggttttattggagatctaggtggtaacaagataacagttcactggtacaatcaggagactaatttgctccgtgtaagcgttttgttgtcgattatattgatgctaaaacgttaaatttcttctgattgtcttgaaagatctaaactttggaagttaccaagataaagaaaatgttttcttcaatagttctagtaatccaacttgtcaatccctttgaatatgaaggtgtgggatgatatgataattgagtctgctctagaaacatactacaattcaagccttccacgcatgattcatgaacttcaagccaaactcaag

SEQ ID NO: 182679 - DNA, 78 bp, Arabidopsis thaliana landsberg
ttatcgagattttttgaagatatgggcaacgctgatgagttgataacgatgatcattacgaacaaacggtctccatga

SEQ ID NO: 182680 - DNA, 730 bp, Arabidopsis thaliana landsberg
atggttgtggcgtccatcgtcaggtctgtagcaatgtcgcgggatatgaacgatctccaatacttgaggggcatttctcttctacaagggctaaaaccctggttaaggtaaataaaaccgtgagagttatgcttcccttgctgtacaagtcaacaagtttcacttcttcttcttcttcttcttttttttctaggtatttggatgccaatgaacaccataagtttctcaagctggtcttgtcagatatgggagagtgtgctctctcggtaattagagaagcagagcgtttcgatgaggcttttgtgcattctttttgcatctcaacactagaggaatattctgtatcccgttgccaaaatgtcatttttataaggtgactttcccaattttacatgtccttctgtggctctgtctctgtctctctctctcgtacgccttgactgtcttgttttgtatccagttctcccgccaggtactttctttactgtttccgtccaaggaggcaaaaacatcactaaatcttaaaattatgatgtctgtgttgaaatttgtggcaggtgaattccaggtatgtgcaaaagtctcgtgtccagattagtcagtcattagatgtttctagggcattattatgtttcttgtggcactcactgctctgctatgttgaaactctcatagcttattctctctcaggttgaacctaaagcaaattggtcgaagcttcttgacttag

SEQ ID NO: 182681 - DNA, 102 bp, Arabidopsis thaliana landsberg
atgatcgattcaaacaaatcagagacgcgtttagaagaatatcaccagagaacgcgtagaggaaacttagtcagagaaaggaagaagatgtgtggtagaaag

SEQ ID NO: 182682 - DNA, 237 bp, Arabidopsis thaliana landsberg
atgttgagggatatcaaaacgaaaaagtcgatgccccccactacctgggtatttgtgggcagccgcatactgtcggacggcgcatactcggacgatttcaccggctatttagtcagggagggttatttccagctgacggctgtcgatatgcccgaatcggccagcagctccaatgaaacccttgaatgggagatcaatcccgatgtgatgcccaaggccggcacctatgagtggatg

SEQ ID NO: 182683 - DNA, 325 bp, Arabidopsis thaliana landsberg
atggcaccccaagatgagagctttcttttgggttatcataggagcaaacaccaggttaaagaacctcagttccttgatataaacatcactcatgtaatgccatatgatatccaggatatggagtgccatagcttgaatgtatcagctaaggtatctggtgttcgtcttgggggtggaatttcttacactgagtctttactgcatcgatttggtatcctgggtcctgatggcggtccaggggaaggtctcttgaggggtttgaaggatttatcttcaggcccacttgcgaagctgtttaaatcctctcacctcactgaaaaggaag

SEQ ID NO: 182684 - DNA, 438 bp, Arabidopsis thaliana landsberg
atgagcgttgatttggtgagctgtggaacatacagtgctcgctggactcgcgtaaagcgctatggtcgttgctaccaccattgaaactctatggtaagaattcaaaatgaaaacctaaagaattttttttctgttttttttttaattctggaatttgaatccaaagcttcgtccaattttctggagaatcaaagaactttccctagaaaaacaaacagatctacgaaccaatcgatctaggtatatatacaatttctaacaagagattgaaatgggaaaatctaaataaaatcacagaaaacgaagagattgtgagagagaaattgagaatttttcttcttcttctactttatagatccgaagaaactagaaataaaccaatctatccttggtggtgttcttattcgcccgttaaatccagcaatggaagcgaactga

SEQ ID NO: 182685 - DNA, 317 bp, Arabidopsis thaliana landsberg
atgctgctcgttgggtttttggcaacgtgtctaagatacaacggctatattttgacatggtccaagtccagctatcataagtcggtgtgttcttgtgggacctctaaaagagcgttactttcctaatttcagcggaccgttacatacacactcgcacacactagccttcgtcttcttctacatctctttcttcttctgtgtcagagacgctgtggtgaaaagaaaatgacggcggccgaagtagcttctgcgcagaccaagaagctcatgaagtttagtctttctctcttccgtcgtggctttaactcctctaaatg

SEQ ID NO: 182686 - DNA, 995 bp, Arabidopsis thaliana landsberg
atgagtacacgaagaaatggcatttccaagcatcagcgaggtgataaattttgtggtgaagggccaaactggatactaattgcagggggtgcattgttgagcacattgtccattcgctttggatacaagctaaagcagtcgcttgattcgaaacctcaatcaaatggctctgctggattaaaacgtacttactttatcgctgtgttgcttaacatgttttataatttggttctagtttttttctatcactaaatgaaagcctcttgtgcagctaatggaacatctgagaggcaaaaatctacaagctgttgcttacactctaccacatcttcctgtacacaaaataatgatttttgttgcttccgctccattccaggtgtgactttgtaactttctgttttgcctcatacatatttgttcaatctactaaacaaacgctatatgcttgtttcttggtctcgcatcatgtcttactgggtttcctttcatgaagttaaaacgatgtgtgatatatagtaaaatctagttgggagaatgtgtagatgttgttatacagaactagcctctgttatcttacctcatgatgtatttgtcaactaggggaatccaatgcgaagttatggaatgagtaaaatagttacaagatttgccaccttgcaataactggttgaatcgaatatctcttgtttcgttgtggcatattaccattaatttgcatcaattgggctggcaactagggaagcaggttttctccattgatggctgtgtctagtggctgaatgctaaaaacagttactagttttgttatctaccaagacctcgttaagcatagttacaagttttgtactattagatccagacctgagttatgttttctctttggaaaatctctgaatcctaatattcatgtagtccagagcaaacagtcgtgtatggatcttatcagcctttgcttctttatttttataggaactgagagtgtggaagggaaagag

SEQ ID NO: 182687 - DNA, 125 bp, Arabidopsis thaliana landsberg
ggtattcgcgtcgagatagagctccaggaggcgcttttgcaggcccttgctagtcagtcgcgtctggagtttggcatctgcatgccggcgcaatacgccgtgcgcgtccgggctgtcgtcgtccg

SEQ ID NO: 182688 - DNA, 319 bp, Arabidopsis thaliana landsberg
ttaccctgataagcaggcaggttgtaccggaccgctgccaaaagcgggtgagtattgtttttaccttcatttctgctacttttgcagccataatcaggagctaccggtaaaggcaagggttttttattctggaaccggcagttttgcataaacaaccctcatcgcaggacagttaaaagaggttcgtaaccgtattcaaagtgtacagagcacgcagcagatctccaaggcaatgaagatggtgagtgcggccaaattgcgcagggcgcaggacgcgatcacacagatgaggcgttatgcgcagaagctgcaggagatg

SEQ ID NO: 182689 - DNA, 562 bp, Arabidopsis thaliana landsberg
atgggttatgttcccaagcttagactaactttccaagttagaggagatgacgattctatgttcatgggttggttgaatcagaataaggtcaattcgcttgctaagaatctcacgtatgctgaaattccaggttattttacttggagccaatcgggaaaacggtttaaaggaaagagaagaggatttgaagttgggaggattggtcatgttccccgtgagatgggagaatttttttttttggagaatccttctagtcctagatatagtgagagggccgacatgtgatgaggatttgagaagttacgaaggtgttgtgtatgaaacataccgaaaagcatgttcggctcatggcattttagaaggatgattagttattgcttttgttttcatttattatattgaaatgaaattcaattgttaacaattatgtgttggttttttgttttttaaagtgatgttaatacacatatatttgttaacccagttcgcggccacaactgctacgtctggggaaagtcggggctctcaatatccaataaatgttatcggaaaacacatctga

SEQ ID NO: 182690 - DNA, 453 bp, Arabidopsis thaliana landsberg
  unsure (1)..(453): unsure at all n locations
atggcccgcggcgatcgggaggcgacccagcttcacatctccgaggtaggccccggacggctgggtctcgccgtcaagcggggcttcgatctcgtcgtcgcctcggttctgctcgccctcgccctgcccgtctgtgcggtgatcgcgttcgtcatccggcgcacctcccccggaccggtgttcttctggcagacccgggtcggatttcggggccggcggttccgtgnnnnnnnnnnnnnnnnnnnnnnnnnnnnnnnnnnggcgcgcaaggcggaggtccgccacctcaacgaggccgacgggctgttcaagatccgcgccgatccacggacgaccgaggtcgggcggttcctgcggcggacgtaccttgacgagttgccgcaactcgtcaacgtcatccccggcccgatgagtctggtcggcccgcggccgatagttacagacgaggatcag

SEQ ID NO: 182691 - DNA, 667 bp, Arabidopsis thaliana landsberg
ttccagatattgatgttgatactaaaggaggaaagacaattggatatgtatatgttggagaaacactagctggtgttttcaatctctcagatgcttgtagatctggtgtagctcaagccatgaaagaactgaaatcgttgggaattaagattgcaatgcttaccggagataatcatgccgctgcaatgcatgctcaagaacaggtgagcaatcctttttttttttaatgagtgtgatgcttctcttgaaacttagtaaatcacactaatgaaaacttaaatgttatatgaacccacagctaggaaatgctatggatattgttagagcagagcttcttccagaagataaatctgaaatcataaaacagttaaagagagaagaagggccaacggctatggtaggggacgggttgaatgatgcaccagctttagctacagcggatattggtatctcaatgggtgtttccggctctgcacttgcaacagagactggtaatataattctgatgtccaatgatatcagaagaataccgcaggcgataaagcttgcaaaaagagcgaaaaggaaagtggtggagaatgtggtcatatcaatcactatgaaaggagctattcttgcattggcatttgctggtcatccgctgatttgggcagctgttcttgcagat

SEQ ID NO: 182692 - DNA, 117 bp, Arabidopsis thaliana landsberg
atcaaccattactgtaacttatacgaactggtagaatcaaccaatcaaaaagatgcatttttcggagggtataaactctcggtccaagatctcatgctagatcaaccattactgtaa

SEQ ID NO: 182693 - DNA, 382 bp, Arabidopsis thaliana landsberg
tggcttgccgaagctggatgcggacctctgccgttaccaacgacaccatatcgccggaagcttactttatgctaacttcaaggtaacaaatatttttgttactttattactattattattatcttttaggtcgttttctaacgaagatcgtttcaacatagcactattattaagtaaggttctaaaaatgcaacaagatctcgaagaagagaagaacaaagccgtcatccaagatttggctgaaaaagttgaaaattacgaagctaatctgaaaaagaaagacttcgccatccaggaccttgaaatcatggttaaagagcacgaaggtgcattagaaaagaaagattttgttattcagactattggagggttctttggctga

SEQ ID NO: 182694 - DNA, 785 bp, Arabidopsis thaliana landsberg
gcctcagagttgcaactcaaagttgctctttataaaaatctccatgctcgtgttttacaatttgtcgcaaatactgggctactggatgaagcttcttttgaggtaaaatatttacttagttgtatgcatatgaatatgttaatatgttatctaatgtcgcaagagttctatccgcagttattggacaagatatatgttgaattggcgagaatttggatggagatgaagtttcaagccccaacaaaggctgacaatcttcctgggctgtactaatttcgttcccgggacttcaaaattgatagtgtcatgtaagtagatatatctgcccttggcaagtatttcccgaacgaaagtttctctgagtggccagagtatctggctgatgatgataccaaggatgtgtcagatatggtgaacccttcagtcttatggtctactggaacctgtgaattctcatctttattacttatcatttctgtttcctcttcacagacacatattgaccaggatgaggaaaatttggaggatgattgggacttgatacaggagcatctggatagtatatatagcacacataatgagttatttggtttctgtgacctctctgaaaaggtattggaactcaaatctgcaattgttgcatcaggctcactctcaattctcttgtatctaacaagacaatttattctattcagtctggaagattctgtattactgacagtagaagactggattcgttcactgattcctatgaacttggagtcagtatgatcaaaggtgattag

SEQ ID NO: 182695 - DNA, 674 bp, Arabidopsis thaliana landsberg
acggcaacatctataacgaaaaattcctgacggaactgaagcaggccacggatgaagtgttcttcctgccgggcatcgaccgttcacgcgtgtcatcgctgtttacgccggacgtgcgttacatcgaagtggtggaaggtggcttcaagggcggcaacgtcattcctgccgaatatgcgccgacgcaggaaatgttcgacatcgtccgtgaccacgtcaacaagggtggccacgtcggtcgctacaccaccaaggaccagcgcggcgcgatgatcttctccgagttgctcgaagtcgatccggtacccggcgagaagctggactacggcaacgtcgccaacatgctggaagaccgcatccgcggccgcttcacaagcaagaccaagttcgtctacaagctgaatgaggactacacgacgccagacggcaagttcaagttcaagaagggcgacaccatcgacgaaggcttcaccgatctcggctggaagcagcgcttcaccaccttccatgcgaccaagaagatcgaggaagaagacaagaccgtgatcgtgccgatcaagggcagcatggtcaccgccgcggttgtcgacaatccgcagtacaaccccagcgttgacatccatatcctcggctttgccaaggtcgtgggcgacgtcattgatgcgacgctggag

SEQ ID NO: 182696 - DNA, 2164 bp, Arabidopsis thaliana landsberg
atgaatcagagaggcaaatctaatttcgaaagttttcttaaaagcatctctctttccgtctgcgtcaaattccatactgaggtaactttcgcctttcattttcttctaattatttgactgatgaaattaaaatcgtctttttagtatgagtttatgtatttgaccatcagttcgatctagtgtaaaccccttaaaaaaaaaattgaacatgaagaatctactgtgaaagaaatcttctaacttatcaactatacgcatacttgaaacttttgcacgatgcatatcaaagtgccatagatgaaattcatagacatattcttatgttagaaactcaattaagcatgtaatcacattctataaaaaaaaattctcttcttttaggctagtgttgatatgaagattcttgtaagattaacaatttcaaaagagaatttcaagttttagactctatcattaaatcgtatggaagaaaacaatgtaatttaagtcgtttgaaagaaaaagtttcaaaagggtattttaccaaaaacatataacaaaagtacaatagtaattaatgataacgttgaataataaaacaaatcttatctctactgtctcactggcttacgcgtgtagctaaatccttttgattcattttgaagaaaacaatgaatgtatcttttatttaaactaaattaaaaccaatagtaaaaccaagctgaactctaattgaacagcccaaaccaaaataacttttattagaatttggttacagtctttaaaaatcaatttcagtttttggttttatggggtagcttcaatgtcttgtatagggtagtagatggaagaaactgaaataattgggtcgatttgtgatataaaatattacgagggggttgcatctaaatattactattgttattcaacccggatccgagtaatataaccgggtgggtgattttaacaaaatggttgaatccctataaatcgaaaaccctaatttcaaaactttccgcgcagaaacgtgttggttcgtcttcttcaagaggcaaagcagaaagagtgaaaaaacctcaccttgtcctgagtgacatttggtccgcctacgacaagtggagcactttttgcgtcggcgttcctcttaagctgaatgactactcttggacggatgctactcagtattatgctcccaccctctccgccatgcaaatcttcaccaagaaacccttcctcgacgatggatcttcttcttcatcaaggtcacagattctcgattttgaatcctattattgttgtgttctaatgattcatgggtatcaacaatcagaacttggttgatcacactttgtttgtttgtttctcgattttaggagctttggtgaggactgtcatctttattttgaatacaatgagacagtgagtgtagatgggcttaggcttcctcttactatgatggtatgtgaaaagctcttaccttagatgttgggtccttacatttgcctttcgcgggtttaattaaatggggaggttctgtctttcttccttgaaggttgaggaactagctaagaagcaccatggattgaatactcttagaacctctgatctgtctgaaaacagctggttttctataacttggtatgtctccttctcagctttagcccttctcttaaaaattacatgtttcttgaattggttgttggattactagttattgacagttaatctacattgtttgtgacttatatgaaataacgactaggctgagaatgtggttgattgatatatgttataggtctccggcaactcaaattccatcgaggcaaacactgaatcagtatttcctaacatatcattcattgacacccgttattccaggtatttcccccttagaatttatgcttgaaaacaagtgtatatgtataggtttttgatgtcttgaactagtttttttttcttgtgatattcagaaacaattcctaaagggacagaagttgagcttcctgcttttggagttctgactaccaagctctctggcgaagtttggaacatgccagggacctcagatcaagagatcataaacaggcatgaggaggctgctgcctcctggctgggaaaactcatgttcagccacatcgattacgacttgaatatggctgagaaacctaaggacctgcccttttaa

SEQ ID NO: 182697 - DNA, 1353 bp, Arabidopsis thaliana landsberg
atgacgttgaaaaggattcttttacctcaacggttgccggcacgaaccgtgacgaggtagttagaagtcttggatggttactcaccttgcaagtgggaaaccatgtaaagttcgaaaagagagttctctccatatcgaaggagggtagtgaaagtttcgccaaagaggagcattgctgtaccatcagattcttataccacaagtgtatacaattgttttgaaaacaagaacagataggtatcgagaggaagcttttaaatgaagcttgggctccttggtaaagatgggtactaaaggtagtgttaccttgggatcatagaaggtagaagccggcatgtcgcgattagtatatttcgtccgatagtaatggtcccatcccacatgagaagagactagagcagttgaattgctatccttcgtattaaagagttcttcggaccaaagccgagatgagcttacaaataggattcgagacaattgaacacaatatgtaactagaattaacaattcaaggctagattgatgtcccaagtcaagcagcacaatgaatcgagaaatccagtcaaataattgagtacatttagagaaaaattcagacctttgcgaagctggagagattgatcgaccacaagcgtaagagagagctttctctggataaacagcagggcctgagttttgttgatgagaatatgggccaagcccattaaatatcatctttagagaggttagggtttcagtaagcccaactgcaactccactcaaaatgaaattaggcctaagcattgctaatgggccacaacagaggatcaggcccgttcgctgtaaccctagtttccttttgcaggtttgatagatggacgttggtaggcggatgcgctgcaacgaaagatgtcggagatgggctcatcgtcgccggaaaggaaatcagcttcatggttataagatcctcagaaacaagagcaaagaggataaaaagaagggtctcaaatttaaacatgtagaagctttcaacccataagaaggttgcgccgtgcaccatcgacgactcccctgaacgtggtgcatatgacagtccaagagtagaatctcttgccatcaacgaaatccagaggaggtaagctcttacatagttctagtttgatccagatcggaagaattgtggcagatatggttgtatttgcttcgtcggaatgggtgtggatagagggagggaaaagaaaggagtcgccgaccctctccttcgtcctttgtcactatcggttaagtcattttggaagcttgctgggagaacacaattttgaaaagaaagacacatgggcccgaaaaagagtaaaactgaaaacagaatgctaa

SEQ ID NO: 182698 - DNA, 590 bp, Arabidopsis thaliana landsberg
atggatcaagcaaaaggttatgaacatgttcggtatactgcccctgaccctagagatgagggacttggctccattaatcaaaggttttcccacgactcttcaactaatgttaacacttatgtacgacctccagattatggtgtttcaacccctgctcggccagtgctaaactactcaatacagaccggtgaagaatttgcttttgagtttatgagagatagggttattatgaaaccgcagttcatcccaaatgtgtatggtgagcacagtggtatgcctgtttctgttaacttaagtgctctgggaatggttcatccaatgtcagagagtggccctaacgctacagtgcttaacatagaagaaaaacgtcagagctttgagcacgagaggaaacccccttctagaattgaagataagacctatcatgaactggtccagtcagccccagttatctcttcgaaaaatgatactggtcaaaggcgtcatagtttggtttcttctagagcttctgatagctctttgaaccgtgcgaagttcttgtgtagttttggtggtaaagttataccccgccccagagatcagaaacttag

SEQ ID NO: 182699 - DNA, 344 bp, Arabidopsis thaliana landsberg
atgcgccaagagcgagaggatatacgacaggagatgcacgacgagcgagaggagatacgccaggagagaagggtgcagcagcagcaacaacaacaacaacaacaacaacatcaacatcaacatcagcaagcaccactgcctccaccaccaccaccagttccaccccgggacaagcactgggagttcatgagccataagccaccaacatttgctagctctcctgatccattggacgttgatgattggctaaaatatgtggaaaagatgttgaatattgcacaatgctctgaccaggagaaggttctatatgcttttggtcgtctgactggccctgctgctgattg

SEQ ID NO: 182700 - DNA, 76 bp, Arabidopsis thaliana landsberg
atgagagacgaattcgaaggtaaaacaaaaggaacccagaaaaggagagacctgaagaagaccatagatgacgaga

SEQ ID NO: 182701 - DNA, 56 bp, Arabidopsis thaliana landsberg
atgacaaaacactgcactcaagggcattacaaacggactccgttccactcccgcag

SEQ ID NO: 182702 - DNA, 214 bp, Arabidopsis thaliana landsberg
  unsure (1)..(214): unsure at all n locations
cnccgagtgctaaacgcgcgtgctgtaaggcagacagcctgtcgctggatctcgacgcgcctgaggatttcgaagaactgcggcgacgcagcgccgaaacggccgataccgttttcacgatgttcaaggcgtacgcgcaccgctggcctgcgcctgagcatggcctgacgcagcgcggccggcgcaccgactgcggcaggaaattcgacctgcg

SEQ ID NO: 182703 - DNA, 410 bp, Arabidopsis thaliana landsberg
atgggaaggattatgctgaaactttcagtccagtcattaaatccacaacgattcgcgtagttcttgaagtcgcagtcaccaaagcatggacaatcaaacaactagatgtcaacaatgcttttctccaaggcgaactcaccgaagaagtttacatgtcgcagccaccgggtttcattgataaagaccgacaatcatatgtctgtcgcttgaagaaacccatctacggtctcaaacaagctccacgtgcctggtatatggcactcaaacaatatctcctcgatgcgggattcacaaattctttggctgatacgtcactcttcattttgagcacggcgacaacgatcacatacgttcttgtatatgttgatgacatcattgtcacgggaaacaataccacaatggttgctaat

SEQ ID NO: 182704 - DNA, 241 bp, Arabidopsis thaliana landsberg
aagaaaagaatcatcatctactgaatcagatcaatacgacgtcgaatcactagaccacaacaaacaaggcttctcctcggaaacagaggaactcgtaatctttcaaggcggagaagatctcacgatctgcgatatcctcgatgctcccggagaagtcatcggaaaatcaagctatggtactctatacaaagcgtctttacaaagaagcggcaagattagggttcttaggtttcttagaccg

SEQ ID NO: 182705 - DNA, 1816 bp, Arabidopsis thaliana landsberg
agagcgaacaaggaagcacagagttagcgattataccagattaaacggtacgattaatactgaaccggtaatcgaagtagcggttaaacaaaaaccggattccattgtccaaaaagggggaattcaatccaatgaagcaaagaaaattatgtatgcaacatcttcgattctgtctccaacaccacaaagtttcttcctttcgcatcatcttcctccaatttcattccttaatcggattaattttctgggttttcctgtaacaagttgctgctatggtggagacattggtctcgctacgttatataaacgacggagtagtatacaaagacggagaaatcgaatcgtcgtacctagagctagagcttctccttacgagattcttggtgtgtctccatcagcgactcctcaagatataaaaagagcttatcgtaaacttgctttgaaatatcacccagatgtcaataaagaggtacttttttgatggtttctatttcattgaagtttaacgaattggagctttgtatggatgctttatgctaacatgtttgtctttacatacaaattcatggaattgagcctccgtatgttgccatcatatgtatgtgtatctctgtggacctactgatggacttggtttacttagtctctatccctgtggaagaaagtttagttcataattcatcccctggctgtttttggtgtataggcaaatgcgcaagagaagtttttgaaaataaagcatgcatacactactctgataaaccctgactcacggcgtaagtacggttcagatagtcgtgcgactggttcttcgacgggtcaaactagtcgaaaaggcaacagtcaagtcgaggaagatttctatggacttggtaaaaccctaaccccttaaagcaccatatattggttgaaattgaaatgtggtcattgaggatcctgttgtgtaaaatgggaactgtttctttgaagtttaatgttaaactatggcttgacataattagggaagagaatttttgtatgagcacagtgtagaagcattgtcaaagggttttgaacaccaatgttaaaatagggttagtggaaatgttcacagagtgtgacaacttattgacatattgtgaatgctaggctccatttaatgactgggttagaagtgtggtgcggtattctctcttatgtgttgtgttcttttggggcacttaggttaattgaggtcagtgtgatcttatgcacaacacactttattatgcaggtgaattcgtgagggatgttcaattaacagtcggtagagccaatctgtgaattctattatctttctgtcgttgttttttgcacgtctagagattttatgcacagcacattgtgaagttgtagttaattgtttgtttagaggctcactttctgtggtattaacaggggatttcttcaaagatcttcaagaagagtataaaaactgggaagctagtgcgtcctcacaaggaaaaccgaaaagtctttgggaagaactatcggtaagtccaataatatcaaactactgataacctggagtcctcaatgtgtgtcaaatatgaactttttccacgaagattggttctgatgaatatagactaaaaccaatctaggctccttttgattctcatatttctttttcttttctctcaggaaattggagaagaatttgtggagtttcttgagaaagaacttaacattagcgacgaagacaatgaaggatcaagcaaaaacggagaaagatttgattttgaagaaggctcaacagagaaatcttccgggaagaataatagtagcacaaagaata

SEQ ID NO: 182706 - DNA, 785 bp, Arabidopsis thaliana landsberg
tgatggtgtcgatgaatatgcagttggaaaatttctcacccatgtattttccactgagacaaagcaacacgagaagatatgctcgctagtcattgaatctgcctctcaaaaatttgacatgaaggaagaggtatttaaaaaagcgttaatgccaaatcttgaaacccgttgttctaacatttatatgatcaagtgtctgatcttgtgagatagtgggcgggaaaaaacgttgttatagacaatattctaatttttctctgtggatctggcaggttatgcaaacgattttgacacatttggagctgggggagtgcaatacctaggtatgcttccgcaactcaacatatgttgcactttgaatttccacaaggtagggattaaaaaagctgtagctgaataatttcctgtttagtgaaaaggcccattattttttaatggtgtatgctccagacctctgatgctcagaacattgttatgctatatgtgcagtcttctccaaacactcttgttgcacgaagtgccatagttgcagcaattttgaagaagtaagtgtatattcattttctccagcttttctggtcaagcgattctgtagaagtattagagttgcagcaatgctcaagaattttctgttgtttttaggtctcacgtgaagcaagggttacatgtcttcgatataccagctgtggcctctagcctatgtgttgcaacaacagatgtcttggctgaaaatcaaaatctgaaggttaataacacttctctctccaatatgaatctgtggggga

SEQ ID NO: 182707 - DNA, 549 bp, Arabidopsis thaliana landsberg
aaccaccgtccgtcaaaaaaactcttggtaatggagcataaactagccactgctgagaaaaaagtaagtctctttcgttatcgtaccacactagatatttctcagctaaaaaactctcattctcttcaaattctgactttggtgaattctaatttgtcatgggattttgattttagttgctagtagacctagtcaagctagtacagaaacgaggtttggaaggcgaaaacggaggatggaaggaatttctaaacgtttacgacaaaaaattaggatcgagtttgagtgatcctgcgagacgttccaatgatgttttggttgcttttcttttgacatttaaaaagaaagaagatttgcaggtaactatcacaacttaacacttacaatgacaacttattattcttagttcttaccattttattcttgcttcagctaatagctagggttatgcaatgtggtgctaatcgtgaactaattgagaaattcaagcaagagactccggataaagagactcctgagcaggtggagaacatttttcaggatttctaa

SEQ ID NO: 182708 - DNA, 805 bp, Arabidopsis thaliana landsberg
acaaggtatttggattcgaatgccccacgaagcaagtttacgatgatggagcaaaagaagttgcactttgtgtcctctccggaattaactgtaagaaataggtaggtttgttgcatctctccttatgatcaatcattttgataaatactattcttgtgttgcagcgagcattttcgcgtatggacagacaagtagtgggaaaacgtacaccatgagtggaatcactgaatttgcaatggacgatatatttgcttacattgacaaggttacatacatgaacctaactttttgttttctgccatgtatctaaatttctgtctctgagagatcctctgttgtttcctttagcataaacaagaaagaaaattcactctaaaattctcagccatggaaatctacaatgaagctgtaagggatctcctttgtgaagatagtagcactccacttaggcttttagatgatccagaggtcagcttaacttctttatcacgccattaataacactctaatcatcattagctactaaattgattactgatattactatttgcaactttgatagagaggaacggtcgttgagaaacttagagaggagactctcagagacaggagtcatcttgaggaacttctttctatatgcgagagtacttgagcaaaacttatttcttctttctttcttcataatttagttattaccaacaactaggtatatattgaatttgtggatttttttgcagctcagaggaagattggagagacatctttaaatgagattagctccagatctcatcagattctccgactg

SEQ ID NO: 182709 - DNA, 590 bp, Arabidopsis thaliana landsberg
gagtgcattttctatccaaagagcgtcagggtcagcaacaagatgtcttggtgattcagtagaagcagatacttccgcatcactacttagagtagaagatgatagtccaagtgaagctgaaaagagacagcaacatctctggtttccttttggagattggatcagtcactctgtatcaagaaaagaacacacacatcacaagggttcatcagatcaaaggtaccaattgaaaacaaaaggttgttgaaagagtgtaaaaatcttaaaatgcacaaattttcggtttcagggatatggaatctagagaaagagaaatgctgcgaagtccattcttaccaaagataacaatggtagggatttcaacaggagaagctgcacagatgagtaaggctaatctcaagaaaacaatggaagatttaacagaagacttggagcaatctgatgaagggaacgatcatggttcaaaacgttacgactctctaaagattgcagagagagatcctctatttgttgcaaacgtcggagactactattcgggtttggctaaagctggttctgctcggttgtcccgtagaggtgatgaccagtaa

SEQ ID NO: 182710 - DNA, 378 bp, Arabidopsis thaliana landsberg
atgctcgtagtagtcggatcgcaagggtcatcttccgccaaatcggaattatctccactcgccgaaagatcgggcacctcaactatatcagaaagaaatctagatgtaggtaactacttaacctgatattaaaaatggatttttaaggatccactcatagtaagcttttctgcaaatagagtctttgaattttgatgagctttaccttgattcccaaaagccagcatacccttgagagtcttttcctttgacgggtaagacttgcgaaagtacactctgtactcagggttttcgaacccatgttgttgtaggtgatgaaacagccaagttctgctgtttctgcttaaaggtggtgccaagcaggaggaagatcactaa

SEQ ID NO: 182711 - DNA, 114 bp, Arabidopsis thaliana landsberg
accgagctcgtatttgggagaagaatctacctcaaggctccatcacctcttgggatcaatgcaaaagagccttcctctcaaagttcttctccacaacaagaacgacaaggttga

SEQ ID NO: 182712 - DNA, 609 bp, Arabidopsis thaliana landsberg
atggatcattgaagtgcatggagttccaggaactctttacgccaatgaaacttaccaacttcaagttgagttccctgagcattatcctatggaagctccacaggttcgtcctctaactccttttgttaatacttaacgatacttaatcatcgcatcaatctcataacccgatggttccacatataaaacaggttatctttcagcatccagctccacttcatcctcatatttacagcaacggtcacatttgtttaggtaagtacatacaaacacaatgactcactctgtttcaaagtccaatgacaagacccttctatgtgttcttttgattatgcagatgtcttgtatgattcgtggtcaccggcgatgagactaagttccatctgtctcagcattctctcaatgctctccagctcatccgtgaaggtttgtgtgttttatcttcttctcatatttcaaaggctttcacagaataatcttcttcttatgatgtttattgttctctccttgcagcaaaagccgaaagacaatgaccattacttgaaaaactgcaaacatggaagatctcccaaagaaactaggtggcgtttccatgacgataaagtataa

SEQ ID NO: 182713 - DNA, 372 bp, Arabidopsis thaliana landsberg
atgaaagagacgattcaggatggccgggttattttttatatggtcgatgaggaaatggagattttaccggttgggttgatcccactgagtaatgcagaaggatatatgctgctggacaatggatcgggtggagctacccgggcctatgaattccacatcaccctttttgagaaacaacatgagaaataccgggccatgcggaccacttatatcgattcatggctgaggaatctcgccaatacgcacgaatccatcaaatccgaactgatccgggaacgacaggacatgcccaaccctgcggtgtacagcattatctccaaaaagacgtttccgctggaagaaaccttgttgcccgtagcaaaacggtccctg

SEQ ID NO: 182714 - DNA, 1050 bp, Arabidopsis thaliana landsberg
atggacgttcgatttgaagacagcataagcatactggtaagaaagaaaacatcgaatttcatgaactgcattgtatttaactccgttttgcatacacgtattcaggtttcttcaacagttcctgaaggcaaaggagtatcttcctctgcttcagttgaagttgctactatgtctgctgttgctgctgctcacggttagtacaacttctctgcaataagccaatactaattaacgagaagatgattcattgagctgaatgtgcaggtcttgaaatatctccgcgagatgtggctttactttgccaaaaggtggagaattatgttgttggagcaccttgtggagtatggatcagatggcttctgcttgtgagaaagcagacaagcttctggttatgatctgtcaggaactttctctctttgtctcttacaaagcttgattctctaaaaagagtaataactggtgattgtactcgttgcagccaactaagatactaggacatgttgaaattccttctcacattcgattttggggaatcgactctggaatccgacacaggtgctgtgtacatttcttccttcagaaagtcttacattttgtttctaacaaatttggtactctgcagcgttggtggttcagactatggttcagtgaggataggagcttttattggtaagacaatgataagatcttttgcagcttcttttgctgaaaccaactcagaagaggctgaagaggagagctcggagttgattgaatccgatacttcgttggattacttatgtaacctttcacctcataggtactataaatctctctctatgtatatatcatctgtgttaatcaattagatgagatcgatattttttccttcttttttttcgcagattccaagctctttatgcaagtaagctcccacagtctatcacaggagaagaattcctcgaaaaatatggtgatcacggggattctgtcacaaccattgacaaagatggtacatacgccataatggcgcagactagacatccaatatatgagaatttccgtgtgcag

SEQ ID NO: 182715 - DNA, 528 bp, Arabidopsis thaliana landsberg
tttttgaagaaccttcttcctccttttctgagggtaatgattaacaatactaattccattatgctctttcacttgtctcaatattttgaaccactgttgacaggtggggatgatgacccgttaccagctatagaggacctccaaatttcaggagaaccttatcctggacatgaacttcaggcttgtggttactccattaatggaacaacaagttgtaattttgaggtgcgtactaaataaaaaacagaatcgcttccttacttatgttgaattgcatctaatctatcttcttctgttcttcaattttcagtgggtatgtcatctagaagatggatctgtgaattacattgatggtacattcccctcctgctgaattttgtttcttatttctttttatggaaataagaatctagtcgttaacgaacttctaatgcaggagcaaagcagccaaattaccttgtcactgccgacgatgttgatttatatcttgctattgaggttcagcctttggatgataggaaccgaaag

SEQ ID NO: 182716 - DNA, 1579 bp, Arabidopsis thaliana landsberg
atgtcgcttgtcgagatctctggcgctgatgccctggtaccattgccaccacctccacctcctatgcctagaagatcacctccaccaccacctccgaggtttgatgcctttgatcataagggtgcaagaatggtttgtggttttcgatgtccagttacaaaaaggtcttccctgaagcctttacattgggttaaaataacaagggctttgcaggggagcttatgggatgagttacagatacaatatggagaatcacaaacgtattgaacttaactttattgaccaatccatgtaattcaattctgtgatactgagttttcttttatcaaccattgcttttttttttgttgttgttgctagtgcaatagaacttgatgtaccagaaatagagacccttttctctgttggggcaaaaccaagaccaaaaccaaaacctgaaaaagttcccctggtaggtcatgtagctataaacaagtagtattactttctggtggaaactgtaaaatattttgttttttaagttgtactaagctactctccagcatctctttcccttagactttcttctactccgaagcctattgcatgtctgtatacttttgtgaattcattttggagatttttttgtcttatggtcttccagattgaccttaggagagccaataacacgatagttaacttaaatatattaaagatgccgctgcctgatatgatggtaagctccaaaaaccttaattacccgagtaaaagtcaattactggttaatctttcatagcttaatgataattatccacatttttctttgcatcgtccaggctgcagtcatggcaatggatgagtctgtactagatgttgatcaaatagagaatcttatacaactttgcccaacaaaggaggagatggagcttcttaaggtgttacctcttgacttttgagtagcaatatctacttgtgtctttatttaagtgatcatttactgacacgagttcttgttcggaattgactgctttgttgtagaactatactggtgacaaggcaaccttgggaaagtctgagcaggtctgtttaagtctttagagattatcaatctcgcattgttttggctcctactataaatatgggtagtaattagcttacttaagttaattcattttctcctgtcatcaattttgctatcgcagtgcttactagagctaatgaaggtgccacgatttgaggcaaagcttagagtactttccttcaagattccatttggcactaaggtgtggctgtataacttattatgttatcttctatctgattctttagaggaaaacgtaattcttggttctgttgttaatggtgattactgtgcagataacaaaattcagaaaaatgttaaatgtggtcaattctgcgtgtgaggaggtaagatggtacaataatcacttctagtttttgtgcagtccataagcttctccttcttatacttttttctcctcatttcttattcatcaggtacgttcttcacaaatgctaaaagagattatgaaaattattctcttcctagggaacacactgaaccaaggaactgcgaggg

SEQ ID NO: 182717 - DNA, 124 bp, Arabidopsis thaliana landsberg
attcagtgttgttttaaaggaaattcataccaattgcacatacaatgttattagtgtgaccaccaatttcaagtctctaggaaaacaagtagaatatgtcgttgatgaagggcacatgggttaa

SEQ ID NO: 182718 - DNA, 118 bp, Arabidopsis thaliana landsberg
catagtaggtttaaagatagaatttgacagatcctttgtaaattatctctggaatccaattttctcgatattcgaaaaagaaaatggggatactggcagcgaccggacgttcatataa

SEQ ID NO: 182719 - DNA, 90 bp, Arabidopsis thaliana landsberg
ctaggcgctgataactacataggaggaggaaacacaacaacttgttggggatacagaaatggattgaaaagcatcaaagcaaaagagtag

SEQ ID NO: 182720 - DNA, 504 bp, Arabidopsis thaliana landsberg
atggaaaaagcttcaagcccagaaaaatggctagccaaagtatcagttacgctcacaaaggcaaagcctgacgaaatctggcctctcttcaccgattttttcaatctccacaagtggcttccaacgctagccacatgtcacggcgtccacggcaacaacggtgagcagggttgcatcagattctgttccggcttttccataggatccaacggtgtagactccgccgcgagatggtcaaaggagaagcttgtggccgttaatcctgttgaacgtgtgatgagatacgagatagtggagagtaacactggattcgaatcctacgtttcgacggtgaagatattgccacgtggcgaagatggttgtgtgattgagtggagtttcaccgttgatcctgtgagaggattgtcgttagaaaatttggttaagaagtatgagaaagcattagagataatcaccaagaacatggaagaagatgctttgagaagaagagagtcgtcttcttag

SEQ ID NO: 182721 - DNA, 968 bp, Arabidopsis thaliana landsberg
aaagtttcaaggcttcctaagtctaccctgcgccttcttgaaacatccattccggtatgtgagaagtagtacagttatatttagtcacaagatcactttagaggtttctgctaattctcttctaacttggatttgcttgtttcagggagtcactgaacccatgctttacatcggaatgcttttcagtatgtttgcctggcatgttgaggaccattatttgtacaggtaacaagagtttaacgaattttggttaaaagtatatgggttactaaatgtggcaatccaaagaattttaatctcctttttttctgaccttctttcccaacacagcattaattaccaacattgtggagcatcaaaaacttggtatgggattccaggttccgcagctctaaaatttgaaaaggtggttaaagagtgtgtgtacaatgatgatattctatcaactaatggagaagatggtgcctttgacgtgcttctggggaagacaactatattccccccaaagactctgttggatcataatgtgccagtgtataaagctgtgcaaaaacctggagaatttgttgtcacattccccagggcttatcatgctggtttcagccacggtaaaacaaaattgtctgaatctacttttttttgttggtcagagatgtggtatcatcttcaactgaaattgtggttgtgtgaaaaattgtaggttttaattgtggtgaggcagtgaactttgcgatgggtgattggtttccatttggagctattgccagttgccggtatgctcatcttaaccgagtaccgttgcttcctcatgaagaattgatttgtaaagaggcaatgctcttgaactcaagttccaaatccgagaatctggatcttacacctacagaattgtcaggacaacgaagcatcaagactgcatttgtacacctgattcgttttcttcatcttgctcgatggtctctaatgaa

SEQ ID NO: 182722 - DNA, 50 bp, Arabidopsis thaliana landsberg
atgagggcagatttaatagcggatggagaccaacgtttgaacgacttgag

SEQ ID NO: 182723 - DNA, 332 bp, Arabidopsis thaliana landsberg
atggtggactgtggtgtcgatatttaccaacttcctgttgttcctagggcatgtagatcacccagagtacgcatatacattcgaacatgatttattttgccataagttacatacattttggctcactcgattgcatcttttattttttatccagggacgcaggctaaaaattatgagaaaacaaagatcggagttcgaggttttagcccaagtggctggaagattctcaggtgagcgtaaaaaccgaattgttatcggctcgttggctcacgaaacaaaggagacgaaagacgataatgtcgtcgtcaataacttcttggagacaattggaa

SEQ ID NO: 182724 - DNA, 255 bp, Arabidopsis thaliana landsberg
atgacggcaagcgcgtgtatcccactcgctactgatcggtctttttcgtggtgtttaaagatattttagccgtcaagatcttaaatgggttcttctcctcctctgtttttctgttgtttataaacttaattaggctaaagattttctgttttttccttgtttgttggtttctctttgcttttttctttttacagtctacgagaaagggagatgatgaatgatgggcttaatatctttaatactcttgctatgtaa

SEQ ID NO: 182725 - DNA, 268 bp, Arabidopsis thaliana landsberg
atgtctctcttgccaatccgagagatcctttcgaacattcgaagcatttgttatcacatcggaaacttcatccccttgatctatacaagtagctcacattcagcgaaacgaagagccaacaaaatcgaaacaaaaatcaacaaataccttgatcaggaaaagcttggaatgtagcagaggtcaagccttcagcgaactctctcaaatcatccgttacaccgaattcgagaacgctccacttctgaaccggatcctgacccggataacg

SEQ ID NO: 182726 - DNA, 941 bp, Arabidopsis thaliana landsberg
atgtacattgtacacaaacaaattgagagtgatagtttaaaggatgctctggtggaacaagatcagttatcgccactaactgatgaagaagagtcagatccagcaaagaagaataagtggatcgaagatgaacaagcaagaatcgatcgagatgaaaaagcaatggatatgatcttcataaacgttggagataaggttctcagaaatattgaaaactcaaagttaactgctgaagcatgggcaacgcttgataggttgtatctggtaaaatctcttcaaatcaagtttatctgcaacttaaagtctataactacatgatgcaagattcaaagacgcttgaagagaatgttgatgaattcctaaagatgatttcagatcttagtaatcttcagattcaggtacatgatgaagtttaagcaatgttgatactaagtgctttactggatagttatgatatgctaaaggaaactccgaagtatggaagagaaggcattaagttggatgatgttataagcgctgcaaaatcaaatgaactagaactaagggatatttcaggaggatcaagacctgtaggagaaggtgtatacgttcgaggtaaaactcaggccagaggaagtggaaattaccaatctggtaaaggtgaaggtaatgaatctaaatcaacagaaggtaagaaagtctgttggatatgtggaaaggagggacacttcaagaggcagtgttataagtggcttgagaagaataagggaagtggtgcaggagaaacattactggtaaaagacgatgctcaagatttggtcggtttagtagcttcagaagtcaatctaggagaacacaaaggaaaccatggagagtggataatggatactgggtattcctttcacatgacaccaagaaaagagtatcttatagacttcgaagaagcaaagtctgaaaagtga

SEQ ID NO: 182727 - DNA, 109 bp, Arabidopsis thaliana landsberg
cccgctccatggcgcggtccaagaacggctgcctcaagatccttgtctgcccggctccggatccgatccctccgccggctccgacgccgacaaccaccccgacgaggag

SEQ ID NO: 182728 - DNA, 1340 bp, Arabidopsis thaliana landsberg
atgaagcttcgaaggagaagagcttcggaagtggtgagtgttcctaaaccaagtaattaaaaccttaatcaactgtttgtctttggaatttagagaacatggctcttttagtttccgtttatggttgttgagatgatctttgattggtataatggggtttgagttcttaagccaaaccttgtgaggcttttgtatcttttactggctgtgttaacccttgttatattcatacttgtaccagcctaccaaaatcagtttgttcatcaatagtgttacttctgttccacttgagctaatacaagaaccccttgcaagctttcgctgggaattcgacaaggttcgtgtgtttcggctccttgtttgtgaatcttttatactgtcatattctcgttttgatgaatgtcgggtttttttcttttatttagggagacttccatcattgggtggacctcttctatcattttgacactttttttgagaagcacgtaaaagtaaggaaggatctgcgtattgaggaagaatttgatgaatctgatccacctttcccaaaggatgctgttcttcaagttctcagagttatcagacttgttttggagaactgcactaacaaacagttttacacttcttatgaggtaaaaatctgtgccctcaagtctttattcatgtttatcagctcttattctttgttgatttctggttgttcggctagatatgttgcttgatatactgagatgtctacctgcataattctcacacttttttcttcataactgcagcagcatctttctctcctacttgcatctactgatgcagatgttgttgaagcctgtctgcagacgttagctgcctttttgaaaaggcccactggaaaatactccataagagatgcttctctgaatctaaaactattttcccttgcacaaggctgggggggaaaagaggaaggccttggcttgacgtcatgtgccacagaacacagttgtgatcagctttttctccagctagggtgtactcttctttttgagttttatgcttctgatgaatcaccaagtgagcttcctggcggtttacaagttattcatgtacctgatgtcagcatgcggtcagagtctgacctggaactcctgaacaaattagtcattgatcacaatgttcctcccagtttaagatttgcgttgctgaccagattgagatttgcaagggcgttctcgtctttggcaacccggcaacagtatacatgcattcgcttatatgctttcattgttttggttcaagcaagtggtgacactgagaaggtggtttttttctttaatggccacccggaattggaaaatgagtaa

SEQ ID NO: 182729 - DNA, 412 bp, Arabidopsis thaliana landsberg
acggcaaaggcaaaagcggcccaaatctctcgtttgtaaaatcaaaagatatgatgtgatcgacaatatcgtcttctgctttcctttctttagcacaccagtaagtgtttccgttgagagaaacaccacggtcacaacagtatatacaccagtgtggagtgacatcaagagttgtccatgaatcagagttaaaatcgtaaatttcataccaaaaatattgatttttgggtgctcctaggaaataatctacaaacctcaataattggaagctaccacgagattccttatccttgtatcctagagcgtaaatgaacctgtctttgtgtggacggtgagaatatctgagttggatccaccttgtttgtccgcaatacggattccaaacgacaacccttgtatcgtcttcttttaa

SEQ ID NO: 182730 - DNA, 86 bp, Arabidopsis thaliana landsberg
cgtattcaataatggtttattttaaattaatgcatgatcccaaccgcaaaatgaacagaattcgtcgaaagaacattgaatcttga

SEQ ID NO: 182731 - DNA, 1577 bp, Arabidopsis thaliana landsberg
atgccagacaacgatgctcggcgtcaagcagaggatcagatcaaacgtcttgccaaagatcctcaagttgttcccgctctcgttcagcatctccgcaccgctaaaacccccaacgtccgccagctcgccgccgttctcctccgcaaaaggattaccggacattgggctaagctttctcctcagcttaaacagcatgttaagcaatccttaatcgagagcatcactgtggagaataggtctgtttctctctctctcttttgctcttctattttttcaattgggatttgagtttttgatttcttattggagttgttacagtccaccggtgagacgtgcgagtgctaatgttgtgagtgtagtagccaagtacgctgttccagctggagagtggcctaatttattaacctttctcttccagtgtagtcagagtgctcaagaagatcgtcgtgaagtaacttccctttgaaattctctgtctcattttgtctatttatggttcttttgtttaaaaatcatattttgttgtttgtatttgtaggtagcattgatccttttcagctctttgacagaaacgattgggaacacatttaggccatactttgcagacttgcaggctcttcttctcaagtgtatgcaggatgaaagcagtagtcgtgtcagagttgctgctctcaagtaatttgtttttctctggaattgataactgttgctcctttcttggacctttatctctactcttttacaagcttctgtaatttatcagggcggttggttcttttctggaattcaccaacgacggagatgaagtggtaaatttagccactttctcactttcttgttaatgttatatacatgtttaatttaaagactgatttggaatatatgcttatgtcatttctgtcaggtgaagttccgagatttcattcccagtatattggatgtatcaaggaaatgtattgcatctggagaggaggatgttgctatacttgcttttgaaatttttgatgagctgattgaatctcctgctccccttcttggagattctgtcaaagcaattgtgcagttctctcttgaagtttcctgtaaccaaaatctggaaagtagcacccgtcaccaggttaggagaattattctctttcgcttgaaataggttcgaattgtggtgttatgattacttatgccttactccattcatttaccaggcaatccaaatagtttcatggttggcaaagtataaatacaattcccttaaaaaacataagcttgtcataccaatcttgcaagttatgtgccctttactcgctgagtcatctgatcaagaggacgatgatgatcttgctcctgatcgtgcatctgctgaagttattgacactctagctatgaacctgccaaagcatgtattcctccctgttcttgaatttgcttccgtgcattgtcaaagtacaaacctcaagtttcggcaagcttctgtaccagctcttggtgttatatcacagggttgctttgatctgatgaaagagaagctggatactgttcttaatatagtcttagaagctttaagagcccctgagctagtg

SEQ ID NO: 182732 - DNA, 125 bp, Arabidopsis thaliana landsberg
gtttcaagtcagaagaaccacttaactttgaaaaccaagaaacaggaagagcacgagacaacccggaagaagaagaagaagaaacaggtttctttcttccccatctcatcattccaagaatctga

SEQ ID NO: 182733 - DNA, 529 bp, Arabidopsis thaliana landsberg
atgatcaagatttctgataatgtgtatgctaacaaggagataatcgaaggtgagaaggagaacaaagatatagtgagcttacaacgtattgggaaaacactgaaaattgggaatgaaaccttcgaggatctagatgaggttcgtctttatattcttacaaaatttcagttttggtacaagtgaaaatacttatgcgttttcaatatttcaggtaatggatcggtatgttgatcctttggtaactcatcttatgacaatgctaaaccaccggaaatttcggactgggacaaaatcggaaatagatgatcttcttcgggttgagaagggtgtgaatccgaaaatggtagtttacagttttggtgtttctcatgaacatccagggagctttatattgtcttacatacgatccgcaaatccgcaccacgagtacatcggtctataccctaagggattcaagttcaggaaaagaatgtttggggatcttgataaactggctgcttatttcaagagacatatcgataatcaatga

SEQ ID NO: 182734 - DNA, 398 bp, Arabidopsis thaliana landsberg
atgtctctcaaggctgctagtctcggactgaacatggtggcagcttgtcatgttctgatgctggacttatggtggaacccaacaaccgaggatcaagcaatcgatagagcacatcgtataggacagacacgaccagtaacagtggttcgcttcacagtaaaagatacagtcgaagatcggatattagcccttcaggtatgtaaactggttgatttagttctcttcaatttctctataagctttaagccatttcatttttgatctctaaacacgttttgtcgatgcagcaaaagaagagaatgatggtagcctctgcatttggagaagatgaaaagggaagccgacagtctcacctcacagtagaggacttgagctatctgtttatggctgattcatga

SEQ ID NO: 182735 - DNA, 181 bp, Arabidopsis thaliana landsberg
acaccaaaaatctgaccacatgtcgtatcagaaagcagttgtttcaccaattttgtccacgactccatgcaatggctgtgccgtctcacgatactctaagagtttcctctttgcattgtatacaaggtttctgggatccgaaaatcgttttggtatcggagagggtcgaccagcaatctga

SEQ ID NO: 182736 - DNA, 263 bp, Arabidopsis thaliana landsberg
gcggcgcgctaaccagcgcctaccgtaataagctcatagcactcgtcaacggcctgccggaaagcgtctaccgccagtcctacaacgtttggacgcggctcctcaacaagatcaacaccgaccatccggaatacatcgccccgatggcagcagcactgtcttatcaatccttcccgttaaaaacctaccgtcaatactgcgacgatagtgaatgcgattacatagactatgttgtgcagcagcggaccgattacaaggatgtc

SEQ ID NO: 182737 - DNA, 1514 bp, Arabidopsis thaliana landsberg
atgccacctttccgttttcgcatcccattcttctcctccaactctccttctcgtatctcttcagggacttcttcgccatcgccaccacctactcctccttcacgccctccttttcgtcctgcaggcatcgctcagccgtcgaagtcagaaacaaagcccaaggcgtctccgtcactttctaggagtagaagtaatgttgcagccctagctgcttcttcgtccgcgtctcaattgccttctctcggtgcagccacgccaactcgcctggcgaaacagactaaccaacaatctggttctccatcaaagaaactggattctctgaggatggaggaacaaaaggtggcgacaaaagagaagccaccgggagaaactgaaaaaatagctgaagagaatatcagtcctgtaaaagagaaacctccgattggagctcgtccagaagagcatttagaacagaaagaaacagaggcagtgcaagaacaggggaggaatacagaagcagcgagacttgtggtgcaagaaaataagaaagtccttcctgaaggcagtgggaagaagtcagcagcaaatcagggacaacagaagatagaagaaatcgagaaaattgcgttacaagaaaggaagaaagttcttcatgacgacggtgtacagaagttagaagcagatcagggacaacagaagagcaaagaaactgagaaacttgcattacaagaaacgaagagatcacttcaggcggtaggtagagaagatgcaacgcgaagcaaaaccacacgacatatggcagcagcatcagaaaccacgagaggaccgagagatctaccggagaaaaagacagaaacgcaaaacagaacagagattcctaccgatgacaatcatcagaaaaccaaaggcgcattaacgagtaatcttggaaatccgagagttacgaatagagaaggatcatcttcaatgagcagaaagattaaagaagacatcagagatggaatcagtaagctaacttggggaaaaagcaacggtgatgataaatcagtgagcgtctacactctcactggagaaaacaaaggagccacaatgggaataggttctgagaaagacaagaaagacggtgaggttcatattcgccgtggctacagaagtaacccagacgagagctctaacaccacagccacagaaaccgaaaaccctaaagacgacgaagcagaggaagaagcgagttttacggcatacataaatggaaacactcaagggataaacaattcaattgtagtcgagagttcagtaagcgagaatgatccaggagttcatatgagttttaagtttgaaatattgaagaaggaagttatatatccgccagagaatgtggaggagaagaaaccggagacggtgaccgtaacgaagaagttaaagaatgagccgagagtaaggaggagatgcttgagagggttacttgcagagtcgagtgagtcggagccagataatcccttgaagccacggagacatggttgccggtttacttg

SEQ ID NO: 182738 - DNA, 350 bp, Arabidopsis thaliana landsberg
ggaagaggaagtcagttctaggtttgcgtcggagtggcgattcactcggtgcttttgcggtttttgctcgcgagcacaatgtcctgcgccttcgccgccgccacgcgcacccaggtcacctcgccgtagcgatcgtggccgtgtgcccagccttcgccattggcgcgttccagtgcatcgaggctgtcgagtgcgggcagtgcatggccgtgatcggtaacgttcgccgcctgtgcgccgtggatcttcaacagatagaacttcagcgccggcgcgtaactgccgcggctggcggcgatggtgacgctgtaccgaatcgccttcgcgctgcgtgctcagttgctggctga

SEQ ID NO: 182739 - DNA, 114 bp, Arabidopsis thaliana landsberg
gtatggtcctatgcagattcaaaaaaagccggctaccttggccgagcggagttttataatgctctaaagttggtaacagtggcacaaagtagacgagagttgactgctgagata

SEQ ID NO: 182740 - DNA, 246 bp, Arabidopsis thaliana landsberg
ttatcagcgttcaacaacgacattgacatgttgcaacgactaaatcgtgttccttttgctatagatgacgacatgatgaaacatcatttggatgtttattgttggtccatacctgaggacttgctatccaagttttttagattaaacagaggattgatgatttttatttttggattgatgaattttattattttgattgatgatgaatttggttttgggaatttagttttggttcgtgtcagttag

SEQ ID NO: 182741 - DNA, 344 bp, Arabidopsis thaliana landsberg
gggccgatccgggcggtaaccccgaccggtatccagaccgagcagggccactacgacctcgacgtgatcatctacgccaccggcttcgacgccatgaccggtgcgctgagccgcatcgatgttcatggccgcgacggggttttgctccgcgatgtctgggcgaccgaggggccggtgtcctaccttggcctgcaagtcgccggattcccgaatctgttcaccgtccagggacccggcagccccagcgcggcaacgaatttcatcaccgcgctagagcagcatgtggagtggatcggagactgcatcggctacctgcgggccaaccgataccgcacgatcgaggc

SEQ ID NO: 182742 - DNA, 65 bp, Arabidopsis thaliana landsberg
ataatgaaatcgtcatacgacagaggagacgatcgaagcgttggcgattttttacccgacagtga

SEQ ID NO: 182743 - DNA, 758 bp, Arabidopsis thaliana landsberg
atgaagaaggtgttcatcctgattacagaatctacttgcaatgccttttcaggtaaccatcccaatgaactactaataaccaacctagagtcagcgtgaacaatattgtatatttagtgtattttttcgatcgtggatttatttggaaaaaataccttggtatctcatgtaaacagaccacaagcaaggctttagtctctaaatttcgtgtttgtgttcttctgttttgttttccttaaaactgcagtgtgttggacccgagctctcttcattgcggcatttacccagcactaatgtcatattcaacaccggatacactggcatatccgcgtcattcgttgagccgtgcagcattgataacaagtggtagtccgatatttttcctagatgcatataccactttgatagtcctctactcatcaacagcagacccgtcaatacctttccctccacctcaagactgtaagttttctcaccaaatgaaatccagttcaaccacctttagatctttgagactatgttgattcgaaaacttatatcttacaggtttattgaggcagaccataaataaagtgaagcaagaaaggagcatcacaccaaaactagtgtttatccgaggaggacgagacgatgctactgtctttgagaactatcttatagaagaacaagatgtggacggtaatggttttgctagcgccatgggtttcgtgtctttcctcgatgatatttcgcagcgtgtcactgaatacatgaagtga

SEQ ID NO: 182744 - DNA, 125 bp, Arabidopsis thaliana landsberg
gaaaaaaaaaagtgaaggaagaagaagaagttggagaagccaagagcaaatctaattctctgactactctcattttcatgtcggagacttgccgaaatctaaagaatttcttcaacggagactga

SEQ ID NO: 182745 - DNA, 906 bp, Arabidopsis thaliana landsberg
taccttccggaacagtgttccttttgcgactggttatgacatgccaagccacagggcacaggcgcagatcaagttttttagcttactgtatatctgatccttatcatgcaggtatgtacatagttatcaaagctacttatggaacaatgcagcaagtctgcgcgtcaaaaattatggtacatcttggttgtttctttattaatcttgtgtcattctgtaatcttgtcgatggaggttttaactttcacccttttgttttgttgtctggcaggaaccagccaagttgtgttgggggacttggtaagtacaaaggtagatgctgcaaaaagaatggtcgacagtcttacctctgagcacaacgaaagcagcgaagaggcattggattgtgaccaggtagatgatactgctgttgtagatcttccagctgaaaggagtgaccttgttaaggttagtttttattgcgaacttcttctttttaggccgttcttagttgaaaacttttgctaccatcatctggtgtgaaattaccttcagattatgatgagctaatagaactttgggcttgaaattaatgatatttctttgttgtcttttttccgtattcgtatatgctttagcgcatttacattctcattgttatttgttaatactagcactattcatgtgtgatgttttcttttgtgttcttcaggttgtaagtatagaggatttggaagctggaacttactcgaccagtgacatcgtcctccctctacctgggtaagttgctggcagaattttccgacacaagtagatttcatattttacttcttgaaaccttaagacttttctttgtgcttcaacagttcaagagtcatctacccgtctaatgacattgcagaaatttatcatgatttggcaaagaag

SEQ ID NO: 182746 - DNA, 1725 bp, Arabidopsis thaliana landsberg
atgaaagctttaggttcctctgattgcaatttaaacattttagaaactctatcagacgatgcgattcaggagattactgaaagctatgatggatttttcactactgtagagtctctcattgctggtactggagattccttagttgaagatgagtttgtgtctcatgtgtattgtctctgcaagtatgggcttgattctcttgttcgtgatcactttcttagatcacttgaggtactgaacataaacgtcttccttttagattaaagtttgagtcttggagctttctgattgcataactgattagcttgtaccacttagtagctgctctgttggtgtagagtaaaagtggaagaagtatgtttgttctcttatgatacatttgttttgtttcagcaagcttttgagaagggaggtgcatcgagtttttggcaacattttgatgcttatagtgagaagaaacatcatgtaagaagttacacgcttggttgattctttgtttgctataaaatattctgaaattgacttctagttttgactaaaaatgagtgcttttgggcagaattatggagaggagattcagatagtgttatgcaaggctttggaagaaatttctattgaaaagcagtatcatgagaagtgtctgtccatagtagttcatgctttgcagtcgtttaaagaacagtcgtcagatgatagacagaactcagatacagaaagagttcatcttttttcgaggttccagtcaatgctgtcttcaactctgatgactacacttcctcagcattttcctggtatacccatctttgaaagcttgttctttgtgtgatttctgatgtagtttgattgcttggaagttttatttatacgtttgccacttgttcaatcattactctcttattgttcctctttttattatgttcttagaaatactccactggtattttaaggaaaggctggaggagttaagcgcaatcatggacggagatggtattgaagaacaagaggatgattgcatggatttggacgagaagttgagatataaaaacggagaaatggatgttgatgaaggctgttcccaaggaaaacgtttgggacatgacaagttggtgaagaacattgggaaggtggtccgtgaccttagaagtattggatttacatctatggctgaaaatgcttatgcttctgccatctttttgctccttaaggtattttttatgcatcagattattcatctgcctcacagagagttataacactatatctattgtcagtaacttgtaccctgtttggcaatgttatactgtaggcgaaagtccatgatctggctggtgatgattacaggacttctgttttggaatcaatcaaagaatggattcaggtagtttttgctggttagattttcactgctccatcagattagtttggtaatttggagattcctgacatcttattttctcttttcagacagtccctctacaattccttaatgcacttctttcttatcttggtgattccgtaagttatggtaccacatcgtctggcctcacgtcccctctggcttgttgcccatctccaagcttttccagagtggtgactccttctgaaggaattgttcggtggaaattacggctagaatattttgcatatgaaacacttcaagatttaaggattgccaaattatttgagataattgttgattatcctgagaagtattttcttttctga

SEQ ID NO: 182747 - DNA, 386 bp, Arabidopsis thaliana landsberg
  unsure (1)..(386): unsure at all n locations
atgaggcagagattcgcggtcatcgtagaacctatatcggtgcgatgcctggtaagatcattcagtcaatgaagaaggccaatgtgatcaatccacttatccttctggatgagnnnnnnnnnnnnnnnnnnnnnnnnnnnnnnnnnnnnnnnnnnnnnnnnnnnnaagtactcgatcccgaacagaactctaccttcgtcgatcactacttggaagttgagtatgatctcagtaacgtattcttcgtaactactgcaaacattcggtacaacataccgcacccactgttggaccgtatggaggtggtcgagatccctggttacatgaagcccgccaagcttgagatcgcaaagcgccatgaaattaaaaccagctcaagagccatg

SEQ ID NO: 182748 - DNA, 435 bp, Arabidopsis thaliana landsberg
ttcaccgacagaaagttcctagacttttgcgaggatcaccacatccgggtggactgggctgccgtggcccaccccatgacaaatgggcaggtagaacgtgccaacggcatgattctgcaaggactcaagcctcggatctacagcgacctcaacaagttcggcaagcggtggatgaaggaactcccctcgggggtctggagtatgaggacaacgccaagccgagccacgggcttcacaccgttctttctagtctatggggctgaggccatcttgcccacagacttagaatacggttccccgaggacgagggcctacgacgaccaaagcaatcgagctaaccgagaagactcactggaccagctggaagaggctcgggacatggccttactacactcggcgcggtaccagcagtccctgcgacgctaccacgcctga

SEQ ID NO: 182749 - DNA, 2544 bp, Arabidopsis thaliana landsberg
  unsure (1)..(2544): unsure at all n locations
atgaatccagtcggtgagctttccttcttttcctccggttttggtttttccgatttgcttgccgccgttaatctccgactttaatgctccgccgtgtcttcgaagttgcacttacttaaagctttttctcttccgccgtcggctttggaaggatccttctctttgaaaggtggattctttttggccggagaaagccaattctgagctcgccaatggctaacagaacattgaaccggcttctacggaatttctgtaagctctaattacctttattatctggaaatttaaagccttttttcaatagagtgttgaacacggagaaatcactgataatagatacttagcttctgttcttgttttatgacttttgtggaaacaaacaatctctttatggttactctaataagattttagcttggcaattgaatatggtatgatatgaaagttttggaatttagtaagaattcttgacaagtttcaacctttttgtgtttttttttgtttttcagttgtagaaagttcaccattcaggaagagaagtggattgtatcaaggagttgtttacaatgtaatcaaacggtttcagtctcatttatcagagtccgggaaggtagaaaaggagttagaagagcaggaggcagagaagagaaggcctagtagtgtcacttcttcgaggtccggattagagaaaagaagacaatttgaatcaggaatcgacaatgatagctctagtgatgaagatacaggtgatggaaagtggaaactagacctagcttggctcactaaagcacttgagccagctatgcaattacgtagatgggctcttccaacaggtttgtatcatatggtgcattcattgtgcttcttaaaatccattatgctgtggcaatgtttaatgtgtgttttctttctctaggagagaagtcactgcctggtagtcgatctctgtctgagataattgctagtattcagaggagtaagcttgggattgaaggttggacttttggtgatcttactattggtctctatcttatataccttagacaagcatccttgtctccatttgaggacgtcaagggcgtagaagttgtttcagagtctacagtaagaacattattctaatcattgtcatgttgataacttaccttttactacattctaagtagctttcttttttttccttttttcaggtttatgatctgatatataatgcggagttagcaaaaggttgttacagggatagtgtgagtggtcttgcaaagaacaccatgcttcgagagaataacattcttaaatttgtgaaagattcaagtgttatgaggcctggatactannnnnnnnnnnnnnnnngaaggaaacttgttgtctttggaatacgcgggacacatacaatttacgatcttatcactgacattgtctcttcaagcgatgaagaagtcacttttgaaggctactcaacacactttnnnnnnnnnnnnnnnnnncgatggttccttaaccacgaattgcaaactataagaagatgcttagcgaaatacgaggtgatgatataatccttgttgttcctcctttcttttttttgtgaggcatgagaaggatggatttttattgcaatgaacgcattcatagggatacaagctacggcttgttggtcattctctcggcggtgctatagcctccttaatggcgataatgctcaagaaaatgccaagggaggaattgggattcgatgctgaaattatttcagccgttgggtatgcgacacctccttgtgtttccaaagagcttgcagagaattgctctgagtttgtaacaactattgtaatgcaggtcagaacaaaaaaaaaaactctcttttcttgatcaaattttactgagattactttcttcttgaaactcacagcatttcccccgatttcaggacgacattatacctagactcagtgcagcttctctagcgagattgaggaatgaaatccttcagacagattggtaagcaaacaaccttctcttcttgaaacttgactagccttttacaatcagtttgtttaccactgtgacttgtaaatccaggacaagtgtaattgagaaggaagaatggaagaacgttttggatttggtaacaaacgcaaaacaagttgtcacctctgtgcaagacgtagctagaaaagtttctgattatgcaaacttcggaaacaaaaaagaagttccaggtaactactacttgagcacgagtttctttcgcgtgattctgtgtatcattagaagacttaattatgtacttaacgcttcatgaatctcatctttcttaaatcttatcagaaatcccgtcatccaagaacaaccagtctgggatactaatctctgactctactactaaagatgttgtaaaattgccagaagagttatatgtaccgggtgcagtttactatctgatgaggagcctaagaggaaccccgaaaagctcagcaggaaaacaagtagagtactatagtctatggaagagagatccaggacaacattttcagaggatacttctctccg

SEQ ID NO: 182750 - DNA, 117 bp, Arabidopsis thaliana landsberg
atgcaaagatcgtggagaccgtatcatcctctagttggatcattcatcaacgtcggagctctcatcttcgggaaatcattaagagcattagaaccacttgttcgctttctcatgcgg

SEQ ID NO: 182751 - DNA, 1068 bp, Arabidopsis thaliana landsberg
atgggtttagggaaactttaccgcgacaagttgtcacctgatgctgatccagttgtgcacatgtcagtttccaaagcagagaagcgactgaaaaagctcgagagggattatcaacatacctacgagaattacaatgaaatccgagtaagcatatctatatataacagaacaatgagtacttgtactgtttttaaaagcttatatattatcataatgaattttttgggcagtcaaacaggtataggttctacattgaagcaaagcattctacgtatcgcagtcgacaggctggaaactgtatcaaatattacaacaatctgcgagagcaactgcagaataatcttgacaaattgaaaaaagcagaagaaacacagagaggagtagaaaagcctgatcacgtaagtcctcacaactaatcaaaaacattttgtgttttcacagtacaaacagggttataaggatttagaaaagagactaatcagcatcttgccttaaatgaccagacaataagtgtcttctgttctactaacggaaataacatatagataagtttctataagaacctagcctaggatatataggtgaaggaaatctcattcttcagtatggaaatcatattacatctgttttgcatgtgttttgatgcaccatgccggtttagtgcaagcgagtgtcgatgcagcacggttgtaaaagcttgacccaagaaaagaggatacttcaactgataggagaaagacaacaacaacacctggaaaacaatgaccttggtcaagaaacaattcatttcacgaaaataagctgggaggtactactactgttacttgactagtctttagtttatatcgtagaatggcctttatacttaaaccattattacaaataaatcagttcgactacagtcaaagtaaaattccaaaaagtagcaacagcaaaacagtacataatctgctgaggagatttaaagacacggagaagttgaaggataaagccgttgccaatggtgaacttgttaacaacccaactagtcaggacaacttgacaatttctatagagatggaaataaaa

SEQ ID NO: 182752 - DNA, 278 bp, Arabidopsis thaliana landsberg
tggggttgtcggcgctagaacaactcagaagtagggggaagcagaccaacggagatgacgacgtcagcgtagacgaagcaaacgaccaacgagccatcgtgacagcgcttctcaaaaacctgatatggccccctgccctgtgtagggacacgagaggacatagacatcggagatcctgctctcccgaccctcgatggcacgtcggcggcgggcacaagaaatcgtcagaccatttacgtgcatgttgtgcgctcacgcccaatgctcggcccaacaac

SEQ ID NO: 182753 - DNA, 78 bp, Arabidopsis thaliana landsberg
gggtttcgagttaaaatcagatttcctagttcctactatatgcctctgcctcaagtccaagatgccgacaaaaaatag

SEQ ID NO: 182754 - DNA, 77 bp, Arabidopsis thaliana landsberg
atgactggatcgccttatagaggtattatcatctgggtcgcatgtgatcgtctcactcgttttcgggatgatcaaag

SEQ ID NO: 182755 - DNA, 1062 bp, Arabidopsis thaliana landsberg
atggtaagttgatgcgaagaacttcattttctgcagttacggcgtctcaagaatgacgttgtaaacaataggcttatcgacaacgacaaagttaaaacaatgcatagtgcctccaatgaaactggaagcaggacgtacccactgttattattgtgtctccgtcgaatcctgtcaacggctgaacattgtgttcggtcgcgcatagatcgacctccatcagtattaagacgtctttaaagatgacatttacagagctgtcggtcttagtgaaggtgattggttcagtattgtcgaacgcaaatgtgctactaccgatccaagtgcgttgtacttccggttgtcatcgataatttttgatggaacagacagaatctcgacatgtcatcagaccgcccattatcatgtgaatcgtttgttggggaatgggtgcttcatcatgcactggtgcattgcgacttcgcttgggggggtcccggtagctgttggtcagcttctcgatcttgctctatacgggcaggctcttgtaggttttccctatcatcgcgtgatcgttgaaaccgcctctttcaacgttgtgtctatgagaatttaggtggtgtcgatcgtgttagacctcaatatttccgttcttaaacttagaaagtaacagaagctgaagttgtcggcagtcgtcggtggaatgagcaacgaatttgtgaaattcacaataagaacgttttgtgtcggaatcgcggtagtacttgttccaaggtttgtgatgttgttgtttgtctcgattgttgatggcgaatgtcgaacctttctttcctttatcgtttctagtgtagtcacgatcatagtgctaacgcggttcatagtgttcgtcgctagctttctcttttggcgtagatgtctttggttggcgttccaccattgcagccttttcttcttcaattttgatttatcggttggcgctgtgcaaggcttcgtccaaagttgatggccgagcggtgataaggtcttttcgaaaccgtgatctcaaactcaacgcgttttgtagatcaccgatagccgcatcgtcag

SEQ ID NO: 182756 - DNA, 819 bp, Arabidopsis thaliana landsberg
accaccatggcctaagactgatctttaataacaacataaataatggaaagccaacattcacatggaaactgaacaacactcttctcaatgataccttggtcaaggaaggaataaagaaagaaattaaggactttttggagtttaatgaaaatgaagccacaacatacccaaacttatatgacacaatgaaagcatttctaagaggaaaactcgtagctctgagtgcctccaaaaagaaactagagagggcacacattagtagcttgacaacacacctaaaagctctagaacaaaatgaagcaaattcaccaaagaaaagtagaaggcagaaaatgatcaaactcaggggtgaaatcaaccaagtggaaacaagaactattcaaagaatcaaccaatcgaggagctggtgctttgagaaaatcaacaagatagataaacccttagctagactcactagagggcacagggaaagcatcctaattaacaaaatcagaaatgaaaagggaaacataacaacatatcctgaagaaatccaaaacatcatcagctcctactacaaaagtctatactcaacaaaactggaaaacttggatgaaatggacaagtttctagacagataccaggtaccaaagctaaatcaagatcaggataatgatctaaacagtcctatatcccctaaagaaatagaagcagtcattcatagtctcccaaccaaaaaaagcccaggaccagaagggtttagtgcagagttctatcagaccttcaaagaagacctaattccagttcttctcaaactattccaaaaaatagaaatggaag

SEQ ID NO: 182757 - DNA, 62 bp, Arabidopsis thaliana landsberg
gaccaccccagatgttttaaattcgattaaggagaaatgtggatcaaccataacaaacaatc

SEQ ID NO: 182758 - DNA, 1456 bp, Arabidopsis thaliana landsberg
ggtggtgtagaaggaaaaaggcaagttgataaagtcatcgacaaatgtgcatccatgcaggtatctgtgttaagtttttatcttatggggtttcacttagggtaaaatgtctaaggtttattcatgaattaacttacagaatctacgagaggcaattgcaacctatcgcagtagtattttgcgtcaacccgatgaaaagaagagagaggcagcactctcattttttgttgagtacttggaaagatattacttccttatatgctttgcagtatatcttcattcggagggtgcttttctccaatctggttcgcttggccatgtcagttttgctgattggatgcgagctaggccagagctctatagcattcttcgcaggtactgatatttttgcctgtaacctggtatgcttctgtttgcttgtaaatctggctgtatctcagttttccataggagcagttgaagaacaactttgagaggcttttcctatatttaagtagctcccggcagctgatctatttacactattgtagcatatgatcttcagatgtctcatgtatgttcattgtctcttctaggttgctcaggagagatcctatgggtgcccttggatatgcagctatgaagccttctttgataaagattgcagaatctaccgacgggcgccctcacgagatgagtgtcgttgctgcgcttagaagtggggcagttctgggaagtcaaactgttctaaagagtgatcacagtcctggctgtcaaattttaaatctaccagagagggtggaaggagctccgaattttagggaggttccaggatttcctgtgtatggtgttgcaaatccaactatagatggtattcgatctgtcattgaaagggttgggagttccagaggtggtcggccagttttttggcacaatatgagagaagaacctgttatatatatcaacgggaaaccatttgttctacgagaagttgaaaggccatataagaacatgctagaatatacggtaataatctatgttttaaaacatatttcaaatactatttagatgcaatacctttgagtgattaccctcagtttctcttcaactcttatggattggtctgaaagcttacataaatacctctatgtagggaattgatcgagatagagttgaagggatggaggctcgtctaaaagaggatattctgagagaagctaagcgatatgacggtgcgataatggtcattcatgaaaccaaagatggacagatttttgacttatgggaaaatgtagatgctgattctgttcaaacacccctcgaggtttacaaatgtttagaggctgatggttttcctattaagtatgcacgtgtacctataactgatggtaaagcccccaaaagctcagactttgacacattgacatctaatattgcttctgcttccaaagacactgcttttgtcttcaattgccag

SEQ ID NO: 182759 - DNA, 197 bp, Arabidopsis thaliana landsberg
ataaagcaactgatgatgttgaggtcatagaagattgggaagaagacgaagatgaggatgttgaatcacaggtatatctctttctactacattttcacgtcaaaatcgccactctgtttcttagattcttgtaagctaatctttcttctgttttacagcttggtgatggaggagatggtggtggaattgttctaaag

SEQ ID NO: 182760 - DNA, 43 bp, Arabidopsis thaliana landsberg
atgaccgccactgaaaagctaactcaatttcgtattgactttc

SEQ ID NO: 182761 - DNA, 590 bp, Arabidopsis thaliana landsberg
agaaactcactaagaactggaagcagcaagctcggcaaaggagaatgaattatgagaatcctaggatcattgatgtccaaaactacaggtatgtctatatacacacacatacacatatgtttcttggaaactttgtttttactgaaatctagtgttgattactttgagcagcatcttcgtagctacatggaacgttgctggacgctctcctcctgaagatttaaacctcgacgaatggcttcattcttcagctcctgcagatatatacgttctcgggtgtgtttccattttacatcttcttttcaagaatgtctctttttgttcttacttatcttgtgtgttcttttaggttccaagagattgttcctcttaatgctggtaatgttcttggagctgaagacaatggtcctgctaagaaatggcattcactcatcaggaaaacgctcaataaccttcccggagcaagcagtgcatgccatactccatcgcctattcctgtccccattgcagagattgatgctgacttctcaggatcttcaaggcaaaagaacgagactttcttcaacagaagatctttccagacgccgagc

SEQ ID NO: 182762 - DNA, 127 bp, Arabidopsis thaliana landsberg
gagcgagatctatgtcatgtcgaacctttctgtgccatcgcggcgatcccactcctacacgcggacgatccaatggcatactgtggatgctccgatgatgtaccatggaccattcgacacatcctag

SEQ ID NO: 182763 - DNA, 604 bp, Arabidopsis thaliana landsberg
gcagatgtgtatgtaaagatcaatgcccgcgtaaatggaaaaggcatcacacgcgtgcatgatacagatggtgatggcaaggccgaccaggttaccggtttcggtgattatggcggaacaggtattactatcaaggacggctatttatatgcatcctccgatgaagaggttttcaggtacaaactggatgataaaggaaatgtgatcaacccatctcagcccgaaaagatcattacgggactgatcaaccgccgccagcatgaatccaaatcggttgtgctggataaccagggtaatatttatgtaaacatcggcgcctattccaattcctgccaggagagggacaggcaatcaggttcactgggcaggatgccatgccccgtactcgattcggcaggaggcatctggcagttcagtgcatcgaataccatccaaacatatggtgatggtgtgcggtatgcaacaggattgcgcaatgtggtaggtcttgactggaaccagcaggccaaccagttatttgtgatgcagcatgaacgtgatgacctgcgcaatatttttcccgcgctgttctctgataaagacaatgcggaacttcccgcagaat

SEQ ID NO: 182764 - DNA, 71 bp, Arabidopsis thaliana landsberg
atgcccggtgccgtaccaacgatagctctgaagcatgtgtacagctctaatgagacgtatcttgcagtcag

SEQ ID NO: 182765 - DNA, 221 bp, Arabidopsis thaliana landsberg
atgcatatcacaagttcacagcccacagatccaaaacggtaggtcactacatttaaatgtcactgttggtaaaagcaaagagcatccgatcaatatgttaacagcgacgtttctgaatttaaaacacaagcgaaaaacggaatcaatccgtttaatatttttgtcttttttacagaatattatatgagtttgaaatcgatagtgacatatcaaacacataa

SEQ ID NO: 182766 - DNA, 173 bp, Arabidopsis thaliana landsberg
gtttttgggtccaaatgtcagttttatatcgggtatcaattaaatttcacggaagccgaatgaccctaaccgatccaaaccaaaaagtttctggttcctacacggatcctaaacctccttatctaaaaaaaccgatccagaccgacccgaaaaacctgaatgcccatgcctag

SEQ ID NO: 182767 - DNA, 474 bp, Arabidopsis thaliana landsberg
atggaattgatccaaggggcaatcatcttcattcaaaccgagaaggctaggacggagttggaatcagacatcaaggagtacgagagcaatctcctccttttggaccaaacccatgaagacgacttctccgagaaacaagagaggaacgagttgaagaccgtcctggaggagaagcgaagtcgtttagctgtccttccttcctcgtcgttcaaccctcaacagtttgaggaattcttcaccgaatcgcctcccttggacgaatctggtttagattaggccggtacatttcaaagcttttgaaacctaaccatagcaaattattcttgtactttttctaatccgaaataattgtctcaggccccagtgatcccatggaacccgaagcacccatcgtgctggtgacgattcccgaagcggtagccatcccgccagaacttcctccatccacgaactcggagacagtggtcattggaa

SEQ ID NO: 182768 - DNA, 165 bp, Arabidopsis thaliana landsberg
gcaaaggacaaggtcgtagttaataagaagaaagaagaaggaaaaacctgtttaggttgcggcaacttcgaaagcaaagaactcattgcagattccagtagcaagaaagagagaataaggaccaagagacggagagagagaaagagaggcaaaacttctgtgtaa

SEQ ID NO: 182769 - DNA, 238 bp, Arabidopsis thaliana landsberg
atgcatgtattaccggatctagagtttcttgagaagaagtacaaggatatgccagtgagtctttactattgctgctctcttatattttattttggattttcaagcaatttaaatttcacctaggattgccatctgtgtgcagttcaccgttgtgggtgtacactcggctaagttcgacaatgagaaagatttagatgccatacgaaatgcagttcttcgctatgatattagccacccg

SEQ ID NO: 182770 - DNA, 181 bp, Arabidopsis thaliana landsberg
ccattttcaggagaatattgtcaataacttcaagagtggtttccagattcgaaccttctgtggtcccggcttcggccccagcagcttcggcttcgccggtttcagcttcagtggtttccactctgctagcttcggctgtggcgccttcggcttcagcggtctcgacaaaaacaatttttga

SEQ ID NO: 182771 - DNA, 179 bp, Arabidopsis thaliana landsberg
gcggaagaaggggatcgagagaaagaaatatcacatcagcggatagtgacagaaaaccggaatcaaaaaaaaaaggaccttaccaaaaagcaagaaatacaccactaaaccaaacgaggaagagcacaaatgcgggatcaaccaagcggaaaagagcaaaaccgacaaaaattgagtga

SEQ ID NO: 182772 - DNA, 420 bp, Arabidopsis thaliana landsberg
atggggaacaatgtagaagatgcagcaacaatgaagtaagtaaagaaatattcaaaagctgtcaagggtgaaaccgtaaaaaactataacgtataagtacataaatttgtgagtactatgagatatttctatatccacaaaggcataaattttaatgtgccaatcccataattgatccctaatttatatccaaaaaataatgtttaaccatttgtgtatatatatatggaagtcaaatctgctatctatcgatcttccacccagtacttaactagtagaattataggggcttttataagaatgggcatatattgggctgaaaattagaaaatgaacactttcatagagagtttataggattcggcacttctcctgacatactatgacgattttgccctcagaacaattaaaggaagatga

SEQ ID NO: 182773 - DNA, 42 bp, Arabidopsis thaliana landsberg
atgcccgaaaaccaagggttcctcgcaagttcgccacggagg

SEQ ID NO: 182774 - DNA, 1253 bp, Arabidopsis thaliana landsberg
cagggaatagaatatgataacgaatttgaatctggttatgattcaccctttgctgaacataatgcacttgccattgttccctccggtttagagattggacatgaagaaacatgtaagggtttagagaatagaaatgaagaggtaagtccacagctacattattcagtgagtattaaaaggtaccattgtctcttagattaaaatgattttggacatgaaaatttggctcctgaagagttggttaatgactgtaagactcctgaagagatggtaaatgactgtaagagagtgtcttgtgcttcggagtttgtcaagggaggggagtatacaagtgatcccaagttaaaagctctgtttgcaagcaaagaaaaaaaacccagtataccaccccatgtccagtgtaaacttgaaggagtttgacgagctcagataactgatggtggacaatgaggagctgtaagttctatgattaaaagtgtagctattttttttaaggctatctaacaaaacgttcgtttttacaggatttttaagattgtaactgaattcatcttctgctatcggctgttcctggacatagctgaggccaacaaacctttggaaactgaggtaaagaacgtgtacactaaaacctcttgaatacttatgatgaacaccatacatgatagtatcgcacatggtgcaattggtaaacagcatgtgcaggtaataatggctatgttgtggcgcagaaggcatggtttgtacaacacggcatgagctgttttcattgatacatggtttctgacccttctaaatgagaagtacacagatttcaaagcctgcaagaataagaggaagtctcaattggggagtgaacataaaagcgtttgttacaggcagggcaaaaggacgggcaccaacaacttttctacaatatgctcacctggtgtacatccctatgaaatggtacacctcacactgggtaagtctggtaattaacttgaggctgcatacggttcaggtctttgaccctttaattgaagcaacgtcggacgaggaagtacaaggtttgatggcgcctgttttagagatgattccatggttggttaaagaggttgtaggtaagaagtatacaaagaacttctcaacaaagccactaacattggagagggttataggagtataccataaccagagaggaggtgacgatggaccccttgcaacaaaatacattgaaatgcactcgtttgggcttgacatagatgatatgg

SEQ ID NO: 182775 - DNA, 694 bp, Arabidopsis thaliana landsberg
ggtggttgatgttgtgcaggaggaattagagttacagcttttaaaggtaagaacatcttaatatctgtcatcttgtattataacattgacaaagcttgcctgcttctgttacattgcttcaattttacaagcacatttttagtaacttggtattataaactcttaaacaggaaaagccacgaaaccatcttgatatgagaaaccggctcaattctaaaggccagcgtgaaggaaaggtcattgattacaggtacaacattgttgcctctttgtgcattatctgtaaacgagaccatgtctgctttgattcgtgtactcgttgtttttatatccacatcctgaaaatcagtatgataaaaatggactgaagttttttgtgcatttgcatgaaagcgtgactcgagttttgaaaatgtgattcttaacgagggtaacatgtatccgtagttaggagcaatgacgaaagggaaagaatctgataggttgacactgctaagagtgtctgtgaaacaacaaccgattcacaatgagttcttaggagtagctatgttgctttttttaggcaggtttctcacagtggatgatcctctaattttctttctttctttttcattcaaatagaataagcgacctgagggtggttgatttgttggacggtctgtgtgatagaatgcaggactatactctacaaaag

SEQ ID NO: 182776 - DNA, 423 bp, Arabidopsis thaliana landsberg
caccgcgttcgcgtcctacgggcgcggggagaatcacgggccggctagcgagggcgagcccggcgacagcgggcccggcgatggtgacggcgggatctccggcagcgagccgcttcccggcgacggggcccgaataacgaactcccggtagccagcgccggccgggcggcgaataccccggtacgcaaaaccctggacacgcgagaaccccgcggtgcctctccggcggccgcggggttctcgcgtaagaaagcccggctactcggctacgcggacgacggcgaccaggccgacgcccttgatcgggaacgctcgctgcagacaccggaacggtgccgtgccgacccggttcaccgagcccatcatgcttccgcccggctggaacagacggccagactgtgcggagagctcttcgatcggtga

SEQ ID NO: 182777 - DNA, 560 bp, Arabidopsis thaliana landsberg
atgaatcactccacttctgatcagagcctctacatcgagagtgatgatggagatgacgagagaaaacacttgtccgacgatgaagacgacgatggaactctttctgatacttctgacgcttacaatcaaaaccaacatcatctgtctaaagctagcccatactcaacggcatggcctaagagttataggtatcatgattctcaaatttctaacgttaatgttaatgcttctttgtcatttgtgtttacttaattactcatgttaatgtttcaggcaatcgattgatatgtttggaagtgtaccatcaccaaatttgggttttcttgctaattcttctatgtcgagaagaggaagctcattcatgtcttcgacactgacaagaagacatactccagaatcattaccttgtgttacaaagcctctcctagaagatgaagaagcaccaaaacataaacttagcactcattctttgcttccgtcgaaaccatcgtcatccatggtggggtctcatgatatgggaatctccaatgatagctcctttggacaggctgttcttaatg

SEQ ID NO: 182778 - DNA, 116 bp, Arabidopsis thaliana landsberg
atggtattacgtcaacagaaacactgcaattccagtttagcgcaatcgaagcagcgacaaataagttctcagaaagtaacaagcttggtcatggtggatttggtgaagtttataag

SEQ ID NO: 182779 - DNA, 190 bp, Arabidopsis thaliana landsberg
atttgatctcctgcttcgcctcttgcacctccgtcctcatcttcctcgggatactaaccgcaagatactccttcgacgatttcttggtctttctgccgacaaagatgattgccggactttcgatactgttcgtttcaatagcggcgatgcttatagcattctcgtcggcgctattcacgatgatgggtaa

SEQ ID NO: 182780 - DNA, 408 bp, Arabidopsis thaliana landsberg
  unsure (1)..(408): unsure at all n locations
atgcgctgtattcccaacctggtggttagtgcaccgatgaacgaacaggaattacgcaacctgatgtttacggcacagctggacagcaacccttatccttttgtgatcaggtacccccgcggagaaggtgttatgcccgactggaaaacaccttttgaagaattgcccatcggcaaaggcaggaagctgaaagacggaaaggaaattgccatactgagctttggnnnnnnnnnnnnnnnnnnccaggctgccatccgtgaattacgtacagaaggcattgatcccgcgcattacgatcttcgctttgtaaaaccgatagatgaagcgctgctgcacgaagtattcagcagatataacaagatcattaccgtagaagatggtaccgttgtaggcggctttggcagcgcg

SEQ ID NO: 182781 - DNA, 111 bp, Arabidopsis thaliana landsberg
atgccgccgcaggcgttgcggctgccggctgcggcgcagcggcctcggcaggggcggaaatgtccgggcgagaatcaatgggctcctgcgtcgcgcaggcggccagcagga

SEQ ID NO: 182782 - DNA, 812 bp, Arabidopsis thaliana landsberg
tctcttaggacagagacagcattagttcagaaaccagtggtggggacagaatctaatattgccatgaagcaaatgcttgcttttactttcacggaacaggtatacttaagtggtagtttttgtactacggattgtaaaactgatgttacaactacttaaaatctttaaacattgaacagggttcttttgtaagagaaatccttcttcgagaattcgctaaggtgagcatttaatatgtcttatcagctcttcaataaaagtacaacagttcaatcgcttggcttgagaagcaaatattggacaaaaattactatttgaacatttatgtttatttgataataatcgaaatcccttgcaataggtgtgtgcaaatatcattgtttgttgatcaaaaggattgattattcaacagggtcttgatgcatatggattggcaactttggactcttttacattttctggttcaggaccatcgagttccttgacagaagaagacatgacaaaccttagaactttctatcgcctcatctcattgttctcagggatgcaaaaggctaaaagcgtaagcacggtaacaaatttctcttttcttctgctatttttatctttaattaatgttttgggcaacaaacttgcagcaagtaaaagcggtgagtaaatatggtgaggcgctcacgcctctagacgaagcatcactggtcatgtatcagcttccatcagcacaagagatgcttccgattctctccatattacctgaggtaacagatgttgcaaaactgaacttgattttacgagttcattacagtttttaa

SEQ ID NO: 182783 - DNA, 461 bp, Arabidopsis thaliana landsberg
gtgttagtagattatcgtcgtcgtccgccactcaacgcacctcccttcctgttgaacgggcagtgaatccatatgcgatgctctaccgggaaagtgactgtagtccctttgcggtagcaccgcttgcacggatcgtgcgcgttcctagttgcgcgataggtgatgtacccacaggaacaccagtacctaacgcacgtctcacactcggccattgaacctcgcggcgttgcgcctgggttacagggcttgcaaagcctaccaccgtttttgcgttgatagtagttggcggggtcggtcatgtcgtgaagcttggcgccacaaactctgtacgccctgcgtatgttgaccgcgtgcgataccgcctcaaggtggaacgggcatacgcaccaccggtattggcacaggtgatccggctccgttccctatggaatcggccctacgtagagcccgtaagagaatcg

SEQ ID NO: 182784 - DNA, 275 bp, Arabidopsis thaliana landsberg
acttgcctgttaataatcaggaagctgccgtaagagaaaagacgctctttgttgccaatctcccttatgaaactaaaataccaaatatgtaagtagtacctttaatttcctctgttctcggatccagtttttcatgactgatcctctacttttgcagcatcgatttcttcaaaaaggttggagaagttgttcgtgttcaacttattgtaaacctcaagggtaagcttgtgggttgtggctttgttgagtttgcttctgttaatgaagcagaggag

SEQ ID NO: 182785 - DNA, 91 bp, Arabidopsis thaliana landsberg
atggacagagaatttgaaatccattactcattagccaaaaacaacatatttgaagaagaaagtagaaatcatcatgtatgcgttaaacttg

SEQ ID NO: 182786 - DNA, 487 bp, Arabidopsis thaliana landsberg
atgatagatgtcaaagacgggagaataagtctcaaccttgggaagcacatcaagctgcagtttgacatctacgaaactttgcaaaggtcaactgtagaagaaaagatcatggctcaaccttagccttcgaattcaatcacccgaccaagcacaacctctacacctgacttgtgagaactaaaaagaaatctgatgagcaagaagaaaccatagaaaagctagctcaaacagttgaggaacttaagagtaaactggatcagatgcaagagaaagctcaatcaaaatgcgggattgacactatcccgagaaaaagattacttaaagatggtatgaggagatagattatccaccagaagagaaagaggcctatttcgaggaaagaagaattgagtattcggctactcttctctcaagagaggatgctgaatatgatgatgagatcagagaggactatgcagatcttctctatcacccattttcttcttaa

SEQ ID NO: 182787 - DNA, 111 bp, Arabidopsis thaliana landsberg
atgccgaaggtccgcccctggatgatgcaaagaataatgttaatttttaatatttcatttataatatttgtcgtttctttatagaccaattataaatacgacttctcgtga

SEQ ID NO: 182788 - DNA, 13 bp, Arabidopsis thaliana landsberg
atggccctggaag

SEQ ID NO: 182789 - DNA, 96 bp, Arabidopsis thaliana landsberg
atgcctatgtttatcaaggatgcggctttcgttgccatttatgctggattggtcttcggtacagcgggaatggcgcttgtgctagtcgaaatgtcg

SEQ ID NO: 182790 - DNA, 209 bp, Arabidopsis thaliana landsberg
ctaaccgtatcatatgaagtccctgccctattaacccctgtggcatcggtgcgtatctttttaccttaaagtctctatgtcaagctgaatgtcacagactgtttttcttattaccttaactttccccaattcaggtactacggccttttatagaaagcttgcttagaggtggacttgaacgatttgcagccttggccaaaactacttaa

SEQ ID NO: 182791 - DNA, 384 bp, Arabidopsis thaliana landsberg
attttagaaaaaacacccgtcatcaacctgctgggcaggcccgacgtggcaatcgacgacatcaggaaaatgagcgactcattcgccgaaacgttcgggcgatactccgaagaaattctagagcaggcagagataaatgtgaaatacgacagctatatcgaccgcgaacaaaagcttgcggagaagatcggatcacttgaagacttcaaaattttccccgacttctactacgacaaagtcaaagcgctatcgcacgaggctcgtgagaaactgaaaataatccgcccggctaccattgggcatatgtcgcgcataattggcgtctcacctgccgttgaatctgttctaccagtgttctcggcaagtaaatgctggatcaagtga

SEQ ID NO: 182792 - DNA, 513 bp, Arabidopsis thaliana landsberg
gcaattgacattgcattagttgcaactttctttttggagacacttcctcctgtgaaatcatcagaaggagaaagtagacaaggtatgacattttttcttgctatactatattcgcttgtggcattgttttgtcatcctaaagatttcctgtccattctgctcgcagtagtttcttcataaatttgatcttgtgctgaaagagacatacacttttatcttgattcaggctcttctgatgaggatgatatgttgattgacgatgtaccaggattagtcttgaataaggctctggagcagcagataaccaatgcgatagactcacgctttcttctgcagttagtatgtacctactctctgtcatatagaaagtatattaagtgctatgcctctgtaattttttatttttaatctaagtgctatacttcctctggatcaagtgattctttaattttaatctaaataatcttagtttcatccctgcagacaatgttttgttccgtcaagtttcgcttg

SEQ ID NO: 182793 - DNA, 88 bp, Arabidopsis thaliana landsberg
ccaaagccagacttcaatgctgaagtgtgagcctgcttccggtgtggctgaggtgctgcgcatgcatatcacgttcgccgtggcactg

SEQ ID NO: 182794 - DNA, 1685 bp, Arabidopsis thaliana landsberg
gaaataatacaaatggtggaccatctcgaaatggaagacatgtctcccacagcgtagttcttgggtcttttaatgttggagatcagacagaaggcattgttccagacctcagccgggtaatccccaaggatttgtgatattgtttggcctatgggatggtttgattagttaggctaacctgcttttaattttgtgttgctaactactaaggtcattggagcagttctaaattcttttggagttagtggacagcttcctacaaatcacagtactaatggcacgcaatcctctatgcccgtgagtttttttctcgtcactctctatttcgaatttattccatattagtgcttagtctacgttaaggattgttgagaatcaggtgttgttactatttgatgtgtaaggtttcatattgtcatcaactattgcctgtttctaaactcgatgttgcatgcgcttttatttttcctagtcgaatcagtcgtctaatgcacctcctggaaatacatctgatggagagcctggcattggtggtcaaagccaagctacgggtcattcacaacctaggcaagcatttcctggtgtatcatttcaaacatcgatgcctcgtgtagttcagattcctgttacagcagccacaacgattcctatcccttcattcttaacggtagttcttagtcacgtagtagtattttgatcttgagactagagctttaatcttgtcattttacaatgtaactctctaattctgcagcctattccggattccttagacactctaatggagttcattaatcggatggagcaggcattatcacaaaatggtattgtgatctaagttttattgtcatattggatagagaacacataaataagttaattggatgttcctccaggctatcagccagatacctcttctgctggatccggagggcgaccaagggaagagttgcctagaaatagacgaggtgcagcaacacctgaagcactctctgttgtcctaaggaatgcacaacatttactgagtggtctcggtgtctcttctttatcggtaaacaccttcttcacactgcttattaattgattccattctttctctttacaagaactgttatgtatatggttaccatgcattgtcatctaattatgtgctgtttgtaatttgcaaaaacattgttgtagcatattgcgggacgtctggagcaagatggttcatcttcagatcctactctaaggtcacaaatccagacagaggccgtgcaagtaggtcttgccatgcaacatttaggggccctcctactggagcttggacgcacaattttgacattgagaatggcaccgtcgccggtgcgttttgggtcattcctttcgtgcattttcctattcattcttgacatgcggctcattaacactttgatctacaggaattatcctatgtgaatgcagggcctgctgtgtatatatctccatcaggaccgaatcctattatggttcaggtaagcttctagtctcatcttttttctaaattaattttctacttttatgtaattattactgtattttgcagccttttcctcaccaaatcagccctctctttactggtgctactgtctcatcaaatccactaaccggacctgttggtttaggaactgcccaaaggcacattaatattcacatacatgctg

SEQ ID NO: 182795 - DNA, 940 bp, Arabidopsis thaliana landsberg
atgattggatacaatgagacttattttggcgagtgggcaagaagagttttgggtaagtttagcataagagagatgaaagagcttgcagagtgcaaccacagtaatagttcaatattagatgtatgtagttgatattcaatgtaaaatctacattataaccatatgacaatttgatgaggcagggtcagttctaagtcttatggatttgttttgttgatacaacaaacatgtattcaaaactaatagcaacaaaatggtaaccatatcaaccgtttcctattcttaataatgaaaccatcaggggtaaatctataaaaagaaaattcagtcaaatgatatgcaaattgtactcgttatctctattgagtttcctcctatataactcaaatccatcagagaaataagtaatcaaataaaaaacacactacaactaattgaagagctcttttattaaacactatggcctcatctaaaatgttcttagtcgcttctctcctcatggctctgatgttctcctctatgatcacttcaagccgcgctgcacaacaatttacgaagaaacaaacgttaaaaccgaagttttttagaccgtgtttccctcaatttccgagacccggctttccgaacaatccagcattacccagttttcctcagttcccaagacccggttttccaactaatcccatgcctttccctaaattccctagacccggttttccgagcaatcctacacccgagtttcctcagtttccggggcaaagttttccaaaattcccattctcatctcctttctctcaatatccgaagcccgcaatgcctggatcgcccgttacggccctctctgctcccccctctctccctggaactccaacttccatcccttaagttgtctcctccaaacttaatggcatatgtgaagattatcatcaacataagctaa

SEQ ID NO: 182796 - DNA, 907 bp, Arabidopsis thaliana landsberg
atgcactcgcttgaatcttccagaagggatcagggatgagttggtcgatggatcttggttaatgatgcctcctcttcacacaagccacaccattgacatgagcattgtgatatggattctttggccagatgaggaaagacactcaaatccaaacatcgataaggtaattccagattgactattagcgaaatcatacaatatatttcatatgtctcctgatgacggtgttgaacaagaaaagcaacaatgtataaatatatttttatcatttgttggttagtctctatcatcacacagatttagcttataggtacttccttagtatagttgttgatgccaagttgctaaaactgtaaatgtgatgttaaaggaagtaaagaaaaggctatccccagaggcagctgaagctgctaatcgcagtggcaggtggaggaatcagatccgaagggttgcccacaatggttgctgcagaagggttgctcaaacgagagccctttgttcagcactttggaagatccttgtttccgaagaacttcttcaagcactgacaaccattgaaatgccgctggtaaatcttcttttaacttgctttagatactgaggattttctaaacttcaccagcatcccgctggatgatatgctcaaagttaaatatttatatatttgctcaagcagccatctgtggttggttttccttttagaaattttgtattgtgaatttgtgatggtaagtttttgctaccatacagcttcctgacgaatatcctatgtgatagaggtagataatggccagggaggcagtcaattaaagaaatttctaactctgctaagtttgttgttttgcggcagcataatgctttccttctgtgtttcaggttaatgtccttgcagacatggagctttggg

SEQ ID NO: 182797 - DNA, 107 bp, Arabidopsis thaliana landsberg
aaatcgataaagaattcgactccaagtaccgtcggcccgaacctattacgactctaagactaaattccggctatctactgagttcagacaagattcaagaccaatag

SEQ ID NO: 182798 - DNA, 144 bp, Arabidopsis thaliana landsberg
aaccaccagatattacgaattggtttcccagttatgtatatgaatcgttaccattgtcttcttcaatcaatgaaattgaaaacgaagtagatgtggtcaacaaagcaaatcttggtggtgttattgatgaatcacttccttctg

SEQ ID NO: 182799 - DNA, 986 bp, Arabidopsis thaliana landsberg
atgggcaaaggaagagcaccatgttgtgacaaaaccaaagtgaagagaggaccatggagccatgatgaagacttgaaactcatctctttcattcacaagaatggtcatgagaattggagatctctcccaaagcaagctggtatgtctatgatctttaaaagcctctttctttagcttttctagtcttctggttctgattctatctatgcatgcaatgaaggattgttgaggtgtggcaagagttgtcgtctgcgatggattaattacctcagacctgatgtgaaacgtggcaatttcagtgcagaggaagaagacaccatcatcaaacttcaccagagctttggtaacaagtatgtgttatcttgttaatgtcatgttgtgggctcaaagttttgattttgacaatagcttttctgcattttggattcaggtggtcgaagattgcttctaagctgcctggaagaacagacaatgagatcaagaatgtgtggcatacacatctcaagaaaagattgagctcggaaactaaccttaatgccgatgaagcgggttcaaaaggttctttgaatgaagaagagaactctcaagagtcatctccaaatgcttcaatgtcttttgctggttccaacatttcaagcaaagacgatgatgcacagataagtcaaatgtttgagcacattctaacttatagcgagtttacggggatgttacaagaggtagacaaaccagagctgctggagatgccttttgatttagatcctgacatttggagtttcatagatggttcagactcattccaacaaccagagaacagagctcttcaagagtctgaagaagatgaagttgataaatggtttaagcacctggaaagcgaactcgggttagaagaaaacgataaccaacaacaacaacaacagcataaacagggaacagaagatgaacattcatcatcactcttggagagttacgagctcctcatacattaa

SEQ ID NO: 182800 - DNA, 305 bp, Arabidopsis thaliana landsberg; identical to SEQ ID NO: 177915

SEQ ID NO: 182801 - DNA, 380 bp, Arabidopsis thaliana landsberg
gatcatcgagtcttcttcttctctacggagacatgaacttggcgttaagagaggtggtagcgaagatggaggagattcgcagcagaataagaatgagaaagtgaaattctctgtttctttgttgagagaagaaatcgaacaagatttctctgccttaattggtaaaagacctccgagacgaccgaagaagagaccgagattggttcagaagcaaatgaatgtaacttcttcttcttctctccatctctctcgctcacacacaattgatctcttttttgactctgaattttcatttattgcagactctatttccaggattgtggttagcagaagaagtaacagcagactcttacgatgttcctgaggctgtggaaacatga

SEQ ID NO: 182802 - DNA, 885 bp, Arabidopsis thaliana landsberg
atggctgccacctttgcatacctcaaagacgtccgcccctacaccacagcatggagagttcaagtcaaagttcttcattcctggaagcaatatacacaaaagactggtgaaacccttgagctcattttctctgatgaacaggttatctatattaactttttatttgctttttacatagtctacttcatatgttgtaattgaatgaaaattaatctacatttcagaacaaaaaaatccacgccaccattcggacagacttggtgtcaaagcatgttaataagctaactgttgggcagtgggtttttgttgagatttttactctcaactatgctggcggtcaattcaggccaacgaatcatctttacaagatgacatttactaacggaactactgtgatgggatctgatcctgtatctgattctatgtttctatcactggcaaaatttcagaaaatccaaaatggagagtttaatccatacatattagttggtaaacatttattaaaaaagctaatattaataaatattcactgtcgatattccatttgtattaaattaacacctttttcttttatagatgtcattggtcagattgtttctattggagagctgcagaacttagaagcagccaacaaaccaacaaccaaaattgagtttgaacttcgtgatgaaacgtaagtttctggacgtttgacttttctactaatctcacaaatcaattttaattatatatctcactaatcaatttttttgttttacagtgatgagaggattggctgtactttgtggggtacatttgctgaacagatatttagggcatgtcaagactctaatcgtggaatggtgatttgcattctcagatttgtgaaaatcaaatcttataaag

SEQ ID NO: 182803 - DNA, 1639 bp, Arabidopsis thaliana landsberg
atggtttatcagattgtgacggatgaagattgcgaaggctctagtagctctttgagtgcaatgaacattacagttgaagacggtgttgtcatgtctaaggttgttttgttcaatccagctgaggatacttgtcaagatagtgatgtaaaggaggagattgaagaggaggtaatggagctgcgtcggtccaagagaagaagcgggcggcctgagagatacggagactctgagattcagccggattcgaaggatggatgggtaaggatgatgccatataggtacaacatatggaatgtttcaagtgatgatgatgatgaagaagaagattgcgaggatgataaagatactgatgatgatttatacttaccgttatcgcatttacttagaaagaaaggaagcaaaaagggatttagtaaggataagcagagagagatagttttggtagacaaaactgagaggaagaagagaaagaaaacagagggatttagtcgaagttgtgagctttcggttattcctttcactcctgtctttgaacctataccgttggaacagtttggtctcaatgcaaatagtttgtgtggtggtgtctctggaaatttgatggatgagatcgataagtatcgtagtaaagcagcgaaatacgggaagaagaagaagaagaagattgaaatggaagagatggaatctgatctaggttggaatggacctattgggaatgtggttcataaaagaaatggaccgcattctcgaataaggtccgtttctagggaaaccggagtttctgaggaaccgcagatttataagaagagaacgttgagcgcaggtgcgtataacaagttgatagactcgtacatgagtagaattgattctacaattgcagccaaggacaaagcaaccaatgttgttgagcagtggcaagggttaaagaaccccgcaagcttttcgatcgaagccgaagaaaggttgagtgaggaggaggaggatgatggcgagacttcagagaatgagattctatggagggaaatggaactatgcttggcttcttcttacattcttgatgaccatgaggttatatatatataccttttggaaatctttttatattttcctgaaaacattcttgatgaccatgagcttacatttttatatgtttaatagtttgatttgaaatttcaggtgagagtggataacgaggcgttccataaagcaacctgtgattgtgaacatgactatgaattgaatgaagaaatcggaatgtgttgcagattgtgtggtcatgtaggaactgagataaaacatgtttctgcaccttttgtaagtggaaactctataccagacaacattttgtcacctactttcgatgagttacttgtaatatattttggtggtatggttttcgataggcgcggcacaagaaatggacgacggagactaagcaaatcaacgaagatgacattaatactactatagttaaccaagatggagttgagagccatactttcactataccagttgcttcctcagatatgccatcggctgaagaaagtgacaatgtctggtctttaatacctcagcttaagagaaaactgcatttgcaccagaaaaaagcttttgagtttctctggaagaacctaaccgg

SEQ ID NO: 182804 - DNA, 187 bp, Arabidopsis thaliana landsberg
gtcttgtactacttccaaaaaaaaagaatcttcctcatcatacaatcttgacgaaatacttgatgataagtttgatcaattttttgatgaaacattacagagatatgttgatcgtaaaccaaccaagtcaacaacgaaacgagcatatattaaaagagatcgtgaactaggacacatccagttatga

SEQ ID NO: 182805 - DNA, 418 bp, Arabidopsis thaliana landsberg
atgggccagcgcggtcttgaagttggtcggcaggttggtgttcaccgggccggagaaggtgccgttgacgccgccgtcggcggtgagaatagtgtaacgcttctcgacgtaagcaccgggagcaaactgcgcggccactgttgcgccgcccaactgagccgtgccggtgacatgggtgaagtcgctgcccgccggcgacacttcgaccatgtaggtcgatgccgctgtcagcaccagattgcctgctaccgtcagcgcgccgatcgaattgcccggcgccagcgtgccgccgtcgatcgtggtgttgccgaccgtgccgttgccgccgagcgtgccgccggggttcaccgtcgtcagcgacgacgacgcaatcgagccgttcaccgacaaggtgccgccgttcaccgtcgtcgtgccg

SEQ ID NO: 182806 - DNA, 75 bp, Arabidopsis thaliana landsberg
atgttcaccgggcgcacgctgcgggggcacggtgtcccgccaccggacccggcggtaccggagtcgctgggcaag

SEQ ID NO: 182807 - DNA, 114 bp, Arabidopsis thaliana landsberg
gaattgaatcagaatgtcgtcttcgacagtggtctagtttatggcattcccgagcgacttatcaacaatgagctctccgacggcttcgtcaagtttccggagtattcattatga

SEQ ID NO: 182808 - DNA, 188 bp, Arabidopsis thaliana landsberg
aacagtttggcgctgaggagaggcaactgacaggagtctcgaaaagagatttaatacgagctcacacaaccatctccacaataaaaacgaagacgacaaaacaagaagatcagaacacagaacctaaccatcacaaccgctttagcgccaatgaatatgagaaggcgaaggatcaaggaagaccttga

SEQ ID NO: 182809 - DNA, 517 bp, Arabidopsis thaliana landsberg
cactgtgttggatcaacgattttgggattcatgcgaaagctccaaaagtcacttagtttcgattgatcatgaagacccttttgctgaatactcggaatctttggattcaccggctgatcggatcgagaaactcgccggagatgagttttcaagcttacttgattgggatacggaagacgatggcggatggattcaagtgagaggcgagaaacataaagaaaccgagaaacgcgacggcgacgaagacgtgatttgcgttgaagcaacgtcatcgtcgcaaacgattgaagaagttgaagattggatttcgaatcaagacagcttgttctcggaatattcctctgacgacatcattaataatttctactctaatgttgctattcaaggaaatttaattgcatttcattattgtactgatgaagatgaaaatgtatccataaagaatatgtttcgtactaataacaaacatttgtttttcaaattgcaagctcatgttaaattcactaaccaagtctga

SEQ ID NO: 182810 - DNA, 112 bp, Arabidopsis thaliana landsberg
tccaagttcctaccgggcaagtaaaggggacccaagacttgtcttcagcttttattttaaaggtgcatgtcaccgagaagcagctgagttgatcttggctgtcaggaaatga

SEQ ID NO: 182811 - DNA, 1547 bp, Arabidopsis thaliana landsberg
atgaggctagttctgcacttagcaacagctctaaatagggccattaagcagatggatgtgaagaacgcattcctgcatggagatctcaaggaaactgtttacatgactcagccagctggttttgttgaccctagcaaaccggatcatgtctgcttgcttcacaaatcaatatatggtctcaagcagtccctaagagcttggtttgacaagtttagtacctttctgctggaatttggctttttctgcagtaagtctgatccatctctgttcatatacgctcacaacaacaacctgattctacttctcctgtatgttgatgacatggtgatcactggtaacagctcacagaccctaacaagccttcttgcagcactcaacaaagagttcagaatgactgacatgggccagcttcactactttttgggaatccaggttcaaagacaacaacatggcttgttcatgtctcagcagaaatatgctgaggacctcctgattgcagcgtctatggaacactgcactcctctgccaacccctcttcctgttcaacttgacagagtgccacatcaagaagaactcttcagtgatccgacttacttcaggagtattgcaggaaagctccagtatctcacattgacaagacctgatatacaattcgcagtcaactttgtgtgccaaaagatgcaccagacaactatatcagactttcatcttctcaagcggattctcagatacattaaaggcaccattgcaatggaatctcctacagtagtgactctcctactctcttgcaggcttacagtgacagcgattggggaaactgtaagcaaacgcgacgatcagttggtggtctctgtacattcatgggcacaaatcttgtctcatggtcctcaaagaagcatccgactgtatcacgcagctcaactgaagcagaatacagaaccttgagtgatgccgcatcagaaattctttggctaagcacacttctccgcgagcttggaatacctcttcccgacacactggagctgttctgtgacaatttgtctgtcgtttatctcactgctaatccgacattccatgccagaacaaagcactttgacattgattttcattttgtcacggaacgagtggctctgaaagctttggtggtgaaacatattcctggctctgagcaaattgcagatatcttcacgaagtcacttccttatgaagcgttcatacatttgcgaggcaaactcggtgttactcttccgcccagaccaagtttgagggggactatcaacaccattcaagtgaagcctcgacaaaactttgtcgtttcatcaaactcagcaaagaagcaaatgaaagcccaatgcaagcccaagaagcccacaactcaagtttggaagcaacggtcttctgcgacaaagacagaaactccagaagcttcaccaagtcacgacaagaacagagctggcacaacttcacctaatgcttgtacggaaaaggcattcaacatcaagttggagaatcggtttctgacccttgattcagagatcccagcttga

SEQ ID NO: 182812 - DNA, 446 bp, Arabidopsis thaliana landsberg
atgaagaagctgcggcaagaggtttctcagctgaaaatatctttggaggaatcaaggtaagcttttttctcatactcaatagatagctacgcttcgattttggtaaatgcaatcttgttattgttttgacaggttagaagaagtggggttgaggaaagttacagaggaacaagctcagaaattagcagagaacacggtgtatatcaacaagctgcaaaatcaagagaagtttcttgctcaaaacgtaatgtatttttggatcaatagcttctgtcttccactatatgtttctcaattttgtcacaaatctcttactcgagagaggcttttatactgaaccaaaggtcgaagagctagtgaaagcaataagagaagcagacccagccgtaagtagatggagagaagcttgtgagctagaagttgaagcagggcagcgcgaagtccaa

SEQ ID NO: 182813 - DNA, 471 bp, Arabidopsis thaliana landsberg
  unsure (1)..(471): unsure at all n locations
atggcggccgcgccggaatccatcgccgggccgtctccggaccgcgtcgccttctccgcggcgctgcggcgggtaccgccacagaagcgccgggcgctggtcctgttccacgtgtgcgacctgacggtcgaccagatatcggccgagaccggggcgcggcccggcacggtcaaggcgcggctgtctcgcggccgcgcgggctgtgcaccccacctgagcgagaccgccggcggttattccggggccggccagccctaacccggagatacgtgatgaatgacctcaccaccgaactgcgggacatggccggcgagggccagcgagtcatgccgtcggccgtcgccgagatcttcgagaacggggaccgcaggcgccggcgcacgctggccacgcgttcagcggcgggcctgacggcggccgccgccgtcgcggccgtggccgtcggcgtgtccgcggcacagcccnccgcga

SEQ ID NO: 182814 - DNA, 1652 bp, Arabidopsis thaliana landsberg
acctcccctgttgaatcagagcttcgtcagcaaagtgcacgtacttgtggaagtgtttcaaatatgttgtcctctgagctagaagtggtcgactggaatgaaatattttttttcagaatcgactccctggtattctctctcttccatgatatctaacatcatttttttgacctacaactaagttgtatcccctgaatactgctggattattttatttttccaaatggctatgttcttcttctctgtggattttcatgtccatcgccattttaattgtatttctactattaatctcatagattgattaatcacacagcttcatatatccaagcaaatcagaaacaggtttaaatgctgcagtgcttatagcttggaaaatcttagttagtacatgtaccttcgtacaattttagaataaaatgtattatgaataatattttctggttattctttgttgtcttcaagatcaaggttgctgcagtggctcttttgatattttattgttctttcattttcccaggatgactttgtcttggaattaatagtgacagacgtcggaaaaggtttgtgtccttagttcttatagcttatatattacgtggtaatgtatccgagttaaagggtttctttcatttgtggtatattaatcgatgttgttttcacgatttaggtgcccctgttgggagtttttcagctcctctaaaacagatagcacaatatatgaaggacaacgtataccagcacaattatgctaatgaccttgtctggttagacttatctacaactgaaaccatggtaaaaatcgtgaacttaacatgccccccttcctgtcaggatgtagccattgttgtgtagaaaatgatatcaataatgtattatcaatacatgcatgttaagggattttcgactttctgggttcacagattgcgataaaatgaaatgattggcttcctgttttcctgcagagcatgaaccaaggggatcaaagaaagaactgcggaaaaataagatgtgctgtactgttgccagctaagtcgaaagtggaccaaagcaaatccttcagagaaaaaaaatctggatttcttcaagtaagtcctagcattgagggtccttggacgacagttaggctgaattatgctgctcctgctgcttgctggaggttgggaaatgatgtggttgcaagtgaagttagtatgcaggatggaaacagatacgtaaatgtcaggtctctagtttcggtggagaacaatactgactttctacttgacctctgcctgcagtctaaagtaaattcaattccagatattccaattgggttactgaaacctggtgatacgttaccggttcccttatcaggattgacacagtcggcatcttatgttctgaaactgaagtgtgtatttcctgatgggtcggatgagtattcttggagttctgtggtttcgaggcctgggggagcagaggtttcttgtgaatcagagcctgaaatatgtatatcggctctaactgaatccgagcacttgctattttgtactcagataaacagtacttcttccggagataatcaaaagttgtggttctgtttgaagacccaagcaacagaaattgcaaaggatatacgttcggaccctattcaagactggacccttgtg

SEQ ID NO: 182815 - DNA, 186 bp, Arabidopsis thaliana landsberg
atcaaatcaacgaaaaactacgaagatgaaatgaaaatcttatccaaagaacgagatctacgtacagatgaagggaacgatgcagaggaagagaagaatcccaggagatccggtcaagagatcgttaacaggaggattaagaacaacgacggcggagataagcgtcgtaagaagaagctgagctga

SEQ ID NO: 182816 - DNA, 78 bp, Arabidopsis thaliana landsberg
gcccagcacgactacaatgaaatggccgacctaagaaagcaatgcgtcgcgcctagatcgtccatagattatgcctaa

SEQ ID NO: 182817 - DNA, 246 bp, Arabidopsis thaliana landsberg
atggaccgtgagtttgctagcaatcttgttctcggtaatggaaaacattacaaggttagatattaagtccaagaatatggatcatatctctatctcaaatcttgaaaatgaattcttgaaattgagcttgaatctttttcattcgtagggacaaagcttgtcatccacggcattgccacatgctaagttctatccaattatggcatctgtaaatgcaaaagctaagaacgcttcagctttggatgc

SEQ ID NO: 182818 - DNA, 303 bp, Arabidopsis thaliana landsberg
atggagggaaatcaagctggatcttctctagattcgttgattgcttctttcaataaacgaatcggcgaattgcaggaactcgtcatcgccagaaacagtgagtcctagttctaaacactcaatactcaatttgttattcaatatcttcatttgatgacctaatttcaatttcctgcagtgtatcctgcaggtaccatcccggatttatcggcgattgacacagcgttgagctcaatggagcttcaggtacaatcgatcaaggaccgattacgtgaagaaaccgaagctattccaaaagctaag

SEQ ID NO: 182819 - DNA, 223 bp, Arabidopsis thaliana landsberg
aaagatcagagtagcgggaagagctagaagaagaaatggttgttctgctgagttcggtgatgaacctggtggcaccgcctgcgacgatgttggtgatgaccttcgcaagatcgttcctatgtttcataagcgcatgggaacggctctacaactcctttttggctacccaaaatatagaggacaaagtcttagtacactacagaaaaacagcgatttccagtga

SEQ ID NO: 182820 - DNA, 290 bp, Arabidopsis thaliana landsberg
tattactcgggaaatctcaacaggaagttttacaagttcaagtgggaattgttcttgacactaatgcgacattagcagctttgagcttacgagctatcaacatgtctctctctgaattctataacactcataatggcttcaagacgaggattgtcctcaacatccgagattccaaacgaactgttgttggtgctgcactgaattctataacactcataatggcttcaagacgaggattgtcctcaacatccgagattccaaacgaactgttgttggtgctgcagcttcag

SEQ ID NO: 182821 - DNA, 1147 bp, Arabidopsis thaliana landsberg
atgccattgtctcattggggtgactgtgttcttactgcagtgtttctgatcaatcgaactccttctcaggtactctctaataagactccatatgaagttctcacggctaaacctctagattacactcgcattcgaacttttggctgtttgtgctatgcttcaacctcacatcagcaacgtcataagtttcagcctaggtcaagagcttgtgtttttctgggatatccttcaggttacaaggggtacaatgtcatggatttcgagactaacaaagtctatatctctagacatgttgagtttcatgaggattcctttcctatggcagatttgaataaagaagctacagtgaacgatgcagataatgatcttcaacagatgaattctttgccctcaggtaattcgatcattcctcatcttccatcacctcaaatttctccatcaacacaaatttcttctcatagagcacgaaaaccacctgctcatttaaatgattatcattgttactctcttgacaatgatgtcacccaacatcccatttcctcttctctttcatattccaaactctctccatcacatttgctatacattaatagcattactcaaattccaatccctcaatcttactctgaggcaaagaatttgaaagaatggtgtggggctattgataaggagattggagcaatggaaagtacagatacttggaagattactgtgttgccaccaaggaagaaagttgtgggttgtaaatggatattcactgtgaagttttatgcagatggaactcttgagaggtacaaagccagaattgttgctaagggttttactcagaaggaaggcttggattataatgaaacattttcacctgttgctaaaatggttactgtgaaaatgcttcttaagatctcagcttctaagaaatggttcttgaatcagttggatatctcaaactcttttctcaatggagacttggatgaagatatctatatgagagttcctgaaggctatgctgagagtaaggggatcattttaccaaagaatgctgtttgcagattaaagaaatctatctatggtctgaaacaagcttcacgacaatggttcctcaagttttcagcttcacttcgtcagcttggcttcattaagtgtcatg

SEQ ID NO: 182822 - DNA, 155 bp, Arabidopsis thaliana landsberg
atgaatcgagcatgctcaattataagatataacatcacaagcttcgactatcctaacagtaagtaagatataatatgaggtaaacaccaagtgtcttgatcgtttttcttcattgtgcaggcttattagttattactccagaacctgagatataa

SEQ ID NO: 182823 - DNA, 25 bp, Arabidopsis thaliana landsberg
atgacctttcctgatgtcatcattg

SEQ ID NO: 182824 - DNA, 348 bp, Arabidopsis thaliana landsberg
atgctcagtgcgcgcgtgcgcccgggcggccggctgatcctctcgggcgtgctggaacggcaggcggacgaagtggccgccgcctacgcgccctggctggccatgtcggtctggcgcagcgaggaaggctgggtctgcctgcatggcacccgcgccgacgccgccagctcccccgccaccccttcctgattcgacaccatggctgccgccaagcttgtcacgcgttgtccggcctgccgcaccgcgttccggcttgtggcggaccagttgcgtctgcgccagggcctggtccgctgcggacagtgcgataccgtcttcgacgcacgcgaacacctgattgaagtgccg

SEQ ID NO: 182825 - DNA, 394 bp, Arabidopsis thaliana landsberg
ttcattgaagacgaggaacagctggtgcggatttatggatccgctgtcgagatcgtcgtcaccgtatttgctgtcgttgaaatgaaagccgccgagttttccgaaacgatgaaggcgggcgacgatttgctcgatattcgtgtttggcgcgtggtggccgagatcgacgaggcattgcgccttgtcgcccagttcctgtgctgcgaggatcgagctgccccagtcggcgatcaccgacgagtagaaagccggctcgaacatcttgtgctcgagcagcatccgccaatcgtccggaagcgctgcgtagatctgggcggcggcttcgaggtagcgatcgaacgagcggccgagatcttgctggcccggaaagttggttccgtcccccacccagacg

SEQ ID NO: 182826 - DNA, 951 bp, Arabidopsis thaliana landsberg
atggaagttgattatacccaggttgtgtacaatgcaaacgatttggcagcattagtagagcagaagaagagcacacagaactggcttgactattaccaattgaagtatacaaggaaccaggaacataagccgaggataaaggtaactgagtggtcttagacacaaacttaaagaagcttgtcttgtatctaatctgtttcatgttgtgttctttgggaaactagacgggttttctcgggctatggggaaagaaagttgacgcaatcgatcattatatagctgaaatcgagaaattaaacgagcaagtaagtatcatttcttcctacaacggtttctcagttggaaataatcaaacttgacttatcttttcggtttcttgattagataatggaggagaggaaaaaagtgaagaaagatgatacaagtgtaatgccagccgcttttgtctcgtttaaaacacggtggggtgctgcggtttgtgcacagactcaacagtcgagtgatccgactgaatggttaactgaatgggctcccgaggcacgagaagtgttttggtcgaaccttgcaataccttatgtctctttaacagtaagaagacttataatgcacattgcattcttcttcctcactttcttcttcatgattccaatagcctttgttcaatcccttgcaagcatcgaaggcattgagaaaaatgctcctttcctgaaatccatcatcgagaagtaatgtttctgtctcttactctctccattgtattgcctacttatatgaattagatgttgaatttgctatgttttgcagcgatcttttcaaatcggttatccaaggttttcttccgggtatcgtgttaaagctctttctaatatttctgccaagcattttgatggtaatgtcgaagttcgaagggtttgtatcgttatcatcgttagagagaagagcggcttttag

SEQ ID NO: 182827 - DNA, 167 bp, Arabidopsis thaliana landsberg
acgccgacgaatgcagagccatgattgtttccgaagagattgagaatctaactaacttcctcaaaaagagtgattgtgattcttattcttcttctagttcgtcttcttcgattgaagctgaaacggaatgtttttggaaatgggatgttacagaattcgaagttgtg

SEQ ID NO: 182828 - DNA, 465 bp, Arabidopsis thaliana landsberg
tttgcaacagccgactatgactatgacaacgttgctggagtaacaggaaacattaacctctgggatccacaagtgtcacatgatcaagttagtcttgcaaccatggcgattgcaggcggtcctaaaatagaacagctcgccagcatttcagttggatggatggtgaatccgttgttataccaagatcacattcacttatacacttactggactgtaagttttgagtaaccacttgaaagtttacgcttattttttttttttctaacttggcatggttttagtgagatatatatggtaattaaatattgatttaaacaggcagatggatataataagacaggctgctacgacataagatgtcctggattcgtgcaagtcagcaagaggataccacttggtgtccttcttcaaccaatttctgtttataatggcacacaaaaagaaatggacttaagcttgcatcag

SEQ ID NO: 182829 - DNA, 862 bp, Arabidopsis thaliana landsberg
atgcattactctttgtaatatgcaggataattatgtccggagctgggttttatgtgagaataccatctctgaagtgccaattcctgcaaacactcctggtctcagtagcacgactgatgtacgtcactatgtcatgtttttaatcttgtctctttgtttatcccttcctctagtttatctttacaaacaatgaaaattttctacagcttcctgatgattttctatcatgccttggtatggcattgtcacctggaaaccttgctgttgctttggtctgatcttccccgaaacctggtttgctgtgactttaaactatctcttttcagaattagaaaacttagacttctcattgaaattttgcaggtccgcaacttcaacgttgaactcttgaatccaatgtaccaagccaggtaatattcattcattcattgagaactgtttctgcgtcctgctccttgcaaaagctgactgttcattccttcttgcttccaggtcgcagaaggctgctgtagaattcctctggaatggtgcacaacaatctggtgagtcagaagattcttcagagacggtaaccgaagctattctgggtttctcaaagaatgaattcgcaaattgggaatctaatattctctggtcgttgaaagaattcaactatttgaataagcctctagttctttgggatatggtagctgcaatgctggcgttcaaacaatcaatgccagagtttgttgaattagtattaactaaatggctctctgtgtcataccttggatttcatgatgatatctccatggaagatctcgtgccaaagatcaccaaacgcttctctgctgttccttccaggctgttacacattctcaac

SEQ ID NO: 182830 - DNA, 444 bp, Arabidopsis thaliana landsberg
atggctagcagtcagaacacgagcgatacatcttcaaggcagtatgaaacaacggagccttctcttgatgaaaacattgatgcattgcttgaggtaaagagccatttgacccttctatacttctaaattatgctatgagcgtgagggaattttatgaatatcgctcacgaataaccttagaaaacctgtaatatggtaattattttgtttaaactctggcaggaagaagagaccttaattacagcacacagaaaagagatcgaggatacaatggaaatagttcacgaggttatggctcatatgtcttgtgattgttttaacattatttcatgtttttttttgtaggaaatgaaattactagcgaaggtggatcggccagggagcatgattgacaactatgttacacagctgagctttgtgttgtcccgtaaagcagctggtctt

SEQ ID NO: 182831 - DNA, 584 bp, Arabidopsis thaliana landsberg
ttctgttaccatttctcataatctttgcttcggccacaacttacattgacgccatatgtcaaagtgttaccgacaaagccttctgcaccaaaaccttgaatgcttaccctccggcgacttctgccaccagcacggtactaatatatatacaccaaaagtaatagatagaaatacatcacttgttactttccaaatgttttggttgctcgatcaattatttattttttttcttaaaaagtttgttctacgttttttccttaaattatcaatttaacttttgaagttatggtttaaattttaaatatatatacatggttttcttataaagtgtaatgaaaatcctacaggtttagaattgaaatgtggttataaaataaaatcataatttcgtaattgcaggtatatatgttcatgtctcaaactaaatcattgatacataatttattattattttaatctatagttcgaagcggctgtggccacgcttcacctaggagtgtcttatgccaataacgctgcgggtttcgccggagaagcggcaaaggaaaatccgcagttgaaggagaagtttgatgcatgtcaac

SEQ ID NO: 182832 - DNA, 177 bp, Arabidopsis thaliana landsberg
atggttacggtcgtggtcgaggaagaggacgaggtcgaggacgtagtcgcggatgtggtagcgggagattcaacggacaagaacgagatgctcaaggaaaccaagatagaagtttccaatcagggggagctcgaggagctcaaaacaatcaaggtggccagaaccgatggcaacaaa

SEQ ID NO: 182833 - DNA, 132 bp, Arabidopsis thaliana landsberg
atgaagacgcagcatcgatctggcattctggctctggcctcaaccgcgaccctcggcatcgccacctctttcgccttgacatcggtggtcgcccagtgggatttcgactctctaacaaccaaaagcgtcaac

SEQ ID NO: 182834 - DNA, 390 bp, Arabidopsis thaliana landsberg
atgacgaatttcaagaactttcaaaaacaaaatgtaaacaaacaacagaagagtcgagaaagtgacaaattcgagaaaaaaaaagatgtcgagagagcaaatatgtcgcagaggtttgagcggtcaggtcagtccactaatgttagaggagaatagctaattatttgggctcaagtccaacaaatttttttaaatgatatgaactttaaagaatatttcaaattaccaaaagtattttactttcttttggcgattatttaacttcttttggtagttgacacaatcattatattatatgcacacaaattttggaacgaaaatttaaatgtgtttttgttgaactttctagaccacacgattctatattttcgaaatctggatcatgtctag

SEQ ID NO: 182835 - DNA, 135 bp, Arabidopsis thaliana landsberg
atgattagcaccaaatactcaaatcttcgtataaaaacgaaaccagcacaaagaagaccgattcaaagatcgaagaaggtaaagttaccggcagagaacaacaactgtgtacggcgccgacgagaagcagagacg

SEQ ID NO: 182836 - DNA, 292 bp, Arabidopsis thaliana landsberg
catttgagagtgacaacattggtcggagaaaaaagcttagtgacttaccaattcgtttagcgattaccaaattgctatcagtgacgtatagctagcttctttacacccttataaccactattactggtttgcaggtacttgaatgacaactccgaatacattggagaaggggtgaaactttcacagttctcgtttcaaatcccgaaaccgctgcaggatgactacgtgaggaagcgcccagctcgactactggattccatcgataatacaaacacccctgcagctaaagaag

SEQ ID NO: 182837 - DNA, 1304 bp, Arabidopsis thaliana landsberg
atgtactgtactttgcgatttcctttgcctcttcacattccccaaactcgaacaatgacgtcctgtcagccgaaacgacgccgtgttgagcacttgcggtgctctgctcagcctagtagtattcgtgaagatgacgaagatgccgatgataggaggtgaccatcgattctctttatttaacttgttcctgtttgattctaattgaattattgtttttctgcaaatgtgatgttgatagagttggagttgaaagacgaatttcgattgtggtggagagatacggaaatggcacttcaaaaaggtggtcaacttaggtttctgttcttatcttattacccgaagaatcatctgtataaacacactacctcttgttccttcttgtgcagatattttctagatgatgatgattcccctttacaaggcattctcgaggagcgtgaaactaagcctgataacaattctcagagctctaattcctccgaaacgaacattctttggcttccagatgttgtcaaggattttgttttcccctcaggctttcctggtacttgtacttgtcagcttcaaattccatatgtatctttctgtcatcttcctttgtcaggactctcagaatgttaagcttgcagaggttttgtagatccaattatgattcagtgagttaatctcgtaaaatcacattgtgcagggtctgtttcagatgattacttggactatatgctgtggcagttcccaaccaatattactggctggatttgtaatgtattagtcacgtcaagtcttctcaaggcatgttcgggaatcccctaaattattgctaaggtcttcttatgactggacttcttctagagacaaatgttgagaatgctctgcaattttttttcaaaattcttgtgctacaatgcaggcggttggggttggctctttctcaggaacttctgctgccgctactgctgctgcttctgctgcagccatcaggtttactttcattctaatgcaaactttgtttgtttgctgctgcatattttttttgttcttatagtttttccaaaccatgtgttgtctcttcagatgggtgtccaaggatggaattggagctcttggccgtcttcttattggtagggaaaccatcggaacgttaataaatgttcatggagttatctaatatcctctacaataagaagggtatgttttccaggtggacgttttggtagtctttttgatgatgatcctaagcaatggcgcatgtatgcagattttattggcagtgctggaaggtttgtagtacaggatttaaattcttg

SEQ ID NO: 182838 - DNA, 266 bp, Arabidopsis thaliana landsberg
accaagcggtatggatatatctaagcatgatgtctcagaaggaagtcacgtttttaaagctcgtcctctgaacaagaaggtactatccattctcgagtctcatttgcttgcattatagtattgcacacctaatataggtttccgctcctgctaaacagatactttcaagcagaggagacatgggcattttcaaaaatagcaagcgagaaacaacagtacctttggtatggcagccttaccaattattctttgcacttgatcttctg

SEQ ID NO: 182839 - DNA, 1442 bp, Arabidopsis thaliana landsberg
tctactcgggacagcctacttcctcatccgatgacatagaagctgtcaccattgtcgggagttttcaggacactgctaatcacattaatcaaaaagaaatacagtggggagtacgtatttcccctaaagtttcttttctcttctatttttccagagttataacatgttgatgcctcatcccagggatgataacatatttgcgtagttaatagctacatatgcatttttcttttacagttgcttgaagattcactagaagatcgccttgagaagacaggaggtctgctgtctgattctgagaagggacaaggagaaagtaaagacggggatgcagatgatagtaaggtgatacatagcttcaacttagtcaataatttctgaactgaaatcccgtttttactcgtcaattgattctgtgtacagaaaagatccactgaaattggaaagcaaggctcttccttaaaaaagttgaagaaggacaaagcgggtaatgcaacagcaaaagttgcacgtctggagaccattacggtgtcaccggcgccgcgtgtaaaaccagaacttgccttgccagtaatgtactttcgaatcccttacccattttttgtgttgggatttgattaaaaaggaatgaacatgtgatatctatgggtgatgcatgattgtttaggagaaatgaacatagtctttgtatttgtcaaagactcaacctcctttaacataaatcaattttgctccatctccttgttttctctgtcaggtccacagatgtagagcaatccatccttgaagaccttagaaaccgtgtgcagttgagtagtgttgcaatgccatcagtcagcttttatacatttgtgaatactcataacgggtaatgtccacctctcctcctaattttaactacttatttgcaaccttgttactcactcttttattctcccccaggttaaactgttcatctatatctcatgatggatctctggttgctggtgggttctcagattcttcaataaaggtatgttattctcggatggttggatacatttccctttttttgttttcttcctctcttaaatgatgccaagtgacaattatggtgttcaggtctgggacatggctaagataggacaagctggcagtggtatgttaattctctgaaaaattgtattgacatccacgtttaagaatgatatttatctcatacgtttcgcttgtaatttttgttgatttctcataatgattgtttttgtttccatgagagttatagacactaagctgtctggttccaggtgctttgcaggctgaaaatgattcaagtgatcaaagcataagaccaaatggcagaagaagttatacattattactgggtcattcagggccagtttactcggccactttcagtccccctggagattttgttctatcttcttcagcagatacaacaa

SEQ ID NO: 182840 - DNA, 548 bp, Arabidopsis thaliana landsberg
tgcaaagcccaatacaaactttgtgtggaattcttaatctccatggtcgaggacttcatgtgagagaggatccacctgttctgttacggttttccacccatctcttgcataaccgggttctagcttcctctccatatcgctacgtaatgtctgagctcatctctcaatatgcgaaaaacctagcaatcatcctcaagcatctaagcaatattacccttgctcgaacccgtgtccaagcactttctcgtgtagttctcttcgggccagtgagattcacgactttgaccacttttacaacgccacttggtctcttgacaatggctatatgttcatccattgactcgtctttggaagaattgtcgataatctttgatctcacatgtaccaaaatgctttatagcttttggctcaaagctctcaaagaactcttgtcgattaaatctatcgatccttttatctatctttttatctaccttatgttggctttgtggaatgctccttatggttgtattgttaactttgggatctctgattccctcctcctttga

SEQ ID NO: 182841 - DNA, 99 bp, Arabidopsis thaliana landsberg
atgattctcatcggaagatacaagctttctatctccttccgagtgaaaagcctcggctttaagcttagagatctctgtatcggacagagaacggtgaag

SEQ ID NO: 182842 - DNA, 339 bp, Arabidopsis thaliana landsberg
cttccagagccaggaatcgagctctacctcgccggagacaccggatcaacgtcgccggacttcacccggccgcctgcgtacgtagaccgagccccacggtgagtatttcttcgattccttgcacgggtagattctttagcaccccgtgaagctccctgtgcccttggattgaaccctaccgccgtgagcaggccaaagcacacgctgccgacgagcccgaccgcctacgcacgtggcccgaccgattccggccatcaccgacgacgagccgtacctcgacgtgaccgcaaggacttcctggagctaaccccgtccttcgctggacctccctcgccgccg

SEQ ID NO: 182843 - DNA, 239 bp, Arabidopsis thaliana landsberg
gggctagtgatgtgggtaaccatcaaattagctcaaaatcaaagttaccaaaagatacaacaccggatcgagaagacattattgataagaaactgttggagttggagatccggtttaactggtttggtttacaaacttggctacaaagttgcgtgaagagaacgttggcgttaaatcaggaatgtatatcaaagttactccataaaatctgtattgttaatattgtttctatattttcg

SEQ ID NO: 182844 - DNA, 180 bp, Arabidopsis thaliana landsberg
agtgatagcaaaatccgtccaagaaggtggcagcttaacaataataccgtcaactatgaacttgttaggcaagacacatgggaactgttcgagttccttagccagtgcctgtatttcatgagcctgttcaactacagaacggttctcaaccatcttgtagtcaacacagcggctccatga

SEQ ID NO: 182845 - DNA, 489 bp, Arabidopsis thaliana landsberg
atggaataccagatcgattccatgaactccatctggtttacctcctcggtcagttacaccaccaacaacgggtccacgacgagcgattacgccgcccaggacgcgggacattcgccggtcaacgacgggcacaacctgtacacgacctcgaacacttccccgaacctgagcgggaacctgttgtatcgccggcgtttcgccaaggaaggacggaccttctcgctgaacctgaacggcggttactccaccaatgacgggagcggcgtgaacaactcctacaccaattattacgacgggggcgtgctgagctcaaccgacacggtggaccagcggttcacccaggacgccaccacgaaaagctggggcgtgcgggcgacctacaccgaaccgctcttcgtcgggtacgtgctggaggtgcatctggcccactcgaacaacctgaatctttccgacaggtatacctacaaccaggacccttacaacggaaag

SEQ ID NO: 182846 - DNA, 393 bp, Arabidopsis thaliana landsberg
actggagacgaaggtgctggttcaggagactatgtgtttgaggatttacaacagcttgtttcctatacgttggtagaaatgataagtcttattaaggaggtcaggccgtccctatcaacagttgaagctatgtggaggcttttgatgtgcgacttgaatgtcttgcaagcctttgaagctgaaggcgatggattggtgagttcaagtaaattatctgattcggaatctcttggtgctgaatctaatcctccaaaatctagtgacccagataacccaaagcctccccaatccgatcctcaaagcaatcggaatgagccactcaaatttggaaacttcccaaatacaccgaactccaaaaaaactcagtctagtggaacaacaccaggaaaagaa

SEQ ID NO: 182847 - DNA, 923 bp, Arabidopsis thaliana landsberg
atgaatgatgagaacaaaactccatcaaatgatcccgagaagagcagcagcgaaacaaactcttcgaaagatctaacctcggacaaaaatcccgaggcaagttcttcaaacacgaaagaaaccgacaatagtgctgtgaaaccccagtctcatgaggaagctgtggcatctgtagaagcgaacaacctctcagaaaaagttacacaatgtacaatcgacggtatgcttcaaagtattttcagtgtagtcttttcttcttgtgattgttcttccatttgcttctatgtgagtgtaaagtctctaccccgtttcgtgtgtgtgcagctgaaagtccacaagatgctgaaaagaaaagcaaatctgcagatggaagtggaaagaagaaatctttccctgaaccaatagtcatatctattgttttaaagatgtctgaatttgatcataaggtgaatcaaattttgtttctttctatataactcgaaaagtagtcatttatcagttctttattttctttaatatcattttctcaggctttgctagaggagtggatctcttcccgtacatctggagagaaatataccactaaggtactattatacaacttaaagcttaaagagatctaaactgaacttgaaagttgtatgaacacatgtttggctttcctttttctgcaggagaaagatagactaattacaaacctaaagaccattgaagactacctttgttcctttaattcacaggtttgtttggttcttcatcaatcaaaatttctgttcaggtttttttaggttcttacatttcgtattcgtgaatcagggggtgactgttgtaaatatatcggccaccacattcccgcagacactagattggcttcacaactatcttcttcaggtaaaaagaagtcagcaaattcaaagctttga

SEQ ID NO: 182848 - DNA, 422 bp, Arabidopsis thaliana landsberg
atgcgaattaccggcgtgatgcgcctgttgcctgacgcgttattcaatcagtttgaaggctccgtccagacgtcggacggagtcgcgatccgcataccattgaaccggattcggcatttttttcgcccaccattggaatctcgaatcttgacgggcattggcggcgaaatatggatcgacccaacagacttgcgtgtggttcgaattgaaggacacctattccggcaggttgataacggctggggaattctgggcacgctctatcccggagggaccatccgcatcgagcaggccaaaacggcagagtgcggctggcagctatctcatctcactctgaacatgacaggaaaagaattgatgttcaagccgttgcgtgtgctcccgcacccatccgcgaccgactaccatccaaatccgaaaag

SEQ ID NO: 182849 - DNA, 445 bp, Arabidopsis thaliana landsberg
ctacaagcaaaccatcaacagttacgacaattctatcgtctacaccgaccatgttctggccagcatcatccatgctctgaaacgatcaggtacggtggcagccctttggtacgaatccgatcatggggaaaccttgccgacggccacctgccacaagcacggtcatgccatgggcaatcgttacgaattccccattcccgccttgttctggtactccgatgcctatgcgaaggcattccctgacaaggccgccacgatccgagccaacgccagccggcgcgcgaccgacaacaacaccttttcgtcgctggtcgacatggccaatgtggactttccaggccacgaccgctcacgcagcctgttcagcagggactggcggtatccaacccgcctgatccatcccgtctggcaaaacaacggtgataacgtcgactacgacgacgcg

SEQ ID NO: 182850 - DNA, 102 bp, Arabidopsis thaliana landsberg
ttggtggaagatgacctcaacttttggagattctcaagagagtatcgtgtgatgattcgcaacaaatatcatccggtggtggcgtttcaggttgagcgttaa

SEQ ID NO: 182851 - DNA, 66 bp, Arabidopsis thaliana landsberg
atggagactaataagtgtgaaattgagctgtacaataaatggataggatatacaacgcctagttcg

SEQ ID NO: 182852 - DNA, 1304 bp, Arabidopsis thaliana landsberg
atgtttcttcccgctggaggcaagatcataatacaaacgctttcaaacgtcggtttcgtcatccatctcttcctcctcggactcaaaatcgatgggagtattatcagaaaagctggttctaaagccattcttatcggtacagcctcttacgccttcccgttctctcttgggaacctcacgattatgttcattagtaaaactatgggacttcccagcgacgtgattagctgtacaagcagcgcaatctccttgagctctatgacttcattcccggttacaaccacggtcttagcggaacttaacatccttaactccgagctaggtcgtttagccacccactgctcaatggtctgcgaagtttgtagctggtttgtcgctctcgcttttaatctctacacacgtgaccggacgatgactagtctttacgcgctttccatgatcataggtcttcttctggtgatttatttcgtctttagacctataatagtatggctcacccagaggaaaagcaaaacgatggataagaaagatgttgtcccgttctttcccgtactcttgcttttatctatagctagccttagtggagaggccatgggggtccatgctgcgtttggagcgttttggttaggtgtttcgctccctgatggtccacctttaggcacggaacttgctgcgaaactcgagatgtttgcttcgaatttgttcctcccttgtttcatcgccattagtgggttgcaaactaatttctttgagatcacagagagccatgagcatcatgtggtaatgattgagatcattctcttgatcacttatggatgcaagttccttggaacagcggctgcgtctgcttactgccaaacgcagattggagacgcgctttgtttggccttcttgatgtgttgccaaggtatcattgaagtctacactactatcgtgtggaaagacgctcaggtaaaaataaatagaggttgcttaatttgtttttttttagttaggttttggttcacaattagcaaatattatagaaagatttttccttcctattcacgtaaatttttctcttaacttaaggtaaaaaaaaaattgaatttggtttacaggttgttgatacagaatgctttaatctggtgatcatcacgattttgttcgtaactggtatttcgcggttcctcgtggtgtacctctacgacccttcaaaacgttacaaaagcaaaagcaaacgaacaatcctcaacacgagacaacataatcttcagctacgtcttctccttggtctctacaatgttgaaaacgttccttccatg

SEQ ID NO: 182853 - DNA, 722 bp, Arabidopsis thaliana landsberg
gggaatttgggtcgtttgaagaggaatgtacaagattttacgagcatgaattattgggttgtccgggactactaccgtctggtggaatctgtcaattcccttgaaccacagattcaaagcctttccgatgaacaggttaaacttagtgttcactgcttgagacgttttatttattgatatgtttctttaatgtattttgactttggtttgtttttgtccatagctgaaagctaaaactgctgaatttcgagaaagattagcacgaggggagtccccagcagatatgcaagctggtttgatcaatatcttactttgaatttagttaccctttattttaacaatgtacgttgttttgatagtctatgcgcttactctctcacttttgtgcgtgtgtgtgtgtgtgtgtgtgtgtttcccctgtctagaggcatttgctgttgtccgtgaagctgcaaagagaacaattggaatgcgtcattttgacgtgcaggtctgtctatatctttaccctcaagttttagtccatgctatttcttgggtgcatttctataatcttgaagagaggttgttaagtatacttatgtttcatttgttccatcagataattggtggaggagtgcttcatgatggatccattgcggagatgaagacaggtgaagggaaaacactagtttctaccttagctgcatatcttaatgcattaactggtgagggcgttcatg

SEQ ID NO: 182854 - DNA, 1646 bp, Arabidopsis thaliana landsberg
atttttcaccggtgctccgatcccgtgtttccggaatttcaatggcgagtccaagagtcgtatctgaagatagaaagtctgttgacatcgaaatcgtctccgtcggagctctctataccggctcatgggataagaagtactggagttcatctagggttggttttctctgctctctatcctccattcgtcagtcgatagctcaattcaactctttctgtgttacttttctaattccttagaaattgagaagaaatatagaatcagattgacttcgattactgtaatttgaattattttggatggggctgatatgcctaacgatgcaatgaatcgcgattaattttgtgtagattggtacatttgcaactatcaggatcgatgatcagtagattctctgtttctgaatatttttgatttaaatatatacgttcagtgatactgcatagggtagagagtagagactagatccttaagctgagggtgtagattgggtttgactgttctcgttacttcaacagtgaacaacactagatctattgaaacaacttatgcatatggtgtctcagaatttctatttactttagcttctttttgttcatcagggaaaagatcgtttcccttatcctgtaggctacaaagctgttcgagctcacagtgggaacacatattacatggagattgaagaaggtgccaaaggacctttatttctggtgcgttgctttttccatataaattatagaagattgtgcatactttctttagaatgcaacaaagtcttactctattgttgcagattagatatttggatgaatcatggacgggacagaccccggatattgcatggggaaagctccagaagacggacttctctcacttaaaaatatggcatggaaaacggtttacatgtaagatgggcggcatggaggtacgcatctcagtttctttttgttaccttcttgagaccatcttgcatgctacttttataaccaattcaaagtcaaacattcgtcattgcctttccaagaatgttcttgcatcctattgtgatgatttggtgaattttttgaaaagacacttgctggcaacatgatcactatctgtgtacttgagagtttcataggcacaattatttaatctgcattttgttgaagtcatggaacaatatagtataagtagtaaacggaccaagaagatatagttaagatgtgcggatctataacctgtgatcatacctctgttcttcctgataagaaggcctcttactgtcttctactgcatttctgacttctcaattctaagttgattcataggcaaaaccatagtacttgggatatacccgccagacaagttgagcatactactttaactaagatttttttcaaatgttttgctttccttcggtgttggtcactagaactatcagttggtttgtaatttattctaatcctaccactgtgatggggttaattaattacttcggtttaaaatgactatgatttttttgttttgttacagttttttggcttcaaaaacccgttggttcagaggttgctccgggaacttgtgaccaattcccatggaatggtagaatctagccccagcagtagggcctctcatatccgggtcaacgatgaaaggccagtcat

SEQ ID NO: 182855 - DNA, 318 bp, Arabidopsis thaliana landsberg
atgcagcaccacggagaagacgctggccggcaccggctggatcgacgacctctgagcacggaggccaggcagtaagtagaacgcccgcgtgctcgcttccaagctagaagttgagcacgcgggcgttgtatgccaccatcattgcgattcgtcgctgacggtgatggggctgctcaagcgtgtgagaatcggtctcgcttcctccagcttcggcgcgaacaggctcaactgcccaggatccgccaccaaagcctcgaaatgctccgggctaaacagaagcgcgaggcgtgacgcgaaggtgttgcgcaacagccggag

SEQ ID NO: 182856 - DNA, 147 bp, Arabidopsis thaliana landsberg
gtgcccaaacgggcggcccggcccggcccggacccggacccgttagacctgatgaataatcgggtcatgcccggctggcccgcgtgtcgcagtcgcggcacagccacgacacgccgatctggtagtcgtgtcgggctggctcgttaa

SEQ ID NO: 182857 - DNA, 119 bp, Arabidopsis thaliana landsberg
ggctgtttgacgaaatcatcaagcatgcggaaacagcaatcatccataattcacccttgttcttcttgtcacatggatatgaatcaagtagcttggtcacaaaagaaccttgtggataa

SEQ ID NO: 182858 - DNA, 351 bp, Arabidopsis thaliana landsberg
agcctgcatcccgaccagcatgcgctgtggatcgacccggacgattcgaaccatctcgtgtcgggcaacgacggcggcgtcttcttctctcacagcgccgggaagacgtggaagtttgtcgacaatcttcccacggcgcagttctaccacgtgtcgctcgacatgcgcgacccctatcacgtctgcggcggattgcaggacaacggatcgtggtgcacgccgagcgcgacgaaggacatcaagggcatctcgcgcggcgacgcgtatctcgtgggcggcgccgacccctatttcgtgcagatccaccccaccaaaacgaacatcgtgtacgctgagcagggcggcgcgaac

SEQ ID NO: 182859 - DNA, 186 bp, Arabidopsis thaliana landsberg
ggcaaaatctgcgcgagtcatgagttttgccaaatcgctgaatgtggtccgagcctgccagccaagtttctctctggctttagacggatcaccgagaagaagatccacttcagtaggacggaagagtcgtggattgatacggatgatgctcttaccggtggcagtatctataccgacctcatctga

SEQ ID NO: 182860 - DNA, 555 bp, Arabidopsis thaliana landsberg
  unsure (1)..(555): unsure at all n locations
atggagaggtccttattcaactgcaaattagtccgcactaatctgcctgagaagaactcgtctctcagtacctttcagtgcgagtcgaacgtcttcaacaactccatgattgtattgggcgtctccctgatcgtaatggtgattggagggattttgtgttnnnnnnnnnnnnnnnnnnnnnnnnnnnnnnnnnnnnnnnnnnnnnnnnnnnnnnnnaagtggatatcacaggtcaccttgacttcaggtcgcgcggcggccgtatttgacccgaacaaggacctgttgcatgattgcaaggagttgttttacttttacctcaaggtgagtaccgggtttaaccagaattgttcgttttgttgactgtttttcactctttacaatcagatcttcaatgtaagcgccttcgccagtatctatgccattatcatcctgctgcctctctatagtgtactgcaaagccaatacggaactcaagcgcaggcctacgcgtgggcggtgtccgcggcgttcctcgggggtatcacgcccgcgatgatcatgctgacgttatag

SEQ ID NO: 182861 - DNA, 258 bp, Arabidopsis thaliana landsberg
gaggttcaaataaagaaagacaaacgttttgcatatggatcaatgaaggcggttccatctttgttttacgaagataagtatctcgagacacaagaaaagttgaacaagctggagaagaagattgaagagatggagctgaaactcaaggatgtcgacttctggactaacatgatgcaaaacatgtttccagaccaagtacctccatctatgagagcaaaccaaaccgataacaacaaaaacgacaaactaagcctttaa

SEQ ID NO: 182862 - DNA, 135 bp, Arabidopsis thaliana landsberg
atagatagagttgattccggagaactaaaccggatccgtttatcactgagatgtgatagcggaagagaacttgagagcaacgctgttgacgcaatggcgttcgtcagttggtgttggaaaaccttcattttttaa

SEQ ID NO: 182863 - DNA, 149 bp, Arabidopsis thaliana landsberg
ttataccaagaacaaattcagggccgggggttcttctagatcttgaccaggtacacaagatgggggatgatgtctttgataaatcaaaaactgccctagacataatgcgaaaagcggttgttgatgcaaaggaaaggaagaaagcttga

SEQ ID NO: 182864 - DNA, 234 bp, Arabidopsis thaliana landsberg
atgcccacctacaagattatcaacccgtcgcaggcaccgatcatggtgctgtcgctgacctcggatgtgctgcagaaaggccagctgtacgacctggccgacaccatcctgtcgcagagcctggcccaggtgcccggggtaggggaggtgcagatcggcggcagttcgctgccggcggtgcgcattgccgtggagccgcagttgctcaaccagtacggcctgtcgctggatgaa

SEQ ID NO: 182865 - DNA, 209 bp, Arabidopsis thaliana landsberg
gggtttgggactcggtgaaagagctaggaagagcgtatgagaatatcatgggacttgtaatctttgcaccaatcgctgttctgtcttggtttcccattgtctccgagtttcaagctcgtctgcttttcaatcaagcttttagcagaggccttcaaatctctatgattctcgctggtcggaaagacaaagcaacttcttcgcacaagtaa

SEQ ID NO: 182866 - DNA, 1261 bp, Arabidopsis thaliana landsberg
atggtgcattacaactttctctcgctgattatatttgcatgcttcttcgctgtttttgttcttcttgttcgtgctcaagaccaatcaggtaaacacaaagtcttgcaaattttcataatatggctgtgttttttaagctttaatctctcggtatgtgtgtgtgtgtgtttttatttgcaggttttgtcagtatagattgtggtatacctgaggattcaagctataatgatgaaacaacagacataaagtatgtttcagatgctgcgtttgttgagtctgggacaattcatagcatagatcctgagtttcaaacaagttctcttgagaagcagtttcaaaacgttaggagcttccctgaaggcaacagaaactgttacgatgtgaagcctccgcagggaaaaggcttcaagtatttgataagaacccgtttcatgtatggtaactacgataatctagggaaagcaccggacttcgatctttatcttgggttcaatatttgggattctgttacaatagataacgcaactacgatagttaccaaagagatcatccacactcttcgctcagaccatgttcatgtgtgtcttgttgataaaaacagaggaactccgttcctgtctgcgttagaaatcaagctcctgaagagtaatacatacgagactccttatgattcacttattctgtttaaaagatgggatcttgggggactcggtgctcttcccgtcaggtgaaagtgaaaactactttttatttgatgatgagttcttttttggtatttcttcttataaagttggtaataatgtaggtacaaagatgatgtttttgaccggatatggatacctctaaggtttccaaagtataccatcttcaatgcatcgctcacaatagattcgaataacaacgagggattccaacccgctcgctttgttatgaacactgcaacttcacctgaggatttaagccaagacataatctttttttgggaaccaaaggatcctacttggaagtattttgtgtatatgcactttgcagaagttgtggagctgccaagtaatgagacaagagaatttaaggtgttattaaacgaaaaggaaatcaacatgagctcctttatcccgcgatacttgtatacagacacgctttttgttcagaaccccgtgagcggaccaaaactcgagtttcgtcttcaacaaactcctagatctacccttccacccatcattaacgccattgaaacatatcgtgtcaacgagtttctaca

SEQ ID NO: 182867 - DNA, 378 bp, Arabidopsis thaliana landsberg
ctggattggctcagttgcaacaatgggttgagataaatcgtgatattgtccatagtcaactggaaacactttccttagaagtgaaatctagtctagcgaggtaatttttctcacatacctttttcttcttcccttggtaatagatactagaatgttttcaaattcatatgttctgtgtctttaattcatcacagatcaagtaatagcacaaaaactgcattagaggaagagaaatgtccttattgtgcagcgccagtcaatttccactcaccagaggaagccttttgcgaatcttcgcaccaaaaaaagaagaagagcaaagacaaagagagatgtgatcaaagccacaagcttgagaggtgttgtgtctcaatgcaa

SEQ ID NO: 182868 - DNA, 424 bp, Arabidopsis thaliana landsberg
aacacgaaaagaataatgaggacgatggagtattgacttcatatacaaacaatcttccagatcgaatacgatttcgtgcaggttgtacagtaaacctaaggtcagacatcgggttcaaggttagaaacatactcctcaaattatataatgtgaactctgtcttatcaacaaacaatatttatgtaacatattatttctttctgtataaatcaagcctttggcagaaatgatggtcaaggattcaaaatgcagatggggaaactactttagctatattattttaccattatcgattggtttagaaactgatccattggtttatctaaacaaatccaaatccatgatggctcgaaagaagcactcttatcaagcagctataacgtattttcttatcaacatcgctctaaaagagattggcgccaag

SEQ ID NO: 182869 - DNA, 124 bp, Arabidopsis thaliana landsberg
atgaaaaaggggggagagaaagagacggtgacgaggcttctggtgatcacctgccgatcaacggagcaaaacgacggatttgtttcgccacaccaatcaattaatacgacactgttttggtttg

SEQ ID NO: 182870 - DNA, 513 bp, Arabidopsis thaliana landsberg
ttcacacaaaccacggactggtccaacggcttcaaggtcaacctcaccgacgacgtgatcctgagcggcgacctgcagctggcgaaatccaccagcaacacgctggatttcacggtctacaaccagatctacatgccgccgctccagcttgacgtcagcggcagcgtgcccagcgtgacggtcaccgacccggcctacctggccaacgggcacaactacatcctgtggtcggccatggaccatcttcagcacgactacggcctggaacgggccgccaagctcgacctggaggtgaacttcgacagtgacgtggtgcgctcgctgcgcgtgggcgtccgtgccaccgacacccaccgctacagcaacaacaccaacagctcgtacaactggggcgcgctcaacacgcactggctgccgtacacctcgcccgatgacctggcccgcgccgacaccgaaccgagctggatgcagtcctacgagacgctgggcaacttctatcgtggggatgcgaac

SEQ ID NO: 182871 - DNA, 999 bp, Arabidopsis thaliana landsberg
atggagtggtggaagaagaagagtttacgagccataattaaaagggagagattagtccgaggacacgagagaggtgggacattgctagaagagatcatcaaatcttgcaatggcaaagcaaatcccatcaaaatattctccgctgatcaaatcctagaagccaccgacactttcagcgaatccaatcgtgtttctgaactattcgatgagattccataccattggtattattcaggtaaaaacaataaccatcatcatcatcataaactgttactcatcaagaaatggagatatagatttagtgagcataacggaggaaacttttgccgtgacatagccatctcatcgattgttagtggtcataaaaacttcatgcaattggttggatgttgtcttgaatctgaacatccagttttggtttatcgtgcatcaaagaaacctactagtttagatctgaaaatggttgtgtcatggagacaaagattgaaaatagcagaggagattgcaactgctttagcttatcttcacactgcgtttccaagacctttcgtatataggattctgcgtttagaagatatcttattggatgatgaagatggtgttgctaagttgtgtaacttctcctactgtgtctctattccacaaggagaaacatttgtgaagcttggtaatggttgtataggtggagattatgattacatggatgataattatttgattaatggtattgtctcggagaaaactgatgcgtttggatttggtatttttatgcaaaagcttctgatgggagaagagagatttcatgagctttgttatgatcggagtgacttgacaacttttgaaaacagaagaaagtttgcaaaatgcattgatgagattgttgattcaaacatgttagagaaaataggtgatgttacagaagaagagcgttgtcgaatggaagctttcattgtcctctcggaaagatgcattggtcttagaggggaagttccaaaaatg

SEQ ID NO: 182872 - DNA, 82 bp, Arabidopsis thaliana landsberg
agagaagaaggaagagaagagtgggatgcaccaacaagtgacattgcaagagttaaggagcggtcccataatattcctgcgg

SEQ ID NO: 182873 - DNA, 49 bp, Arabidopsis thaliana landsberg
gtttaaacattacccgcaagaaagaaaagggtggcgcggcttaccggcg

SEQ ID NO: 182874 - DNA, 442 bp, Arabidopsis thaliana landsberg
atggtcaacgcgttgagcgcgttcctgatggacatatacgcccagggccagcgcgtgctgctgttcgtgcacgaggcgcagaatctgccggacgagtcgctggaccacttgcgccttttgaccaacctggaaacgccggtgcatcaactgatgcaggtgttgctgctggccacgccaaggctgggaacgcggttgcgcgcgccggtcttgcaaccgttggcgcaacgcatcacggcgcgccacgaactggcgcatctcgacgccgacgaaagcgaagcctacgtgcgtcatcgcctgcaggtggctggtgccacgcaggttcccttcagtcgtttggcattgcgtgatctgcagcgcgccagccacggcgtgccgcgcctgatcaatcttgtcgccgagcgggccatggcgttggcggccgagcgcaagcacccgcaggtcg

SEQ ID NO: 182875 - DNA, 215 bp, Arabidopsis thaliana landsberg
gtatgaacaacccccacactggaggagcctgcgggacaacaaaacgccgacaggtgctcaccgccgcccgctccggtagcagcgacaacgacctccgctctgggcggccaaacagcagcagcgatgacctcagggtagacgctgctgcgacaaggccctcgcccacgaccccactcgaggggcgaggacaagctaccaaggccgtggagtcggag

SEQ ID NO: 182876 - DNA, 221 bp, Arabidopsis thaliana landsberg
atgacatgcgcgttggtgccggatattccgaacgacgacactgcggctcgtcgcggccggttcctctccggccaccgggttcgggcggccagtagcgccagcccggatcgaggccaatcgatgtgccgggtgggctggtccgcgtgcagtgtttgtgggagcactccgcggcgcagcgcctcgaccagtttgatgaccccggcggctccgaagccggctga

SEQ ID NO: 182877 - DNA, 424 bp, Arabidopsis thaliana landsberg
ggtcgtatcatttataataagagcaccagatatgataacatgtttactcaggaggaaattgatgagcaacggaaaatactattaagaagacagaccaaaacagctcctaaggtgtctggaacaagagctagagactttaatacagatattgacctttatgagtaagtttctctttgtgtttaacttggctttgtaccatcatttcagcttaaaaacaattttgtttttggtaatctgaaaaatctaatgggggaaaaaatgcaggaaaccaatatccaggctaggaacttggacaggaagagcaagagcgaaaataccaacaacaatgtcgatggactttaagatccgtcctccatcgaaggttgacattaaccaagaagaggaaccttgttccaagtggcaaatggaaaaaagacataaaaac

SEQ ID NO: 182878 - DNA, 156 bp, Arabidopsis thaliana landsberg
cataatcggataataaccttcacggcttcacatcatgtcgaaattgtgttatcagaatcaacaaagttgtgcgcgcgtatacaaacttgtgaggaatttggttcaattcgtaagaacaaacttattcatcagaaccggagaaaagacaacatatag

SEQ ID NO: 182879 - DNA, 526 bp, Arabidopsis thaliana landsberg
  unsure (1)..(526): unsure at all n locations
atgggcgcaccggacagtccggtgtgccaccggacanctgtccggtgcgccagccacgttacccaaccgttagggttctgacggtttcgaccgttggagctctgacctcttggtgcactagatagtctggtgccgcaccggacaggcactgttcactgtccggtgcgccttctagcgctgctgactctggcgcccactgtagcgcatttaatgccttctgcagacgatcgttggcacgaagtagccgttcgtccgctggcacactggacagtctggtgtgcctccggacattgtccggtgcaacaccggacagtccgatgaattatagcggagcggcctccagaattcccgtaggtgagcagttcggagttggagtccctggtgcaccggacactgtccgatggcacaccggacactgtccgatggcacaccggacagtccggtgcgccagaccagggcacactttggctgacatttgctctctatatttgaatcctttttcagtctttgtattggtttgatgtga

SEQ ID NO: 182880 - DNA, 173 bp, Arabidopsis thaliana landsberg
caggaagcagcagcagcagcccgacgacgccggctgcggcagcagcgacgaccactaccagcacgacgtgatcatgctgaggcggacgaggagcgggcgggcgttcccgccgccgatctccgcgatcggcaagggcgggcggccgtggctctgcctgcgggcgcaccgcgagg

SEQ ID NO: 182881 - DNA, 323 bp, Arabidopsis thaliana landsberg
atgccagaaatctctcgattgatcttgatcggtgatgatcacgatactgactctgatttacctgcggttattcaccgaccgaacggcgaagacgacgaatctgagaaactcgagataagattgaaacctcttgtggtagctttgttacctaaaaccctaacacgagaagaaatcgacgatgtgccttttctgatttacgatgataatgttgtctccagtgtagagattgaaaaatgcgtcgggcctttcgttggtgaaatgttaattgaagatgtagagattgagatcgatgatggagttagagaatttaggaggagattgag

SEQ ID NO: 182882 - DNA, 349 bp, Arabidopsis thaliana landsberg
gatacccgattactggaaaaaaggattagccggctcggaagacatcgatttcaaatacacaactatttcactcaacaaggtatatgagatcggttacaagcatgccatcgaaaatatcaaacgcaatggcggcaaggcagaaggcggcaatatcaccatacgcacacaacaaccgcaggcagtacgtttcgagaaaagtttcccgggactgtatcctgtacagaaacaggaagcatctgtggatgctaacaacgagatcgtattcacattcgaaggcaccggctttatcctgaacggattgcccaaaccggaaggcgccaaaaaccctgagaatgaacaccgcccagaa

SEQ ID NO: 182883 - DNA, 310 bp, Arabidopsis thaliana landsberg
tcgagtccgacgccgagcgcgtccaggaaatcggcggctgctcgttcggcccgtcccagatcgatccggtccgtggccggcgctgcgacgtggagcgcgggaaattcgaccgtgttcgccagggtcatcgcgtgctcccggtggacgcgtcggcccgtttcggggcgccgagcggtcgatcgtaggtcgaggccagccgtgccagagccagcgcgccgaccaacagccccaggtctcgcagcgccacgtcgtagtagccggagtaggtcagaaaattgatgatgatgccggcgagccagagcgccaccac

SEQ ID NO: 182884 - DNA, 421 bp, Arabidopsis thaliana landsberg
atggccgacgatagctatatcaatgtaaccatgaccgatgcactaaaagctggaggaaacgatctcaggaatgacacaaaagttttcggatgtggagaaagcagtatgcgaactacaaacaatccaggtatctcttaaccaaagtgttaatactatacaatctcatgtgcgaactttgagtgcaggaaatcctcggggagctcgacgaagcatgtttagtttgccagattcccaagcgtggaacgaggctggtaggcaaaacactccaagtgcaagcgagccccgatctcaaccggatgtcgtagaagttttagtcaatggtgaagagcaaagtggaaacctctatgagcagaaaaactatgataaatatgaagctatggagaaagttagctgcgagctgaaaaaaatatatggagcctga

SEQ ID NO: 182885 - DNA, 412 bp, Arabidopsis thaliana landsberg
atgtctgcccgagccaacgctgccgcgcgccacagcccgcctccgcgcagccgcgcgataacgcagcgcgcaacgccgaccaagccacaggccaaagccaaagcgaacgccgcgcccaagaagaagaagaagaagtccgcgcccaagaaggagaccaagagccagaagccagcgaaggcgcccaagcgggagcgcaccgcggagcccgagagcgagcccgagagcgagcccacgcacaaacgcccgcgcacacccgagcacaagtacgcacacacgcatgaggtcgaggtcaagtcagagcccgttcccgtgcccgaacatacgcatcacacacacccaccacgtgcgcacacgtccacgcacgcgcacacgcacatcaagcgcgaggcctctccgagctcgtccaccgcga

SEQ ID NO: 182886 - DNA, 114 bp, Arabidopsis thaliana landsberg
gcggcgcgagaccagcaccggcgtgtgttcgtcgaccgtgacgatcagatgcagctggaaaccgatgaccgcccggtgttacgacctgtgttcgaacaggaccagaagcgctga

SEQ ID NO: 182887 - DNA, 778 bp, Arabidopsis thaliana landsberg
atgttgactagagccatcggacgagttcgaattcctgtgtcgaggattcagggatcgaattgtacgagtgggcttttaaaagattcgaaattgggtccgattggtgtttgctgtagcagatgggtatcgagcgagagcgggaaacgatttgcggcgatgtggggaagtggagattacggcagattagggctcggaaacttggattctcagtggacacctgccgtttgctctgccttgagtgatcacagtatcacagctgtcgcttgcggcggagctcacactctgtttctcaccggtgatttcttcagctcccgacttgttttatatatatatatatatatatatatatatatatatatttttttttttatttagtggattatccaggaactttgaaatcttaagaggttgcaatgtgagtaataaaagtagagggagaagaattgtgttgactattgagctgagaaatccggagaattggcatctcaatgagttgctgagatttcattcattttggtatatgccatttgcagatcatagctgcatataatcagtattagagtggtcttcgttggatagcatttcttggctttgtttaattgggcatgtggttgttgagttgcgtttttgtaaagttatcatcttttgaatcagtgattggttttgaagagtatctgataataagcttacacatgtgacagaaacgaggagagtctttgcaacgggtcttaatgattgtggtcaacttggcgtatcagatgttaaaagtcatgctatg

SEQ ID NO: 182888 - DNA, 104 bp, Arabidopsis thaliana landsberg
atggggaaggctccagcactgcttcacaagctgcacgtccttggcgacggccccactgccctagcacacgccgtgacagttgtgctggagcagcgactgtgtta

SEQ ID NO: 182889 - DNA, 674 bp, Arabidopsis thaliana landsberg
cataaaagctgaggctgtgcatttacaatgtaccgttggcggtgaagaggttgttaagccagtcactcttgatatttcatcaggtcggtattacttggatattattgctgacaagcttggattgaaggatggcagccaagtgatgatatcaaggtgagtattttgtcttctctgtcaataaatggagctttctcagttttaatcttactaaagctaattttggattttcatcaggactattggcaaaacttcctctggctatgagtgtagagtatatgctgccattcctaagttgaagtcttccgataattcatggaaagcccgtgaaaaacgtccaatcattgaatcatcacatcttgaaaagtctcggaatgcaaaagcaagttttgtttgtggtgtagatattcacggtgatgcgatcgtggcatctgttggttacccatggaggtcccatgatcttgaacatgatggtgtaaccttaaagtcgttttacaagtctcttacctctaccaacttttgctccgttttatgttttgtttttcctttgtatatcttttggtctagtgctgaagcactaaatatctcaccagttttttggcctctgtaggatatgttgcggtatttctcctaatggaatctataaattatcccgagaagcgataatagcggcgcag

SEQ ID NO: 182890 - DNA, 1445 bp, Arabidopsis thaliana landsberg
gaactaccattagaagaagctcaagaccaactagaagaagaagaagatgatgatgagttcagtaattttgtccgtttgctttctttattattcgattatactttattttctgtgaattgggttttcattgtgaaggaagaaccattgaattcaattcaaagttgatcacttttcatcagtttctttgttatttttgtgtgactattggaacataaggctaaaaaagatgtttttatcgttactgtttttcagctgtttgcctaatgatttggaaggagctgttaggcaatcaggtgaagcaggtgctgcgtttgtgaactcaggaggaaatagagctattgtaagggctagtagtatacaaatttgtaatctttggtggggaaaaagaatgagatttggtatcagctttaagattctgactctgaaatcttgtaggtggagcttttgattcctcagctgcagtttttagacgatgaaggtgcacaagctgaactttgggacctttcgcgtgttttcttggagactctcattaaagaaacaggttgtgaggtaagctaaaacagtttgtataatacctttacatgaaacattttatcagtcgatgactcgtagcgcttgaaaatgttgttgccagagagttaaagctgtatttccagacgctggagctgctgcattgctaaaataccggtggaaagatgcaacgttcggatttgctaggtaagttggcttacatcttgagagcttaatagtttttcgttcgaaagagtctgttagtaatatgcagtcatgttctttgttgtgatgcagcttaagtgaccggaaacctgtggagaaagaagatgagatcattgtcatggttgttcctgattaccaaatgctggaatatgttgagaaaattgctaaagggcttgctgatgacccggtaactaaatctgtcaaatctttaatttcaactttgctaagaacctttagtactaacattaagaaggcatttctttgtgttctttcaagccaaggcctctcattatgtggaaccctcgtcttataagcgaggaagtcggggttgggtttaacgtgagaaaactaaggcgttacttcctaaggtaaaaggcaaaatccttaatgagacttgacaaggtttttgacgtaacatcaataactgttcttttcattttggctcttctagttcattcactacggtttactctatgagacctctggctgctggtgctgttttcaggtgttatcctgggtaagactcagacttggtttttcttatttgattaagtccatgtagatacggtttaacgagtacaagctgatcattttctatcctcatttatttttctagtaagtggaaagtcttctatgataacaaagacagaccaggccgatacctactcgctaaagaactcattggtcgacctgatgcagaggatcttgag

SEQ ID NO: 182891 - DNA, 429 bp, Arabidopsis thaliana landsberg
atgcatagtggaatacaagcgtatctttcaaccttagcatcacctaaggtggttgaagtggtgaaacaatttcctgaaaaagtcaccttgaatgaagtacccaggcttagttcatggcctgcacagtttcaagatacaggtgctaaggaacagcatgtggctcttttcttctttgccaaggacatcgagaggtaactgtatataattgtgttttgtttcacatggttattctgtttttggtcgtttcaatgttttatttcctaatccactgacgaaatatattaaatgttattgtgacacacagttatgagaaaaattataagcctctggtagataacatgattcagaaagatttagccctaaagggaaacctcgagggcgttgagcttttgatatttgcgtccaaccagcttcctcaagattgccagc

SEQ ID NO: 182892 - DNA, 476 bp, Arabidopsis thaliana landsberg
cttatggttgcagctacattgattttactgtgtacaaaacctatccaagttgctgaattaggaccacttccatggttattgaccgtaccttctattgcaatcattggtagggaggtaagatttatagcataattgattgtaattccttaataccattcacttgcagaataagtaaacatgtccttaactgtataaaatacgtttgtagattactatgtccgcagtaagagaatgggctgcatctcaaaatggaaagcttttagaggtaaatcaccaacatctcatctctgatattgtggtgtctaagagctttcttattgtttctcttctttttgaatcatgaaatggcgttgattgatgcttgcaggcagttgctgtaaataacttgggcaagtggaaaaccgccacgcagatgacagcactaaccatacttcttgcaagccgagatagcaatgttggatggctcgtagcttcag

SEQ ID NO: 182893 - DNA, 361 bp, Arabidopsis thaliana landsberg
  unsure (1)..(361): unsure at all n locations
atggcgcccagcgggcgcgacagcnnnnnnnnnnnnnnnnnnggtgtgagcctggtgggcagcaggaacagctcggatccggtggcctggatccgcaggtccgtcttgatgaaggtcggcgtcgtcagcgcgttcaagacggccgcgatcgccatcccttcggctgtgctgacggcgccgagccctctgccgggaaacccgccggcgctcttgaccaggcccggcccgccgatctccacgtcctccacctggctgtacggcacgctggcaaggccctggggccccgggccccgaagatcatgttccggtcttcgaggatccgcaggtcgttcagtcctctctgggtgattgccggcttagg

SEQ ID NO: 182894 - DNA, 165 bp, Arabidopsis thaliana landsberg
ataaaaagcatcaatccgatgaaacccaaaaaccatcataagctcatcgatcaacatcagatgatcagtaatgaatggtatcaaaatccaatgatcatcaaagaaactttcaaaggaaaacaaaaaacagaggaatcgatgagcacctttgtgatagagacctga

SEQ ID NO: 182895 - DNA, 742 bp, Arabidopsis thaliana landsberg
atggagcagaagagcgtgttgttttccgcgttaggggttggtgttgggttagggattggtctagcgtcgggtcagagtttgggtaaatgggcaaactggtctatttctgcagaggatggactaaccggagaaaagattgagcaagagttggttaggcagatcgttgatggcagagagagtagtgtcactttcgacgagtttccttattacctaaggtacattgctcgacatatctttcttgcattttattactaaaagattgataacgttgcctaaatgggacagtgttgtgttatatactaatgtttcttttccatgttgcagtgagaaaactcggcttttattgacaagtgcagcttatgttcacctaaagcaatctgatatctcgaagcacacgcgtaatcttgcacctggaagtaaggccattcttctgtctggacctgctggtaaaaatctcctacccttttgtcttccaacctcaatctttttctaattcagactttggtgtaattttgttgcctcttttactctgcagaattctatcagcaaatgcttgcaaaagcattggctcattactttgaatcgaaattactgttactagatataaccgacttctctatcaaggtgattcattgcatacaaatttagtatctttgtttgctaaagaacagcttgtaatgttcctctttcatattaattgttacagatacagagcaagtatggatgcgtcaagaaagaacct

SEQ ID NO: 182896 - DNA, 188 bp, Arabidopsis thaliana landsberg
atgtcctacacagttgtggcacgcgcgacatccatgccgaccactgcctcgaccatggcgcggcgcgtgcggcgcaacccgagattgtcacagggtgcatctgcatccgagactacgctggagcatcgatttgaggcaatccgcctcggacgaggacgggcaggtcgccgacatcgtcgacgtcgtgg

SEQ ID NO: 182897 - DNA, 269 bp, Arabidopsis thaliana landsberg
atgtcagcaaaatcgaaaaaaggaaattcggattctggagaaggatcagtttcagaagtgaccgacacaagtgacaatattgtaagcgtcgtctcgtttcaaaatttgttattagagaaatccttccttcactctttctaataattgctaatatgaccaatgattataactctattcagaaatcagaatgccgtttgattaaaaagtctattgctcaattttcagggaccaagaagaagtcggagacagagaatttcgtaggaacatga

SEQ ID NO: 182898 - DNA, 1939 bp, Arabidopsis thaliana landsberg
aaatcaataatcaaaaatctcagtctgatcctcgtgcagtccatcttaaccaactaccgtcctcagcttcaggcagcttaggcagttcagttccggtacagggacttaccaaacatccgcagcaccagatgcagcatccaccaagttcttttcctatgtataccacttctggtagttttcactcattcccgggtccaaacaccaatgcttctggttccacgttgagacctcaccttcatgattcccatatgagacatgtggcacataaccagcctatgggatcaactggtcttggaggaccgccccagtctaccacaaacatgatgactatgcccaagtttgagaggccaagttctgtaaatgatccgagtagggttcagggtggcgctacatcgcacttccagagcagctcatcattgcctctaaattctgcacctggtcaaggatcatcagtgtcccacgtaaagcaggaatcagttgatcaaagttttgaaaagaataatgcagcctcaatgacttcgaatgaggacttagagaaggagtcctctagaatggttttatccacgcctaacaacatggcgcctgcaagctctgtttctccttccatgacaactcaactagacgccagcacaactgtaagagatctattaatatatagttttctcattataaaagtcagtctccactgttcttgtttgcctcttctctttgagctcctggggcaactatggcgcttcaaaagcccttgcatattttccgtgttatgtccgacaacctggacatctattgtttttccttgttttgggttttataatttctactataaacagtaaataggaaaagtttcaattggacaatctctctcattaacattgtttgtgtatccatcagatgaattctcgtggcccattgggaacctctcaaggaggagctaatgctaggatgccacccaaaaagccttctgttggtcagaaaaaacctcttgagacattaggttcttcacctccaccaccaaggtaattgatctgctcaggcttagaaacagggaacagtttttttaagtcactctttcttcgttaataatagacttctgatgtatggattttttaagcgtaaaccacttttcttttcgagtccccaagtaatataaaatcataatcattttgcatggatcaacttgcagcaagaagcaaaaagtagcagggaattctatggatcaaagtattgaacagctcaatgatgtcactgcagtcagtggtgttaatctcagggtgcgtttcctggtagcttcagttttcaattttgatctggatgtagattactgaagtaaatcattttttgtctgcatttgatttaggaagaggaagaacaattattttctgggggcaaggaagatggtcgtgtttccgaagcatctcggagagttgtgcacgaagaagaagaaagattaatcttgcagaagaatcctctgcaaagaaagctggcggaaattagttgggatacttcccatatcttcttctattttaatttctagttattgaatcacttggagacgaagcttacatatgcttttcttatctggcagtgactaaagccggtttaaagcagataagcaatgatgtcgaacggtgcttatctttggtgagatgtcaacttcgtgtgcattgtttgcattcaatacttgagcttctttttccccttttctcatgtatttgtgctttcagtgtgtggaggaaaggatgcgaggactattatcccatgtaattcggttgtcaaagcaggtcagtctaactttctcttactacctggttcaacattgtttgataaattctgtctgaagctaaaaatgcttcttcagcgggttgatgctgagaaatctaggcaccggacttttatcacatcagatattcggctacaaatcaacgaaatgaatcagaag

SEQ ID NO: 182899 - DNA, 100 bp, Arabidopsis thaliana landsberg
ctccctcctccaattctgtgtgggtggcggcgacaccagagcccttttcaccaacggcaattatctcggcatcggcatccacatgggatttgggagctca

SEQ ID NO: 182900 - DNA, 159 bp, Arabidopsis thaliana landsberg
aaagaaaaggtgttgtatattttggtaccaagaacggcagggtatacgccattgatccggaagaaaaaaagaagctgtgggtgcacaaaaccgataactccatggtgaataccgtaaatgtatttgatgaccggcagatgataacagccaccatggatg

SEQ ID NO: 182901 - DNA, 645 bp, Arabidopsis thaliana landsberg
atggaattcttcttgagcagccacaatggaactgaagaaacaacgaaacaattcaactttgaagaagaagctgacacaatggaggatctatattacaatggagaagaagaagataaaactgatggagctgaagcatgtcctggacaatatttgatgagctgcaagaaagattacgacaatgtcataacggtttcagcaaagacagaagaaattgaagattgttatgagaataatgcaagccagaggaacatgttacttagactgaattacgaaaatgttatagcagcttgggataaacaagaatctcctagagatgtaaaaaacaacacaagtagcttccagctagttcctccagtaagcgcctaatcttccgagttcttacaaaaatgatattatattgtttcaaattgagaaaattgaacccaatctatcaaagaaacttattgtaatggttgttgattgcaggggatagaggagaagagagtaagaagtgagagagaagctagagtttggagatacagagataaaaggaagaatcgtttgttcgagaagaagataaggtacgaggttagaaaggttaacgccgacaaaaggccgagaatgaaaggtcgatttgtccgacgatctttagccatcgactcttag

SEQ ID NO: 182902 - DNA, 1071 bp, Arabidopsis thaliana landsberg
atgggtaatgtgacgtcaaatgtggcggccaatttcgcattctttccgccggagccagcaacatacggcgtaacgaaggatgacgagaccgggaagctggtcttcgccggagtgtcggctgacaagaacgtggaagtccaccaactcaccacaaagtccggcaacaaagttgttgccacgttttggagacacccttttgcgagattcacgcttctctattcccatggcaatgccgctgatcttggccaaatggtcgagctattcatcgaactccgtgctcatctccgcgtcaacatcatgaggtatatcttaaaaactttaatggttagattcttgacgtttgacttgtttttaaatgttttgatggcattttgaaacagttatgattattcaggatatggagcttcaacaggaaaggtaaccaaagagaaatcattcaaaactataaaaccttaatgtgatttattcagatgtttttgtgttcttgactttttttgtttttctggttctttttggtttagccgtctgaattcaacacgtattatgacatagaggcagtgtacaattgcttgcggagcgattatgggatcaagcaagaggagattattctgtacggacagtctgtaggaagcggtccaacgttgcacatggcttctcggttgaagaggcttagaggagttgttcttcacagcgccattctctctggaatcagagtcttgtatcctgtcaaaatgactctctggttcgatatattcaaagtaagaaaagcacacacaaaagatttgcttttggttgggttacatatatactctgttcctgtctcatctctttgttttgaatgtcttacttcagaacatagacaagattcgccatgtcaactcacaagtccttgtcatacatgtaagtaaaagctttagatctagtggatttgtctgtcttcttctttctgttgatttgtgctgattgatttgtgatgagctgctgcaggcacaaatgacgagattgttgatttgtctcacgggaaacgactgtgggagctgccgaaggagaagtatgatccgttatgcgtga

SEQ ID NO: 182903 - DNA, 140 bp, Arabidopsis thaliana landsberg
gaaatatgctttggaattgttggtggaaacaggttttcttggctgcaaaccgtcttctattccaatggagcccaatcattccttacacaaagatgacactcctcttattccagatcctaaactctacagaaagctgattg

SEQ ID NO: 182904 - DNA, 249 bp, Arabidopsis thaliana landsberg
ctttgctctttcgttttacaattgtcctcctcctcgagcaaaagatatgggacgaacaacaactaaagtccaataaacgtaagttagggtatcacgtgatcaaacattaatacaagaaataaagattaatgagtcagtgatgatccaacctatccatgtgtagtttttaccgacgactaccgaatatgtatacgttttatcagtaacggacaattattggacgattatttatataacaacgcgtttaaa

SEQ ID NO: 182905 - DNA, 430 bp, Arabidopsis thaliana landsberg
tttgatgtaagagcctcttcaagtcgtaaatcacttaagaaactcaaaagagagtcacaacaaggtaaagacataggcttaagaaatgttacagatgaagaagtttcttctccaagatttgaggaagctcaagttgatgatattccaacttcaaaggactccattgatgtttttgttgctgctcctcgagacaaagtgcttcaggcttgcactgtaacttccggtttgatggctgcactaggtctgatcatcataaaggtgaatcccaaatctgaaagtttatgattttgtgattctagcatttgtatcttgctgatttggttaccgcttgcaggcgtctcatgttgcttcgactgaaggattactggttccagactgctctatagatgtaccatgtaacatctcggaaaacgattatgttgtgtactaa

SEQ ID NO: 182906 - DNA, 182 bp, Arabidopsis thaliana landsberg
cgacatcacattgcgcagattacggatgcttctgtatcctagaagacaatggcacaaatgaaccaccagccaagcgcttggatcgcagagaaaagcgcatcgaaggaaatgagcggtttttgctgccgcctggccttcatctaggcgcactctttgaccttccacttgtcaaacgagtctaa

SEQ ID NO: 182907 - DNA, 173 bp, Arabidopsis thaliana landsberg
atgacaataatgagatatgaaaatttggtaaaacgtaccgatctctattatcgtgcaaaggtattaatgtttggattagcatcaaatagataccaacttgctcttcactcttcttatagaaaaatatggtaccatatcgacccaccaaactaatcatcatcgaatctagctag

SEQ ID NO: 182908 - DNA, 42 bp, Arabidopsis thaliana landsberg
atgaacggtgagtgctctcattttttcgcagaacttatttga

SEQ ID NO: 182909 - DNA, 874 bp, Arabidopsis thaliana landsberg
atggcaactgagagtttaggaccagcatatgctattcttcatggagcatttctcgtgttacttgacggtttaagtctcggtatgtttttccgtaattctaatctttctgtctaggtttgaagtgttattgctatactcacttattcaactcttattcttcccttctgtaaccattttttatctgcactggggagctttctgtttatttgattgcattctggtatgaacaatgtggttttttgaacttctcgatgtccaaaaacatggtaataaaattagtcgtgtatatctgtggccgggtgtttcactgtagcttatgctctagtgattccctcacatccctatgaaaagatgctctttgcctggtggtccagtaaaacatattcgttaggttctctagctgcttcttagattgattgcttttataaatgcctttgtcatctacagtcttacattttttgactggtctgtctttgacgtaatgatataagtacactggaatatatcaaacatctaaaagtttgaataggtctaccttgatcgtttgttatataaattcatgcaaatatcttttcatgtaatttgttgaattgggtattcgaatataatggtattccatcttcactagctgaatctacaacttgtgttatgtagtttctgtcgttggatttactgagtttaggatatccaactttattggtatttcatcttcattagctgagtttgagtggtattgctttcatatatctttacccagcgtgtatgattgattaacctcttttttttttatgttttgcaaggaactggtttctctggaagggatggtcaagatctgagagaaaaatgcttcgctttcctgttacaacaacttgag

SEQ ID NO: 182910 - DNA, 1160 bp, Arabidopsis thaliana landsberg
atgaatagtaacatcgctgtcaagatctgtaacggcgtacctgcaaggtagaaatcaatggccagattaaacattgaaactaagaacataatcagctcaacgagaactcttacatattaattagacattactcttttcttaaacatttcagatgttatgtttacattcaaaaccatataagcacatgcatgtttatcaagtttaacgcacaagctaagaaaaggccaattcttgcctaaaattcacttacaaaacacgacaaaggaaacaaagattcttagcctagtttagaatatccagaggtcaaaacttggaagagatgtcttagatatttagagaaacaaagcattagcaacagaagttaagagagattcttcactttctaaattagaagaaaactgagcatcatcatcattcccttttgctttccactctttgctcttacaaatcaggaccacaaaacaacaacacataaacaaagacagatcatctaatggatggaccactcctgaaactcatataccccatttcttgtaacttttctagtatttcccgcaaaaaaaatatgatgagagaaaccaatcacaataatggtgatgatgatgacaaacttatcctggttttctatctctaagatcaaaaccagagtattttaactggcaagtaacagtgtttaagcaaatattgaccaagtttagctatctctgttcatatagagcaaatgaaaattttgcagggaagtcactgaaatctgtttttaatagcttgtgttaaaaaagataggaaccaagagaagatgggacatatgtttctagaaatcatacaagaactaaacagaggcaatacatgtggagataaatgaatagaaaagagaagagagaacagaacaaaaacacagagaacagaaatagtagaagattcatttgacccatcaaattaaaaaataagataaaaacaaaataaaattatgcttacttgacgaatttgccatcagattcaaatgtatcgggcttagaccctagcttcatgaacttcatatttcttcgtcttgtttaccaaaaggaagacacttttgtttgaccctgaagcagctttaagaagcttctactctctctctttttagaagaaccgatcaaatcacagaagaaccagagaagtga

SEQ ID NO: 182911 - DNA, 15 bp, Arabidopsis thaliana landsberg
atgggcttgattcag

SEQ ID NO: 182912 - DNA, 403 bp, Arabidopsis thaliana landsberg
atggcgagaggtcagatcagtcgcaaaacacgctcttctgaactgttctacgccggccatcaagtcccactcatcacaattcacaatcttaaagagaaaccttcatcattagccgattacggtccattaggggtatgaaggatttattctccccttgaccagaattgagaaactgatgattcttgagattctgaattaagcactcagcttctaattcttcttctccaaaagaaatctaagatctgcaaaaggagagaaaaacaaaacaaaaaactagccatagtggctaagatagactcgcacttggacgagaatagacaaaaccagatttcaccggaaacaaaatccgacaaaacatcgtcggaaagaaaggaaaacacctttctctctctcaaagattgtt

SEQ ID NO: 182913 - DNA, 172 bp, Arabidopsis thaliana landsberg
tttctcagtgcctaattcatgtgatttgtgtgctttcgaccgacagcttctgtatgaaacatgtctctgcatctggcttctgtcctattatgaacctgcaatagagtacttggcaacatcgaggacaatgcaaaggctcacggaagtggttaagcactcgactaaggaaaag

SEQ ID NO: 182914 - DNA, 118 bp, Arabidopsis thaliana landsberg
aattatagaaaacctaatcgccacaaaacagaaccaagatcaaaaccgaaatttgaagggtgaatttagagaaactcacaattggcctcgagaagaaccaagaggacgtctaaattga

SEQ ID NO: 182915 - DNA, 321 bp, Arabidopsis thaliana landsberg
atggagggcaaaagcagcggaccggcgggtgaggcagacgcaggtgaagaagtggagagaaggaaagaagttcagagtcgaggtaatgaacaaatgtcccatgtgtccaatcatcaaccttcgtctgaaatgtcaaggatttcctcagtcgcttgtggaccccacgctcctccgtgttctctcctcttccgccggaaactgtgtggttaacgatggcttgccactgagtccaatgcagactctctccttcaactactccaacacacaccagtttgctctgcgacctctttcttggtcttttcagtgcgagtaaatcaataa

SEQ ID NO: 182916 - DNA, 1800 bp, Arabidopsis thaliana landsberg
gttcttatcattgtgggggaaacgggttctggcaagactacacagataccccaatatcttcacgaagctggttacacaaagcttggaaaggtacacttgaccttaattgaagcacattatcaaataaatgatatgcttgtaaagcatttaatagaggaatttaagtgtcatcaataaatgatgtgttatttattctgtagtcgagagctttagcatgtcaaagttgccacaagcaagtatagcccgtttattagagttttctgctttatattttagaagctagcttattagaggttcacgaggattgcctttgtgcataatctttgtggccagatgatttggaaagtataaaaacaaaaaaggcagatgttggtaaagcataaacttatttttaagcaccctaattattttgtcatacggcaggttggttgtacgcagcctcgaagagttgcggctatgagtgtggctgctcgtgttgctcaagagatgggtggtaaacttgggcatgaggtacgttttctttttgttagtcgtcttaacatttttccttttggaaattgtttgttacacatttgtttaagcatacactgcaagaagctaaatctttggtggtgcttgacacaggtcggctattccattcgatttgaggattgtacgtctgagaaaacaattctgaaatatatgactgatggaatgcttttgcgtgagttgcttggtgagccagatctgggcagttacaggtaatcaacattcctagccaatttgtcttagcatggggcatgtgatatattctttacttactaatagctgaacctttcagtgttatcatcgtggatgaggcgcatgaaagaactttgcacaccgacatactatttggattagtgaaggcaagtagatacctagctatctttttacattattcaattagagttagatctttggatatgttctgattctctcttcttatggcaggatatagcacgggctcggcctgatctgaagttattgatatccagtgcaaccatggatgcagagaagttttctgatttttttgaccaagcccctatcttcaggttcccaggaagaaggtatcctgttgacatttgctttactactgcacctgaagctgattacatggacgcagcaataactactgtgcttacgatacatgtgaaggagccacttggggatgttttggtcttcctcccaggtcaagaggaaattgaagccgtagaagagaacttgaagcacaagataagaggtttgggtacaaagatccgcgaactcattatatgcccaatttacgctaaccttccaagtgagctccaagcaaaaatatttgaaccaactcctgaaggggcacgaaaagtcgtgctagcaactaatattgctgaaacatcattgaccatcgatggtataaagtatgtcgttgatccaggctttagcaagatgaaatcctataaccctagaacagggatggaatctttgcttgtaacgcctatctctaaggcttcagcgactcaacgaactggtcgagctggaagaaccagtccagggaagtgttaccgcctgtacacggcgtttaattactacaatgacttggaggacaataccgtacctgaaatacaaaggactaatcttgctagtgtggtgctttctttgaagagtcttggtattcataatctgctgaactttgactttatggaccctccgccttctgaagctcttataaagtccttagagctgctctttgctctgggtgctctcaatcagcttggcgaattgactaaaagcttgtag

SEQ ID NO: 182917 - DNA, 3505 bp, Arabidopsis thaliana landsberg
caagtggttttgctagtcgtcacaatctgtaaagaacctacatcctttacgttttattctagttctataatcgttgattcgttaggcttagatagaaaagataaaagtaagagttgagataccattatactaggattgctttggtattgatttggtatctgttacttttccccctctctatgcagatgcaaattgctggcaagagtggctggttttctcggatatattcttctttctaatcaaaagtgggtgtactgattttgttgatttcattgacaagttggttttacgccttaacggtgttgataaccatattcttcggacgaatcatgtgacttggctgcttgcacaaataatacgcgtggagcttgtgatgactgctttgaactcagatgctaaaaaggtcgttactcaattacaatgatatgtttgcagctgcaatgcaattacttgtacttctttttcggcgaatttaacatcccaatttgtgctctatttgggttttctctcaggtggagactactaggaagatcttatcatttcacagggaagacagaaattctgatcccaacaatcctcagagtgtgttgcttgacttcgtaagcagttgtcagaatctacggatttggtcactaagcacaacaactagggcatacctaaacaatgaacagctgttgaagggaaaacagatcgatgagtggtggagaagcaaaggtacataaggtttcaatggcagggcttagactaggaagcagagaatcccgattataaaaagcatcctctcattctgtttcttgtttggggttgtcaggagagcggatgatggattatatgaatatggatgataggtcgattggcatgttttgggttgtttcctacaccatggcacaaccagcatgtgaaacagttataaattggctatcttcagctggcatggctgagttaccgggattacagccaaacgaccgagtaatgatgacgcaggaagttaccccgttacctatgtcattgctatctggcttttcaatgaatttgtgcttgaaattggcccttcagatggaagaagctttgtttgttagccaggtttgtttcctttgtctcacaaagatattatatatgttaattgatacactgatctatgaagaacatcttctttggtcatttttacttagtgacctattttctccacggtttagtaaaacaactttagcgttttacttgtttaaaaatgttaatagtagattttaaaaaacctgagaaaaatgaatttagtgtcgtagtaaaacatctgagtgcaggttgttcctagcattgcaatggttgagacatacacaagattgcttctgatttcccctcattcgatgttccgttcacatttcagtgtaagctatttggttccttctgttaccttttgactttcattatcttatgttttattgatcataagcgattcataagattagctaactttctgtagcaattggcccagcgaaatgcttctctgctaagcaagcctggagtgacattacttgttcttgagattctgaactatcggttgctgccactctacaggtaaaacgagcgaaaagttctcaagttggagtagatccttctttatgttttaactgggtcattcttttagttagatgacaattgtttcgggctttcgccatattggctgttagacccgactaaacaaaattactgatcttattgcagataccaaggaaagagtaaaactttaatgtatgatgttactaaaataatatctgcattgaaaggaaaacgtggtgaccaccgtatattcagactagctgaaaacttatgcatgaatctcattttatcactcagagactttttctctgtgaaacgggagggaaaagtaagtggtgttttcgaattactcactgtcccccttcttattttgtgcctggatctcaggtgtaaataattgttcttatgttatcatcactaggggccaactgaattcactgagacgttaaatcgcataaccatcatgactcttgctatcactatcaaaacacgtggtatcgcagaccctgatcacatggtttatctgcaaaccatgttggaacaaatactcgcgacgagtcagcatacatggtcagagaagacgatgcggcatttcccatcccttctccgtgaaactttgaaaggacgggtagacaagaggggcctatcaattcaggcatggcaacaggctgaaacaactgtgataaaccagtgcactcaacttctctcaccatctgctgaacccgcttacgtttcaacatacctcagtcacagttttcctcaacaccgtcagtatctatgtgctggtgcttgtctgctgatgcaaggccacgctgaaaacatcaacagcacaaatctggtttgctttgcttagtctattcataattgtgaaatgattgttagttgatagtggtatgattttctcttccaaatgattatcaggcacgagttctgagagaagtttctcctgaagaagtcactgctaacatatacactttggtcgatgttttgcttcaccacgttcatgtagaccttcagcaaggacaatctctagaggtttctgtcagccagaagagattaacctcacttttcgttgcttgatccatcttcttacattgcatcgtaatattttttaggcagttctagacaaggcaggcgcaaatcttgcatttttcttctggacacatgaaatgcttcctctcgacatttttcttttggcgctcattgaccgtgatgatgatcctcacgccttgataattgcagtatgttcatgcttttacgtaaaagaagcttaacatcatagaaattttacagtgttgttttcaatttatttacagatgagcctacttaaaacgccagaccttctgctgaggataaaaaactactgccaaaaccgtgggtctcctgagcactggcttgtcacacaggtgttcaaacgcaatgaactccagaaggccctgggtaaccatctttcttggaaggacaggtaatatatccaattcaacatcagtgtaactgatttctaacaacaatttcacttaagtacatggctttgattgtttgattggttttgttggcatccaaccataaatgtgtgatggaaccttccatgaaaacttgtgtatgactaggaaatagttgaattttggtttgatctgttttaattttggtgttggattctgctaaagttgggtaaatgttttacctatttttttattgtgttaaacgcaggtatccaacgttctttgatgatattgcagcgcgtttgcttccagttatccctctagtgctttacaggctcatcgagaacaatgcgatggagcaagctgataatcttttgcttgcacactcgcattttctagcgtatcatcctctcagattcacgtttgtccgtgatatactagcctatttctatggccatcttcctgggaaacttgttctgcgcatgctcaaagtacttgatctcagcaag

SEQ ID NO: 182918 - DNA, 165 bp, Arabidopsis thaliana landsberg
gtgcctacactaagacgataccaggagctgttgctgccggcgccgaatgcagagaatggcaccacggccagcttggcttcgccgagaatataagaagtaacctcctgctgcgtttccagctttttaccttctgcagtggtcctgcctgccaggtctattttaatg

SEQ ID NO: 182919 - DNA, 339 bp, Arabidopsis thaliana landsberg
atggctagtcactatgaatccaaacaaggtcaaacccatgagtgcgactatgatgaagaccatgaagaagaggtacacccacaagacccaagccacgtcacaacatgcaccgactagaccagctactgacaagatcaagatagctaggcctaagatcaaaagtggcttctgaagaaaatgctcgcatgtcgttttgctcctacccatccatagagctgatcctaatagaactatggaggaaattagtgttaggatattcaagaatcctatcactgtattgctcattctgttcattttccttctctctccttttttatttgttactagatgattctttga

SEQ ID NO: 182920 - DNA, 558 bp, Arabidopsis thaliana landsberg
ttcacaccgtattctagtggatacagatgtcgacacagacgatttattcgctatactctacctcctgaaactcaacaaatcagaatttgatctagtcgtaagctcactactactttttctacaatccacactctaattcttcaactttgttttaatgctctgtttttgaaacaggggattacactgagtgcaaatgcatggacaaacgcaggacacgccgtgaatcaagtgtatgatttattgcacatgatggatcgtgacgatatccccgttggtgtcggcggcgaaggtgggattagcgacgacggtactattcactctgacgtcggtggttattttcccatcatcgaacaggtttcttcttatatattcttcttatttgttttcttgaataagttttgatattagtttggttttgaaaatgtaaaaaaaaattggtgtgcttaggggatgacaacaacaggggaatgtagatacagacaagccattcctaaaggtcttggaggccttctcgacatagactccaattatggattccgtaaacagtttcttcctcag

SEQ ID NO: 182921 - DNA, 150 bp, Arabidopsis thaliana landsberg
atgggtctcctgagggacctgcacaaggccatcaagcaaaccgagctggtgctgatctctgtcaaccccacaatccaatccatcaggaactacgagaaggtcaccaaattctatcagaaatgtatcgagtgcaaactagctactcatgga

SEQ ID NO: 182922 - DNA, 96 bp, Arabidopsis thaliana landsberg
ttaaggagagggagagggagaagagaggacaaatggaagcagcttgcgtaccaaaagtgcgacacgtatgtaaagagtcggaaggagacgtacggt

SEQ ID NO: 182923 - DNA, 687 bp, Arabidopsis thaliana landsberg
atgcctatcattctcaccatcaacgtatataacagagcttccccttttgatcaaccatgtgattcaaagcccaaccgtaaggactcctccctactaatttatagatccataaaatcattagatagatttcacatagacacagaaaccaaacttgaagcttgtttcaacacaaacctgacccactaagaccggtgacccaaatcacacatcctttctgatcaagcaatctctgtctatcaactttctcaacagaacattcatgccactttatatttgtcgagtttccgaccgtagacaaaggtccttgcttttgtcctaattagacaattaaaaccataaaaaattggcaaaacaatcaaaggttctgggaaaaatcaggaagaacgatacatacccgtgtgaccgttaatggatttaacctcaggaatagatccatttttgttatgactcagagtttgagatccatccatagagacacatgctcgaacaacatcagcagatcttgaattactcattgaattgctatcgaaaatcccttttggagaagccatcgaaagccctaatagcgatttagctccggcggcgatcatattttacggtgggggacgataacgcctttaattagtcgcagggaagccgatggcggccggcgatacgtcctggtccgatgcggaacggagcaattcg

SEQ ID NO: 182924 - DNA, 306 bp, Arabidopsis thaliana landsberg
tttgcttctggatgcacgaatggagatgaaacaagaaaagcatataagcataaggttctgaagtcatctgatgagtcaaacattcacatcgctgtaggggatggaaatgagggacaggattgttgtttgcttcatgatgatagcatcagaagtgaagaaactatgaaatccaatgagcagtactctgaaaagggaaacaatgattttggtgaaggtgatgttgataacaatgacaagactgataagagatttcaagagctgaatgtgctagcattgtcgatagaggagcgtattcttaaggcataa

SEQ ID NO: 182925 - DNA, 78 bp, Arabidopsis thaliana landsberg
atggataatctgatctcgtcagacctcagatatgcaatcgttggcatcattcagcacgaatctttgagcgttgcacac

SEQ ID NO: 182926 - DNA, 927 bp, Arabidopsis thaliana landsberg
gggcttatattgtgaactatctggctacaagaggaccgaagatgcaatcatttgttatcgcttctctcattcaactgctttgccggctcacaaagtttggatggttagatgatgatagattcagggatgtggttaaggaatctacaaacttcttggaacaggtgattcatcttctgggggaatacagtgctttgtggacatttttttgtagaattttcagatatttttaacaagggcttgctgaatacgttgcttacatcaattttatttcaatagggttcctcggatcactatgctattggtttaagaattttggatcaacttgtgcaggagatgaatcaggttagtgatgtattgtggttgattttccatgtcacagacatgtcctaacataggctggaataactctcttttaagtttgagttcttggcatgtattgctaattgcatttgagtcatgtttttgtatattagctttgagttgcctcatatttttgtttcttttcgatctagagtagcagtctgttatagatacaagtgggaggtttgtgctgtatctaaataattgtctgttttcaccattcctttatttttttaattaaaaacatttaagatggctgttttgttagactggccagaattatatgtgcacagtgtgcatgcttttagatagatagcgtgtcacaaactatattttttcgagggtatttatttctaactttttgtttttctactgtgttccaacttaccagggtattttttttaaatgcttattgacattttttcatcccttttttgctcaattcttagcctaatccaggactgccatctacacatcatcggcgggttgcatgcaactttagggatcaatccttatttcaagttttcagaatagctttgacgtcattaagctatctgaaaaatgatg

SEQ ID NO: 182927 - DNA, 113 bp, Arabidopsis thaliana landsberg
atgagattcccaagcttacgaaccagggcttgtccttttaccatattaagggaagaagattcggatgtacgaaaactgtttgagacaaagatctttgaaataacgaattcact

SEQ ID NO: 182928 - DNA, 101 bp, Arabidopsis thaliana landsberg
aagcttgcactcagaaaacgtgcgtttccttgcgcgttaaagtcttcatgtcgtacacgaaaactagggaacaaaaaattcgtctgtccgattttgactaa

SEQ ID NO: 182929 - DNA, 349 bp, Arabidopsis thaliana landsberg
  unsure (1)..(349): unsure at all n locations
atggtgagagccgtcagaccggagtacctccagccattaaacttaaagcaagaacggtggcggtaatacccgctggtacgagaacagggctgaatacaaggaagagcggcatggannnnnnnnnnnnnnnnnnnnnncaactagtgataaaccggccagcaacaagaggaatactgcggctgtagaggcaaaaaacgctatcaaaacacccttaatcgtcggctttggagatcgtaatctctcgcgttttttcttgcgaaacaacatttttaatggccagaaaatattccttgttttatcggatggttatgttgtgggatttcatgaattaggagagtggattttatga

SEQ ID NO: 182930 - DNA, 166 bp, Arabidopsis thaliana landsberg
agacagagtcaggataaggcgatctcgatttgaaagacgtgaaagagggatcataaccgaacacacaaacagatcccaagaagaacccgtacatgttcatcacaaagaagaccaaagtcaagaagccataaagcgtttacatctcttcgcagatcatgtgtggtga

SEQ ID NO: 182931 - DNA, 1084 bp, Arabidopsis thaliana landsberg
  unsure (1)..(1084): unsure at all n locations
cttccaactcagcttcgttctcctgacgtggccttttgcggtaataggattggtgaaccgtatcacacaccaacggcattaacaccaaagctctctcttcattctggtgttcggctatcagatcctactgagtatcgaagtgtagtgggtagtcttcaatacttagctttcacccgacccgacatctcctatgcggtaaataagttttcacaattcatgcattctccaacttcagaacattggcaagctgttaagagacttcttcgctatctccatggtacgccaactcatggtatacttctcaaacgcaacaatccactctcacttcatgcatattcaaacgcggattaggctggagatacggatgactatgtttccacaaatgcttatgttgtttacctaggtcacaatccaatatcttggtcctccaaaaagcaaagaggtgtggcgagatcatcaacagaggttgagtataggtctgttgcaaatgcctccatagagattcgttgggtatgtttgttacttcaggagcttggaattgtcttacctagtgctccaactgtttattgtgataatgttgaagaaacatatttgtgtgcaaacccagtttttcactcaaggatgaaacacattgctttggactatcactttcttagaaatcaagttcaaatgggagcgctatgggtggttcatgtttctacaaaagatcaggtggctgatgcactaaccgaaccannnnnnnnnnnnnnnnnnnnnnnnnnnnnnnnnnnnnnnnnnnttacgccaagcccctccatcttgagggggcatattaaggatcaatcatatcaaatgatttgatcaatcatatcttctatttatgtaaattagatcatgtaattaatcttcttaggatagcctagcaatagttgtatgtgtatatatttcaaactctgtattcaataataattatccttcatacaaacattcataacatcttcttatcccactttatgtgttttaattccattccagtttaaagatcttaacccaattgtcttcaaaatattgtgtgaccttactatcttcatttctttagttttga

SEQ ID NO: 182932 - DNA, 298 bp, Arabidopsis thaliana landsberg
atgggctccgaaagctgctacaggatcaggacagagagtatgtgtaaacgcaatatgatttggaagggattgagggaatagacagagaaggattcgtatgattagagaagaagcaaacaggatttactaaaagagaagcaaacctgagaggagaacctatttccgaacagagagttctttcaagtcgatgcgtaagcttggagagagagaagaatcaagtaatgacggaatgggaaatttggaacgcatttggagtgttgggaagactgtgggcgaaggtgaaacagtggctgcttga

SEQ ID NO: 182933 - DNA, 3549 bp, Arabidopsis thaliana landsberg
gtagacaatatagaagaagcacaaagaaagaaaaagagctacttcgttaagctgtcagcatgctttccagatgcttctgaggcagaagatctctttgaaaaattagaccgaatgagggatgcatcaatttttgatgtcttaactttactgctggaggaactgtcatccacaaatgcccagattattaaagtaagttcaaacttttctgtttagtagtatcagcaagagtattttacagaaaatgcatttggtaatcagaatgaagaaaataaatagtcgctttagtatattggatatattcaactttactacatattagagaagtgatcattttctcattgttgttatttatttttatttttcaggagaagtttctcaagatgattggtgttaaacattctcttttcgagttcctgcgcatactttctacaaaatgttcgcctagtatatttagctcagagcatgttcagtgtcttttgaatcagctttgtggcagcacctctgccaacacgcaattgaaggctccttccatcaaacttcttctggtaaggaaagatgttgcgaaacatgctagcatcgtctgattattatcctttcattaagttattttgttccaattgatatctatcctttgttcattttaggtgttccttgttaacttttgttgtattataaattttgaacttttcttttaggtatataagcgttcttaagtatgcattagtattttgcttacattgtcttcgaatatgcaaatgagacactgttactgatttcttaaattaggtaattctcaacatgttcccttcttacctgagaggttcggaaaagcagtttctgaagctgctagaggagaatgattcagctgctgatgagctaattgtagttttatcaaaggcagctccttatatttctgtcaacttcgggtaatctcttcagcactatttgacttacaatgggtttaggttaaaatataaaatctgtgttgctaaagcaaaattcttgctagagaacttggtttacatggcattttcttaactttgttttcagattgattagatgctataagtttgttctagatattttttcttcttaaaaatggcttatgttatagcatgcctaggcaactaatatcctttttatggtttaatgagaactagacatactcttgcctttgcagtgactattaccctgttctggagaaggtttgtctggagggtactcgttctcaggccaaatgtgcggtttctgccatcagttcattggctggatcatctgaaaaatcagtcttttctgagttatgcgaggttattttttcagcaaccggaactttttgttactttcctttactccacatttacttgttcacatttatgtgtatgttaatgtaactaacttgggaaaatccttaggatataaacttattgtgctttatattctagggaaccctactcttggcttaagtagaattattgaagttgatcatgtgacagtctgctgtgtgcacatatctttcacagtacttcctttgaatatgtgatggttttccgtttttagagaaaattgagcaatgacacattgtttaatttgccttccttttactcagatgctcatggattctttgctgtgtggacggaacattccaacaactttgcagtctttggcgtgtgttgggcaatattctgttttggaatatgacaatatatatgaagatatcaccagctacatataccgggtttttcaagtaagtgacaagaggtgctattcttcgttatggagatatccagctagtaattctctgttttcttttaacttttctatttgttgatggtaatatttacaggcggaaccatctgacaatcaactcccttgtgatcagtcttctggttgttgcaactcttgcaagctaaaggcaagtgctggagaaagaaactcttttgcttcccgtttattagttctgataatatttactttaccatttaaacccaaagtaaaccaagtgtgacccaagtgtaaatgcctctgctcaacatttgccagttatttgtgtactttcgaagaagttcagcattttcatactttactccagaatttttaagaataatgctgccgcatatagaaataagtgtgaatcacattattgttaagaatggtgttatccctttattagctaggcaatgatttgaatgtaagccataagatattttagatttttgagttgtgataagcgtaatgaagttctcaaattctgcttacaaagatgaggtatattcagttttgacttgttgtctttggcagatatatgggctcaaaacacttgtgaaaagtttcttgcctcgtcatggtcaagtcgtaaggaaaattgacgacttgctaaacattttgaataaaacattaaaatcacaaggacacgatggcatcaaatcatggtatgttctttttggatagctatacaaatcaatcatgttgtacatgctcttaacacgaagccacaagttttatgtgctttcacaattccattatcagtttctcttggtacagtcttgatccttgttgacttgtcatatgttcgaaggtgcttatttgtccttgaaatttgtagcgaggacacaggagctaatgttagactggctgctgctaaagctgttctattgctttcaaggaaatgggaccttcatatttctcctgaagttttccgtcttaccattttgatggcaaaggtaaagggacttccatcttgccaacaaccaaacaatctagaaaagatttttgaatattatcctaataatttcaacagattgtttttcaatttgtcgttgttaactgatagcaagtcatgagtcgactattacagttgctacatactgcatcctgcatttttgtcacttctgagagtatctgtccttgcaactgcatataggaagtatcccaaagtagctctgattgtataggcttgggtgtatggtaatttatttctgaagaaaaggtgtttgttgtagtgttaaccttgtaagggcagtctggcttttaattgcttctcttggtttcatgtactggatatacgtgcttagaaagttggatttactttgtttatgatcgtctttttgactgtttacgtttatcatcttccaggattccaacgcctttattaccaagacttttctcaccaagttgtacaagctgttgacggaacatatgatacccagtagatatgcatgtgctttttcgttttctttatctagtccatgcagagatctgcacgatgatgtaacttctcatgctcctcactctaagaaggaaatatttcggttgtttcaaccctttaggttctctgaaaattttcttgtctttttgttcagtcgtttagatacatcaatggattcatcaacaaggctacaagagaatctcggacatgtcgggatttagatcaaagagaatcactcactgatagtccagtttacatgacagtgttcctaattcatgttcttgcacatgacccagagttccctttagaagactgcagggacgagcatatctatgctcgctttt

SEQ ID NO: 182934 - DNA, 144 bp, Arabidopsis thaliana landsberg
atggttcgattgttgcagcctaaacacatggtacaagctgtgaacgctttgcattggcgaaactctgtggaatttcataagctgcttaaagataatggagatttctctatttgctttaactctgagcaagtgttaccacaaaag

SEQ ID NO: 182935 - DNA, 186 bp, Arabidopsis thaliana landsberg
cctggcggaaagcggttcatatcccctggtcatcccggcgaaagccgggatctcacttctcttcgtgccacccccgaagaggtggaaaggcagggagatcccggctttcgccgggatgacggggagaaaaagcgggaatgccaaagggaggacagtagaacgacactgatcggctgtcttttctaa

SEQ ID NO: 182936 - DNA, 164 bp, Arabidopsis thaliana landsberg
ccactaatattaaccactcccaactgggagaattttgggttcgagtcattttggccacctacccgtgctttaaatttgaaatattttcgaacgtgtatccagatgcaaagcctcatacgattagttttctggatgtaggaaacctttggaatcccaacggttaa

SEQ ID NO: 182937 - DNA, 333 bp, Arabidopsis thaliana landsberg
  unsure (1)..(333): unsure at all n locations
cgcggccaatcagcccgtcatattcctggcttggcacggctggggcaagggtgacggtttcgggcacggaataggcggtgcgnnnnnnnnnnnnnnnnnnnnnnnnnnnntcgatgcacccgcgcatgccgcagcggcacaaggcaccattgggtgcgtggttcatgtgaccgaattcggtggcgccttcgtcgccacgccccatgatctggccgcggaaggtcatgcccatggcaacggtggagccgacgaaaacagtgcgaccctggcatcatgcaaggccgggtcaagccagaagcgccaacggcgagcagccgcccgcgcttgtgcagg

SEQ ID NO: 182938 - DNA, 130 bp, Arabidopsis thaliana landsberg
ggttttttttggtggagaagaggaagaagatgactcatctggttttggatatgggttaagaatttcgtcgaaggagaagcatgattctgaatttggcaaattggtgacaagtatggagagatggacatag

SEQ ID NO: 182939 - DNA, 206 bp, Arabidopsis thaliana landsberg
atggatcccgtattgctaggaaaatcaaaaagattagggaagtggatcgaatccatattgtttgatagagaggaaaatcatgataagggaagtggatcccgtattgtaagggacgagtagggtatagaagaagaactattgatttgtttcggatacccgtattgcttcggttcggatcggataaaatccgatatccgtggatatag

SEQ ID NO: 182940 - DNA, 513 bp, Arabidopsis thaliana landsberg
atgaacgaggccattcaggatttgttagggctgcgaggcaagggtcagcactacgaactgctaaaccgcttggacaccacccaggccgagcgccggcacagccgttattacgagaaaggcgcggtcatcctgcccgaacgcgattacagcaatgggttgaagcgcggcgaacagtacacggtgctcgacaccggccccggcaatcagttgaccgtgcgcggccaggagggcgaggtgatccggttcagccctgcgcgcttcaatcgcctgtcggtctacagccgcgagaaaaccgaattggccgtgggcgaccaggtgcggattacccgcaacgatgccgacaaggatctagccaacggcgaccgcttcacagtcaagagcgtgacgcaggaccaggtactactcgccggcaaggagggccgcgagattacgcttgaagccaacaagcccatgttcgcggggctggcctatgtctcgaccattcacagcgcccaagggctcaccagcgaccgc

SEQ ID NO: 182941 - DNA, 1237 bp, Arabidopsis thaliana landsberg
gtctattgtgggtatccacttggtcaagcggagttacaaacaaccctcaggacagtcctttcatcactaggtcagaactcaggcttatccaggctggaaaaccagttcaaccgtcaaccaattcgccgaaaccaaacccatctttgcgacttcttttgtcgaaattgcctacttgggcgatcatttttgctaatgtgactaacaactgggtgagtttgagtttaatagtatctttatcagagcaatacctcatcttttgttgccataaactcacacggttttcgttagttgttgttcacagggatactttgttcttctctcatggatgcctgtttacttccagacggtatatagggattattccatgttttcattcagatatatatgaacttcaagaaaatatatgatgttttatatctttgtcttgtttgatcataggtgtttaatgtgaatttgaagcaagcagcttggtttagcgctcttccatgggcgacaatggcgatctcaggttactatgcaggagcagcatcggacttcttgataagaactggtcactctgtaacctcagtacgaaagatcatgcaagtgagtattagaagtgccatacttggttaactaaatagccgacccataacattctaacggaaagtccctgcttttgtttgtcagtctattggatttatgggtcccgggctgtctctgctctgcctcaacttcgcaaagtcgccttcttgtgcagcggttttcatgaccattgcattgagcttgagttcctttagccaagctggatttctcctcaatatgcaagtacgttaactctcacccttatataaccaaccattcattctaaacttgattgatcactaacctaaccattttgggataatcttgaatctcacaacatcttttggtttctctttgcggaaacaggacatcgcaccgcaatatgctggtttcctgcacggtaataatgttatcagatggtggatcttttcttcttcttcttttgcatcgattttgtttcttgctgaaaaagttaggttttgtatatctggtgtgcgagacaggtatttcgaattgtgcgggtacgttggctgcgatcgtaagtacaatagggacgggatattttgtgcagtggctcggctcttttcaggcgttcttgacggttacggcctttctttactttgcaaccaccgtgttttggctcctctttgcaaccggagaacgagtcttctag

SEQ ID NO: 182942 - DNA, 69 bp, Arabidopsis thaliana landsberg
atgaggaaatacaaaaagtacgaaagggacgattctttcgaactaagggtaatcgttgcggatgaaacg

SEQ ID NO: 182943 - DNA, 1122 bp, Arabidopsis thaliana landsberg
aattatgtattcgtggtgaagttacaaaacacgaatggagaaataccatctggaaagaattgattgaatgggaaaggaaattagttgtacctagacctgaagatctatcaacgtcatcgcttagtggagttcaggaagacaaatctgtgtcaacttctctaggtactgcttaagaatcgtttgattcctccagtcctgtccaaatctcaacatgtctgacaaggtttagctttaggatttgcgcagacagttttggtcgtgttaaaggaatcagtgaggcggcgaacttcacttcatagcatttatcaggtatgagcttaaacttgttttttctctgaagctatgtgttttcttctgaataccttcgtattggcataaacagggagataaagaagctgtcccagtagctgttcttttctctggtggattggattcgatgattcttgctgcgctgttgcatcagtgccttgatccaaaatgtaaccattcccccacactgtttctgtctcggccaacaattctgaaactaatcaaaagaagtaatatctatttcttcagatgaagttgatctccttaatgtcagttttgatggtcctaatgctcctgataggatctccgccaaggctggaataaaggaactcaaaaagattgcaccttttagaaggttgaacttcacaagccttttatgaaaaatgcatatatctgttactatctatgttgatacaaatgtttttggaattttcaggtggaaacttgttgagattgatgctgatctgtcaaaactaggctttgagacaaaacgtgttatgtcactcataaattctgcttacacttacatggtaaacctcaaagtcttgagcattgtgattacattcctccgaacttgatgtgaattattcaatctttttttgctatgttctaggaccttaacataggaacagcattatggttagctgctcgtggtgatggttggattcacgaagataatggaaatccaagtgtagaggaaaataaccagcgggtcaagtataagtccgatgctagaatcctgcttgttggcgctggtgctgatgagcaatgtgccggttacggtaggcacagaactaaatatcgaaatggaag

SEQ ID NO: 182944 - DNA, 524 bp, Arabidopsis thaliana landsberg
ttgtagctacagatttgagacgtggcgattctacgagttcgatgccgatctagagcctgatccacctgctattcagcctgctgactccccaacatcagctgcaagaactgagagaacaggtgcatagaaatatttgaatgtgttctgctgcagcagttgtctctaagattgaatgtttcattgcaggaaatggaaaaggtggatctaaagtcattattgcgatagtcatcccaatagtttttgttgtgttacttgtaatttgcctatgcttgttcttgaggtggaaaaagaacaagtctggaggtagagtcaaaggtaacacaatcttcttcttcttgttatacctatcttgtcacaaaggatagactatttatcctgagaactattgtcctttgtcagaatcaaatgcagagaatgagttctcagattcgttgctagttgactttgaaactctaaaggaagcaacagataacttttcaccagaaaatgaacttggacgtcgtgggtttggttcagtttataag

SEQ ID NO: 182945 - DNA, 82 bp, Arabidopsis thaliana landsberg
gagatattttgatccttcatattggctgcggatattttacatcatatcggtcatagtaggtaaacgcgttcttcaactttag

SEQ ID NO: 182946 - DNA, 49 bp, Arabidopsis thaliana landsberg
cttcaccaattcgagacaaaccaatcaatgcggcagctcgattactccg

SEQ ID NO: 182947 - DNA, 321 bp, Arabidopsis thaliana landsberg
atgacgcatactgctaaagcttgtatggataggcctcgtaagattggggcgaagtacacaaacatgaacattgcacctgatgagaaaattgaaagttttgaacttgactacgatggcaagagggacagatggaatggttatgatccttcgacctaccatcgtgtgatagatctttatgaagcaaaagaggatgcacgaaagaagtacttgaaggagcagcaacttaagaaacttgaggagaaaaacaataatgaaaaaggtgatgatgcaaatagtgatggggaagaagacgaagatgacttaagggttaatgaagccaag

SEQ ID NO: 182948 - DNA, 89 bp, Arabidopsis thaliana landsberg
acgctttatcagcttgtcatcgagcttcaattcgacgtccgggtcacatctcagcctctgcacgacctctgccagcacgacatcccgcg

SEQ ID NO: 182949 - DNA, 209 bp, Arabidopsis thaliana landsberg
caaagcgcgaggcgctgcttctcagggcatacgatatggggatggatttgtgcgaggaacaaccagacattgtgactggtgaaatcaagtttaccatcgttgcgtcaggaacggcaatcgatcttgatgcgccatattcgctatatcaaacgagtcgtaagacgtccgaaatcgatgcagccgttgcgcgctacagggctaccgcctaa

SEQ ID NO: 182950 - DNA, 991 bp, Arabidopsis thaliana landsberg
atgatgaacgatgatcagctttctcctattggagaatcgagtgtcccagttcctaacaggatgctaagacgattgaagaaagctaaattgatctccgattcatgttctggatctgaaaccttcgattccgaaaaccccgacggcgaggatctgggtaagtctgaattgcagtctgcgaagggttgcgatgggattgaggaagaagatggggttccatctgatctcgacggtttgggtgtagaggatggagttaccgcgaggaaggtacttgattttgattatgtgcctgagtttaatcagacgatcgaagatctgggcgagaaaagtggaagcgaaatctctgattcggaaacaagagatgaaattagggtttctgaaacgacggaatctgaaaaggaggatccggatttcgagacgagtgtgcatgaatttgattccccaatggaggaattgggtgagaaaggtgaagacgaagaggaaattagggttccggaaacgaaggaagctggaaagaagcgaccaattgtggagacacgtgatggagagggaaaggagagaaagagagataagaagaggaagaagaagagtgatgactttgatgagctgccagtctctactgcttccatgaacatgactaagaaggtagctctctctatttcttactagtttcattttgagttaacattattcgtttgtgtgtttccttctcctgtgtttaattggtgttactgttcttcgttcgtctgtaggaaagaagggaatatcttgatcagcttcgtgcagaaaaccagagactcttgcgaggtatgatactctcaaaacactcttcagtgctcatttcaacgttttgcagggaactgaaaattgtttgtgtttttcttttcatgatagaaacgagagatgctgcctttgaagcagcccctcttgtccgaaagccgatttcatctgtcttggagaaaattcgcagaagaaaagaagagatttcaaaaca

SEQ ID NO: 182951 - DNA, 64 bp, Arabidopsis thaliana landsberg
atgcaaaacgagacagtttcaactttcacggaccaactattttcatggcgcctcgatatttcag

SEQ ID NO: 182952 - DNA, 403 bp, Arabidopsis thaliana landsberg
atggatgatctcttctcagcatatatgaatcttgaaaacattgatgtgttgaactcctctgaagctgatgatagcaagaacggtaatgagaatagggatgatatggagagcagcagagcaagcgggaccaagactaacggtagtgatacggaaggagagagcagcagtgtcaatgagagtgccaataataatatgaattcttctggtgaaaagagagagagcgtgaagagaagagcggctggaggagatattgctcctaccaccagacattacaggagtgtttcagtggacagctgtttcatggagaagttgtcttttggtgatgaatctctaaagcccgctccttctcctggatctatgtcaaggaaagtgtcccctaccaattctgatgatgggaactcgg

SEQ ID NO: 182953 - DNA, 455 bp, Arabidopsis thaliana landsberg
atgtgtttgatcctgaaattaattacttttgtttttgaatcttatgatggtggaccacagggaggaaacactgatgcacttgtacactattttggcgaggatccgaacgattatccatttgaacaaggtatacgatgaacttcatcatcctcatttgtgctaatatacataaaaagtggctggctcattgtttttacgtagctaataacaatacatgattatcgatattgcctgcagttaccgcgaccctcttgagttttgtaaggttgtttacgacagcagcacaccaagagaatgtcaaacaagcggagttggagaagaagaaagctcttaaggaagcagaaatggagaagacgaagaacgagtcaacctcacaaagaaaccagttgatgatagctgacgaaaaacttaagtatcaatttgcaaaatccgcctcaacctctcaagagaactga

SEQ ID NO: 182954 - DNA, 284 bp, Arabidopsis thaliana landsberg
atgatacagaagattcgagaagcagcgagagagaaagatagagaaatggaggagaaacaacagcggcagcagctaacactaaggaaagcgaaacgagtacatgtgcgaatatatagctctacgatttttctcactcttttatttttttctatttcttctattatttcccaaataaaaaatctgggagagacaatgctatggtgacctggctttcacactctttttagctcaccgacgcgtctatgttgccgttagattgttttgagtttgatctaaaccgttga

SEQ ID NO: 182955 - DNA, 426 bp, Arabidopsis thaliana landsberg
ccggccggcgaaatcagtgcggggctgggcgaggagcacacggtcgatgtctacccggtgcgtgacagtgtcttgctgcgtttgccggcggcgttggttttgcacgcttttcaacgattcccctaagcaatgctgcggctgacgcggctgattgcaaggcgcttgcgccagaacgcggattccaaaccgtatgtcgccgtgcatgggtgctacagtctggctgtgctgccggccacgccatcggcgccggcgcgcttggtcgccgagcagttgcaccgctgtctggcggtgctcggcgaaacgcatttgatcgacatgagcgtggtgggacatgccttctacgccgacgacacgctggtcatgcgttctgatacggtcgccgctcggcgcctgatcgaatacctcaacgcgctggaagcacatgac

SEQ ID NO: 182956 - DNA, 1624 bp, Arabidopsis thaliana landsberg
atgggggaagatgaaaagtaggttctgtgactgctaacttggatttcagaaattcaacaataatatgcctatataattagttgctgtcatgtaggtagaaaggttttgaggtttccattttcttctttagacatattttgatgatttatgagtcacatgagttctaatatcttatacctatttgcaatgcattaagtttacgaatttggaaaatataggctctacatatctcgacattatccattcactggaattttattctccaccataacttccagtttagatcctacaaaactgttgtgaccctaatcatacgaaattaacataggatttagatacaaggaggtatgggcttttgttatagacatatggggtcatgggaaactaggattggtttgttaactgcatcgaactgtaccaaaatctgtactctctgctagcttaagaatgctctgttttttagtatatgaagtttccaactttattagccttcctctaaaagtgaacaaaaatatattgactttgtttcgcatctatatcatagctcttattactgtgtttccaggtttcttgtaaagaggtgcttatcagatgggaatattctccatgaaagtcacactccgatgtctgcaatgagtagaaagaatgaaagcatatcacatagaggttttgtgtcgtcacaccaagtgactcatactcatataatttcagaatcatcaccagatatgccagctgccggtgatgtaacattatcgaggtttgtttaaatctttcttacgtttttcttcattatagctagataaaatatgtactgctggtacatttagcttgagtgtccatgctgtgtatgcattataattttcctgggtcaaagctctgttgtgcttgtcaattctatccatgattatagctcatatattattcatgaggtggttgtctttactctttgtgcttcatgtagcttaagattttgtgtgtactagtacataataatactcgtctttgttgttggtcttaatattcagctataacatctttgtaggtgtactccgtcaatgcctagcacacatttttttggagatgtccaaaaagttcaacataatggtagtagctccatttacttgtccgagcaagaagatatgtctagtgtctcaaatttcgttgatattgagtggctttcgtcgtcagaaaatctatgtgagaacgatcacttgtccaggtaaaattactgtgcactaaagagatcaattcacgattttaagcagtcaatagagcaaccagatgtcttcacatagaagcttaaaaattcacatctatagcattacatcgtccatcaatctaaaaatccatctgattatgttccatctaaaaatgttatgaccagggttttcagatatccatctgcgtatggctaatataacaataatattcatcatgaatgatcaacaatttttttaatcacggtttggtcaattttactgtgcaagtctcattgcattattttggcaggccgtcagcgcttacaatatattcaaccgcggagacgtcttcatcagagaatatcatcactgaagtaaaacaattgacgccagctatgagagagagtgggtcaagcagcagtaag

SEQ ID NO: 182957 - DNA, 375 bp, Arabidopsis thaliana landsberg
atgatcatgcacaggctgagggaggaaagcatcaccaccaaccagcacatccggcggcaggttaagatcgacagcaacagccagcgcgagcaatccaacatacaatcgagtgcacaccagccacgctagacgtacaaccggaacctgcgtggccagacacccattgacgacgtacacggaagactcgcgaaacgcgaagcacgagtcactggtccgatcagttaccgatgcacagtatccgataacgagcgtaagccaaacgatgacggacgccgcacagacctaatcagctccggcatcacggggaccggtcgcagtcgtggcggcgccatcaaccgcaccagaatcggcatacggcgcagagagagcgacaac

SEQ ID NO: 182958 - DNA, 109 bp, Arabidopsis thaliana landsberg
gtccttggacaaactcaagaatcaaagagctcttatgtagatatcattaaacgaaatctggctgatgaaacacttgctgttgctgtgaacaaccttgttgccttgaaag

SEQ ID NO: 182959 - DNA, 88 bp, Arabidopsis thaliana landsberg
atgaatgtcctacaggcaaagcacaaaatgttgatctacgcagaagatcgtataagactggtcatcaccagcggccatagccgggaaa

SEQ ID NO: 182960 - DNA, 201 bp, Arabidopsis thaliana landsberg
gccaggatgcgatcgtcttcggcgtcatcggaggcctcaagacacgcaaagcatggaagcggcgcactccgatcgctgaaggatggatcgaggacggctctgcgcgcatgaaggtcatgtggttcaaccagccgtatcttgccaagatgctcacggatgggatgtatgtgaagcttgccggaaagataaccggaagcgaag

SEQ ID NO: 182961 - DNA, 112 bp, Arabidopsis thaliana landsberg
atgattattatggcctgggatggcggacaaccaagttcagtctttggagctgatgtattcaagaaagttctgagcgtgtttatcacagctgcaataatgaaacttggacaag

SEQ ID NO: 182962 - DNA, 706 bp, Arabidopsis thaliana landsberg
atgacaattcaaatctacgcaaagactcttacagaaaagaccataacacttgatgttgaaacctccgactccattcataatgtcaaggctaagatccagaacaaggaaggcattcctttagaccagcaacgacttatctttgctggtaaacagctcgaggatggccttaccttggctgattacaacatccagaaagagtcaactctccacttggttctgaggttgagaggtggtatgcaaatctttgtgcagactcttacgggaaagaccataacccttgaggtcaaaagctcagacactatcgataacgtcaaggccaagatccaagataaagaaggaatccttcctcgccagcagagacttatctttgcaggtaagcaactcgaggatggtcgtactcttgccgattacaacatccagaaagagtcaacactgcatcttgtccttcgtctttgcggtggtatgcagatatttgtgagtaccttttccggtaaaaactttaccagtgacaccctcaccctaaaagttgagagctcagacaccattgaaaatgtcaaggcgaagattcaagacagggaaggtttacgcccggaccaccagaggcttatctttcacggtgaagagctcttcaccgaggataatcgtactcttgcggattacggcatccggaataggtcaaccctttgccttgcccttcgtcttcgcg

SEQ ID NO: 182963 - DNA, 2492 bp, Arabidopsis thaliana landsberg
atgagtgcttatatctcagaaatccatctggggccactaataaagacaagtacagttgaagattccaaggtgagtctgacttaactaaagtaataatatttcacatcactgtcctctctctctctctgcagctctaaactgttttgaaacctaattgcagaagaagtccagacaaaaaaaagaggatgaatccatcacaacaacacttaccaaagctatgtcctaagcgcctattcctcttcttcactccattcttattgttctctctctattacatcctcaccactatcaaaaccatcaccatctcttcccaagatcgtcaccatcctccacagcttcatgtaccttccatttcccattactactcccttccagaaacttcagaaaaccgatcgtcaccacctccactactactaccaccaccaccatcatcctcatcatcgttatcttcttactttccactctgtcccaagaacttcaccaactacttgccttgccacgatccatcaacagcacgacagtacagcattgagagacactatcggagagagaggcactgtcctgacatagcccaagagaagttcaggtgtttggtcccaaagcccactggctacaaaacgccttttccatggcctgagagtagaaaatatgcttggtttaggaacgtaccattcaagaggctagctgagttgaaaaagactcagaattgggttagacttgaaggagaccgttttgttttcccaggaggcgggacttctttccccggtggtgtgaaggactatgttgatgtgattctgagtgttttgcctttggcttctgggagtatcaggactgttctcgatattggatgtggagtgagttcagttacatgaatagacaccagaacttgattcatcttgatattttatagcagtattactactttcgattatgatggattccatgtgttttgttggacccaaaatgtcaggtagcgagttttggagcctttttgctgaactataagattttgacaatgtccattgcaccgagggatatacatgaggctcaagttcagttcgcattagaacgtggactccctgctatgctcggtgttttaagcacttataagctgccttacccgtcgaggtcttttgacatggtccattgttctagatgccttgtcaattggacttcctatggtaatgtgtgtatttaaatagacctgtttatatgatttagttcactgtgttttgaactgcttgcttcatccactctgcttctgatactgaaagagagaacattttatccagatgggctttacttgatggaggtggatcgtgttttacgtcctgagggatactgggtgttgtctggaccccctgtagcatcaagggttaaatttaagaaccagaagagagattccaaggagttgcagaaccagatggagaaactaaatgatgtttttagaagactttgttgggagaagattgctgaaagttacccggttgtcatctggagaaagccttctaatcatttgcagtgtaggaaaagactaaaagctcttaagtttcctggattatgctcttctagtgaccctgacgctgcgtggtgacttcactttcccaaaatctaatttgctctgcatcttcaaaagcttaagcttgattcggttggatctttttattaataggtataaagagatggagccgtgcatcactcctcttccagatgttaacgacacaaacaagaccgttctcaaaaactggcctgagagactaaaccatgtgcctcgaatgaaaaccgggtcgatacagggaacaactattgccggcttcaaagctgacacgaacctgtggcaaagaagagttttgtactatgacaccaagtttaagtttctcagcaatggaaaatacagaaacgtcattgatatgaacgcaggattaggtggttttgctgcagctttgatcaaatatccaatgtgggttatgaatgtggttccatttgatcttaaaccgaacacactcggtgttgtgtatgatcgcggtctcattggaacttacatgaactggtaaatcactcaaaacgtctctgatatcatctaatttgacatctcttataccatattttccggtttttgtaggtgtgaagctttatctacataccctcgaacctatgacctgattcatgccaatggtgtattcagtttgtacttggacaagtaagatccgtccctaacttgaaaactttgatttacattcatttggtgatcaaagtgtaatggtttctttttctttgtttcttatgatagatgtgacattgttgatatactcttggagatgcagaggattcttagaccagaaggagcagttataatacgagaccgttttgatgttcttgtcaaagtgaaagccataaccaatcaaatgagatggaatgggacaatgtatccagaagataatagtgttttcgatcatggaacaatactaatcgtagataactcaattaaataa

SEQ ID NO: 182964 - DNA, 81 bp, Arabidopsis thaliana landsberg
atggaccttcaaattcgacgattacacatccggaagcgtaaaattagccggcattcaaacaaatttcatacctcagaggac

SEQ ID NO: 182965 - DNA, 89 bp, Arabidopsis thaliana landsberg
aaaacttttacagagaaaagcgagagaaagaagaagaatggagactgagtctgagatttctgattcatcgtcaagcaacaactcgatga

SEQ ID NO: 182966 - DNA, 378 bp, Arabidopsis thaliana landsberg
gccgtgttcgacgtccgtgacgcgaacccgggtgccgagcaggtgggcgcgcaggttcagcgaaaactggcggacgaaggctttgctggcgccgtatgcattgccgccgggataggggtagctggccgccgtcgagccgagattgacgacatgcccgcggtcgcgcgccaccatgccgggcagcacggcgcgggtgacgtacatcaagcccttgatattggtgtcgaccatggtgtcccaggcgtccagatcggcggactgggccggttcgagcccgactgcgagcccggcattgttgacgagaacatcgattgccgacaggtccgccggcaggccctctatcgcctgcgccacagcgccgtggtcgcgcacatttaa

SEQ ID NO: 182967 - DNA, 253 bp, Arabidopsis thaliana landsberg
atgttgtcaaatcttccaacggatttggtagaggaaattatctctagagttcctcggaaatatatgagagcagtgcgattaacttgcaaaacgttttatactttatctaaatgtaagagcttttccaagctacactttggtaaagaagcaacaacaaccaaggaaggggagtcccagatgatattgttgatggattacaatctttatttgattagcgttgttgtcgatggtgatccgtatatagagtgtaaag

SEQ ID NO: 182968 - DNA, 1057 bp, Arabidopsis thaliana landsberg
  unsure (1)..(1057): unsure at all n locations
atgcaggaaatagaaattcaaaaagaaacagtaaaacactcgaccaacacagctcgttgccaagtactgggtgtggttgagtgactggacgagtaacagacagaaaatgtaacagggatactcgactgcacagtctcttaccagacaactgggtggtcgagtatcaggtcgagtaacaggcaaaagttgcaaaactaagcaacaggtaacaaaatgcagtaaacaatagcaaagtaaacaagaaatcaattagatgagaaattctcgaggatggggtaattgagtagttttgtttcctcagttntcaagtgattgacatgctcaataaattatccctagacaacaagttcgataaccaaatctaagtgtcaaaacaatagagaccctcacagttaaccagtcccagaatcaatcaccattgacgagagctaacctaataggcattacgaatcaacaagtaaagccaaaacgctccatgtaaccaatacctttgtacagagccatgaatgtctgggctcaaattccagtttatcagaaagcaataggcattaagaacaactaatccagaagggatcgaaaaatcaaactcaaccacctagcataatgagaattctaaactactctaacccatcctcagaaacctactcactactcagacatcattgcaaaaagcataaacgatgataagaatgaaaacatgatagcaacagagtaatagcaagatgataacaggatgaacaacttagtaaaagaaatgaaaagcaaatactgaatagattaatagaaatccggattacaaaatatcaagaacacacagtgtttgcggaataaaactttgtcttcgaaaatgtaaaatacatgctacttattgggccggattaagaactgtattgggacgacatcatattgggatggattaagaactctactcgacccaggtggtcgagtgattggtcgagtgattggtcaagtggaggatgatggtgagactcgacttggtgacagagtggacaatcgagtggctgatgacaagggactcgacaacgtggtagagtga

SEQ ID NO: 182969 - DNA, 1601 bp, Arabidopsis thaliana landsberg
atggtggagccggtgaactcttcgcttgggaaaatgctattggaggaaattagtccagtggtcatggttctatgtacgcctcttgttgaagatactttcctcaggaacggcttatcctttgtggaaacgctcaagccattctgcaactttagtaacatcgatggtgaattccttgatttgatgttgattttgttctgcgtttactatctgaaacgtctaatttgacgattccaattgcgaaattttgcggtgcagtgcctgttcggacatcgagcgatcagctgtatcggctaaagaagtttacattaagattgttttatgcctccgatatcaggcaaccaaacgtagaggtatgtaaatttgcttcggttgaatatgtgaatgtttgatgtttgaacatttaaggcacttgataaccagttctaactcagctggatcacctttaattgaaacatattgaaatcattacatgttgttgtggtagatgttcttccattctgcatgtttggtgttgagctcaaatttgattatgtttacttcatggctaggttgctaagcaacgactagaacatgttattactcaagctggggagaaggattttcaggatttgaaatctgaccctcctcaaattactgatatactctctagtaagtcactactccaaattttgtttctgtgattagcggaaaatgcctttataagttttttaaactcttaacatcgtgcactaacaatttataaataattgagaagccgaattctctaactcgttgcttttctaatgctgtcgtatttcgctccctgcagatccagagtctgaaattgcaccctcatgggttcaggtttacaataaagaacttatacgtacattgtcgttttcagaccacgaagcttttgatcatcctgtggcatgtaagatattaaatggattttagaaaatagttgttttcaggtctttaaactaggttttctgatctatgatgtctcatagagttttctgttgagttccaagtaattcgaaatgtgctttcaggtctattggtcgtttcatcaaaagatgaagaacctataaaaaaatttgtagatcttttcaactccaatagattacctactgatggtacaatggacccaaacattttgaagcattacttgttggtgcatgacaatcaagatgcaacaacagagaggtagttgttccttattccctcttatatgatatgattttcatcataagtttatgatatgattttcgtcataagtttatgggtgtcaaatgtaatgttatagttgactagatgatatttcttctgtagaacgtctaaagttctgtcagagatgagaagtcaatttggaaataatgaatgcaacttactttgcactaattcatctaaagaggggaacgtggaacatcaggctaatccctgggcttcatttgtaagtcactcatccgaacttttatacaacataatttcaagtctcatacatcaatccatgtcatttttgtaagttcattatcttgatcatcaatttttcttaaaagaaatcaagtgtttcggccgacaaacttggatgtgctctcactggtgatgatattgtggag

SEQ ID NO: 182970 - DNA, 175 bp, Arabidopsis thaliana landsberg
cttcatcggaatctctgcgtctctgacgccggcgattcttccgtccaccgaagcaacccgaaaagcaacccatagtcccgaaaattctcaaggtctagcgagagaagaagagaaacttcatgcgtgtggtttccagatatttgatcaagcattaataggtcgacatcgaaattga

SEQ ID NO: 182971 - DNA, 822 bp, Arabidopsis thaliana landsberg
gtctctggaatccattggtggtacaaaactgaaagtcatgctgcagaacttacggcgggttattacaatctcaaaaacagagatggttatcgtgcgattgcgaaaataatgcgtagacatcacgctatcttgaatttcacttgtctagagatgaaaaacacagagcaaccagcaaaagctaagagtggacctcaagaacttgttcaacaagtaagcaagttgaatctgtaaataccacacttttgtatattcgttacttgaattgattttggtaatggttaaaatttgaaggttttgagctctggatggagagaagggattgaagttgcgggcgaaaacgcgcttccaagattcgatagaaatggatataaccagatcatactaaacgcaaggcctaatggagttaaacaagatggtaaaccgaggatgtttgggttcacatatctcagactgtctgataaacttctcaatgaaccaaatttctcaacgtttaaaatgttcttgaaacgaatgcatgcgaaccaagtaagcaatcaaaaagagccctcttcgagatgtgtatttgctccaagatcatttaacatttttctgaagttgtgtgtgcttttcatgattcaggagtattgttcacagcctgaaaggtataatcacgagctgcttccgttggaaagatcgagaaacgatgaatcattggagatgtttatggaagaaacagaaccatttgatccatttccatggctggacgagacagacatgagtattagaccctttgagagtgtactgtctctattgcgaagcacatttttgagaaagaagtcctag

SEQ ID NO: 182972 - DNA, 151 bp, Arabidopsis thaliana landsberg
atgacagcaaaagattcgtcagaaccagttactacgcttactcaattcaacaatatagatgttgtaatcaccgattaccatatgcctggtttgaatggtgttcagctaaaaaagagaattgatgaagaatttgggaatttgcctgttattg

SEQ ID NO: 182973 - DNA, 911 bp, Arabidopsis thaliana landsberg
  unsure (1)..(911): unsure at all n locations
atgacccggaattcgtatcttaatccacggttacaacagaacgcttcgtcggtacaatcaggggtgagtaagaacgatgatgtggagcgggttatggatatattgggtcgggcgaagaagaaaaacccggttttgggttggtgattcggagccgggtcgggttattcgtgagatccttaagaaaattgaagtcggtgaagttgggaatttagcggtgaagaactcaaaggtggtttctttagaggagattagttccgataaggctttaagaattaaggaattagatgggttgcttcagacccgattaaagaattcggatcctattggtggcggcggagtgatacttgatcttggtgacttgaaatggctagtggagcaaccgagttcaacgcaacctgcggctacgcttgcggtgtagattgggaggacggcggtggtggagttacggaggcttttggagaagtttgaaggaagactctggtttatagggacggcgacgtgtgagacttatttaagatgtcaagtttatcatccatcaatggagactgattgggatcttcaagctgtgtcggtggcagctaaannnnnnnnnnnnnnnnnnnnnnngaggtgggttgtgttaaagtttcttctttttgctaaagaaaaatctcagcttttatgattttttttcttagcctagattcatgttttgattcaggcttgcgaacaatttggaatcattcacgccattgaagagctttgtgcctgcgaataggacattgaaatgttgtccacagtgtttacagagttacgagcgagaacttgctgagattgattcagtgtcttctccagaggttaaatctgaagtagctcagcctaaacagttgccacagtggctgttgaaagctaaaccggttgatcgtttaccg

SEQ ID NO: 182974 - DNA, 345 bp, Arabidopsis thaliana landsberg
atgattacaggcatcgatgacctcaagtccggaaaaattgttacacccttgcctgcaaaagccacatttttggatgatcctttgcgagttctccgggctgttcgctttggtacgtgtggtttattttcttgttttttttttcattatatgttattacatttcccatctcagatcctctattttgagctctgtggttgtcattttgtctgtccgtcctaatatactgccataacaggtgcaaggtttggttttactttggatgaagaactaaaagaagctgcttcaagtgaggaagtaagggtagctcttggagaaaaaattagcagagagcggattgggaatgag

SEQ ID NO: 182975 - DNA, 170 bp, Arabidopsis thaliana landsberg
ttgtgatgtctgacaaaagtaagcaagctgagagttcgacggactcggattctctccaacagaagtctgatgaaaaggaagagatccttagtccaagatctgctgaggaaactaacaaagaaatcaagaatgtgaaagaatatgaagtgccagaatgttctaaagaaaag

SEQ ID NO: 182976 - DNA, 111 bp, Arabidopsis thaliana landsberg
ttgcaattgtatatcacaaatcaagtgcccactggaataattgttaggattcaaacaacacataagaaagagaagaagatgaaacctgaagaaggccacttccgagcttga

SEQ ID NO: 182977 - DNA, 52 bp, Arabidopsis thaliana landsberg
gtcctactactatcctttcgtaaatcgtaacgacataaagaaaacaacatga

SEQ ID NO: 182978 - DNA, 444 bp, Arabidopsis thaliana landsberg
atggcgaaaggaaaaggcgtggagatcaaggagagcgaactctccgaggcggtcattgccacgacctcaacgctcgtggcccagggccggccattgaccgatgcggaccgtgccaagatcaaacaggtcaccctggaccgtttgatcatgagcaagctgatggcagccaaggcgctgccggaagacaaggcggaggccaagaagttcgccttggattacatcgacaagatcagaaagcagctgccctcagaagaggctttcaagcggcgtctggaagccaatggcttgaatgtcagccagctgcagtcgaaggttgaagatgagatggtgttgcgcaaggtgatagaacgtgagatcagctcgaaaatcatcatcaccgatgagcaggcgcaaaaattctacaatgataatcaggacaagtttgatcaacccgagatggttcac

SEQ ID NO: 182979 - DNA, 532 bp, Arabidopsis thaliana landsberg
atcgtgtacgactacctgacggcgcacggtatcgacgcgagccgcctggaaggtccgatcggccacggcgagaacgatccggtcgacacgaacgacacggatgccggtcgcgcccgcaaccgtcgcacggagctgcaggttcagcagtaagaacctcagtcgtacccgagaagaagcccggcatctgccgggctttttctttttgtttccgcgtcatgctcccccaccgcggcatgagatccctggcgtgacctcaacgcacggcctgaagatggctaaggcgaggcagctggggtctcttggtgatatcgcaagaaaaagcccgggcaacccgggcttctctcgtcttagcggagcgactcgatcagtcggagcggcgctggaaccggtaatgcccgaccagccactcgttgccttcatcgaaaccgaacaactccgcgcaggccatccagaacatgcgccagcgctggtgccaaagattcgcagcctgctcgccgtaggtgcccgccagtacctccaggatttcctcgcg

SEQ ID NO: 182980 - DNA, 773 bp, Arabidopsis thaliana landsberg
  unsure (1)..(773): unsure at all n locations
gtggagccaagctggcccgagcggagggaaatattgccagggagcgcgccgagcagctgcaggagcggctcatcaccctggagagccgcgtggagcgggccgaggccgcgatgcgcgcggaggccgaacggacgcgcacacagcttgtgaacacatatcgtgagctgggtgcgcggaccggtgacttcgaagtgccggaccgagagctcggcgttcgctgtctggaatgggtgcaggaagaactgcaggaacngcgcactgtcgtgggggggttcatgtcgtacgcctccctggtcacctgcgagggggcgatgaacgcgctctcccgcgaagggtgccggcacttcgaggccttcgaccaggcggatgaagattttgatcgagatatctataaggtcgaagcccggttgtgaaggaatccgccggggccctttatgaccggatgtggggtctgtacggtcgtgaggtggtcagggagcgggccgagactgcgagggctcaggtaacgttgttgtttgtttggcggttgctgaatgcaggctgtgcgtgtgtttgctgaatctgtgagtcttgtcttaggcggacgcggcgagcgggtggacgacttcggggccctgaacagcgcgctgccagacccggagcctgacctcgcggaggctgtgactggggccgccctggagccgcccccggagaccgcagaaggcgcaccggatacctccgcatccgctgcggccggcgaagacctgcccctagagaccgccgaagcggcctga

SEQ ID NO: 182981 - DNA, 74 bp, Arabidopsis thaliana landsberg
agttgttgagaacagtgaccggagtggaggagcagtacccggtattcgcggacgtgcgtcatcgcagacgatga

SEQ ID NO: 182982 - DNA, 265 bp, Arabidopsis thaliana landsberg
atggtgaagacaaaagcaaaaaaatatggctatatcaatagggaagggaaattattcattgatactgtatataccagaataggcgatttcgtggatggaatggcagtagtatgggggaacagcgatagaaaaaaaacagaagttggggttattgatacgctgggcaattttctgatcccctacggtaaatttgaacggatttcagattactatcatggattgttcgttgcatcaataccgcctgaaccatgggattcaatcacag

SEQ ID NO: 182983 - DNA, 512 bp, Arabidopsis thaliana landsberg
atgccggaccgattgaggcgccgcagcgcgtcgacgcggctcgcatggggaacgatcgcgtcggcatcgtccagcgtgccttgccataaggtctcatcgaggtcccagatgaccagcttcaccgatttggcgaaatcgccggacgtcttcttcttctcagtgagccggggcggatgcgttgcctgcacgcctttcagatagaacatcgccgattccgcggcgaagccttcgatggcacgaccgacaccctgccggaagcaggaggaaatcggaatatcggctgccgcgagcgtctggaaattctgcagaaaggctgccggcgaaacggcgggatccttttcgccatggatgagaaggaccggcgggcggctctccagctcccgctgcaggtcggaaaagccctgaagatcgccactgaagccgatgaccgcgcaaaacggttccttctggcgcagcgcgtgatagagcgccagccacattccctcgacatatccgacgagcgcgatccgatg

SEQ ID NO: 182984 - DNA, 260 bp, Arabidopsis thaliana landsberg
gcaagctctacatcgattaccttcaaaaccggcctaaggccacgctcgccgcgccctattcggtgcgcccgaaacccggcgctaccgtttcgatgccactgcattgggaggaggtaaagaagggattgcaactgaaagacttcacgatcttcaatgcgatggaacgcatccagcgcgaaggcgaccttttcaaaccggttttgggtgagggaatcgacctcgaagaagtaatcggcaaaatggatctgactgccggctaa

SEQ ID NO: 182985 - DNA, 420 bp, Arabidopsis thaliana landsberg
atgtacgaagatgaggaaaagcattactctagttgctgcaactacgtcaacaaagaaatgcaagacgtggcatatctggtttgcaactggaatcttgttgagttggatgattgcactccacaagctaaggtggcttatacttcacctgtttctcaagacaacaacgcatggtacttcgacatcgggtgttctcgtcacatgactagtgaacaatttgttctaaattattttactgtcatcaccaatgggaaggtcacctttggagatggtggaaaaggaagcattaaagtgaaagggaagatcgagatagatgatcaaccgcacgtgtcaaatgtgtattttgttgagggacccactgctaatctgataagcatcagtcaagtgtgtgatgatgacttaactgttacgtttacaaagact

SEQ ID NO: 182986 - DNA, 4483 bp, Arabidopsis thaliana landsberg
atgaagaaaagaaaggataatgatgaaaatgatgtacatcaacaacaaaaaaaccagaaaacaaaaaaaagaacaagacgtttgttcgatgaaaccaactttccttcgcataatcaagcacttgggtcaaaaaatttagtttccgtcggttctgtttttggtagagtgcttagtgacattaccaatgtcgatcttaccaaaagaagtcaaactcctcatactcccgtgtccttactgctatacccggcaaataataatgggagttcctcacccattactcctattaattcgttgaattcaactcttagaatagtattctcatatatcatcatcatcgtttctttcgactttatattgaaccatatatttttgcacttcaaaggagacagagtaatttataatacaccacacacaagagaaaatatagtcaatccatctaatagctcagaagttattaatccaacttttacaagagctgccgcaaaaactagaaaatcaggttagtaagttatatactatttgatatacaacattatcatataaattttaattataaaaatagtattttatttataagttatttttgatttttatattttttaatgcaggaaatttatcgaaaacaaaaagtataccatcatcacttcgtaagaagaccaatgtcaaaacaaccaacaatggtgatattgttaacaaaacacctattagaagattgcctgctgttaaaagaatggccagaaaaatatcaaacccatcaggttataaattttttttttttttaatactagatacaatacatattagttaatattattatttttcttaatttggttgttgttttctcagaaggatcaccggacttcttaactcctaatcaaactaccccaaatgtaaacacattgtttggggtatattactctggaaatgtcttatcggatataacaaatatgtttggagaatccatcgtctctaccattagattaatgtccaataagaaggaaaaagtatcaaatgatcaaggttcgatttatatttgaaagtagctatttatgttatattttagtatgtttgtctaatgtccaatagtcaaacaaaaattatattgtttaataattttttttgttgattgttagcagtcccccattcaactaaattacaatcaaaggagaatgctgcaagtattgtacgtgacaacacgctcaatgatgaagaaatttatcattctgaagcaatatattctgatagtggtataatgttaatcatacttttagaattaccacctttatataaactgtataaaatgttttatttgtgctactttcatgttttcttctgtctacatatagttcagaggaattcaatgatcatatatttgactgtagtagtcaagaagagtatgagtcagacaaagtttcaccgagagatcaagttgttggaccaaataatatgattgacatgaaagatttgttaagaaggaatttaagtttaaagaagattgcgggatttcctggggattttacagtgaatagagagcacaaaagaaagacaagaagacatggagggacccgccgctgacgcccatgtcttccatgcaagaggccaagagacatggaatctcttcactcccacttgatctccacgcgaccccatcttcactcgatttctcctccatcactcgaccttgttttgtcctccataacccgataaactcgaccccatccttcttaaatcaacgctccctttttcttcttttactcgacctcgacgccatcaccatccccacacctattaaactcgaccccattccccttattcatcacaaccaacaaacccatcctcatcaaagccaggcacacgaccgcttctcactcgcctcttcaccaccgtctcgagctaccactcgatcgctcctcgccatctctttcaagatcgtctctcatcaccaaacactcgacttcgtcattccccaacatcaacaacgtcactcgactccttatcaccatcgttctctcatctctcgagtccagccatcactcgacaacaccaccgtttcatctcttccgcgagctcaagttcactcgaccgctcctctccttcctttcaaagccactttacttcgccattacacaccgcctctctatctcattatcactcgatctcttgaatcaccaccgcagctcgtctcaaacccactagttactcgatcgcggctccttcacagcttcatcgctctcaccgccatctctcaacatactcgaccttgcgtagtcactcgatctcgccgcttctcaacgcctctccatcgtttccatcgccgctgctctcatccccacgaaagctcgtcatcgccggttcactcgattaagcaaacaaactcgacctctttcaaaccgtttcaccatctctcgcctctaaaggtcactcgatcgccaagcacaaccaaggaatcactcgaccgcgagttcacccaaccgaaaaaaaaataaaattaaaaattaaaaaaatttggtacactcgacctgtttttggtttgtgtgttttgtgtttctagtcttgttggaactaacgtattaacgtttatttttgagttacatttgttttcaggtttcgtaatgagtaactacagcggagaatcttctatggaccctgattacaatgtggatgaagctgagtcctggtccgctagaccgagagagcaacatgtttaccagagcttcagggatgaattcgaacgctctgcagcccgacgtaatcagagaagagctgaaatcgccagaggaaagagggcgatgtcaagtaggtatgagctgattgatgaggatatcgaaagtgagtatgagccagagtcatggcgcagggagacaaagctgctgaacaaactcgacgaggttacagtggaggagtatatcagattcttcgagatgaatgacttctggggaacgaggtatccgtgttatgagactttagcccagctggggttactagaggacgtgcagcatctgttcgagaagtgtcatctggagacactcatgtcttacccttacgttgcttataaggaggagacaatcgagtttctttccacacttcaagtggagatgtatgagggactcacagactttgagctggataccatggggttaggcttcttgacgttctcagtggatgaacagcggtatcagcttgtgatcaagaagttggaagaactgtttggtttccctagtggaaagggaaccaaacccagatctgacagagaggagcttaaggatttgtgggccactatagggaacaatctaccgctactttcagcgatcagtcgccaacgtcttttactccagggagtctacaggcaccgtgtctaacacggacatggagatgatagattatgcgcttatagggattctccgccggacgaaggggaagaatgtcttgagaggcgatctcaacaacgcaccaccagtaatgcctctgttgatccatctgtgtggatacaggaagtgggcgttgacaaacaggaagaagaaggtgagaggagcactatgcgtgggtggcgttgtgacgcaattctggaagcttgtggagtcccctcaaggaaccaggtttagcaccgaggatgatggacttggatcatttgcgcagatgtgagttcttggagtttgacatggctggcgactttcacagctacaggttcgagcattcatcgattagaattgccaacattcttctcccctgcattgacgctactaggattcttgagggcaggaacattgacttcaagcctgcgcttgaagatctttatttcgagggcagtccgccaaccgaggagtttagtcacaccgaaggagctacaacagaagatgttgatgagacggatgatatagatgaggcagagtttgacacgagcatgtatcatttcagtgagcatatacctcctgcgagggaaagcaaaagtttgagcgaagctcacaggaacaacagcaagctgcagaagtggtgcaagaaacaggacaagttactcgccaagtgcttaagggctatcaagtttctgaaggacaagctcagctgctcctcttccactacagctattccgcagggacatctccctcaggacatgcctacgaggagatatgacgcgcccgagccaagtcggcgcaagcctgagcctagagagcaggagattccgcatgtccctgcgaggcattcatcattcgagccttgtgaatctgggagtaagaggaggaccacactcactcgatctagcagtaggagcggacgacttctgcagtctcgtagtttacgcgaccgcggtgctggccgcagcagaaggagagaggtcgagtttcctcagagcggtgctggccgccacagagctgatgaggtcgagtacccacctgctggagctgatacggaacaaggaggttcgtctatggcctgggagcaatcgcaggcagccattgacgagcaactacgttcattcttcgactga

SEQ ID NO: 182987 - DNA, 798 bp, Arabidopsis thaliana landsberg
aaaattaacaggaacaacaccaattccaactctcattccgcagtgtttcattgaaagtagcttcctctatatgttacaaacttacaatacacaaatcttatcagttatcaccaaagtaagtgattccaagaatgaaaattgttaaaagctcaatcttttctgaaatctcaacttacctgcaaattttgtcacaagggagaaattttggttttatcaatttctgggattttaatatctacacaattttattgggaaaggaagaaacttgcttctacaaacgaaaccaccggaaaactgaagaaggtttggttacctgagagtttgagagagagaacacgacgacgacgaacaaaagacggcgttaaaggtatttttcacggcgttaagaattaactgttcactgtgctctgtctcttccgcttgtttcatttacgattgggctttttctgggcttccttgttgggttattttattttgtcgtcaacctgtttcactgattttgaaaagagtacaataatgaccaaaacccaattacacaacatcaaagcccaactataaatctaaccaaaatttacaacgaaataaaatattatggttaatcatcaaggacacgtgtgcttgtgcatgttgagattggaaagacgttagtgaatcatcaccgccgccgagttgaaatcgcccatgaaaattcctgatcagaattcacctatctccactatagattccgtcaacgaacaactactttctttgatcactgactcaaatccttttgcccagttcttcgagtatgaggagtaa

SEQ ID NO: 182988 - DNA, 355 bp, Arabidopsis thaliana landsberg
atgttacttcgaacaatgccggagccatccaccaccgaggggcaacgtatccagggcgaactcaaggaccttctggaaaatgccgcagcccgacgagccgagagctctgcctcccgaaggcgaggatgcccctcggagcatcatgcagcgtcctcccgacacatgcgcgaggcctcggtccacaccgagcacacgggagacgggacacctgcagcccgggatcgcctcggcgacgagcaacactgccgtgaccgtcgagcccgcctcgaggaaagggtgcaccgaggctaccaccccagacgtggaggacgctacgacagtgaggaggatcaaagcccctcgcccgaaccaccag

SEQ ID NO: 182989 - DNA, 855 bp, Arabidopsis thaliana landsberg
atgccgtatctaactctagagcacatttattgggtgaggagggcagggttgtttgctagtcctgaatggaagaaagaacaaggcatagcaatatccagttttgtgaatgattccacattttgggaatctcttgacaaaattgtgggaagtacatcttctctggttcatggatggttatggttttcaagaggcagcaagcatgttgcatatgcctatcattttatagagagcatcaagaagaacgtcgcgtggactttcaagtacgagagacagttttacgagccgacatggaatgtgatagatgacgtgtggcacaacaaccacaatcctcttcatgctgctggttattttctgaatccgatggcttactactccgatgatttccatacttatcaacatgtatacaccggtcttgccttctctctggttcacttggtaaaagaacctcaccttcaagtgaagattggtacacagcttgatgtgtatagatacggtagaggttgctttatgaaagccagtcaagctggtcagctcaatggagtctctccaggtgagtgaactttcttgattttttatatatatatagtaatattgttttatttgcagacatttaagtttttgaatctctttgcagttaattggtggactcaaaaggcgaaccagtatcctgaactgcagaatctcgctgttaagattctgagccaaacaagtgaaggtgcttcaaggtacaagctgaagagaagcgtagcagagaagctgttgctcactgaaggaatgagccactgtgaacgaaagcatctgaaagagttggctgttgtacattacaatctccaactacaaagctgcaaagcctaa

SEQ ID NO: 182990 - DNA, 676 bp, Arabidopsis thaliana landsberg
atgtcctttcgaactttccaagaattcgttggcgatgaggagagctggtccgatgcgtttcttcttgtccgagaagctcttgggcttctcttacaagcttctgggaagagaaaagacattgaaatgggaagaaagatccaccagctggtttctgggtcgacccggttaaggaatgatgacgttctctgtactcgtattatcaccatgtacgctatgtgtggctctcctgatgattctcggtttgtgtttgatgccttgcggagtaagaatctcttccagtggaatgctgttatcagctcttactcaagaaacgagctttacgatgaagtattagagacgtttatcgagatgatctcaacgactgatcttttaccggatcatttcacttatccatgtgtgattaaggcttgtgctgggatgtctgatgttgggatcgggcttgcggttcatgggttggtggtgaagaccggattggtggaagatgtttttgtgggtaatgcattggtgtctttctatggaactcatggttttgttactgatgccttgcaactgttcgatataatgcctgagagaaatttggtttcctggaactccatgattcgagtgttctcggataatggtttctcagaagaaagcttcttgcttcttggagaaatgatggaggaaaatggtgatg

SEQ ID NO: 182991 - DNA, 1482 bp, Arabidopsis thaliana landsberg
atggctgcttttgttctggctgtcattgtggatggacatcgacgaggccaggaagcatgtcttgaagctaatttaattggtgtttgtctcgggcaccttgaagcatccagaccaagtgatccacaaccagaaccattgtttctacaatggctttgtctttgtcttggaaagttatgggaagattttatggaggcccaaataatgggcagggaggcaaatgcttttgaaaagttggcacctctgctttccgagccccaacctgaggtgaagttcagatttctgtataacgtccttcgtgtagaagtgtacgttctgaccataacattctcttgtaggtaagggctgctgcagtttttgccctgggtaccttgcttgatattgggtttgactctaataaaagtgtggtggaggatgaatttgatgatgatgaaaagattagagccgaagacgctatcattaaaagtctcttagatgtagtttcagatgggagtccacttgtccgagcagaggttgccgtaggtacgcaaagcatgcaactcttgaaaattcatgttcgtggaaccatgggttcctaattagcatcagagtcatttaacgtcaaaagtaaaacaattctaacctaacaagattattttaaactagatacatctgtacatttttttcttgatttatcatttgcccaatttcatgaatccagtttacttagaaatccatatttatttgatgcgttagttttagagaatgacattttagctcgatacaatcttaaaatcatattgtccctcgtttagagagtttatatagagttttgtgcatttccaaatgtttgtctttgttcattctacatatacatcttgaagcgtagcttgcttacttttacttttttttctttctatttgatcccctagtcgctctgttgtttatgtctttacagctcttgcacgttttgcctttggccacaaacagcaccttaagttagccgcagcttcatattggaagcctcagtcaagttctttgcttacttctctaccttcaatagctaaattccatgatcctgggagtgcaacaattgtttctttacacatgagtcctctgactagagctagcacggatagccaaccagtggctcgtgagtctaggatctcaagcagccctcttggctcctctgggctgatgcaaggatctccattatctgatgattcttcgttacattctgattctggaatgatgcatgacagtgtcagcaatggagcggtccatcagccaagactgttggataatgctgtttattcgcagtgcgtccgagctatgtttgcattagctaaagatccatctccacgtattgcaagtctcggacggcgtgtgctttctattattggaatcgaacaggttgttgcgaaaccctcgaagcccactggccgaccaggggaagctgcaacgacatcttacactccacttgctggcctagctcgttcatcctaa

SEQ ID NO: 182992 - DNA, 416 bp, Arabidopsis thaliana landsberg
atggtcgatcctaccagtgaagcatccatccccggcgactacggtcaagcaattgagaagagcaaagtactccatatcgggcgcagtcattgaaatttccgccctaccgacgaagaggtcgaaaagactgggccagccgctattcgagagcaatatactatatcgcctctgaagattaaaaacggagtacatctattatacaaattgtagcatccgttttgcatgacggggcgtgtgctgcttagagaagcagtaacgaatctagcagtcggaattacggctataccattctccgccagttgacaatcttcatcaaagcatggaagccgcctttcaacccgctaaaacccgaaactatgatgaaaataatccatgtgcattcagatcaaacctgcaccaagaaacgcgaagtttag

SEQ ID NO: 182993 - DNA, 152 bp, Arabidopsis thaliana landsberg
gcctgggagttcggtcatgtcgggttaatcgggtcgggttaatcggttttgggaaaattcggtttacaaaaaatttcaccgaatctcaccgaaataaatctcggttcgggtcggtcggtacacgggttattcgggtcggttataggctttaa

SEQ ID NO: 182994 - DNA, 421 bp, Arabidopsis thaliana landsberg
atgccccagtgcgtaccagccgccgccgccgagcgcagcgagcaccgcgaccgtgatcgcgagacgcttcattgcgcccccggttcggtgcgagagatgacatcgcccggctgcaggcccgagacgacctcgacggcagatgcgttgcgcttgccaagctttagcttcacgcgcgcgccgtctttgcgatacgcgacggggccgtcgggggtcacgaacaccgcttccgccgggacctgcacgacattgggcaggcgctccgtctcgacgtccgcgcgaaaccgcatgccgggacgcaacggcgccttctgattcggatcgatcgcgactttcaccttcacggcgttactcggatccgcttccgacttcggtcgcacggacttcgcgatcgactcgacgctgcccttgagctgaacgtcgg

SEQ ID NO: 182995 - DNA, 582 bp, Arabidopsis thaliana landsberg
atgttatggcagaaggaagggaaccgcaagggtcttgcctcatcggaccatgacatacctaaatcgtcagaccctaaagtgagtgtatattcatacaactgcagaaattaataagattctttttttttttttttttttacttttcggtttttgatagtttctttattaatttaattctcaacagacattgagaagactagcacaaaacagagaagcagcaagaaaaagcagattacgtaaaaaggtcagcattcaatatttgtaagttgcaaatatagtttttatatccaaatttatttataacgttatttgctttggtaaattacgacaggcttatgttcagcaactcgagtcatgtaggatcaaactgacccaactagaacaagagattcaacgggccagatcccaagtaaacttttgaccctatcttttcatatatattttctttcacctaaagtctaaaatgtaccaatttaatttgatttcctatatatgtttagggcgtattctttggagggtctcttataggaggagatcaacagcaaggtggactacccattggccctggcaacatcagctctg

SEQ ID NO: 182996 - DNA, 121 bp, Arabidopsis thaliana landsberg
atgaaagagaaaatgaaaaatcgtcgtctgggccgaatctccctgcgctggcccattgccgcatggccaacacccccatccgcacactctctggctggaaaatgcattgagtcgctgactg

SEQ ID NO: 182997 - DNA, 52 bp, Arabidopsis thaliana landsberg
gtgcgaggcgcggatgggcgaatggctcatcaactcgcgcaaagtatgggcg

SEQ ID NO: 182998 - DNA, 542 bp, Arabidopsis thaliana landsberg
atggaagacaaagcttgaactgcgagacgctttagagagccttggggacttagataaaagccaggttatgagggtagaccaatcaacaaagatacaaggatgttaaccaagacgttgtagtaagatgtgccaaattctcctcggagaaagtatagtggagcaagagatggtctctgttttcctccgcagagttacaaaaaacacagtccgaactgagttgcattccccaactagtaagccccattttgacaggtagtctgtccatgtttgcaatccaaaaggtaaaggcatgttttgggacagaatgctgccttctcccagaacttttcttttagaagggcgaagctgatcgcaagttagctttattaagaagctgttggatgagcgactaccaaatcccccaactccggcggaaacacatcgttactgaaaaactgagattccttaaacacccaagccctccaatcgatttcggaatcaaatcgaatttttttggacaaaataaggaacccgagaaaaggaaccaagcccaaaaactatag

SEQ ID NO: 182999 - DNA, 277 bp, Arabidopsis thaliana landsberg
ttttgaaatcagtacaaagaaagaacacgagagaaacaagcgatttatgtacaatttctcgaagatcaaactcgataatgcttcactctcaagaggaattaacaaaatttcaggttacagaagaagagattcaaagctacgtacctacacgagtcttctagaggttgacgaagaagacgaagaagaagaagaatctagatctgtctctctctctactcgatttcttcaaacttgtagctctcacacttctttctctctatattggtctgtactaccg

SEQ ID NO: 183000 - DNA, 38 bp, Arabidopsis thaliana landsberg
atgcccactcactactttggtcggttcgcagatgacag

SEQ ID NO: 183001 - DNA, 85 bp, Arabidopsis thaliana landsberg
agggaggtcctcgacggcgtcgagcgtggagaggctccggcgagctcctgtactggccgaatggggctatgaccggcgctcctga

SEQ ID NO: 183002 - DNA, 60 bp, Arabidopsis thaliana landsberg
aatatagtccgcccatatgcatttggactggacaagcccatgggcgtcccgcccaattga

SEQ ID NO: 183003 - DNA, 338 bp, Arabidopsis thaliana landsberg
gtcgaaccctggatctagtggagttaaacatagttttagatgatgaaagaacaaaactctttcacaagttttatgtttgttttgcaaacctaagaacccaatggagcacatggtgtcgtcctatatttggacttgatggatgctttctcaaaagcactcttaaaggacagttattggcagctgttggtagatatgcaaacaatggaatgtacccattttgtgctgtggtcgatgtagagaatgaagacaactggacttggttcatacagaagctgaatggtgattgtgtaaatctgcaagatggtcaggtatataccgtcatctcttatagacaaaag

SEQ ID NO: 183004 - DNA, 762 bp, Arabidopsis thaliana landsberg
tttccgattcagaaacacgtcatcacctgcaaaggcgtggccatattatttaaacctgtgccgggtggttttactttattatatgaaactgcgccggggcgcgaaagaagcagggctgatgtgctgaaggaaaacctggtgctgggttttgttatcaataatgccgatcccggccttatgaattatacagaaggattgcctgcagatattgccgacactatattgtatttcagaaatgatgtacaggctgcggacaatggcttactacataagagcgactacttctctgaaggagaaacactacagaacaaaccgcccgatgcagcgaacccgcataaccgttccttttttgccaagccttttgcctggatggagataatcttacatccttcgctcgaagaagcgctgcatgtacaattcaagggaagggaaactgtgtggcggtatatactcagcagcccgcacctgcaggatctcgctgatcctgctgtcattcacaaagacacgaaggacccctttaaagggcctgtatatatagtgcttccgggaggagaaaagaagatggctttcgaatcggtgcagcggataccgctttcgagcagggcggaaaaggtgtttcagctggtggagaatttccagcccggttcatccaggtataaagtggtgatgagcatattgccaaacccggatatcagcgctatatcatcagtacaggatcccgagggtcgtgatgccgcttgtttttcggaaatattcatttaa

SEQ ID NO: 183005 - DNA, 324 bp, Arabidopsis thaliana landsberg
atgtcgttatacttggaactctgtgtagttcaggtttgcaggatccatcctgtatttgggcgtgtggataacttctccaaagacttgaaaaaactagtgaaaggtaacaagtgtttcttccatagtaatattgacaagactattttgggatttggtgcctttttaaaatacgatttagttgcaaggaaaaagtgaaaacggtttcgtaacattgctgcttcttttgctttgtctcgatcagctgctgaggtgcatacctacttagaaccgtccatagattcactgaagaaaatagctgcgtttctgtatcctggatcactttag

SEQ ID NO: 183006 - DNA, 1387 bp, Arabidopsis thaliana landsberg
gtcattgcagatcgcaactacagtcctggtgatgaggtaagattataacacgatgagattcacttctcagaggatgcattacttatttcttttaataatcactagattctataagaatgttatttttgttgaggtcgatctcagtgactggttaaaactcatgggcttgttgaagcttaccaaatatctctgtgtaggtattcatcaagtatggggaattctcaaatgctacactcatgttagattttggatttacctttccttacaacattcatgacgaggtttgttttctaatatcatgaccgtagccgtaacaacattgatctatagatgttggattgaagatgctactcaccaaccttgaacttgattgtcatttaattgactgaaaggcacgttgaaacttcacacagtcattatctaaggattcttataaaactgatactgctgcggtgacttatagggtcaaatacaacaggatgtgccgaatgatgatcctcttcgcaacatgaagttgggacttctccagacacatcacactcgacttgtcaaagatatcaatatctttcactcttcttgtgatactttcacaatcaagtaggtattaaagtttagctttagaatgttaccaagtcattacaagttcttaactgcttacatatcaatatccgtactcaaagaatggaaacatgggagatagtaagaaagcagttaagagtgatgtgaacagtggataggaaaataccaatgaacctacttcttcagaattggtttcagtaacagtgctttttacatgtgtatctaagtgtacttttggtgatctctcagggaagtgaaatctgctatagggaaaggaaaaggcattccacaatctctccgtgcatttgctcgtgttctctgttgtatcattccccaaggtgctcaaatcaaattagtcactctcttttatcatcttgcgaggctaattccaaaagtattaacagtatagttgattctcagagctaaatgatttgtcaaaagaagctgcacaaaatgatggccgactagctcggcttccttttaaagacgggaacagagagttggaggcacataagatcctcttgtctcacatcaacagattgattgaggatcatagtgtttgcatcaaggtactatagaacgctttactcaactaattgccacacaatgactgacaatgtaggttttgaaaaacgtttattggtgggtgcctttgcaggaaatggaagaatgctattttgtatcacaaagatttgctgttagaaggcagatggcaagagatctcctatacggtgagcttcgtgtactgagatctgcagctgaatggctcaatcattattgcacgaccttgctttcagagacaatgtaa

SEQ ID NO: 183007 - DNA, 222 bp, Arabidopsis thaliana landsberg
gaagttgttgatggtggaaaggtggagagcaagagcagtattgaacggaaaccaactattttggtgaagacaaaagggtatcttgtttccaatgatgtggtggctgttggtggtgtgattaagcgggtaacaccaccagtactaaaccttccggcagataaggaatttgttgatggtggtatggtagagaatggacgtggtattggtggtggtattaagggg

SEQ ID NO: 183008 - DNA, 566 bp, Arabidopsis thaliana landsberg
atgcttccttttctgaataagttatccatattccagaagctagagattgaatttgaggcaactgttcaaggtatgaatcttgcgctactaagacagggtttctgttgctaaatgtgagttaacatgacgtcttttctgtaggaaaactgccttctgaagttgaaataactgcggctataagctacactgatgaacgtgtatactggtaagtaagaactaagttaggatatttttaatttctcgaggatcttactgaaaatattcatatgtgttgcagtgatcattgtgcaacttcaattgttgacttgcatcgaagctgtccaaagtgctcttatgaactttgtttgaagtgctgtcaagagattcgtgaaggatcgctttctgaacgccctgaaatgaagttccattatgttgatagaggacatcgatatatgcatggtttagatgctgcggaaccgagcttgtcttccacttttgaagacgaagaagctaacccatctgacgctaagtggagccttggtgaaaatggaagcatcacttgtgcaccagaaaagctaggtggttga

SEQ ID NO: 183009 - DNA, 274 bp, Arabidopsis thaliana landsberg
atgaaaactgagtatcgcattgcactaagatctgccctgcgtggtgattttgctgaaggtgttagagcagttttgattgacaaggatcaggtttgttcattgccactcaaatcgttagctctctagctcaattaaaacaaaagtgatcctctctgataaaaatcttgtgcagaatccaaaatggaacccgacaagcattgaagaggtagacgaaaacgaagtggaagctctgtttaaaccattaagtccagaagtggaagagttaaaagtctga

SEQ ID NO: 183010 - DNA, 1491 bp, Arabidopsis thaliana landsberg
  unsure (1)..(1491): unsure at all n locations
atggaagaaagtaaaacacaagaaaatgcaaaactactttttttattggaggaaatgcaacttcaattggaggaaaccaaagccttgcacttacaggaagtggaagctgctaaaaagatggcagaaactgttcctgtgttgcaggaggttcctgtagttgacacagagctagtggagaagctaactagtgaaaatgaaaagctcaaggtaggaacttagctctcttcttttcttttttttttctttctctgcgtctattaaggatgtcaaagctgtgacatctgaaggaagggttcacatttcctttatttctcatttggtttcagtccctggtaagttcattggaccagaagattgatgaaacagagaaaaaattcgaggagagaagcaaaataaatgaggagagactgaagcaggctatagaggctgaaactaccattgttaatttgaaaactgctgtgcacgagtacccaccatacatctcttggtctcttaatgaattcaccaaagatccctttggcactcaacattaagcgtatttttcactttttcacttgcagacttcaagaaaaaatcttagatgtggaatctgaaaacaaaatattgaggcagaaatccctcatccaggcatcaggacatctccctccgactccagttaaggtatatctgagcaaaatcatttcttggatggctacacaatcatgataattaaagtgttactctccttcttgtagggctcacaaaatggtcacttttccagcaaagaaagtccgttcaatgtaagtcctgtcttgcttttccatctctttttccctaaattatgttccatctgtttgtatgtcttttaaatacatctctgcagggatctgaggttgaaacactggcaagaactcaagaacaagaatctgatgcaaagactcggagatatcatctggatcgtcaacgtgtatggtttttagttgaattactcccttctagctttttctgatctgtcggatgtgcctttttttatttattgaagagagatatttttcttgctataggagaatattggtgctcttatcaactgcgtggtaannnnnnnnnnnnnnnnnnnnnnnnagcctgtagctgcatttacaatatacaaatgcctccttcattggaaatcctttgaagctgaaaggactagtgtgtttgatcgtcttgttcaaatgattggttctgctatcaaggtactgaattacatgtcatgtcgttataattagacattggtacccaaggatggaatattgtcctcttttttgtcgtggaggtagattatatatatgataatcacaattgagctgttacgatcattactatcaggatgaaggtgacaacgagcacttggcatattggttgtccaatacttcaaccttgttgttcatgatccaacaaagtctgaaacccggtgccactccacagcaaaaaccacctgtttcaaattccttgtatggaagaatggccatg

SEQ ID NO: 183011 - DNA, 1754 bp, Arabidopsis thaliana landsberg
atggtggctgtgaggcgaaggagaacacaagcgtcaaaccctagatccgaaccaccgcaacacatgtcggatcatgattccgattccgattgggatacagtctgcgaagaatgcagttccggtaaacaaccagcaaagctgcttctttgcgacaaatgcgataaagggtttcatcttttctgtctcagaccgatcctcgtttcagttcccaaaggctcttggttctgcccttcttgttccaaacatcagatccctaaatgtaagctttttcactatacccacatgactctaatttcaaagcttccttcttttgattaggatatgtttattgttgagctttagatcttaggattcttctgggtttcttgatctctgtctttgatttgatttcgcgaatttgattcagatttcacactactagatcaggttttggattacactgttgctgaattactaatgaaaagttttgtaaatctgcagctttccctcttattcagactaaaattatagatttcttccggattaagcggtctccagattcatctcaaatctcaagttcttcaggtatgtaattttgcagattagaaatctaaatccctagaaatattaatctgaatagtgaaatgtttgcagatagtattgggaagaaacggaaaaagactagcttggtgatgtcaaagaagaagagaaggcttcttccatacaatcctagcaatgatccctcaaaggaggctagagcaaatggcgtctctggccactgcgttgagagcttccaacaccaagttcagcaatgagcttacttatgtatctggaaaggctccaagatctgcaaaccaaactgcttttgagaaaggaggcatgcaggtatctatcttaagttgatatgtattgctcttgttcttcagtcacatctatatgattggtttggtgattcttaggtttcttgaaagcattcattgttgggttaagtatcaacagaaaagttgattttgtatttaatttcatacaggttctatctaaagaaggcgtagagaccttagccttgtgcaagaaaatgatggacctcggtgaatgcccgccacttatggtcgtcttcgatccttatgaagggtacttaacattcttattagcttctcttttgacctttataaccaagaagagagtaggaaaatgcatttatcaatgtataattatattgaagtctaattttttctatctgaacaggttcacagtagaggcggacaggtttataaaagactggacaattatcacagagtatgttggagatgttgattatctgagcaatagagaagatgactatgatggagacagtatgatgactctacttcatgcctctgatccttcgcaatgtctcgtaatttgccctgacagacgcagtaacatcgcccggttcatcagtggcatcaacaatcactcaccgtgagtttctcttctcttctatttggttccttaaagtcgactctctggtcacaacacctgagctccatgttttggtcctgcttctgaattagttggaaccattctagtattgcttgtcctcattgtgtatttgttgacattttgtgaattgcagagaagggaggaagaagcagaacctgaagtgtgtgaggttcaacatcaacggagaagctagggttcttctcgtagctaatagagacatatcgaaaggggaaagattgtattatgattacaacggatatgaacatgagtatccaactgaacattttgtataa

SEQ ID NO: 183012 - DNA, 314 bp, Arabidopsis thaliana landsberg
atgttcctggtcgacctcgaaaaaggccgcatcatcgatgacgaggaactgaaggagtcgttgtcttcgagcaaaccgtacgtggaatggatggagcgcatccgcgtcaaactcgacgacgtcgaaagccagaaagcacagccggtacgcagcagcgtgcctttgctcgaccgtcagcaggcttttggctatacgcaggaagacctgaaattcctgatgctgccgatggcggccaatggcgaagaacccatcggctccatgggcaacgattcaccgccggccgttttatccaataaaaacaagaacttatatca

SEQ ID NO: 183013 - DNA, 360 bp, Arabidopsis thaliana landsberg
atgatgagaggtaagaccagccggattggtgaaggtccaccctaagccagctgtctttagatcattgcgccatgatccgtcagctttacaggagacactgaaaatgtgacttgtctcctgtctttgtcgaggtgcatcctgtctttcggaggagaagtatcccgggacgtgaggggcctttatctgccagccactccttatcattcttgataacctttaacaaagtttcttctggggagaacaacctggtactaaacactttttgggtccttgatttccatagactccagcacatccaaagagctaaaggccccgaagcaattccagtcggcggtagacatgcaagcttacaaccggtga

SEQ ID NO: 183014 - DNA, 157 bp, Arabidopsis thaliana landsberg
agccgtcaatctgagatctagtggccagctcgccccacaccctcagcacaccgctgacccgtgggtcctgcgtgtcagtgcctcaacccaccctgagtccacctgtcaggtgctcgcgtccacgctcctgcccgccagatctaatcctggtcgttga

SEQ ID NO: 183015 - DNA, 483 bp, Arabidopsis thaliana landsberg
atgcagattcgcgcttatatttttgtcactcttgacttaaataagttgaactacgatgtgtggcgtgagctttttgagactctttgcctaagttttggtgtccttggtcacatcgatggatcttcaacaccgactccaatgaccgagaaaagatggaaggaacgtgatggacttgtgaagatgtggatatatggcaccatcactgattcacttcttgacaccatcatcaaagtagggtgcacagctcgagacttatggctctccctagaaaatctcttccgtgataataaggaggctcgtgcacttcagtttgaaaatgaattgcgtactacgacgatcgacgatctctcggtacatgagtactgtcaaaaattgaagtcgctttcagaccttttgacaaatgtcgactctcccatctcagatcgcgttcttgttatgcatctactcaacggtctcacggagaaatatgattacatactcaac

SEQ ID NO: 183016 - DNA, 387 bp, Arabidopsis thaliana landsberg
ctttactataaggccgttcacttctacttgcaagagcaccctgatataatcaacgatcttctcaatgtgcttgctctgcggttagatcacacgcgtgtcgttgatattatgcgcaaggttagaggctgaccattgatttaatattttctgttaaaaacttatcaccagtggcttaacaatctatatctgatgattatttcttgtttctgatctcaggctggtcacttgcgccttattaagccatatatggttgcagttcagagcaataatgtatctgctgtaaatgaagctctgaatgagatatatgcagaagaagaagactatgacaggttgcgcgagtctattgatttgcatgacagttttgaccagataggtctcgctcagaag

SEQ ID NO: 183017 - DNA, 126 bp, Arabidopsis thaliana landsberg
atgtcaaatttaacagagtttgagaagaggtggcaggatttgacggatcctatgatcaaggaagcttcttcgcccaaagatgcagggttgtcttaccgtcaattctatgcaactgctgaggaaaac

SEQ ID NO: 183018 - DNA, 345 bp, Arabidopsis thaliana landsberg
atgtcgatcgcgatgacattacagacgcaagtcgcgcttgcctgcctgtccggcttgtcgatcggcttcgcgctgggtcttgtcggcggcggggccggcacgttgtccgtgcccttgttgctttatttcgtcaaggtcggcgatgcgcatgtcgcgatcggaaccacagcggctgcgatttccgcaacggcgctcgtcaacctcgtctcatacgcccgggcgggcctcgtgcaatggcgcacgggggccgtgttcgccgccgccggcatggcgggcgcattacagagatcgcgctggtcgctgcgcgtggacggcggcgccctgatgcttctgcttgcggccatc

SEQ ID NO: 183019 - DNA, 264 bp, Arabidopsis thaliana landsberg
atgactctaggggacaataattcgaaatatttccatgctctgactaatcagagacaaggtaggaatcggataaccgggttacatgatgagaatggaaagtggtctgtagaggataaagagattcagcacatagcagtgtcttattttgagaatttgttcacttcgactaatcctcatgattttgaggattccttgtcagaggttcagacattaataacagatcaaagaaataattttctgacgggccccgcgactaataatgag

SEQ ID NO: 183020 - DNA, 450 bp, Arabidopsis thaliana landsberg
atgagcgcgtaagtattatttgcgatatgtgcggctggtctagcttgagtcatcagcattcgagtattgagaccaaattatacgtggcattaactgtgtcgtacactacgatgaccaaattttgacttagagacagaagcagaaaggtacacttcatttcttattcactaatttgacctaatttttatccacaaaaatgagaacctccgctttttcgaaaaagaaaatgaaaacctcatctacctcgccgattaaagacaaagagccatgaaactgggcggatcttcagttggagttgacgtctttgatcctgatccgccttagcgtgcctgataaactaaacaacgcgcagaaggtgtgtagagggtggcgacgcgtaggtaaaaacccttggatgtggcggaaaatcgacatgagaggcctgacccgaaacgatagaaaccttgactg

SEQ ID NO: 183021 - DNA, 530 bp, Arabidopsis thaliana landsberg
gaccatgagagcactacggtaggtttgatgcttggtctggccgcttcatacaggggaacaatgcaacctgatattgcaaaggtagagattcagctatttggtggtcataggctcatattttgaattggcctctttaagtattttttgttgatagtgtgtcaaccaaaaacacttttttggtttaggatatccaaagtcccaacttccatttaagactactttaggatctacatatgcttttgtgttagttttagatcttgtttttataaaatgatggatgaccaacgtcttctgaaatgtgaaattttcatttatgcactgaatgatgtcaattattcttactagcataatacttttaaaattttcagttccagcactagaagatctagatgtatttggtgcgccctgtgtgactgtctaattcttgcctaaagaaattatttttctttttgtaacaggctctctttttccatgttcctgctcgataccaagcttcatatactgagtttgagataccaacacttctacag

SEQ ID NO: 183022 - DNA, 301 bp, Arabidopsis thaliana landsberg
gaattggataagtccatgtttagctccgggacaatggcggaagtgagtactattgtagataaagctgaagttgcgtggttccctgctatgataattaaagagattgaagtggatggtgagaagaaattcatcgtgaaggactgtaataaacacttgagctttagtggtgatgaggcgagaaccaacagtaccattgattcgtcccgtgttagacccacaccgcctccttttccagttgaaaagtacgaattgatggatcgtgtggcggtgtttcgtggttcggtatggcgtcaaggaattg

SEQ ID NO: 183023 - DNA, 134 bp, Arabidopsis thaliana landsberg
ttgtcggtgttagtccccgttgttatgactcttatcgctaatcaagataaagaaagcatggtccttaagtatctcggaagcttttgctaccccaaatggactctcgaagcctctgtcctttcccatgctcaaag

SEQ ID NO: 183024 - DNA, 106 bp, Arabidopsis thaliana landsberg
atggcagtaaaatttgtggtagtgatgatagtgtttgcacaaatcttagctccaatcgctgaagctgctcaaggaaaagctgtctattacgaccctccctacacta

SEQ ID NO: 183025 - DNA, 289 bp, Arabidopsis thaliana landsberg
tgtggaggctcgtattgacacgtcttctactgatcggatccagtcgattgtggacttgcccgcttctgtgcaatccttgcgtggggagatcaatgagctgaaaaaactgatctgttcagttgacaattctgcagaaattaactgggtcgatagagttgttactgtgaaattccgcattgtgcttttgagtttcattctttgggctatcttagctgcgattgtggtcttcttcagctcaggagaggaacgtgcttaccgtggacaattccaacatgattcttcaaggtaa

SEQ ID NO: 183026 - DNA, 111 bp, Arabidopsis thaliana landsberg
aatttcaccacgggcatcgctagtaacctgtattaccaagatgtaataaatcttgagaaaacaaaacagattctagaacaaaaggcagagtggattcgtcaccgaagctga

SEQ ID NO: 183027 - DNA, 129 bp, Arabidopsis thaliana landsberg
atgacggtgatcaaagatgcaaccaatagctcgtgcccaaggctgctacatgcagaacaacagaaagaagttgtcagagcgagatacaggaaaagtaacggaggcaagttaagtactctatatcgtcaa

SEQ ID NO: 183028 - DNA, 798 bp, Arabidopsis thaliana landsberg
aatgataactgcagtgtcatggataccaaaagggtatctaagagctgatcctgatgtggctgagcctccgtcaaaggaagaacttaaagagctcattgagagtggtgcttttgcaagaaagtgagatttttaacttagtattgttcctgtttctctaaatttaggacttgtggagattgtgattgatattggttataatatatagcgtggaaggtagtaacgaggatgaagaagaagagattgaagaagatggagaagagataagtgaagttgatcatgccaaggctgtagctgaagctttgggtaaatcttctaaaagcaaggctgtttcttcttcaatggaggttgatgaggtttctcaaggattgaaagaacttgacatggataattatgatgaagaggatgatggtacgtttagttggccttttggtgtttgttctgcaattctacaagtgatcattttgattagcagagatagtttggtgtgttccttatgtaaacgttacctttttttttggttgtgtttggattcagaaattgaacttttcagttctggaatgggggatctttattatccaagtaatgagatggatccatatctgaaagatgttgatgtaagccatttcactgtttctatttcacaatgaaacatatcgtggttaaattgttttgtatgaagatgatgtttggtctttttaggatgaagatgatgaagaggatattgatgacacaacagtcaagccgaccgattcggtgattatttgcgctaggaatgaagatgatgttagccatctagag

SEQ ID NO: 183029 - DNA, 313 bp, Arabidopsis thaliana landsberg
atgcccgaccagatcattctgctgcacggcctgtgtatgctcggcttcgcgctgggcctgctgctcaagcgaatggccgatgccgacttcgcggtcgaccgcttcgactacatgagcgtggtctcctcgcaagagcgcatcgtcgagcgcgtgcatctgcgcatacagctctttgcgcccgggccggtgcatctggtcggccacagcctgggcggcctgctggcgttgcaggcctaccgcgaagcggccgaaatcaagccgggccgaatcgtctgcctgggctccccgctgcagggcagcgccccggcgcacg

SEQ ID NO: 183030 - DNA, 1548 bp, Arabidopsis thaliana landsberg
tcctcaataaacgggtctacctcgaatttgtcagacggttcagggaggacgtttacttcttctttctccggtcagtctggggcagcgtctccagtttttcatcatgctggtgggtagacgtctccggcgctatttctttcgtaattcttctgaacttatattggtttttttctttttataggatctattcagggccttcataatattcatggaaactttaatgttcccaacttggcgggaagtcttggatcgagaaattcaagtctaaatggtgttccttctgctggtgtccaacaacaaaatggaagtatttcgaatggaagatttgcatccagcaatattccggttgcactctctcaggtgcagttatgcttatgtgttggtatcctaaaaataatgcaaatatgaacccttgctttggctctgcttaaaagtttgcttttggattcttatttgcagatgtctcatggtagctcccatggacactcaggactcactaataggggaggtataaatactgttggaaaaccttaattcagtagttacactaatagggtggttccattcctgaactcttcctacctctaccaccattggtaattggtttactgttccaggattgggagtttctccaatattgggaaatgtaggttctcgaatgacgagttctatggggaatatggttggtggaggcacaatgggtaggactttgagctctggtggaggattgtcgattccgagtcttggttcgcggctaaatttggcagtaaatagcggatccggaaatattggacaaaatcgcatgatgggtggggtcttgccacaaggtacttcatgatttatatccttttctgctctttgttgaaataggttatgcatttgtatggttttagttgatttacaattccgttagtattgatgttaaatcctttatcattaaatgaataacaccggatttctactagtatttagaaatcattaatcgaataactcatgattttgtttgaatttcctaatcagtcgaactccagtaaccaaatggcctcatgttttccccaaatttcgtttcgtcacatcgtttatgatatctttacactcttatattctttcctttctcttcaggatctccgcaggttctttcgatgctgggaaattcttacccttcagctggaggactttcccaaaatcatgttcaagcaatgaacagtctaagctctatgggtttgctgaatgatatgaactccaacgacacttctccgtttgatattaataatgattttcctcagctcacaagccgccccagctctgcgggcggtcaaggacaattgggtaagtaagaaaaaccctttaattctatcttctttcttttattggtttgaagcaaaactatactccgctgttttctgaaacttcttagggtctcgattgaaacaaggccttggaatcagccctatagttcagcaaaaccaagagttcagcatccaaaatgaagattttccagcatcgccaggatacaaaggtcacccttctgatctgcaactgcattaa

SEQ ID NO: 183031 - DNA, 328 bp, Arabidopsis thaliana landsberg
atggctcgcgcgcaaacccagtttgaaagctttcatcggacgattctttttggctacgacagcagccaggacctccgtaacagaagagataccctactttccgatctgaagaaaaatatcagtgcggacgcacctccttacacaaccttcactcagggtagctatgcgctggacaccggtatccatccgctggatggcaatccggatatggacgtaggcgtcctctttgaatgctcgcctaacgactaccccgatcctctggttttgaaaaggtacattcgcgatgcattagtgcggcacaaccgcactgtcgacattcgccgcccct

SEQ ID NO: 183032 - DNA, 65 bp, Arabidopsis thaliana landsberg
tgactttgaaaggaaggctaaacgaatttgcagtaaaagtaacagaagaaacacttcaaaattga

SEQ ID NO: 183033 - DNA, 130 bp, Arabidopsis thaliana landsberg
ctcagccacgggacctgtttgcagccgtccggtgacgatttctgttgatcctgctctccgaaatacgattcgatgtctgcttcaattcccgctagcgcctccattgaagagtcggctcgaaagcttttag

SEQ ID NO: 183034 - DNA, 88 bp, Arabidopsis thaliana landsberg
ccctgttatggatgatctcgtttcctacgtggtcgatgttttgcgaatcttgatgatctctgttggcgagcgaatcgggtacgtggag

SEQ ID NO: 183035 - DNA, 278 bp, Arabidopsis thaliana landsberg
gtgattccagattctatcacaaccttatctcgacatctggatcgtataagacaagtgtttgctacatatggttagacatggtttctatttagttgaaataaaatctctgaatttctgtgacattttgtattgtgaattttctaggtaacaatgatgataacaactggcaagctcctaaccgttccagggaggatctgatcgcaagagaatgtcattggggggagttggcacatacgacaaggcgattgttgattggtgaagttgctgaatgtttatca

SEQ ID NO: 183036 - DNA, 682 bp, Arabidopsis thaliana landsberg
gcctctaactcccgtggtcgcgaggggcggtcttctgcggtcgggcctggccttgggtgatcttttgttggattcgtctacgggcggtcgccaaccatacgtgacgctttcggattcgttccttggtcctaggacggttcgggggtgttacaagtttggtatcagagcatggttcaagatgctctcgaggacatgggttgatttttcaaatgttttatcgagtaaaaagagtcgcaaaggcaattaggaaaccggctcatccatgtgataggattaggttagatagaataggatttacccttagagtgtattaggtaaaccttagagatttaggtgaaacccttttagtcttttagtggtagagttgtctcttaatccttagaattcgaggacaaattcttttaaggagggaagaatgtaatacccctggccaggactaggactaggccaaggaattttagtcgatgatttagcaagccgtacaatcggaacgatcggaaaaagtccttatgggaagagtattgtttgtcggaccaacggtctggcagttttggagatattcatgagcaagtggtcggggaaccggatgggtgagtcgagtggaacggagacttgggtgactgagattaatgtgttgatgcgttgggtgaacccgtcatggttacggttctacgagaagtag

SEQ ID NO: 183037 - DNA, 444 bp, Arabidopsis thaliana landsberg
gttgaaaactgtactacaccgttagaagaagatttgcttgattcagttttgggatcactcataagcaaagatgaaactataatggggcgtctcttcttggaggcaaacatccacgaccaatcgtgccaagccttgctgagcaagtgggatcacttaaagccttcaacgcaaaaggttctttctttagtttcaaaggcaaagaaattcgaaaaggaaaaagaatgcatcatcatgaatctcgctaaagctgagcaagaggtaataatcataaacgataacactctattgttcttaaatgattccacttgactcacaaactttttacaggtggaacttgtgagcacgctaaaccgaaagctggataaagaaaatcgtaagttgctaaggcaacaacaaagccctctttgctccgcagacaagaaccgaaacagcgcatctgcaaag

SEQ ID NO: 183038 - DNA, 84 bp, Arabidopsis thaliana landsberg
ccgttcctggacacaaaagctacggaaaatctgagaaaagagacgttgaggtcttcttccaaacgagctaagaagaaacgttaa

SEQ ID NO: 183039 - DNA, 405 bp, Arabidopsis thaliana landsberg
accttgagtgatattaagaggcagaacgaggatgccaaactcaaagcttttgaagttgacatgtcgtcttttcaattagttttaaagttcagaagctctctagagcaatggctttttgagtcagatttgcattcttcagtccagcttttggtgaacaatgctggaatactggcaacatctagtcgtccaactgttgaaggctttgacaggtaaggttttcacttttcactatggtttcagaattttgaactctattggttacactttcagtctccatcgttttcaggatgattgctacaaattatgtcggcgctttctctttgaccaaacttctcttaccgctcctgagaaacagccctgtgccttcaacagttgtgaatgttacatcttttacacatcgttatg

SEQ ID NO: 183040 - DNA, 557 bp, Arabidopsis thaliana landsberg
gttgcattaaaagcactgctagttatacaccggcttctgagggatggtgatccgacatttagagaggagctattgaatttttcgcaaaaaggacgcattatgcaaatttctaatttcaaggatgactctagcccagtcggtgagtccttactgctacattcacgggtctatgtgtttttagaagcaaatgaggttcattcaaggtttctgcatagagttattgttgatatggtatttgctttatgcttgcttacagcatgggattgttcagggtgggtacgcacttatgcgttgtttcttgaggaacggcttgaatgcttcagggttctgaaatatgacatcgaggctgaacgtcttccaaaagtttccccagggcaggagaaggtatcaaatttgcgttttacttggttttctggccttatattatctcctttccttcctgagggtattcgattttggaaatgaacaggggtatagcaaaacaagggatttagatggtgaaaaactcttggaacagttgccagctttacaacagcttctgcatcgtctcattggtt

SEQ ID NO: 183041 - DNA, 145 bp, Arabidopsis thaliana landsberg
aacaaaaggcgacgatgtcagaagaaacttagatgtgactttgtacccacaaaaaaaaaacagatgtgacagaaattttaagaggacaagattttcacgtttttctaaagattctcgatcgacccgaaacaataatggacaatga

SEQ ID NO: 183042 - DNA, 283 bp, Arabidopsis thaliana landsberg
ggaatgtgatgccgatactatggcaaagatggtgtttattctccaaggacaccaacaacttctgaaaaatcttagcaacatcttcgaaagttatgagttgttccagggtcttctcactattctcgcttacgatgatgtcgttccagtgcatgattttctctccttgagattccaaaggctaagagaactcttagagttcctgttgatgatctcctctcattcaacattaccaagtctaagagaattaaatttcccgaagccaagaagagaaagatatctccag

SEQ ID NO: 183043 - DNA, 2598 bp, Arabidopsis thaliana landsberg
taacggaaaaaatggtttccgacttggacctcgtgacccgactccgtgagattctcggtagctccgacctgaacacggcgactccggcaagcgtccgtcgtcagttggaggcggatttcggtgtggacttgacagataaaaaagcgtatattagggatcaaatcgatacttttctcgagagcaatggcgcggtagaagacaaacctgagagtcccaaggtagaagaatacattaatgccgacgaaatcaaggcggaaattgaaggaggcgatggagaagacctcgacggagatggaagtggaagtgaggaagagaaggaagaacggtaattactcttgtaatgattgtgctttatgtgaaattggatttttgaaattcaaatatcgatgaatcagtgatcatacacacacacaaagattgagtatttataggaatctttagcatttttcaatcgaaccaatcaaaatgcttccgatgcatttctaatcaaagaccacttgtttaatgacttaagtttaagggattattgttcattgatgtgttaggccagtaaaggccaagaagcgaggtggtggcattaccaaagtatctcagttatctccacaacttgagaaagttgttggagcatctcagttaggtcgaaccgaggtaattttcatcttcttccgacaactgttctgcgaagcggaattgtactttagtcttttgtgttgtgtatatttatcaggttgtgaagaaaatgtgggcatatatccgagagaaggatttgcaagacccaaaggataggaggaagatagtgtgtgacgagttgttgcattccttgttccgtgttaagaccattaatatgtttcaaatgaacaaggcattaaccaagcatatttggcccttaggtgatggagatggtaattcttccttgtcattatacaattcagaaaactttcacatgagactgcatgatatctgtatatatatccctagtcttcctgttcagtcagtcattgatcctaaatagctagatcagctaaatatccctagtcttcctgttcagtcagtcattgtatcatgtgtctgaaatcaagtaccccactgtagagagtgatcatgtgtaattgtgtggaaatagtgttcatcaactgttaatagtgttgaatattgatattttccctcagcgtttgagttgttaggatgcttatatatttgttcaagagacctctctaatgaacatcaattttgtttagtaaaacagtattatagatttcgggttggagacagcagttcctgagttttgtgttacccaagtacaatgaaatgaattattttttccagggtgtgctaacgatgtgaaagaagaagatgaagatgaggcatcagagggaacagataagaaaggggagcagagcgaagaagtgtaagagaataaggaagaagaaagtgaagagcaggaagttaggagtttgcggaaacgcaagagaaaaaagtttgttttctctttctccctcagttcttgtaattgtacagctagttatcgccaccctgtgcccataaactaagttttctctattaaataggccagccaagtcggtagagaagcccaagagaaaaggaggaggcggctttgctaaagtttgcagcctctcgccagagcttcaggcgtttactggggtgacagaattagccaggacagaggtacatgtctgactcgagggaatcagtttctcttcgttattgaactcaagctctgagcctaaatttctaagctacttgtctaattttcttaaccaagtctcttgttttgacattttgtctggtgaatggtttcaggttgtgaaattgctttggaagtacataaaggagaacaatttacaagatccgaatgataaacgctctataatatgcgacgaatcatttcgatctctgttccctgtcgagtccatcaatatgtttcaaatgaataaacagctaacaaagcacatatggcctttagaggataatgcaggtatttgatgactggaagttcttacatgttctgggagccatctttttccggtttaggctttttaaccgtatactaactgttgtttgtctctggtctaggagaatcagttagctctaagtctccaaagaatggaaagcaaaaaatggaatcagatggaggtaagaaagctagatgaatttaaacttatcccatttctcatcactgtataaacaaagcatatgcattcggtcagacacagatagtgaggaaccaaatgagaaagataaaaagcagaagaaagaagttcttgctccccttccactttcagatgctcttgtcaagttcttgggtgatggagaaaactcgctgtcgagggcggatgtggtaaagagattgtgggagtacataaatcataatgatcttcaggtatgccatttgctctctacactctgttttttcttacttacctgcttctttacaccattttcttaacttaggatccttctgacaagaggagagtcatatgcgatgagaagctgaaagaactctttgaagttgattcattcgaagacacatcagtctcaaaacttctgaccaaccacttcatcaaggccgaacaatga

SEQ ID NO: 183044 - DNA, 144 bp, Arabidopsis thaliana landsberg
caaaactgatggttttatagatggtgatgaagccccaggacgtccagagaggaagtcactgttgactcaagtgacacacatgtgtgagtggttgactgagttgggttcggccaccactggaactcctgaagacaaatggagcag

SEQ ID NO: 183045 - DNA, 470 bp, Arabidopsis thaliana landsberg
atgacgctgcaggaatcagtatcactttcgtacccgaaggtgagtgaacaattcatttgacctaatccatctcttatcttatactaaatatatgtatatgtaatctaatctagtcctctgttgatatatatatagttgcagaggcttatggatatgcgagagctcataagatggtggtggacattcttttgtgggcagtggacagtcctatagaatccaatttgattgtactctcaaagaacttcaaagaagagttgactgtctgtgttattcaaggcttgcatgggagaggttacaatgttctcttagcagagcctttagaacatataccttttactgaaagctcagaatggctttgggatagcctttgtcgaagcctatcatcagatggaggcggaagctcacaacatgttgacaataaggctgatactgttgctcttgccgattctctgaggaagcaaactctgtag

SEQ ID NO: 183046 - DNA, 210 bp, Arabidopsis thaliana landsberg
atgattcccgcagtcatccttaataacgtaaatgttgggttcttgttgaatggggagatcacgattattgctgaagttgaagttcatgaatttattgacacgttaaatgcatcacaagttgaagagcttagtgatgattcctctgaagatttgcagaacaaagataatgtaactatcgaagtcaacggctttcaggttcttgattcgcag

SEQ ID NO: 183047 - DNA, 901 bp, Arabidopsis thaliana landsberg
gatcaatgaaattgaagtagttgctgagtttcctcatgatccggacgcctttactcaggtttatgtttcgactataatcatcatctcacattttcgaatttcagaattacttacatgtttttgtccggcgcagggtcttctttatgcgggaaacgatacactgttcgaatccactggtctatacgggaaggtgattgatttgcctggcattgtcttactctttgtctttgaattcgattcgagtctcattctctagtcattgaaaatttcaatgtgatgctttagtttgatgatccattttgcttttttccccattcttacagtcttcagtgaggaaagtggatctacgaacaggaaaggtatgggtttcatcttgtggtttgacggtttcaacatgttgtataatcagccatggtagtgaatttccaagtggggaatgatagtgtgattgcaaaagagaatgaattgaaacttctcgttaattgatttcttgaatcagccgttattatggagttagccttacttgaattggtcgtgtttatgttttcatacatcggtgaaatttgtttgttttgtttttcccttccgtaggttgaaattcttgaaaaaatggacaatacatattttggagagggtttaacactccttggagaaaggtgggccttttctttcattaagctagtttgtaattcagaaagaaactctcacatgttacaacaacttgctcagttgtaatgttgcttcttggatcttgttgtcctacatggatacatttgccaacagaaagtttaactgttaaaatactcatctgatccacccattctttatttgttgtaggctctttcaagtcgcatggttgacgaacacgggtttcacatatgaccttaacaacttaagtaaa

SEQ ID NO: 183048 - DNA, 11 bp, Arabidopsis thaliana landsberg
atgctccgctg

SEQ ID NO: 183049 - DNA, 919 bp, Arabidopsis thaliana landsberg
atgcaacggccattgaacaatggtgtagctactaatgagtcgtctgatcttacatcaagtgggcaaagtgtttgttgacaaatcaggcacgtctcctccgagcaactcaacttgtcctaggacaccaccaacagaaagtatctcctcagagtgataaagaagtgactcctacaaactgcacaattgttactaaggagagaatcacagtcagtcctctcaaacaaattgcttcttatacagtggagaggagccatacggtttcttctttttcgccagttaagtctaatctgaaaatgtcgagtaaaagagatcatgtgaaaggaaggctcaacttcgatgatactgaagccacaatgcacttagacgcacctgccactgtggatatggtttcaacttcctcatctggctctgaagcagaagctgatttatttgacattgatttttccaatatagatcttctgagtgaagacttttcattttcggagctactattcgattttgatattggttgtgaagaaatgtcaaaccattccctaccacagccatcaaatttccacatagagactgcttcagggtatattcttctctttggcttaataactatctgaaaattctaattatctactatcattttacttattagattcaattctgtatcacaggtcatctcctgaatcaagaaacacgaatctagagcctgaccaggttgtatcagagtatacatcaacagtaacagaaatgattcaagggaaagacatgaacacaaaaggttggtttagtccaatcttcacgtaacattttaaatataaaactcctatagctgttttcactgataaactcttactgtttcaatttgcaggatctgactctatgactactgtaaagtccataacaaaatgcctacgaatcttaagtcctg

SEQ ID NO: 183050 - DNA, 790 bp, Arabidopsis thaliana landsberg
tcttgcagaggacaagatcatatttccagctgtagatggagagttttcattttctgaagagcacgatgaagaagaaaatcagtttaacgagtttcgatgcttaattgaaaatatcaagagtgctggagcctcttctacttccgctgccgaattttacactaagctgtgctcacatgctgatcaaataatggaaactattcaaagacacttccataacgaggaaattcaggtgaactattgcttttaagtgctgtatgatattgtaaacaggtgaaactatgaaagtttggcataagatcatttgatactatatgctatgaagattcaagataccaatttcaggatgtcaactaacttgtagtggttgcaggtgctaccccttgcacgaaagaacttcagcttcaaaagacaacaagaacttctctaccaaagcctgtgtataatgccattgagactaattgaacgagttttgccatggttgacggcatctttaacagaagatgaagctaagaattttctgaagaacttgcaagctggaggtactatctactgtactgccttaaacttaaccttctttcaaattattagctactcacaattttgcataattacatgctttttcttgtggcctcagcacctaaatcggatgttgctctcgttactcttttctctggttgggcttgcaaaggacgcaaagccggggaatgcttgtctccaaacgggaatggtttatgccctgtgaaaacactaagcaacattaaagaagtcacccttcagtcatgtaatgctt

SEQ ID NO: 183051 - DNA, 162 bp, Arabidopsis thaliana landsberg
atggttacgtcagatgtcattacggatgacatctcagttgctgccattgttattgcatttgatcgttcagggaaagcttttgatagatcagtccgattgtcaatgttcgatgcccacgtttacgtttacttcggtgatcagaatgtgatcgttcattggaag

SEQ ID NO: 183052 - DNA, 109 bp, Arabidopsis thaliana landsberg
aatgcgaggtatgattgctaaaaacacgatcgacaaggatctcaagaacatcaacttgcatattgaacctacatacatgccgtatataggcatgtgcgaggagtattaa

SEQ ID NO: 183053 - DNA, 195 bp, Arabidopsis thaliana landsberg
catttgagactccaaataaccaaatctcaagctcttcactttgttgctctctctgtacaaaaaccgaatcatcattcgatgaattgtcggcatagcttaaccggtcaaccgtatagtatccatgagaaaccggagttaaccataatggtttcttcttcttccttctcttcccatcttcaactacaagtcttctaa

SEQ ID NO: 183054 - DNA, 841 bp, Arabidopsis thaliana landsberg
atcttacacagatgatctcgggtcgaaactgatcaaaacacaagaattttggtttacgctggtgatcacaatcgctatcttgctcccttggttaaccgtgagacgtgttcctgttgacgtctcatctctctcgggccacgcatcgttgataaaattcagaggaggcctgaaatcagggatcttgggtcggatcagtccatcgccgttatcggaatggcatgcttttggaataatctccgatgggaagacatcgcacatgatgttggctggtgctgtcggcgactttacaaagtctttagtctcaaaacctccaacgcatttatgggtccgtacggttcacttcgctggcttaccctatctcgttaacttgtatgacaaggtaaataaaattctctaaatcttagggttttactagtaacagattttagcagtttgttggatgtttgtcgtttttgacatcatgagtattactaaactatttttttttccactacaggtattacttgtggccacgggttcggggatttgcgtatttttatcgtttcttatgcaaccgagtaaggctgaggtatatttgatatgggtggctaaaggattagatgataatttcgggtcggaggttgtgaacaggattaaagattatcctcatcaagacaggatcatagttcacgatactgcgattctaggacgacctaatgtgtcgaaaatgagtgtggaagcttccaagaagtttggagctcaagtcgtgattgttacaagcaatcctgaaggaagtcgtgatgttggtaatgcttggaaagcttctggtggtcctgcttttggtcctatttgggattcttaa

SEQ ID NO: 183055 - DNA, 1557 bp, Arabidopsis thaliana landsberg
gactaagaacgaatccagaagcgttacttttgatgcacgtagacgatccgaccgaattcccagaacacatctggtaccaaggtcaggccatcctcgaacctcgttcctcacgaacacagcctaagggttttcaacccataccatgtccgtaagttgtgttagtccggacaaggctaatatcagaagtacacaaagattttgaaagaaaatctcctttattcaataaagcatgaaaacacttacaatggattgggatccccagcctaatgctcaaatcgagtcaatttacaaatctaattttacaaagacaacaaactttacaccggttccccaacgtccgtgctccccttaaggtctccccaactaaggttacctgtaagacaaaaactagaatcttgagtaatctaagattactgagtgagtccgggtttctaacaaataacaaaaaaatcccaatcccaatccccaatcaaacaatcaatacgagtatactcgattgagtatactcgacaagaaatcacacaacacaaacaaacaagcaatgaatactctttacagagtatatgcagcggaaactactaaatctaaaactagcatgctaacgactcttcatcctacgggccctatactatacgatgctgatttcccataaggcaatgtctccgaccgctagacacaaagtctaaaacgatcacatcccttccccactccaaaccgtgtaaaagggaccaactcctttatagtaaaacttttactaccccgttgggcagtctcgggtggtagcgaaccattctgagctattgggacaatcacgacatcgtcacaccttagtcataaaaatgactaaccacattacttatctacgagcctaatgtaacctaatactactagtaataaaacctactagcaagcaactaacacacaaagattaatcaagccaaaacaagattaaccaacagcaatcaatcaatcaacaatcaaacaacctaacatgcttgctaacaatttaattcgtaataaaaattaggaacaaacaaacaaacaagcaacaattaccgccaataaatacgataataaatcctaccacaatcaaacataatggctaaactaatgcctagcctaagcacaccaaatacttcatcccaaactaaatcaagcatgaatgcaagatctaatcaaacaaccaagccgatcttacgtaaaaacgtagatccgactatcaacaagtaatgcataatttacactaagtataaacatgcaacatcaatcctaaaatcattaacccaaaagaaaaacctagtcgtgtgctactacacacgctacggtactcaccttcgccttattgtcgagagattaaaattctacccttgactgcctaataagtttgatccgaccgagccatctccaacgtgtactaacgatggatctaagcgtcggaccgaaaacaaaattaataaaacaattctaaaagaagaaaaaactaagggcggaactacgtaccttattacccgactacgactcccgactcgaccaacttctacccgactcagactctga

SEQ ID NO: 183056 - DNA, 385 bp, Arabidopsis thaliana landsberg
agtataatgacgaggtgcttcttccaagaaagtgggatgcaaaatgcatcgaatcggactatgtcaaggctgacaatatcgaggagtacgtcaagccgatacatgagacgccgtattggccatcgatcgaattcgacccagcatttgtgcgagatggaaaactccccagcggagacgcggtatctgagctcccagctgagtttccgccaaagggccctgaagcagtgcggagtgaaagttccgagagtggggaggtccatgagcaacgctccaaacgtggccattctagtgacaatgaccatgccgagcgacctctcaagagacagagatcacggagtgcttctaaccccagccgcagaggatcaaacgacggggattacagtcg

SEQ ID NO: 183057 - DNA, 800 bp, Arabidopsis thaliana landsberg
aacaatctagtgaggacgaagatggaagtaatatttattcggttgcaaaagaccattccagtaatgaagaggatgtggataacgaagaatctgagccaatgacatcaaacaatgtgactggtgttgtcaaagaagaacactcagctaaagaagagcatggagatcatgaagagactgagcctttgacgtcactgaacatttccaaagaagaaccttcattagaacacagtgataaagactccttgaagataacagagactcgtaatacttcaaatggatcaccagaactaaagcactctgcttctgtagaatcttttgtaagcattagcagtgacatagagggcgaaagtcttgttgaagtattgaagcaacaactagagcatggcaggaaatccctaagagatttgaataaagaattcgaggaagaaagaaatgcctcagccattgctaccaaccaagcaatggcgatgattacgcggttgcaggaggagaaagcagctctccatatggaagctttacaatacctgagaatgatggatgagcaagcagagcacgacatggatgcacttgagagagcaaacgatgtcttggctgatagggagaaggagatacaagatcttgagatggagttagaatattatagagtaaaatatccagatgagccaagagaagaaattctcgctagcatggggattctcggtaatacagaagaaacaaatgtcacctcaccaactgatgagaccagcattaaggattcaacagacaccaaacttaccggttctccatcagcggaaaattga

SEQ ID NO: 183058 - DNA, 69 bp, Arabidopsis thaliana landsberg
gacttggagacttattttggttttggtgatcagaaaaagaggaagaagaagaagaagaagcaagaatag

SEQ ID NO: 183059 - DNA, 75 bp, Arabidopsis thaliana landsberg
atgaaatacaaaaccaaaaagaacaattacaaaactcaaaataaaaaagtcttccgttgccgggatatgaactcg

SEQ ID NO: 183060 - DNA, 202 bp, Arabidopsis thaliana landsberg
cattaacaatggaggagatttgttcgaagcggagccgcctgagtcatggtgtactaaatcgtccgagacagcgagtcactcgaccgagtcggatcacgaccttgacgctgaatccttagagatggtggttcgtggcgttgttagatcggagcggttattcttcgatcgcaggagttacgagttcgattctggaagagattga

SEQ ID NO: 183061 - DNA, 115 bp, Arabidopsis thaliana landsberg
cactggccattagggttcgccattatgatgaatccaaccaattcccagtccattcagaagagacgatcttctacactgaagaggactaccgcgagtctctggctcgacggggatg

SEQ ID NO: 183062 - DNA, 158 bp, Arabidopsis thaliana landsberg
atggagggaagaataaaaaagccacaagagttagagaaacgtgtcttataccttcctcagggtttggagattcattggcaaggctcttcaatgcttcatctggaaaagcatgagaattttggcttatctcagtatgtaacagagcaacgaaagaaaag

SEQ ID NO: 183063 - DNA, 311 bp, Arabidopsis thaliana landsberg
  unsure (1)..(311): unsure at all n locations
atgttcaatggtaccaccacacgtggatacaagcttcttgatccttactttgcgttcatgaacccgaggccgacgtatgagatcacgttcctcaaacagattccagctgagctgacgtgtaaaggaggcaaatctccgatagaggttgcgaattacatacagagggttttgggaggaacnnnnnnnnnnnnnnnnnnnnnnnncacaagaaaggataagtacgcaatgcttgctggtactgacggtagggttccggtgaagaaggagaagacgtgattattgatcggaggatggagaaaacaaagaaataa

SEQ ID NO: 183064 - DNA, 131 bp, Arabidopsis thaliana landsberg
atgctgaacaatccattcggaaacattgattatcctttacccgcagataacatggttttcagaggggacagttcaaccagaagcaaaggcttggatgagccactgatgaacccaatagacaacattcaaga

SEQ ID NO: 183065 - DNA, 346 bp, Arabidopsis thaliana landsberg
ctgttgttcaagttgaatcgtccatttgaagttgcatctaggggatattcttttgttattagttttgcaaaggccttgacccttcatgaggtagcctatactgttactaaagaaacgcttatcttacttttggttagttgatttgaccgaccttatttcctctcttcttttgatatttttgtagagtgtactgcccttctgtatgcgagaagtttgggtaattactgcatgtttagcgctgatcgaagcaactgcttctcatcaccatgatggcgttgttgcacctgatattgagaaggaatttttccgtcttcagggtgatctctattcactttcacgggttaag

SEQ ID NO: 183066 - DNA, 366 bp, Arabidopsis thaliana landsberg
acttacccgctctttttcccgccgcgcgagctgtattaccggcagcggcatttcgagcagaccgcccgtgtggccgcccgcctggtctgcatctccgaatatgtgcgccagacggtgctgaagcatgtgcccgaccccggccgggtggtgaccagccacatctgcctgggcaagcgcatcgagcagccgccggccgaccgggtggagcgcgtgctcaatcgcctggggctgaagcagggggaatatctcttttatcccgccaatttctggcggcataaaaaccacgccatgcttctgacggcgttcgccctttatcgccggaagcatccggagtccgcattaaagctggtttttaccggcgcgccg

SEQ ID NO: 183067 - DNA, 280 bp, Arabidopsis thaliana landsberg
atgcagcgcaacatgagttcaactgattctccaagcagaccagttgcatcggaccacacgactatctatatgatcctgagattatcaaacatgagagctttccttaaggtttgaatgcagtaaattaaaccaaaagaaaaagactatatcggaaggtacttacatcgtgtcagatcgatctgtagctctagtagatcatgcgaatgttcgtgttatcggacaggttactttgaccaatgtgcatcacatggacaaagcttcagattctcaagctggttga

SEQ ID NO: 183068 - DNA, 5355 bp, Arabidopsis thaliana landsberg
  unsure (1)..(5355): unsure at all n locations
aatcatggagagtacgttgatgctctcaagtggtttaggattgattacgatatctccgtcaagtatttacctgggaaagatttgttacctacttgtcagtctcttggcgagatctatctccgcctcgaaaatttcgaagaagccttgatttatcaggtaagccctcttgaatcaattgctttttcctacttggttattgttggcttcctgaattttccatgaataattttggtgtttgagtttttcattttgaatttgtgttttttgctggtggttgcagaagaagcatttacagctagctgaagaagctaatgacactgtggagaagcaaagagcatgtactcaacttggacgtacttaccatgaaatgttcttgaagtctgaggatgattgtgaagccattcagagtgctaaaaagtactttaagaaagccatggaacttgcacagattctcaaggagaaaccacctcctggagaatctagcggattccttgaggagtatattaacgcacataacaacatcggtatgcttgaccttgatcttgataatcctgaagcagcccgtactattcttaagaaagggctgcagatttgcgatgaagaggaggtgagagagtatgatgctgctcggagtaggcttcatcataaccttggaaacgtttttatggcgctgagaagttgggatgaagcaaagaaacacattgagatggatattaatatctgtcataagattaatcatgtccaaggagaagcgaaggggtatatcaatctcgctgaattacacaacaagacccaaaagtacattgatgctcttttatgttatggtanagcttctagtctagcgaaatctatgcaagacgagagtgcattggttgaacagatagagcataataccaagatagtcaagaaatccatgaaagttatggaagaattgagagaagaagagcttatgcttaagaagttgtctgcagaaatgactgatgccaaaggcacttcggaggaacgaaagtctatgctccaagtaaatgcttgtcttggaagtcttattgataaatctagcatggtattcgcatggctgaaggtgagttttatagcttaaacactccttcctttttagtcctatcactccaccccatgttcgcatttatttgaaaagtttccagaagttaaagttgtccatcgtaggggtttttaatgatgaataagcattgtgagatttcatcaggtagtatggagtaggaaaaatatgctattttcttagatttgatgtaagttttgtaaacttctgctattgacactgtcttttcagatcagtcaggaagactatattatcaaagaattacatgattcttgttctctcaagaaaacctatcttttgaatgctgggataatatctttgttctgaacttgcaaagtaaagttattatgtggcaaaacgatgattattctgtatcatacggatactgagtgatccaagtctctgcatcactgtttcaatgacttgtgatatagttttgaaagttaagtaggaggctgccatttgaagtttgcatgcaactaaagggttgctatttcttctttgaatgtcttagcatcttcaatattcaaaaaggaagaagaaaatatcagatgaactctgtgacaaggaaaagctgagtgatgccttcatgattgttggagaatcttaccaaaatctcagaaatttcagaaagtccctgaagtggttcataagaagttatgagggacatgaagcaattggtaatctggaggtgagatttgtttgcttgcacgattaattataaaaacctatgttcactactgtcatcagaatttgattcacaaaaccagaaataattcattaggcttctactgaacattttctgtggaaaactgattataccttttcttggatttgtcaatattatagctattcttctttcctgattctaatattcacttatggtggtctcttgtagggtcaagcactagcgaagattaatattggtaatggtttggactgtattggggaatggacaggagcacttcaggcatatgaagaggggtacaggtagatccaattataagtaatctttatcaaactgcgcatttgagctattatgtggttatgtttgtgattcagtcctagtaaatctacttattaatcttccttgagagaactgataattccattgaacaatatgacggcgatgaaattcatttttttcttaaaatggaaagaacacttgaagcagagcaaatgtgaatgtgctataaagtacttaactgcttgttggttgtccctttcgactaagttcacgaattactgcactatggcttctgaataaataatacaatgtactttgaatcagtacttctcatgatagtggataattatagcacattttgcattttcaatcacttaaaatattttttctgtgactttcttctgctatattcaaacacatcgcatatacatttacgtgaatttatacacacatactgcatgctaataaattaactattggtctttctggattcattttcatttgatcctgcagaattgctttgaaagctaatcttccttcaatccagctttttgcactggaagatatacactatatccatatgatgagattggggaatgctcaaaaagccaggtaacaattactgtcttgtcactggacggaatatggatagacaccaaatctggtgtaaggtttgcagtttcaagtatttcattttactcatatattatttctactgtctagtgaattgaaggaaacaatacaaaatctgaaggagtcagaacatgctgagaaagccgaatgtagtacacaagatgaatgctctgaaactgactcagaagggcatgcgaatgtatcgaatgataggccaaatgcatgtagctcaccgcaaacaccaaattcacttagatcagaacggttagcagatctggatgaagcaaatgatgatgtgccactaatttcatttctccagcctggaaaacgtctgttcaaaaggaaacaagtttcaggaaaacaagatgctgacactgatcagacgaagaaagatttctctgtagtagcagactctcagcagacagttgctggtcgaaagcgtattcgagtaatcctctctgatgatgaaagtgagaccgaatatgagctgggatgccctaaagacagttctcacaaagttctaaggcagaatgaagaggtttctgaggaaagtatgtattttgatggtgctattaattatacggataatcgtgccatccaagataatgtagaagaaggttcttgctcgtatacgcctctccatcctattaaggtggctccaaatgtcagccaattgtagatctttgagtaataatatagctgttgaaacaactggtcgtcgtaaaaaaggatctcaatgtgatgttggcgactccaacggcacgtcctgcaaaactggagctgctctcgtgaacttccacgcttactcaaaaactgaggatgtgagcaactgtgatctggtttttgagttatcattgaccattcttgggattggatttcatttatttttctacttcgtccaatcttcttcatgataactatatgttttacttgttgcagcgaaaaataaaaattgaaattgaaaatgaacacatagctttagactcctgttctcacgatgatgagtctgtgaaggtggaacttacttgcctatactatttacagcttcctgacgatgagaaatctaaaggtatgtgcttttgttttcttagcaaaactttaggatgatcccagttcggatcagtctctataatgcatgatcccagttcggatcagtcctataattctcatctcacgcttaataacatttcttttgcttttcgatatcattccccttgtttcctagcacgttttaagttttgctctaaaagtttgaatctttgaacattcaatttgcgttaggtctgttgccgatcattcatcatttggaatatggtggaagaggtctgaaaccattggaactatatgcgattctcagggactcttctgaaaatgttgttattgaagcttccgttgatggtaagtatttccttgatagaattggaatctactcatgatatttggatgtatgattgtcaagctgatcattctataaatttgttttcatcacaaattgttctctcactttttacatgattgtggctgaaccgctgtattggcttttaagattatggtcattgattcttccctcttatttatacaccacggctgaatcagcatgaaattaatttgttttcaggctgggttcacaagcgcctgatgaaactatacatggactgttgccagtcgttgtcagagaaacccagtatgaaattgcttaagaaattatatatttcggaggtgagagtattaccccaaattttagcggttaatggatgaaatattttcttctctttgtttgcttttcaacctacttaaagctagctagttacaaattcttactttatttgatgtataatctgaatggttatttcgttgtatgtttatcaggtagaagatgatatcaatgtgtcagaatgtgaactgcaagacatatcagctgctccattattgtgtgccctccatgtccacaatattgctatgttggatctctcccacaatatgctaggtgaaagttgcctctgacgtcttacttagtttaatgagctgacctaagtgagttagttggttatgcatagggaactactaggaaattcagaagtgttaatttccatcgtctcattggttgttagggaatggaacaatggagaaattgaaacaactttttgcctcatcaagccagatgtatggtgcttaagcttgggataggccctgcaagcgatttggaccaactgctttgtttcaggtacactactaggcccaaagctagaaaatttcacatattcatgttattttcgtattatttaatatactcctctttaccagatctgtgaatgccgtgttctgttcactcgacttgaagtcctcaatgtgtccaggaatcgacttacagatgcttgtggatcatacctctcaactatagtgaaaaattgccggggtatagatttttttttttttttttaattatgataattcatttacagtatctaaatgccctgatggtatgttttgtttcttggtttcactggtgtcttatatacccagtagatagatatatgaaatacctgatattaggtttaataatcttaaacattttcttccattcactagcttacattaatgtgtccccttttgtttcttagcactttacagcttgaatgtggaacattgttcacttacatcaagaacaatccaaaag

SEQ ID NO: 183069 - DNA, 242 bp, Arabidopsis thaliana landsberg
actaaggacaccaagtcacgcgcccgccgcctgaaccgctacgcgagcttcaaccccctgcagacggtattccgtttctccggcagcgagccgccctacacgattatgggcgcgagactaacaatgcgcacggcgcgaccggcaccgggagcggcaccggttccgcccgtacagccgcccgtgcccccaaggccgagcagctggtagatcaacgcaaagcgcgggaccagttgagcgtgtag

SEQ ID NO: 183070 - DNA, 204 bp, Arabidopsis thaliana landsberg
cgcataacctcaatcgtttacgcgacatgtcaaactactactccaaccaacaaccgcagtacccaggcgccggcccctcggctgcccagaacctccagttcttcccttcgcagtatggtcctgccaccggcggcacgggcacaccgcagcccggcggcgcatatggctatggaaaccagcaggccggatttgctggtgcacccg

SEQ ID NO: 183071 - DNA, 1420 bp, Arabidopsis thaliana landsberg
atggatttcttgaaagttagaaaatttcgaaagtctcggaagccaaaccttgaaaaggagaaagaagacaagatattggctcagcaagaacaggcaaggagtgagaacactgaagctggtgtgatagattcggggaaaggagatgagatcgaagatgacgatgatgatttcattaccaatgaggttaaaaaaaggctcaaggagttgaggagaaacagtttcatggtgttgatacctgaggaagaagaagaagaagaagaggaatcgtatctagatgaagatgatgatgacggagaagacaagtgttcaagtgagtggagagatgtggttgctgaaggacttcaatggtggggaggttttgatgctgtctatgaaaagtattgcgagcgtatgctcttctttgatcgtttaagctctcagcagctcaaggaaactggtaaaagcttcttgctttgaactgtttttcattgtgatagattggactgatcatggatttgttggttacttttcaatctcttaggcattggaattgctccaagtccttcaactccatcgccaagatctgcatctaagaagctgtcatcgcctttccgatgtctttctctcaaaaagtttgatgttccggaggaagatatcgagcatttgcagccgacagaagttgacgacccttatcaagatctagagacggcctatgttgctcaactctgcctcacttgggaggcacttcactgtcaatacacgcagctgagccacttaatctcatgccaacccgaaaccccgacttgctacaaccatactgcccaactgtttcagcaattcctagtcttgttgcagaggtatatagagaatgaaccgtttgagcaaggctcaagatcggaactttatgctcgtgctagaaatgcaatgcctaagctacttcaagctcctaagattcaaggtgatttaacagctctcatacattgcgcgacttaaaaccttatgtgtagtagtaacacttgaagttggttatgttcaaaacatatcagggtcagataaaaaggagatggagaaagatacaggcttcatggtcctcgctgatgatctcatcaaagtcatagagagctcgatccttactttcaacgtcttcttgaaaatggataagaagaaaccaaatgggggtattcacttgtttgggaaccacaacaacaaccatgtgaattctacaactcctttactactggttcagtcatccattgataaggtacgatttctctgtactcaaatgttattactatcgtatgcttctttggtgtctcataagagaggaacttttgcagaaaagggtgaaagcaaaggagctttcaaagaagacaaaagggctgagaaagaaatcatggcctcaaacatgggaaggtgttcaactcttgtttgcagccattga

SEQ ID NO: 183072 - DNA, 74 bp, Arabidopsis thaliana landsberg
ttaatacctgtctgatgcaagcagttcatgcgattcaaaatgcagattctcatcaatgtatgcagatgctgtga

SEQ ID NO: 183073 - DNA, 102 bp, Arabidopsis thaliana landsberg
gtactggtaagaaacattcctgcagatcctcatgaatcaatatgtgaacttgttgaacatttcttcaaagtcaatcatccagatcactatctcactttccag

SEQ ID NO: 183074 - DNA, 308 bp, Arabidopsis thaliana landsberg
atgatgaagcaagctgatgatggagatgatgaggaggtgaataagaaaatgaaagaattgaataataaagctacaggagatattagaaacacgatcctcgtcatatataaaagaacgtctaagcaatgacgagatagaagaagcacgtgaagaattaatcgcggtataaatatttcatgttctcgactgttggtatggtttgcttgtgttcacgcacggctctgtttttgttatgatctgctcagggattcaaaagattatcggatgatcgaacatcgattaatggagtaaaaagattgggagaaatt

SEQ ID NO: 183075 - DNA, 81 bp, Arabidopsis thaliana landsberg
gttagtaagcgtgaagagttgtgtgcaatattttgttcgtgtgtgaagttcaaagaaaacgtttttggcaagatcagatga

SEQ ID NO: 183076 - DNA, 143 bp, Arabidopsis thaliana landsberg
gcattgatgaagaattttgccgaaaacgcgctcagcaacaagatcgactcagcaccggcggctccgcaattggtcgccaacgatgcattttccaggggcgatttcttcaattggaaaaccgtactatcggcactttcctatga

SEQ ID NO: 183077 - DNA, 61 bp, Arabidopsis thaliana landsberg
gaattatcctcggtatctgattcgtctccccgtgtttggactcagtcgcttccgtcagtga

SEQ ID NO: 183078 - DNA, 315 bp, Arabidopsis thaliana landsberg
atgaaaccgccactagatcatcaccagtaccgtctcatgacgcctcgctccactcttcaacagcagctgaagttagctcccccaccgctgatttcaaaacgtggtatgatgaaaaaaaataatagcaataattacaaggtattaataccattgtcctgtatgaaaaaaataaaaaaaaataattacaaggtataattacgtgttctcaaagcaggtaatatcctccttgatgatgatataaatgcaaaaatcggcgactttggaatggcgagaattttcggaatggacaaacggaagccaatactaggagaatag

SEQ ID NO: 183079 - DNA, 451 bp, Arabidopsis thaliana landsberg
gtaattcatgtgagtttggacctaagtgatgttaggacaataaagaaggtgttcagtaaagttattaagatcccaggtttgctgtttactcttttttgtttttcttgctagtcatttgatgagtggaacggtttagcagatacagtaccccagtgtagttcacatatagttctaactggcctccttctattgatttcttgtttaggtgtctattcggtagctcgagatggggactgccagattaccgtgactgggacaatggatccagaaacgttacacaacaagctgagaacttacaggcctatgatacagaaggttgtgctgacgaagaagcacgattcagatgaatatgatgaccgtgagaaatcgaagaaaggaaaggaaaagtttgttttggatgacgagtttcttcctacggaagacgcgcttcttcctaaggaagacacaaaca

SEQ ID NO: 183080 - DNA, 264 bp, Arabidopsis thaliana landsberg
catgcttggaggattgataacttacaaaatgaattacctaatacgggacagtgcacccaggagttgagcaaccaagtcaagaaggagacccctcaaatcgaccagcgatgggtattccacttggctaacaaccctgtaacggagaagcacccagaacttagaaattcaggtttttacaactcgaaaaaggaatgccaaaggataaaagaagtgtttagcgaatcatataaaattcaaccgttccagattctgaaatcactacct

SEQ ID NO: 183081 - DNA, 660 bp, Arabidopsis thaliana landsberg
atgcagagcttgcaaaagaatgttctatcatctggtgaggaagggatgccttatgataacatattcgtatggaattcgtatctgacgcagcctattcgatcaaggtgcaacaacactatttggacactggcattagttcatgggcactttaagcaggtattgtcttagggcttcaatcctatgtttgatgccaggagttaaaatggttctaactaactttccccatcattcagataagactatcaatatatggaagagacttcagtgttactttagtctccagacgttctcgacattttgcaggcacacggtaagaattctttcttatcaggcctctaatgtatgacaaattcatggtgaccgtttcgattttctgatgccctttcttagttataccttttatctttagagaactttggttagggtgaatataattagtgatgtgaccttttctagaccagtttggatgattgtctccgttttttactgtaaaatatatatagcccttttcattctgtaaaacttgtatttcagttacttgaaaaggggagtgaatgatcgtggaagggttgcaaacgatgttgaaccagaacaacttgttcttgatgatgaatctggatcatgcaaaggaaaaatgagctcagaggtgcaaatgcgagg

SEQ ID NO: 183082 - DNA, 247 bp, Arabidopsis thaliana landsberg
atggggaaggagaagaaaacagagtcgtataataacgatagcggtagttacaattacagaatgttcaaattttataaccgtaaattcaagatcaacgaagtcacacccaccgacgacgtccgtgacgctttttgtcaattcgccgtcggtggcggtggtggaggaaccgatggagattcaagtgatggtgacggatcaaccggtgtaatgggtgcagagcagctttgttctttcctcgatgatcacg

SEQ ID NO: 183083 - DNA, 199 bp, Arabidopsis thaliana landsberg
atgctgatgaagacggcgatgctggactggctagcggtcaccgagcccggcttgcgaacgatcgagaccggcaaccccgccgtcaaccagtacatgatcgcgaccaacgagcaactgggcttcgccgtggcacatccgtggtggcaggcgtacgacatcccggtcgcgtccgtcctcgcccagaccgcgtcacgccccg

SEQ ID NO: 183084 - DNA, 935 bp, Arabidopsis thaliana landsberg
agatacgcggcaagcgctttgtttgcaatcgcgcttaaccaagcgcagatcagccagtcaaagccattgggaatcccggccaccggaagtaccggagagccaatcagcagcgacagtgatcctatctccgatgaggcggatctctgggtccacgaagtttccggcctcctccgtcctgttctcaggtgatcttgaaatcatctggaatagtcatgttcatatgcgtctctgtgtgtgtaatgtatacattttgagctgtctctgtaatttgctttcagatgtcttcagattgattcatcagcttggcatggccttgaagagatagctgcttctactcaggctaaggatcacatcggtgcggtatgattaatttctctccgtattttgaaatttcgttgtgaatgttgaggagctcttctttattggatgttacttttggtttattgtagtttatcaagttactctcagaggatgtgagtgatggtgatgatgattctagtgaaatggtggagaaagagaccgccttagctaaagctgctgatgctatggatcaaaacattcgaagcagctctctatctgtggaatctaagatggagaaacatgtggaattcgaaaacgaatgccgcgacaagtattctgttcccgaggcacagtctggtgctgaggttaaggaaacggagagccacggggagggtgaaattagagatggaggccacaatcttgggattgttgaacatgagaaacctgttggggaagtagcattgcttagccatgagagaaagataaatgttctttacgagctactatctgcttgcttggcagataaacatgaggagaatgagatatgtacacggcgtaggaaaggctatgatgcgcgtcaccatgttgctctgcggttacttgctacttggtttgactttcagtggattaaaatg

SEQ ID NO: 183085 - DNA, 170 bp, Arabidopsis thaliana landsberg
aggatttgagcgtgattttcgcgatttatcatcggagcagccaattttggtgtctttgtcttctctgttcgaattcgcgtcctgatcggaggaatgaaggtcgaaaacgcaggcgacgggagatgatgagaaacgacggagacgaagacggaaccggaccggagatatag

SEQ ID NO: 183086 - DNA, 360 bp, Arabidopsis thaliana landsberg
atggctttgcgggagcagcttgataagttcaataaacagcaagagaaatgccaatctacgctttcgagcatttcttcttcaagaacggccccttcgagatcatacgtgcctgcagcaacaaccagtcagaagcctaatgtatttcgtggcaagttttcagaaaacacaaagcaacttcagcacattaacaacataagaaacagtgctgttggagctcaaatgaagattgtcattgatcttttgtttaaggtttgtgtcccttctctttctagtttcttcttcatatgagcttaatttatataatgaagttgatttgtcttgtagacaaggctagcttatcgcacagccataatgaagctt

SEQ ID NO: 183087 - DNA, 149 bp, Arabidopsis thaliana landsberg
gacaacccctggactttatggctcttcacttgaagaagtttgtttagatattcatgcaccagcaccgcatcaacatgaaccgccagagtcagaggaagaagacagagaggtgttcagttggatagcagctgcaataggattcggacctg

SEQ ID NO: 183088 - DNA, 92 bp, Arabidopsis thaliana landsberg
tttttacggtcaaactcaacgatttcgaagataaagcaaatcaatcacaacgagagaaacagacgaagctgattcgaagagtatttatttaa

SEQ ID NO: 183089 - DNA, 804 bp, Arabidopsis thaliana landsberg
gccaagcaacgtgctacttaactcgaaaaacgagctaaagattggtgattttgggcttgcaagaacaacttccgacacagacttcatgactgaatatgtcgttacccgttggtacagggctcctgagttgcttcttaactgctcagagtacaccgcagctattgatatttggtctgttggctgcatactcggcgaaatcatgacgggacaaccgttgtttccaggcaaagattatgttcatcagcttaggcttataacagaggtataccagtaaagtaaaaaaagcatcagttttacacttttcttaaactgcaatgcccaattctgatttcacttaatatccatttcttgatattagcttgtaggctctccagacaattccagcctcggcttccttcgcagtgacaacgcaagaagatacgtcaggcaacttccgcgatacccgaaacaacagtttgctgctagattcccgaaaatgcccactacggctatcgatttgcttgagagaatgctcgtctttgatcctaaccggcgcatctcaggtaacaaacaacacaaagatccttaaaacattcatgtggttttttgcagtttgcttttggcttatcaattagacctgcatgtgttgtgtgtgtagtcgatgaagcccttggccatgcttacctatcaccgcaccatgatgtggccaaagaaccggtctgttcgactcctttcagctttgatttcgaacatccttcttgcacagaagaacacataaaggagcttatctacaaggagtctgtcaaattcaatcctgaccactga

SEQ ID NO: 183090 - DNA, 206 bp, Arabidopsis thaliana landsberg
ctctcctcgctcgtcgtcgctactgcactgctcgtcgccggaggttgccgttcgtcgccagagttcaccagagctcgccattcatcgtcggagccacgcacccgccatccgaagaccgaatccctgctcttcttcacccggccgaaaccccgtcgagccctccccgtcacatgcacgaacccaaggttgatgacgacccaaattaa

SEQ ID NO: 183091 - DNA, 119 bp, Arabidopsis thaliana landsberg
gcagccggcgggagatatgcgacgcggccgccgcccttactctcgcaggcaaggcgacaagacgccttatgcctccacgctcgccttatcgctttagcgacgctaaacgtacgccataa

SEQ ID NO: 183092 - DNA, 1384 bp, Arabidopsis thaliana landsberg
atgtctccctcgttttgctccggccgatgcaccgccgcgctcttcctcgttatctccgccgttccaatagcttacctcatctccttagagctagctgttccttctacacacgtcttctcttaccaaagctccggcttcttccgagagtgcgccaaatgggacgatgttggtcggagattccttgtctccttcatggacggtggcggagtcggcgagattgttcctaaagactccgacgacgttcttgaagaagtcactttggtcaaagacgttgacctcgccggtaacgcttccctaggaatcgctatcgaccacgtcagaaaccgtctccttgtcgccgtcgccgacttgcttggaaatcgttatagtgctttagctgcttatgatttgtccacgtggcgtcgtctcttcctcgccgaacttagtggtcagagtaagattcttaaccgtccgatttcatcaactctcaattagatccgaaaccgaaccgaaacgaaccaaaattcactatcctaaaaaggaactacatctttatctatatggtttaaatggatttatttttctaatttaagaaacagaatccgaatccaaaaccaaacagaaacaaataaccagtctaaaccgaaccgaaaccaaaactgtaccaaaataatccattgtagactaggtcttagtaataaacaaaaaaatgttcaattcgaataggttttgtgaaattattggataatggtttaactctatatgaatatatatgatcaatgtaggtaaagagaaaacatttgcagacgatgtagctgtagatgaacaaggcaatgcttatgtgactgatgcaaaagctagtaaaatatggaaagttgatgttaatgggaagcttgtgaacactattacaagtcctctctttacaccacctggatggtacaataaccttgttgctcttaacggcattgtttatcaccccgacggctttcttatcgttatccatactttctctggttacttatacaaaattgacttaaccaatggggatgttagtaatcaagttagtgtcattgatgtttctggtggtacattgaggtttggagatgggcttgagttgttgtctccaaccaagattgttgttgcaggtaaatctttaacatctttagtatagttatgatttttaagcctatgttaatgaatgtgagtgttttcaggtagctcgtctacaaaactggttgagagttcagatgggtggagaaccgcttcggtgacgggttggttcagcagcggtatggttcatcgggtagtctcgtcggctacagtgaaggaaggaagagtttatttaaaccatattgttggatttgggtctaaaaagaaacacgtacttgtagaagctgtgttttag

SEQ ID NO: 183093 - DNA, 2195 bp, Arabidopsis thaliana landsberg
gtttcctccaaagttatgagcgaaccatgtcgtctcaatcttctctgcagctgcaatcgtcgtaacgtttcagagaccatagacactgtattgatgttttctacacaaatctctaaaacattcatgattctctggaagcttattaagttattgttatctactctgtctcatatggtacgattattgttattcttctgtttcagataaagaacataatcgcgacatgtatccgcaagtacatgagtctagaagaaacaatggattatatgcaggaaaatcacaagattagtcaccatctcaccaaaccaagtatgtgttatataatctctttttctgtttgaattgattctgtgcttgtttataaagaattcagttttgtttcttttattagtatgggagcagcttgagaaagagaatgcagattttttcaacaagtaccacttaatacgcgaattagcgcgtcaaataaaattgtttaacagttttcttggaaagcaagtttctctgatgctcgagaatggagattttgatattagtactgcaacatgtacgtataacacaaggactaaaatctctaaataacgttcattagttttttgaaaattgggtttgttctgctttgtttgataactctttgcattatgcagctgataggtcagagttgagcactttaaacatgggaatgtcggcattggatgatacaaatggtctaacaggtaaagtcgaaaactcgatttcttgcacttttgacatgtaagaattcccttatgtttctctcttttgtagtaaaccagtcgcagaatcctaatgatcagcaatatcaatttcattcttgtcagtggccaactacaactaatcatataccttgtaagcaaagactcaaacctttctctctttctgaatattgagtttgtaggtcatgattgcagctgggcaaaaactcgattatatatttcacttttgatttctaaagcttcctttggtttctctgtcttgtagtaaaccagttgccgattcctaatggtcagcaaaatcatatatggtctacaccaaataatcatgcttgtaaagaagagactcaatctttctctcttaatctatcatttgtttaacacttctagtacttgaccatttttttatgaataactcaactttctttctccataggtaccaatcttggagcttctaccattccaccagcagctaatgatcaatggtttccttataaggatcctgcgtgtaaagaaaacactcaacctttctcccttaatctctcatatgcttatcacttgtacttcagcactattatgaatgactcaactttatttctccataggttccagtcttggagctcctaccgttccaccagaagcttatggtcaattgttgccatatactgatcctgcgtgtaaagaaaacactcaacctttatctctcatagtttaaacccttttcacatcaaagattttgaatgaatcactctttcttttttgctccatagattactatccagtactatattcaactgcagcaccagcagctactactcaatggccgacatctactgattttgcttgtaaataatatactttattaatcttcctttctcattatattgttttgtaactcttctacttaagcatttgtatgattcattctcctttctctttcccttagatactggaggtccaactcttccaaaagcacctactgcggcatttgatcattttagagatggtttcggagaagatattgacaatagcagcccaaatttccagcagatggatcctttaacagccgcactacaaacgctacccgatgacatgctacaagagctatatcaacaatgccaacgacaatcgcagcttcaacagaacttctcactagaagagcagcaaagacttcaatgtaaagtaaacaacaacgggcttcaaggagtagtaaggccacccgaaaagccgccacaagacctatatggacaatgtcaaccgcaatcgcagctgcaacagaacctcccagtagaagagctgcaaagacttgaagttgaatatcgagcaaacaacaacgagctgcaaggagtaataccgcagcaacagcatcatcaggaacaagaagcaatgcagacacaaggatatccactgaatcgaatacctgttcaatctgaagcttcaaaccattcagatagtggtaagtag

SEQ ID NO: 183094 - DNA, 108 bp, Arabidopsis thaliana landsberg
agacgcttcagatcagccgcgtgtttatccgacggctacgagtccacctcaccaatatccgacgaatattattccacaaacaaaactacaaaagttgatcatttttga

SEQ ID NO: 183095 - DNA, 60 bp, Arabidopsis thaliana landsberg
accattcttgtagtagctgttggtccatgtgcagttgttcagctaggctctttgtgtaaa

SEQ ID NO: 183096 - DNA, 163 bp, Arabidopsis thaliana landsberg
atgagtgaacgactggaaattttaaccgggatagaacttgctcatgagaaaggctcaggtcccagaatagaaggagaaccaagcatcgataactattcacttttcttatctggtgattataagccaactagttggatggctattagacctggccttcgcttta

SEQ ID NO: 183097 - DNA, 301 bp, Arabidopsis thaliana landsberg
atgagggagaaggtggaattggcaaccaaatttgggcttctcttgaaagatcagaaattgggttacaggggagatccagcctatgtgagagctgcctgtgaagcaagcttaaggcgtttaggagttagctgcatagatctttattaccagcataggatcgataccactgtccccattgaagtcactgtaagctttttcttggcaatctttcttctttcttgaatccttcagctgattgttatggtgttgtcttgtcctgccatttcaaagattggagaactgaagaagctagttgaagagg

SEQ ID NO: 183098 - DNA, 1399 bp, Arabidopsis thaliana landsberg
acccttgtctctctacccaccaatcttcgcttcttcttctccggctccgagtggtcgtcctcctcgcaccgccggttaccgtcgcagtggcccttctcctccgagacgcaaatggagtagtttcgaggagcagaagagaaaaggtaggtctccgatggagaaagataaagctattagctttaatcactcttctgattctttcgagtttaataagagaagagctgagggattggataaggtcgataagcctaagaagaatctcaagaggaatactcgcacccttaaccctaccaataccatcgcctatgttcaggtttcaatttcatatctactccaatcttaaactgtgaaagatgatgcataattttgaactattcatctgttttgttagatccttgggactggaatggatacacaggatacgtcaccttctgtattactcttctttgacaaacaaagattcatctttaatgctggagaggtaagtttttctgcaattttattataaagtgtgtagctttttgttagtgttttattggttaaagaattgaattgcaggggttgcaacgtttttgtactgaacataaaattaagttatcaaaggtgtgaccaaacttcttcttttggacttactactacttgtgtctgtgatgagacgagtttaatatgtgatgattcgcttaactcttttcaggtagatcatatatttttgtctcgtgtgtgctcagagacagcaggcgggcttccaggtttgttttcttttgatttaggcatcagctgcattgtgtttgctgctagatcgttagacagtgataagtgttgttcctattttaaatgctttaggtcttctactgaccctagctggtatcggggaacaaggactatccgtgagtgttcttctcatatgatctctttgtatgtttcctgtctgcttttcctgagcttatgacaattattatatgagtggaattgctcaacttctaaaatctcttttgttacaaaggtcaacgtatggggtccttcagatcttaagtatttggttgatgctatgaggtcatttatccctcgtgctgccatggttcatacaagaagttttggtccatcattgaatatatctgactctgcgcctcagattggcttaagtaaacccaaagatgatgcctatgttcttgtggatgacgaagttgtgaaaatatccgccattctcctagaaccaagtcgcttagaggaatctggcagcaaacctggtgaaacagcagttatatatgtatgtgaattacctgaaatcaaaggaaagtttgatccaaagaaggccatggctcttggattgagagctggtccaaagtacagttatcttcagtctggacagtcagtcaagtcagattttaaagatattacg

SEQ ID NO: 183099 - DNA, 608 bp, Arabidopsis thaliana landsberg
atgcagaagctgaatccgcccgcctcgatcaccggcagcgtgcagggcacggcgcaggcgttcgagcagtccatgcagggcatgggcctgctgctggtgctggcgctgttcgtgatctacctggtgctgggcatcctgtacgagagcttcatccacccgctgaccatcctgtccggcctgccggcggccggcgtgggcgcgttgctcacgctgatgatcttccacgcgccgctggacctgttctcgttcgtcggcatcgtgatgctgatcggcatcgtgaagaagaacgcgatcatgctgatcgacttcgcgctggagcggcagcgggtggaaggcatgtcgccggccgaggccattgtcgaagcctgccacgtgcgcttccgcccgatcatgatgaccaccatggcggcctttgccggcactttgccgatcgcgctgggcatcggtgcgggcgcctcgtcgcggcggccgctgggcctggcggtggtgggtggcctggtggtgtcgcatgtgctcacgctgtacctgacgccggtgatctacctgtacatggaccggctgcagcagcggtttgggcgccgtgggcgcgctattgccacgacggtgga

SEQ ID NO: 183100 - DNA, 73 bp, Arabidopsis thaliana landsberg
atgaaatcgccaaagcttggctctgtagctctcctcatcatagcctctctttgtattaatgatcaatccgctc

SEQ ID NO: 183101 - DNA, 906 bp, Arabidopsis thaliana landsberg
atggattcttcttctcttcttccttctcaatggtctgatcttcctttagatattcttgagttgatctccgatcgtcttgaccacgactcatcagacaccattcatctcctctgtctccgctctgtatgtgccacttggcgtctctctcttcctctctccaacaaaaacaaccgtttgtctaaattcccaaagtatcttcctttttggtcatcttcttcttcatcctctggtttcttcactctgaaacaaagcaatgtctataaacttgaagctcctttgaatccgagaacttgtctggttaagcttcaagagacaactccagggattatgcgagtcttggatctattctcaaacgacagaatctgtttcttacctgagaatttcccgtcaaagatcgacttgcaggagtttcatgtgagattggttcgtagaacttatcgtatggagtacgcaaacaatggtggtggtgcagtgccttgtttctggtctctgcattccgacaaagttgtgattttgtcttcaggggaagactcggcgataattgcgattcacagtggtgggaaattagggtttttgaagagtggaaacgatgaaaaatggaaaattttggataattcatggaatgtgatttacgaggacataatgttatacaaagacaatcgttgcatcgttgtagatgataagggcaaagccgtaatttacgatgtggatttcaaggtttcggatttggctgaaggtttggtcggaggaggaggtcacaagaaacatctagtggaatgttccggcggagaagtgtttcttgtggacaaatacgtgaaaaccgtttggtgcaaatcggatatttcgaaatctgtggttgagtttagagtttataatctgaagagagaagagaagagatgggaagaa

SEQ ID NO: 183102 - DNA, 789 bp, Arabidopsis thaliana landsberg
gtaagactctttctggagaaggcttacaagctatcacaggaatggggaaatattcctgtggcgattgcaggtgatctgaatagcactccacaggtgatctctaccaacttttgttttttttgttctaatacttattttttagctgaattctaaaacttactctggatttgctgtacagagtgcaatctatgatttcatagcttcagctgatgtgagttccattgagggttctggactctttcttttacatttcgcctggtcataatttttttcctttctttactgggaaagttagaatgaactctttatattccttttttaattttggacagttggatacacaacttcacgatcgcaggcaaatttctggccagactgaagtggaaccaaaggagaggtcattcagaaaccattatgcatttaggtagcttgtaattcaccggggtctttggtttctctaaataatgtatccatattccttttctgcctacctgatgaacggatagattgcttatatctcttctgtttacctgatgaactgatagagtgatagattacttatatttttctttggcctgcgcttaatcaactacgtaatcctcagatgaagtttctatctcaatttagtctaactaaacaactccctctttcgtcagtgcttcagcatccatctccggatcactactcaatgagtggagccaggaagaattacagcttgcaactggtggtcaagaaaccactcatgtccaacatcaactgaagcttaatagcgcatatagtggagttcct

SEQ ID NO: 183103 - DNA, 494 bp, Arabidopsis thaliana landsberg
atgagcatctacgggcagccagaaaagccgcctccagccaccaattcattgcgagtaacagaacatcttccacaaaatagcgacgcgcttaatccaaacgccgcctcaattccccatggagaaccccaccaaggcaacacgtagtgaaaattttgttgcaaactgctataggctgatcctacaacaaaagaaaaaagcaacctaactgagccacaaaagagccacattgaagcttcaacggaagacgaagccaaacaaaaaacctccacacaaactattgccacatccacattgaacaaatatagtaaacctctctgagaactccgaccagctagccacaaccacaaagagcccgaggagagaagcaaatctaaaccaaacctgataaactgtccgagagaccaaatcgaaggcgagaatgagtcagatccggagccgtccttgagctccatcacctcctccgccgtcaatctctccaaaataagaacaattag

SEQ ID NO: 183104 - DNA, 123 bp, Arabidopsis thaliana landsberg
aatgattcatcatatgatcatccagccattcctcatgttgattctgaatttgactcggattgtaaattccatcttgaacccaaatcggacatccaaactgttgttgatattgaaattgattaa

SEQ ID NO: 183105 - DNA, 266 bp, Arabidopsis thaliana landsberg
  unsure (1)..(266): unsure at all n locations
atgcgcctgaaaatactgnnnnnnnnnnnnnnnnnnnnactgcccgagctgtacatccgcgcggaactcacggactcggacaacgtgaagatcttcgcgctggaagaagaagcgccctcccgcacgcacatcgcaatgtggcgccggaattcctccgcgcggcagctcttccagccgctgtcgttcgagatcaaggcgctcacgatggatgcgttcaagggcctgctcgaagaggtctacacggacgacaacctgccggatgcctg

SEQ ID NO: 183106 - DNA, 1102 bp, Arabidopsis thaliana landsberg
atatgccaggataaagcacaagcagactcatggtttaaaggtcttagagctgtgataacaaagcatcataacattagaaactctgtgaatcatcggagtagtaggggagctcaaagttgcatcaatagtcctgcgggttttatgcgaaggaaacagaatcttggacttcttgaagagactcctgacgtcactcaggtaactaaaagacactttctttaaccatttatatattgttttcgatttcttgatgtatcttgttatgttcttgaagatacgtagcttatgtggaagtccatcgacgttacttgaagagcggtgtttgtcgaacgggttgtcatgttcttcagatagttttgctgaatctgatgccttgggtccagtttcttcttactatgaaacagattatgatttcaggaactcggattgtgatcgtagtacaggttcagaactttgcaggttttcatcacaaagatttgctgcttctcctcctctttctatcataacacagccggttacaagatccaatgtccttaaggacattatgatatggggagctataacgggtcttatcgatggatcgaagaatcagaacgatgcgttgtctcctaagcttttggaatctgctacgatgtttgatgtacagagtatatctctaggtgcaaaacatgctgcgttggttacaagacaaggtgaagtgttttgttgggggaatggaaatagtgggaagcttggacttaaagttaacatcgatatcgaccatccgaaacgcgttgagtctcttgaggatgttgcagttcgatcagtggcttgtagtgatcatcaaacgtgtgctgttacggaatctggtgagctgtatttatggggaattgatggtggaaccattgaacagtcaggaagccagttcttgactcggaagatatccgatgttcttggcggatctttgactgttttaagtgttgcttgtggcgcgtggcacacggcaattgtgactagttctggtcagcttttcacttatggtagtggaacttttggagttcttggacatgggagtcttgagagtgttacccagccgaaagaagttgagtctttgagacgcatgaag

SEQ ID NO: 183107 - DNA, 478 bp, Arabidopsis thaliana landsberg
  unsure (1)..(478): unsure at all n locations
atggcgtgtcttcaatttcatcttcactgttactgtatcgtctccgaccttctgaacgacgtcattgcagagtaagccgaagagctctgacctgtttagactgaatattagccggaaattctcccagattcatcattaaaaggtctgttccactagtccatataatcttactttcttagtcgagcttattgtttgaatctccttcatttttaaagatttagaatatcagatctatatccttattgcttttggatcggaaatttcttcacccaattgaaacgccttactattagggtttacgcttgtgtacaagatgatcgatgttaaacatactgcctcttgcatatgtttacttctctgttattcccatgtttagtctatatcattgttaatagactaacttnttatgtntttgcagttctttttcaactgctaatctaatggcttcaggtcctgatgaagtgacagcggacgtgag

SEQ ID NO: 183108 - DNA, 896 bp, Arabidopsis thaliana landsberg
atgatccgtttcaaaaggacaacaaattggtggttctatgatgaagggattgagtttgaggatggcactaccctagaagctgatgttgtgatacttgcgacaggatatgatggcatgaagaagctcaaagccattgtccctgaaccttttcgatcatggcttgagtttccttggggtatcatgcctttatacaggtacgtacacttttttaatacacttttttttttttaatagtaaacttgttctaaactattccgaaatgttgtgctaatttgatactgtaacaaaatatacatgtcttttgttcttgaaaaaggcttatatatttaagaaaacatgtgttacaattcaaaaaattctaaagattcatttaatgtaaaaattgcatacacctaaagatatggttaaaacgataataatatatagttttacaatatctttctaggccgaaaaaaaattatatggctcatacggttgtggtcttacgggtttataagactatatatttacatagaatttttaaaagaattgttaataaataacgattatataataatcgttgcttatataaaattggaccgttgcttatataataacgatgctaatttactaaaattttcaggggaacaatccatccgttgataccaaacatgggtttcatcggatatgttcaaagcagctctaatttgaaatcatcagaattacatttaaggtggctcagtcagctcttggacggtaaattcacattaccgagcaaagaaaagatgttggatcaattccttaaagaaatgcacgttatgagaagatcaagcagattcttcaaaaatcattgcttctccactttcagcattcaacatgccgatgatttgtctaaagacatgaatctcaagccttag

SEQ ID NO: 183109 - DNA, 244 bp, Arabidopsis thaliana landsberg
atggagaggctgctggcggccaaggggagagcaggggcgccggcgtgctcccagggagctcggccatggctcctctgctgggcgtcggccaagggaactgctccctgctcgcacgggaccaaagaaggtggaagatggggcgctggtggtctgctgctggaggaagaagaagaggggcagggggcaccagcgccattgctggctcgaggggaggaagggcgctgctgctgggcgccagccagag

SEQ ID NO: 183110 - DNA, 123 bp, Arabidopsis thaliana landsberg
gtttatgatttgatagaatgtgagttaaggaaagacttggagctgaaagagatactaaaggagaacagaagtcctagaattctggcaaatgctacgtcactacgctatgatgaaggcaaataa

SEQ ID NO: 183111 - DNA, 285 bp, Arabidopsis thaliana landsberg
atgacttctcgcctcgccgaggcctcctcaagcaacggcacaccctcgactcgcccgaagcccagctcgggcaggttcgcagtgaagcaaccttggccagatcgcctcaccaaccgaccgtatcacaggcacattcaatgcgaggatcgcctgacaccttatcctgacacacgtgcctcagtcggcaaggtcgaagtgaccgcaatcacttcgtccttccactgaccgacctgacaggaaaacagcgtcgctcgcccctctccgactgctgtgccacccgccagg

SEQ ID NO: 183112 - DNA, 119 bp, Arabidopsis thaliana landsberg
attttatgacgttaaatattgtcattactccaaagaaaaatgtcactaataatcagcttaagccttgccatatggaccagattgtcataaaatcatgcatacctatgatgtggagctga

SEQ ID NO: 183113 - DNA, 603 bp, Arabidopsis thaliana landsberg
atggaaggattgatcaagcccgcgggaattctgttggtgctgggatcgttggtgctgttgtaacaaccgctgtggtcgcctgtcgtgccagtcacggggcatgtggtatacgcggcgcccggctttttgatattgatgaggtcatccgccgtggggtttatctttccctgcgcgtagctctgggaaaagtctcccacccgctcaagcgccgtcggcaccgtgtacttcgccaatccatatgccctcttatttggtagaaactcctgcgagtagaagaagaagagcttgttcttcccggtattgaagtgacccggccaataaatcggtccgccgatattgccgcctacggtattcttacgcgacttcggacgcctggagccattgtagttattgaaccaatcgttcgcgttaagagcttcattctgcatgtagtagtacagcgacccatggaactggctcgtaccgctcttggtaatgatattgatgaccgcgccgcccgtctgcttcccatattctgcctggtagttcgaggcaaacacattcaattccgcgatggtgtcgatgttgggaatggtgtccgtccttccctctcgcacgctgccg

SEQ ID NO: 183114 - DNA, 105 bp, Arabidopsis thaliana landsberg
ccagctaaattgggatcctacgtcattttccgaccgtacgtacccacgttcggcatttatgtgacagattcttgtggatcggtctatcgatctttcggcacctga

SEQ ID NO: 183115 - DNA, 109 bp, Arabidopsis thaliana landsberg
agaagatcttgaatctcatgaagagcgagatatcactattgatattgaatttgaatcagataatgagcaggtggtgaatgtggatgtgatcagaggagaacaagtttag

SEQ ID NO: 183116 - DNA, 85 bp, Arabidopsis thaliana landsberg
gttcaaactgtttgatgagtgagaatggttgttcaacgctttaccttgatccaactcttactggttatgacacacagagacactt

SEQ ID NO: 183117 - DNA, 680 bp, Arabidopsis thaliana landsberg
atggagccaaaaatgattgaaattgttattgaatcaaagtcaatagcgcaagcaatggtggatgcagctataaaggtatttataatatatctagagacttcagagtcttctaaatacagagaagccaaattcatacaactctaacatcttttgtttaaatcgttgtcaaccgttttaggctgcatcgtcggggaagaacaatgaagactcagagaatatggttcaccaagctttaagctccattggcgaacatcagccattagacaactctatagtgcctggtatcaagcatcaagagtataccaatggcagcttggatcatcatcccttaaacacagcagagccgatgagtaacggtttcatctcacaggaaggatcaggaaaaaacaaaacaccaatgccttcagagcttatcacctcttgtgttgcatcttggctcatgatgcaggtaaaggaaataattttgtcttggactaacgaaagtgtaatctaaatcaagaataccaaagttttcacttgatgcggttttgattagaactctttgtgtgttatttacctgcagatgatctcaaagaagcagtacccaccagcagatgtggctcagctaatggatacagtagtgaatgacttgcagccacggtgtccacagaatatgccgatatacagagaaattcaaactt

SEQ ID NO: 183118 - DNA, 513 bp, Arabidopsis thaliana landsberg
atgtctttgaaatcaacgtccattaaagtatcgaattcaacggcgacgaattttgaaccggacccgttaggaccggttagaccaagcgagccaccggcgaagccgattgagtttgcgtcgggagagatgacgaaagcgagaccaccgccgatggaagaagggttgacattggttatagagaaggagaaaaaagaagagaagcttgtcggaaagtgagttccaggttgtcggaatctgattgggttagagtataagacttttccggcgccggaattaggtacagagagatcacgtgtgaggccaacgattccattgcttaaacgagcatcaccgaggagtttgaggttgcttatggctagcgtggagaaatcaaactgtgtcgtcgtagctccattgaagaaacagagcaagattgaaatgaagaagaaggagagaaagagagacattaatgatcagttgaagaaatgttttttcagagaagggccattggagaagaagaagaaagaatcttaa

SEQ ID NO: 183119 - DNA, 205 bp, Arabidopsis thaliana landsberg
caaggggcgaacccccaaccgtcagatctagcgccgacagggccactgtgtcttacaccgaacatgagaataagggaagctgcttcacaaacgataggaacatgaagattcacatacattacccttacaaactccatgagtcctacaactacgacaggatacaaagcgcactgcctacaaaaaactatgaccgaacccatggaag

SEQ ID NO: 183120 - DNA, 467 bp, Arabidopsis thaliana landsberg
atggtcatccaatacaagtctcacagcgacgaagaggtattcttaagattatttattccactgtaactgcattgagtactctctctctctctctcgatgtgcttcttacttttgtttccaattacctgatcaaatatctttctggccatttaggttatgagtagaatcagaatgcttgtgacaaaaactgaaactcttagagttggagttactgctagtgatgcagctttgacgctaaagattgctcctgccatggctaaggaacatctactatctgcagagaccaaaggtgccttttttccctactccaataaaagcttgcccgacgaaacatggatctattagatttatatgatgctcacgttcccatttgttgaaacaggtttgctatgtagagacatgagcccagatgggcttcgattctatttcaacctgtttcccgagattgatccaaccaatctccatat

SEQ ID NO: 183121 - DNA, 1053 bp, Arabidopsis thaliana landsberg
aattccaatctgggaaataatatgcgctttggtaaaattaattttgaaaaccaagtaaaactaagagaagtcattaagcctcacaactgcttgattacatggtcgtaggttagagtatcccggagttggaccggagattagtttcatgaaagaaactggtagagcggagttctacacagcaacggacgaagaagcaattcaaggtacgtatacctctatagttaggcatgaccaaaatttaaccgtagctgaattttggatcattttgaaatcgtaactagaccataatcgtataaaaaccataacggttaaccataaaatagactaattaaaaatatatagcaatcgtaaccatatcaaaatcgtagttaaccgtacagttaacctcacaatttatcgtatagtactaaaaccttaaaattactattttaactatttgtaatgcaaacataaatgtcgaatgttcggataaaatatttcaaaaagaataatatggcatatgaaaaaatctataacatacttttcatcgtattaaaagcaataaaaagtcggataatacgtaagattttgcctccggtattatgtgtattgtaattatccataatcatgatcgtaattatccaactgtaaccttatctaaccataaccatcttaactgtatatataatggttaagattacggttaaaaaataattatagccctaaccaatggttaataaaccgtaaccgtaataactttaaccgtggtcatgcctatctgtagttacttactattaatgttttctttataatatttacaagatttttttttctttttctatatatacataaaacattaagcttaattatatgttgtcgactgcagcgtgcatgcgattaagcagattggagggaataataccggcattggaagcgtctcacgcgctcgcgtttctcgacaaactcgttcctactctgcgtgatggagccaaggtggtagtgaactgcagtggccgtggtgacaaagatttagatactctcatccaacgaggcatgccttcttctttttgttga

SEQ ID NO: 183122 - DNA, 340 bp, Arabidopsis thaliana landsberg
atgtacatatgtgttccatgcaaaagtgaagtgctatcaaaagaacgacccaccgtacgaaaaagagggcggccccctgggagtgtccggaaaaaaattggagttcagacgcaaaagcgtaaaagagtcatagctgctcgcaaatcacctcggttaaagaagactaagacttcaatggcagagagaattgccataaggttaaagaatcataaaaaggttgttgcaagcaaaccattgcgacgttctggcaggcaagtgaagcatgttattcggctgcaggatgaaagtaaagtccctgaagggagtaagaaacggaaactggaaaccaaaagaggcagag

SEQ ID NO: 183123 - DNA, 274 bp, Arabidopsis thaliana landsberg
gatggaaggccatcgccctattctggtggttttaaccagcaggcttaccaacctcgaggaccaggtggtccacctcaatggggttcgcgtggtcctcacgggccacattcaatgccatacaattaccaccatggtggaccgtacccgtctcaaggctcacatttcagacctcccaattctggtggttatcctccacaacatatgcctcctagaagtggatatggttctggttgggaacaaagacctccacattctggtccatatgattattacg

SEQ ID NO: 183124 - DNA, 749 bp, Arabidopsis thaliana landsberg
cgcaccgagctgcccacatcaccgactcagatgtcatcggcacgttcctcgccggcaccacttgccgcgacctggtgagcaagctgggtcgcaagactcccaccagggcgagcgagctgatggacatcaccaccaagttcgcctctggtcaggaggcggtcgaggccatcttccggaaggacaagcagcctcagggacgccagcaggaagacgtccccaaggcgtccgctcagcgcggcacaaagaagaagggcaagaagaagtcgcaagcgaaacgcgacgacaccgacgcagatcttgtcgctgccgccgagcataggaaccctcggaagcctctcggagggccaacctgtttgacaagatgctcaaggagtcgtgcccctatcatcagggtcccgtcaagcacacccttgaggaatgtgtcatgcttcggcgctacttccataaggctcgggcccccggcgggagatggcaaaggccaagacaacaacaagaaagagggcgacaaggaagaggagttccccgaggtccacggctgcttcatgatctacggtgggcaagtggcgaacgcctcggctcggcaccgcaagcaggagcgccgggaggtctgctcggtgaaggtggccgcgtcagtctacctagactggtccgacaagcccatcaccttcgaccaaggcgaccaccaccgactgcgtgccgagcccaggaaggtacccactcgttgtcgatcctgtcatcggcaacgctag

SEQ ID NO: 183125 - DNA, 1219 bp, Arabidopsis thaliana landsberg
gacgatgaaaatgaactccttggagacattttttctgtgggtcagcttgttccctgcattgtattggagttagatgatgataagaaggaggcgggcaaaaggaaaatatggctttcattgcgactttctttgttgcacaagggattcagttttgattcctttcaactagggatggtatgtcaaagtttggttcactttcctttaattttgtaattatgtactacttgggagctctgccttagttaatattttcatatgtatttctgcgtacgggtatgcaagtttatttgcatacctaagcgatttaaaaatcctaaacgagttgggagatttaatggctgactgagcttaggctttattttttgcatatgctagcagtttttaatgaaattaagctatatatttgctattctgaactggggtcatactttgcaactcagttttttattgctgatagttgttaaccttgtagctcttctatataggttatgatgtgttgtttgaaaataattatcttatatttcattccatatgcttgttcaggtgttctctgcaaacgtgaaaagcatcgaagaccatggttctatccttcattttggattaccttctatcacaggatttatcgaaataagcgacgatggtaagtaacctggttgacctactactggcctcttagctctttgtctcactttgaacttttaaatatgatttcatcaggggaatgatattcagtttacctcttaatgtacatcatgataaaaatgggctgtatatgtccaacttagggaaatactttagaggatcctaatgcaagtttcttggctttctgcttctgcttctgaccatctttgaaagatttcatcttcctttttctgaaatttctagcaaaccaggagtcaggaatgaagactgggcagcttatacagggtgtggttacaaagatcgatagagaccgtaaaattgttcatcttagttctgacccagattcagtggcaaagtgtctggtatgtcctgaaccttgaacattctgttgcaaattaccgagtgaaggttccttaatttacacaaacttagccacatgaataccattttgcagaccaaggatcttagtggcatgtcgtttgatcttctcatcccaggaatgatggttaatgctcgcgtgcaatcagtcctcgagaatgggatactgtttgattttcttacgtactttaatggaacg

SEQ ID NO: 183126 - DNA, 477 bp, Arabidopsis thaliana landsberg
atggatcactctatctcaccggtgtacaatttcccggccatcactcgctgtagtttatccaattcaattcctcaacatccatcatcatcgacgccgtcttcagccgacatccaccgcttctacaattctctttccccatcagcaccaagcgttccggtttcgccggagatggagtctatggaagcagtggagaagattctcaactacaaattcagtaacaagagtattctcaaggaagcgattacacacacctcgtgtacagactttccttcttacgagcggctagagttcataggggatagtgctattggtttagcaatctcaaattacctgtacctaacgtaccctagccttgagccacacgagttgtctctgttgcgagcagctaatgttagtactgagaaacttgctcgtgtcactctaaatcatggtctctattcatttcttcgacgcaatgctccttctttagatgaaaag

SEQ ID NO: 183127 - DNA, 195 bp, Arabidopsis thaliana landsberg
atgagtatgttgtcagaagctaacctctcagcgacaaaggcagattgggttggggagactaactctggtaaatgcttcttcagacgagcagatagtatttttgacactatcttgtataaaaccgaacacaagctgatcggtctaatgtttgccattcttcttggggttgaaatatttggaatcaaacataaatgg

SEQ ID NO: 183128 - DNA, 388 bp, Arabidopsis thaliana landsberg
gggcgagcgcgggcgccttctcgcggcgctggagaagaacggctgcacggccaatgccgaggtcatgcccatcgccgcgacggaaacgttgcgcacgctggacgagacgcgcaccctgccgctcggcaccgcgccggagggcagcgagcggctgcaactgcgccggctcggcggctcgggccacggcaacctgcgcacggtctgcgtgcgtacgtgcgacggcggcttcttcccgatctcctccaacgcctcgccgatggacttccgccgcgaccagcaggtctgcgccatgatgtgcccgcagacggaaaccgagctcttctgccagtcgatggccgaagggcaggagaccccccagatgacgtcctccgtcgccggccggccctaa

SEQ ID NO: 183129 - DNA, 320 bp, Arabidopsis thaliana landsberg
atggactacggtcttatcatcttcgttggattttctatcgtaagagctttgctgtacgttgcaaaggccctccacttgcaaattgggaaggataccaaactcggttatgtttagagacatagaacagttccctgcctccgaggagatgcttggttatatcattattcaattaggctctccagtctttttttgccaatagcacttacgtccgtgaacggatcttgaggtggattcgtgatgaacctgaagccatcgagttctttctacttgatctctatggagactctaattttacttttgcatttcagtctacaatgtga

SEQ ID NO: 183130 - DNA, 124 bp, Arabidopsis thaliana landsberg
aactgcgaatgattcgtttcttcaagttttggcttcattactggctcgtcggtttcaagagccgaattcaacttcaacttcagatacggtcttaagtcctaactgtcggcagtataaaatgtga

SEQ ID NO: 183131 - DNA, 619 bp, Arabidopsis thaliana landsberg
atggtcactacccttttcaattccatcctcaatcttcaaaattcccaaacgaaatcaacaaaagatgtcgcaaggctacgcaatcgagctctacttcgatccagcactcgagaaccaagtcttgaaagcttggaacgtcttcgctcgtcgtcaaatcagtacatatctaatcaacaacgagtctcgtccacacataaccttattctcaactacttcatccatcgattcaacaaagcttgaaccaatcatcaaatcattctcatctaaacaagaaccaatctcactctctttctcttcaataggaagcttttctagtgacgacaatgctctgtttctttcgccgacgccgtctctttcgcttattcagcttcaggttcagttatgtgaagtgattaagaaagaagggtttgagattggtgaagagtatcgtgttgattcttgggttccgttttgttctgtggctgttgatgttcctaagtcacgtatctctgaagggtttttggttttgagagatttgaagcttcctgtttatggttatgctatggatattggtcttgttgagttttctcctgttcgtgaagttttctcttttggtcttggtaacaatttggaatcttga

SEQ ID NO: 183132 - DNA, 492 bp, Arabidopsis thaliana landsberg
atgttgatggattggtttgcaactagaagggctcaagctgaagactgccctacaacattagctccaagagtgcatgaaagagttgaggaaaacaatcaagctgttatgtcaatgtctgttaagcctatttgcaactttgaattccaggtctaagttcggactagggaatgtttaattgtcatattggacgagtctacttgtttgtgcttggaattgcagggtttagggatcccttgtgctcacgcaatagccagtgctgctaggcttggcgtccatacagattcgttagaagcaaacaaatattttaatgagttagtgaaactaagttacgatgagaaaatctatcatattcactatgttgcttcagaggtcgcaacaggaattgctttaggaactacaggcgagctgcatccatcttttgttcgtcggccaccagggagaccaaggaagatacgaatattgtttcgtggtgaattcaaggctagttcctaa

SEQ ID NO: 183133 - DNA, 599 bp, Arabidopsis thaliana landsberg
gttgtgccaaatacacgaagcagaagtcaaatgggtgaaacaaccgacgggggtttgtatgagatttttcaacaaaactatggactcgttggctcaaccacctttgaaacagcacgagcgaacttcctcataagcagtgccgggtatgctgtggctagtcttttactccagcccaaagatagacacaacggaaatctccttttcgatgagtaagctcccgattttgcactttccttttcttcttcacttggtgcaatgaaaattaatatcaaaaactttctatggacaaaatatatgtatttaccatgtgttatgctattgcagcgtgggaagacttgtccacatcgactttggtttcattttggaaacttcacctggtggaaacatgaggttcgaaaatgctcatttcaaactgagccacgaaatgacccagttgctagatccttcaggtgttatgaaaagcaaaacatggcatcagtttgtgagcttgtgcgtcaagggatacttagctgctcgccggtacatggacgaaatcattagcacggtgcaaatgatgctagaaagtggattgccttgctttagcagaggagatccaatag

SEQ ID NO: 183134 - DNA, 228 bp, Arabidopsis thaliana landsberg
ttaagtgaaaaaggcacagaggtgaagaatggaaaagacacgtctttctggtacgacaattggtcacacatgaggaagctaattgacatcacatgtcaaagaggttgcattgatatgagaataacgatttattccacactggaagatgtgatagcaagtcataggcagagaaggcacagactcgatagtctcaacaatatagaggcgttgattgccgagattcgataa

SEQ ID NO: 183135 - DNA, 177 bp, Arabidopsis thaliana landsberg
atgaatcgccgaagcacggccctaaccctgctcctcctggctctcgtcggagaatgcgcctccctcggcgcgctcgcacaggccatccaggcgcctaccttccgcgccgcggcggggcagcagtctcagatccggctcgtgggaccctccctcgatcgtccgctcggaaaagtaacg

SEQ ID NO: 183136 - DNA, 147 bp, Arabidopsis thaliana landsberg
atggacggcgcgggggctacgggtggtggtataccactctggtccaggacaggagacggatgagctccgggcctccgggaactcggtcgacgaaagaatgggcaaggcagtggcatgcggtgacattggttccggggagcggatccg

SEQ ID NO: 183137 - DNA, 436 bp, Arabidopsis thaliana landsberg
atgattgccagaagcgaggaggaagttgagttatttgatcagatggatgaagaatttgactggacggaggagatgactaatcatgagcaggtgcctaagtggcttcgagctagtaccagagaggtgaatgctactgttgctgatttgtctaagaaaccgtcaaagaacatgttgtctagcagtaacctgattgtacaacctggtggacctggaggtgagagaaaaaggggccggcccaagagcaaaaagattaactacaaggaaattgaagatgacattgcaggttactctgaggaaagctttgaggaaaggaacattgattctgggaatgaagaagagggagatattcgacaatttgatgatgatgaacttactggcgctcttggagatcatcacaccaacaagggagaatttgatggagagaaccccggctgtg

SEQ ID NO: 183138 - DNA, 86 bp, Arabidopsis thaliana landsberg
aaaatgggaacgatccaaaacttaagacatttgatctccacaaggccgtcgacgtacagagaagaagaatggccaaaaataagtaa

SEQ ID NO: 183139 - DNA, 389 bp, Arabidopsis thaliana landsberg
atgaggaggtggcaggctccgcgatggtgtggtcgcgcggtgtggccactgggtgtgatgtggaaggcgaaagtggtgcttcgtgtccgtggagaggtggtgaagtttgtgagctaactcaattggaccttaggctactagagaggggagggagaactcaccggagcggaggaaggtggtggtgtgctagctcgattaagctcaggggagggggaggagagtggccgaggccggtgcgaggagatgatgggctcagggcggcccttttataggcgcttggggaaggggaggagcggaggctggtgggcaccgatgaggcacacaacgacgacgataatggcggcacagtggtggcgatgggatggctcggtgaagacggtggcatgcgg

SEQ ID NO: 183140 - DNA, 223 bp, Arabidopsis thaliana landsberg
atggtgctccactccgcggcggcgcggcggcggggatgcagagggcgtgggcttccccgcgccgtcaccggttccaggaccattcatcggtagcgtggtgccgccgccgcttgcgctgggggtggactacccggagcagcagctggtcgtgaaccagctccaaagcctgcgcatcggggacgcgcagccgcgctcctgccgcagggcccagcgccagtcatga

SEQ ID NO: 183141 - DNA, 143 bp, Arabidopsis thaliana landsberg
ctgagcaggcaaatgtgactgaaaataaacaagttccgatcaataaaaaccctaaaacgaagaaaaaggaacacagactgagaaatttgagcagcaaacatgagagtgacgagagacgatacagagaggctctctgttcatga

SEQ ID NO: 183142 - DNA, 143 bp, Arabidopsis thaliana landsberg
atggagttttgtgaccgcggctctctggcagaggccatccgtgacggcgctttcaagcagccgattgatggggggtacggcgccacggagcccgcgctgttcaacatatactccacactgttggagatcgcgctagcactcag

SEQ ID NO: 183143 - DNA, 39 bp, Arabidopsis thaliana landsberg
atgaaacacgtctatggtaaagccaacgaacattacacg

SEQ ID NO: 183144 - DNA, 1631 bp, Arabidopsis thaliana landsberg
atggttcgagctgttaacaaatttaaagcggacttcggtggccaatttatttcgttggagagagttcaaccttcatcagatcacgttcctcacaggtaactatgtagttggaatgattttgtaacttcctataaatgtattttttgcgctctttagtttctactttacagaaatattttgtgtttattgagtgagtgattgattattaattttgctctttatgctcaaagttggtttcatttatttggaaattaacttaaaagaaactatcttaatgcaggtatctacttgctgaggcaggtgatacattgtttgcatcctttgttggaactaggcaatataagtaagtcttggagttttctattccctggaaaacaaaataggtcagatgttaaaggtgtgtgttttcattcgtgggtgtgttctagggacatcatggccgatgcaaatatacttcaaggacacatatttcacgatgatgtcgcagaggatgaatgtatcgaagcatctgagcctatacagagtgaaccacttaagaataatggagagggtttgcggaatcctaagcaacttagacagaagcccaaacctgctgctcatcgggtatgcttgtggcatgttgaagtagatttcttttcttttgtattttcagtacactgtgattttttgcaacaatgtgttcttattttgtaaatctccttaaattttaacaactaggggttcttggctcgtgcaaaggggattcctgctctggaactttataggcttgctcagaaaaagaaacgaaaacttgtattatgtggacactcacttggtggagctgtaagtctgattgctttagatgttcttacctttgtagctcattgtctatatctgtctctttgttgattcccgggtgttaatatacgtaggtagctgcgttggctacactcgccatattgagggttgttgctgcatcttcaaagagaggaaatgaaaatattcatgtcaaatgtataaccttttcccaacctcctgttggaaatgctgcgttgagagagtatgtttttggagcactagttaaacatacagctgggattagtaatagcattctcataacgtttgcctcgcttggttttgttttttgcagttatgttcatgaaaaagggtggcatcattatttcaaaagctactgcattcctgaagatttggtcccgaggatattatctcctgcatattttcatcattacaatgaacaaagaatctcaatggctggagagactgaagccacaaatggccagggcgtaacatcagaggcagaaaagagaaaaactaaggagcacgagcagttggtcattggtgttggccctgttcagaactcattctggaggctttcaaaacttgtccccctagaggctgttaagaaacaattggataggtacataggaaagaaagaggatcctgcagagacgtctactgcaaatgaatccgcagtgttagctcctattagagacgtggttattgaaccacaatctcttgaaatagaagagggtaaggatggtatatctctcaagccattgccagatgctggtaatggaccaacagttagtggaagaagtggaggaaagaccaattcgcctaatgggttcagg

SEQ ID NO: 183145 - DNA, 363 bp, Arabidopsis thaliana landsberg
gaagaaaatgataagctcagggaaaaagaaagggaaattgaatcgagaaaacctgcagaagcagatgcaacagcgttgaaggagaagtcacgaatggagtatgagcaaaccatgaatatgatgaaagagatggtaaacttgtattcttaattataaatgaatttttatttcttcacccccaatgtagttaatcttatatcctgggttttttctcagttggaacatatgcttaaacagagtaatgaagcacataaaaaagagttggatgagctgagagagtcacttaagcaaggccagcaacaacaacgtggagaacacctacttccactccgatcagatcaagttggttgcaacattttgtga

SEQ ID NO: 183146 - DNA, 1009 bp, Arabidopsis thaliana landsberg
atgcgaagtctcctacagacaataaaccaaatggaaatcaagaatatgtgcaagggcagcatccgcagccgatgtatgcaccctggccagttcactccccaccgggcacctttccagtatttcaaggatatacgatgcagggcatgccttactacccaggctatccaggagctagtccatatccatctccctatccgtctaccgatgattctagacgtggttctggccaaagaaaggctcggaaacatcattcatcttgtagcgaggactccgaatcagaagatcaggaaagagataatgaaaaatcaagtagaagaaggaaatcagggaaggtggtgattcggaatataaattacattaattcaaagaagcaagataattctggaacagaatctgatgctgatgacaatcatgaagaagtggcaagaggagaatgttacaatggtaaagagagggcaacaaaaggaacagaggctgacactggggattggcaggccttccagacttttttattgcaagatgctgacagagatgaacgttccattgaacatatgatggaaaaggagattagagggaagaagaggcaaggtacaggaaagtatgatcctttggcacatgatgaacgtgaatcaggaaaatatcaagaaagggatacagctgatattcggaatggaagtgtgactcgtagaatcaggggatctagtgactcttttatggttcacccgagagaaaatggttttgagaattcttctgatcctctcaacatgaatggatttgataatccaaggaatggtctggataagagaaacatggatgatgattcttatattgttactgggatgtcttcaggccgagatgaagctggaagaaataagagaaatgagatagacattggttcagagatctcttcgtgccatcaaactgatggaactgaaagaaagcaggtcaattatgagcctcatgatctgagcctgatacctgaacgggaaacagagaagttatcagctgg

SEQ ID NO: 183147 - DNA, 1684 bp, Arabidopsis thaliana landsberg
ggagagaagtcaaagtgggaagaacagaagaaaaatgaagaggaggatatggacaagctattgaaagaaaatgatcagttcaaccttcagatttctgcgttaaggcaagagctggagacaacaagaaaagcgtatgaacagcaatgctcgcaaatggaaagccaaacaatggtcgctacaacaggacttgagagcaggctcaaggaacttgaacaagagggaaaagtggtaaacactgcaaaaagtgcccttgaggaaagggttaaagagcttgaacaaatgggaaaagaagcacattctgctaaaaatgctcttgaggaaaagatgaaacagcttcaacaaatggaaaaagaaacaaaaactgctaatacaagccttgaaggaaagatccaagagcttgaacaaaacctcgtaatgtggaagactaaagtcagagaaatggagaaaaagtctgagtccaaccaccaaagatggagtcagaaagaactttcctataaaagctttattgataaccagtctcaggcactactggtatgataaccatatatacatactgtgctaaaataatcattttataatcgacagttggctaattatgctgaatcgcaggagttgaggtcctattcaagatccatcaagcaagaaatactgaaggtacaagagaactatacagaccagttcagccaactaggtgagaatgatctaagtgatgcttttgtagtcatgacaaacctttcatgaccttgcaatttttgtagtgtttataaattaaaatctgtctcttcaggaaagaaattgattgaacttagcaatgctgctgaaaactatcacgctgtactaactgaaaaccggaagcttttcaacgagcttcaggagctaaaaggtactgaggatcatgttcagtatttgttcagatgtgtattttcaaaacttatgcagcccataaattctatagttatgacttgcaggaaacatcagagtgttttgccgggtgaggcctttccttcctgcacagggtgcagcaaacacagtggtcgagtatgtcggtgaagatggagaattagtagttaccaatccaactagacccgggaaagacggtcttcgccagtttaagttcaacaaggtgtatagtccaactgcttcacaaggtgtgttcatctgttaccggttctgttatatatccttatgcttttcagttctgttttgtgtgatctatgcgagaattcatggtacatctcgagaaataatattatattgatatcaccaagttcatttgatattttggattcttgcagctgacgtcttttcagacataagaccgctggttaggtcagtacttgatgggtacaatgtttgtatatttgcatatggccagacaggatcagggaaaacttatacaatggtatgtattcactgttgtttctgagagtaagattttcataggaataacgctgatgcgcttttaccttcgttccctttctttcagactggtccagatggatcaagtgaagaagactggggagtaaattatcgcgctctcaatgatctttttaaaatctctcagtccagaaagggaaacatatcgtatgaagtcggggtgcaaatggtggagatatataatgaacaagttcgtgatatactttctgatggtggttccagtcgaagatatccttttctaatctaa

SEQ ID NO: 183148 - DNA, 298 bp, Arabidopsis thaliana landsberg
atgccgtgccccgcgcgcatgcgaacatgtgaaaggccggtcagtttttgtgtgttcctgtccctcaagatcatttgtgacagcctcagaccgggcgccggctcaaccacccgatctggaacccgatacaaaagcaacaagcgacaaggtaccggcatccgcatgcagagatgccgccgcgtccagagatgtcacccaagggatccttccaggaggtgagcatctcgcctcgatcgaattgcttgctttttcgtcgagggagccttaccactacgacatgctactacaacgtagcacg

SEQ ID NO: 183149 - DNA, 99 bp, Arabidopsis thaliana landsberg
gtgcggctgggctaccggccgccgtacgacgtctacgcgatgctcggcttcttccgcacgcgggcgatcggtggcgaccacacagagggcgagcgctag

SEQ ID NO: 183150 - DNA, 431 bp, Arabidopsis thaliana landsberg
atggcaacggatacaacaacttttcctgaaggcgatgcagaagctgaacttaatcctggccaaaacaagaatttcgaagtagatcctgtttcatcagagattgcttctgaaaaggtaattagttgtatttatgatatatcattattgaatgaatgtgttgattttgcatgagtttcaaagaaaccaccaaatatctaaagcttttatcactttttcatgtacaaaaatccatacgtgaattctcaaacttatatatttacttttgggtttgaaatgtgaaggtacaaaaaatcgtagaaaagagggaaaacgcaaaggcaaagagagatggggcacgaacgcttaaaaacacgatcataatatcagcagtgattgtggccgtcgcaggagccgcttttgctataaccaagaaattgaaagagaataaatga

SEQ ID NO: 183151 - DNA, 119 bp, Arabidopsis thaliana landsberg
ttgttcttcgagctctcgccgacgagtacctgatttcatatattcatcggcttcgtcgacttcatttccatcctcgtcgcatcggcctctcacacctcttcagctctgtcacaatataa

SEQ ID NO: 183152 - DNA, 484 bp, Arabidopsis thaliana landsberg
acgtcacgatccgaaactctatcttctcatcatcgatccctgagaaatcatcatcgtttaataggaaacttagtgaattggagtttaggtttctcaatcgtaaggtttctgcttctggatatcgttctttggttgttcgagctacctcgaagaagagtaacgacgattcttcttctcctggtatgtggttgttcaattgaagactaattttattgaatttgattacttgcatgcttgatttggttagaaattgggcaatttaggtattatgatcgatcaaaatcggcgaatttaggttttgttcatagtgtacttggtaatgtttgtgattcttatacctgttgttgttgatgaaggagatgcttctcaggaaaacaaaccttctaacggcaacaagtccggcgattccgcggctccgaaatcgttcggtttaaacacggattggagagaattcagagcgaacttgtttatgaaagagcaggta

SEQ ID NO: 183153 - DNA, 1083 bp, Arabidopsis thaliana landsberg
atgcttgatttctctgatgctatgctccacaagactgcgagctcatttgtacaggagctgctccgcagaccttttgagcaagaattagatgaagatgggaacagtattgtgattggagatggtataaaccttggtggtgataaagattgggctgaggcagtgtccaaattggctaaaaaagtccatgctgcccctggagaatatgaagaagttatacttgttgttgttgaagaagtagcgagaccctgcagggaaaggactgcggatttcctgcagtggatgcacatgctttctctgacaagtcttctcttggaaaatggaaaatctttacattcactgcaagggaaggctattgaaccagaagagatattgcatgctctattgcttccaggggtatattttctactctcctctgtttattttctactgctaaggcgccacttgttagattagataaatttgttgagactttgagttcttcttacaatcatacttgtcatgaagcagcttttttgtcattgccaatttcactttaaaatgctgatgatccatatgatctctgcatccttttgtttcatcgaaaaactgtcaaaagatgttaacagttttaaggagtggagttatgtagctaagaaacagcttatcatgcagttgaatccctttggcatgattttcgtggactctgcaaaacaagcactctttctgatatgattcatgtcatgcaggcaaaacacactcacttggatgtgcagaggattgctataaagggccttggtctttttggtttgttagagaagaagcctagcgaagagctagtaaggcagctacgtacagcgttttgcagaagccctcctccaattagtattatggcttgcaaggcactagtggatcttgggatgtggcatagcccaacagaagtcgacaaggcaataggacaagatctcttgtcacaatttgaagatgagagcattgattttgcacccatcgacttatcgaataccgaagaagatatgaactttaaaatgctcgatctcttgtatgctggacttgaaagtgatgactggagagcatctacagagagca

SEQ ID NO: 183154 - DNA, 671 bp, Arabidopsis thaliana landsberg
atgagaggtgcttcaagaagatatagtaacgatgagtctgaggatggaaatgcagatataattggtccattaccagtagacgttgacatggatactgaaatggtgtgatccggttcttctataattatggtgtgattgttcgtgaatgcaggcaaggtttgagcttgatgaatattggcaaaggatatttgtgataaaccagatgggaaatctgtggagagcacacaagtcacgcagggtgaaggctattaacttggctgcaaataaccaagagaggatgaatttgagaccaactaatattaatcctgttgagtggcaaaagtttgtcaaactcaaaaccagttcagcattcaaggtaattacttgtgaatataaagttttgtatttaaatggggattagtaacatgtttcattgttaggctgtgagtgatacatttaaagcaagaagaaagaaacagatacctcataccactagccgtaaagggattgtcagactaacagaagaaatggcaagatatctacttcatttattttgcttattattatacggttattgcttgtatgttgtgacagtcactgaaatgttgttttttgtacagaaacttgaaagtggagatccttccagcgtgacaagactacaagttggatcaagtctcgtaccaaaaaggatg

SEQ ID NO: 183155 - DNA, 250 bp, Arabidopsis thaliana landsberg
atgacgtaagcataaagaaaaagaaactcgacgatacgtgtcgaacattcattggtggaacgtggcgaaagcttcttttgagtctttccacgtcattgtattggataaaatcagaaaaagccactttggtttcggtaaactaagacggcgtgaagttggcgagaaaaaagtattacaacaacgacatcacgtcctggttcttaattttgtggaagcacgtgttgtcgtttttgatacatgtactttgtag

SEQ ID NO: 183156 - DNA, 92 bp, Arabidopsis thaliana landsberg
atgagggccagggatgtctcccacgaaacggatggatcaagtgctagacgcaagccagcgttgccagagacaatgaggggacctaagtgttg

SEQ ID NO: 183157 - DNA, 271 bp, Arabidopsis thaliana landsberg
atggacaggtattatggttcaggtcttgcaaatgcttatctgggcgatgaagaccaggggcagatgagcgcctggttcgtgatggctgcactgggcttgttccaaacagatggcggctgcagcgcagatcctgtatatgaaatcgcgagccccatttttccttcagtgaccatagatctgggcgggcagtacggaagaggaaagtcctttactattgaggccccaaatgtttcaagagacaataaatatgtacaaaaagctacattaagcg

SEQ ID NO: 183158 - DNA, 361 bp, Arabidopsis thaliana landsberg
agccgggtcctctgatacagctgagctgtggaatgacatcaggagcccttggagcatcatgtgtttacccgttacaggtagtaagaacaaggtaaaaacccgaaattccgaaaacttgtaaccgatttttttttatgtcttgtctgcgattgtaaaaaacaactttgatccttgtcatgtcagaatgcaagcggatagttcgaagacgacaatgaagcaagagtttatgaatacgatgaaaggagaaggtcttagaggtttctacagaggactattacccaatcttctcaaagtagttccagcggcaagcatcacgtacattgtttatgaagctatgaagaaaaatatggctcttgattag

SEQ ID NO: 183159 - DNA, 1264 bp, Arabidopsis thaliana landsberg
atgtggttgagcaaacaggtaagcttgatcctgtcattggccaacacagggagattaaaagagtattgaggttctctcaaggagaccaagaacagctccgtgctcatcggtgagccaggtgttggaaaaactgctgtggttgaaggtttggctcaaaggatactgaaaggagacgtgcctatcaatcttactggtgtaaaacttatttccttggaatttggtgcaatggttgctggaacaacactccgtggacaattcgaagaaagattgaagtctgtcttgaaagcagttgaggaagctcaaggcaaagttgttctgtttatcgatgagatccacatggctcttggtgctggcaaagcaagtgggtcaacggatgctgctaatttgcttaagcctatgttagcaagaggtcagcttcgtttcattggagctactacgcttgaggaataccgaacacatgttgagaaagatgctgcttttgagagaaggttccagcaagtgtttgtagctgagcctagtgtgcctgatactatcagtattcttcgagggcttaaagaaaaatatgaaggacatcatggtgttcgtatccaagatagagctctagttctttctgctcaattgtctgaacgttacatcactggtatgttgcgccatctttttatctaacatgtccttgtaatttattatgattcttttatgtttgcttattagtgttctgttctgtgcttaggtcgacgtttaccggataaggcaattgatttagttgatgagtcttgtgcacatgtcaaagcccagctttatattcaaccagaagaaattgatagccttgaaagaaaagtaatgcaactagagatagagattcatgctctcgaaaaggagaaggacgacaaagctagcgaagctcgtctttccgaggtaaattactttcaaaaacatggtttttacatatagtacctcacttcttttatttgttattctgcaggtgaggaaagagcttgatgacttgagggacaagcttgagcctcttacaataaaatacaaaaaggagaaaaagatcattaatgaaactcggaggcttaaacagaatcgagacgatctcatgattgctctacaagaggctgagagacaacatgacgttcctaaagctgctgttctaaaatatggtgcaattcaggaagtagaatctgcgatagcgaaactagaaaagagtgctaaagataacgtgatgcttacagaaactgttgggtcagagaatattgctgag

SEQ ID NO: 183160 - DNA, 41 bp, Arabidopsis thaliana landsberg
atggctggcggcgaatgtgcgctatgcacacggatcgaaag

SEQ ID NO: 183161 - DNA, 1435 bp, Arabidopsis thaliana landsberg
  unsure (1)..(1435): unsure at all n locations
atggatatgtcatcttcttcaaatgcagctttagcttttcctaactctctccacgatgttgctggtttgtttcatgaggagattcctttagtggttcaggatggcaatgctaattcgaggtcaaattttttctcacccaagagacctgatgtagcgcatcttctcttatcaaacacacttgagctttacgtgtttgatattggtctatctttcttatttttgtttgggctttttacttgggctttggtgttatttcttatttactttttgttctttgacggtgttgctttctagggttttaagtcttatttaaggttacttctatggatttgtaaatgcagcttttggtttatgaataaaacatagaagttcttctcttctaaagtctttgaattctatgttcttttgaaccattgatacaaaagaacaagaaatcttagctatgaatctgctctttagaatccattgatatttaaagttcttttcatatttgatcctgtattacacgacctacaatgaaggacagctatatcactgtcttgatacgcttatggactctgcctcctacaacgagcaccacgtatcaagacccaacaattcaagatattatgagacatatggttatgcaaacacatagaatcatcaatatccttactcagcacaaactcccaacaataaacctttacgcataagaatctataagatcacatatgcaacttagtaccatcacaccattaatcaatactcatataattcacaaaatcattcaactaatgcaagagtatatgaacatgcaactaaacaagcaaaccatcacccaaataaataccaaaacctatcatgtgccatatcacacgcttcgagacccacatagatttggctgaaggtttaaggttagcttcaacggttctcggacatctcacgacttctccacatcattttcatcttgatctagcttctttctaagtaacctccctcattcttgagttttcacacaaatcggcagatcaaatcttttaaaagaagtcttgattcgactcaacaagattcacannnnnnnnnnnnnnnnntctcggtcgccgacatggatatcttatccacgaacaggttctcttgatcatggacatgaattctttagttaagggcaaaggatcttgatcacgggcaaagtttctcaatcgcgggtaagttttctctcggttacgggcgatctctcgataatttggcatcatttcggttctttctcctttctcccatcaaatggctcgagtttggccaagcatttataggtggagcaaattgggctccaagcaagcgcatgtcatctggtggtgacaccttgcgggacacatgtcgcccgcccgtgaagacacgaatgttgcagaaatgggacgatgacacgtggaaggggaaacttcggcaccaatcctcataa

SEQ ID NO: 183162 - DNA, 70 bp, Arabidopsis thaliana landsberg
atgggcttaatagtagagactattttagttgggcctgcgacagctgcgacggatctgcccattggacccg

SEQ ID NO: 183163 - DNA, 78 bp, Arabidopsis thaliana landsberg
gtttggcgattatcggatttgattgttcatcgcttatatagtcacgaagagatatttcttatggagcttatattttaa

SEQ ID NO: 183164 - DNA, 599 bp, Arabidopsis thaliana landsberg
atgagcaaagtcgaaagcaactgctcggcaaaaggattctacacttatgaggctttcattactgctttcaaatcttttggagcttacaaaggaaaggtggctaaacgtgagatcgctgctatattggctcatttctcatacggatctaaaagtaagttcattatattattaaaaaccaaaaataaaaaatttgcattggcgtttttacctttaatgcgtaagatatttgaaaatcatggatacatgcaattttggttttttggaagcttaaagataatacattttatttttacgtaaaggtttttgttacaaagaagaaatatcgaacgagagatattgttcaaagagcaagaagtacccttgtgaaccggggaaaaactactatggtcgtggtttgctacaatcaatcacatggaacgagtattacggtgccgccggcaagcacctcgggctacctctactgaaggatccagatctggtgtctcgtagtccagaagttgctttcaaagtggcaatgtggttctggaatagaaacgtgcgttccgctttgtacttaggatttggagaaatcacaaagagagttgatggccgtgaatgtg

SEQ ID NO: 183165 - DNA, 2087 bp, Arabidopsis thaliana landsberg
  unsure (1)..(2087): unsure at all n locations
actacacatcgaagaggaggagatatttgttgagatctcgggaattttgtcaacagcacggtgttgggaggaaagagcaagcactatccttgaaaatgaaactcagatgtacgagcttaaagatctcgtaaggtatataattgttcaggcttgtaaatttttttacttcagcccatgcttagtttttcttaagtcttttatttatcaaaagatgtttgttcctaggatgtcagtcaacattgatgcggttttacctactctgcaaggcatagagaacacaatctcgtcggctgaaacttggcttcagaaatctgagccttttctatcagccacttcctctatggcatcatctccatgttctatgcttgaacttcctgtattaaaggtttgtctgcctcctgtgcctactttggtttctgtttatgtttttgtaactgatttgatttttggagaatttaatgctttaattttttgcaggatctagttactcagtctaaattgctcaatgttcagcttcaagagccacgaattcttgaaacattgttgcttaactgcgagaggtggcagtgtgataatcatcagctcttgcaagaaactgaagatttgttggacaatgcgaaaatagatgatggcacgcatagcaatatccttccgaagataatggatttgataaccagagtggactccgctaggagatctggtctggcccttggtctcaatttcgatgaacttcccaaacttcgaactgcaagtctaaaactaggatggtgttgtaagaccatcacgttaagctctagctcacctacctctgaggtacaaatagatttctgaattttaattggttcgtgacactcagtgtggttatgtatcccgtttaattgttttaagtgcgtctttaaatggcagttgctagaagatgttggaaagccctcgttacagcatattcagcagcacttaaaagaggtatgttcggataatatattaacttccnnnnnnnnnnnnnnnnnnnnnnnnnntttaagcattatccttctctttggattttcaaggaaaccacagtgatctggtttgtgagtttcgtcattcttattgacagggacaaacacttgaaatattgcctgaagagtattacttaggcaagagactcatggagttaaaagacactggactggagtgggcaaaacgagctagaaaggtacataaccagcacacgttttctcagttgatcgcgtaaagtctctatggaatgtttaataaaaacgagaagctattggttttatctgcaggtggtgacagattcaggtgctcttgccttggaaagatgttttcgagcttatttctgagggtgaaaacttacctgttcatgcagagcaggaacttcaggttaatatgaaatgaatgttagcaaagcttaacacataaccttactgttatctaaaactgtttgtatcatggtaaattaatgcagtctttacgagctcggagtatgttacactgcatttgtctaaagccatacaactcaagatccatggtttcttgtagtcaatgtggcgaatggtatcacacctattgtttaaagcttcattggcggcctaaggcttatgtctgctccgcttgctgtccactggcagaaaccactccacagatcgatcccgccaggtttgttcctttgcaataaaagcttactctaaaccacattgctacacacttgtattcacatcgatcttagatttttaaaagcatactttcttgaaacctctatacttttgcttcactcattagtttaggtcacaatcaaaagctactgattgtgtggtttctgttaggcttagtggcttgaaccgagaatgtttacagattcgttaagatactctacacttcctcccatttttctgaacccatttgtttgattgatatctattaacagagcaacagagccagagagaccgtctctgaaccaaagacggacaagaatggtcgcgactgatgcagcagttaatgacttaaagtggaaaacccgaaaacacatcaaacggacaactaaacggagtcctcaggttcatattcttccctggtttttcacttaa

SEQ ID NO: 183166 - DNA, 131 bp, Arabidopsis thaliana landsberg
actcaaagattagctctcctgatgagagtgacttgaaagtcctgtcctcaaagaaaccaaaaagcaaatccccgagagctccgattatggtgtcttactttcccgccggttctaacctttcgcgtctataa

SEQ ID NO: 183167 - DNA, 781 bp, Arabidopsis thaliana landsberg
  unsure (1)..(781): unsure at all n locations
gtttaaacagtgcccgcaagaaagaaaagggtggcgcggcttaccggcgtcgagataggtccggcgaggggcggggttggctcggggaggctctggcggtcacagcgatgtacggctcgacggcggggatggccggaatcgctcggtccacgtgtgcaggcgggtgtcctcgtcggaggcgggtgtgccggccaaaacacggcgatctggttcaattcaagggcacggtgagctccacggggtgacgtagagactgtgtgcacaaggaatcagaaattggttcagtggattacccggtccacgcactccggcggnnnnnnnnnnnnnnnnnnnnnnnnnnnnncctctccggcgaagcaggcttcgattcctcgctcggggagcttcaccgaggtgtgctcagtcttctccgagggtcagaacaggctgggaagggcctggttaccggtcgacggtggcaggggctcgggtggccgcgggcacgtcgcgtacgggcagacggcggtgaactgagctccggtgaggcttgagcgcgtgcggaggggtacggccaaggctcctgggcgttttatagccgcggacgcggaccagggcactggcttagcttgggctcggcgcgggcgcgcgcgcgggcgtgctctggcgcggcagacggcgtcgaacacgtggcggtttgtttcttccagtgttcaaatgtcgccagcggtcgcatacgtgcgaatctttgcaaaagtccgccgcagacctcttcctggcacctagggctgtcactcaactgtga

SEQ ID NO: 183168 - DNA, 317 bp, Arabidopsis thaliana landsberg
atggtgagaagaaacatgaccatgtgggggtattaaatcaatgttacaaagacatttgaaggtgaaagaaaagatgcgggtcctctcatgttctcagagatgtaaaaaaaccttaaacctagagaaatttttggaataccggtttaattaaatgtaaaccgaactgaaccgaaaacccttattagctacctgtgaactgcctcttatataaagccgtcgctgacaatctcataggagactcgacactcgagactcgagagagtcctaaactttcaaaactagtgattatcttcgagtcatgtcatgttagcgtttag

SEQ ID NO: 183169 - DNA, 128 bp, Arabidopsis thaliana landsberg
aacctaaaccgcaacctgggcttaaaagcctaagtagtgtttcctcgttagaagatgcaaagccaaagactcatacggacttcgactacaccatcaaagcttcgagaagcaagaagaagcttggatag

SEQ ID NO: 183170 - DNA, 141 bp, Arabidopsis thaliana landsberg
atgggaatatcacttcatgccacagtttctgaagcagtaatgcaacacaagaaaaggcgtcacagagttgatatcctaaacctaatagaaaaagccctagaaggccctcgttctaaaaggctcatcgtaacagaggatata

SEQ ID NO: 183171 - DNA, 114 bp, Arabidopsis thaliana landsberg
ttttctcgaagtgaaccaggagttacacatgttctagtcactggtggtgcagggtatatcgggtcacatgcagctttacgccttctaaaagattcataccgtgtcaccattgtg

SEQ ID NO: 183172 - DNA, 180 bp, Arabidopsis thaliana landsberg
ttccgattccgtcggtaaacggcgaaatcgacgcaatgctgaaccggaacggcgtaatcggagaggaagaaggagaggagatgatgccatcggagataagtcggagagtaatgatgatgcggaaacagtacataagctacgaaactttaaggagagatatggttccttgtcagaaaccag

SEQ ID NO: 183173 - DNA, 211 bp, Arabidopsis thaliana landsberg
atgtatgaaaattcaaatcagttggccgcggtacaaaaaatggaagtgataggcagtacagaaggctatacatttgatgatggatccgaccatgacgatgttaccaagatttttgtaggaggtggtcgtcaaggcattcattacatagagtttgaatatgaaaaaaatgggcagctggaatcaggagtacacttgggtgttcggtatagag

SEQ ID NO: 183174 - DNA, 228 bp, Arabidopsis thaliana landsberg
gtggtgctagctgctaacgagctgccagctatcaacgatgtaacatatactgagcttacagatatcgtgtcgcaggtgatgaatgatgtaattcttgatattaactaattcatgaaaagtgaatctgatttattagacttaatctaccagttaaaggatggaaatggccaattgataggcgttgatacttcaaagcttctgattgcaaattcagggaacgatttagcg

SEQ ID NO: 183175 - DNA, 1062 bp, Arabidopsis thaliana landsberg
atggtagaaagaggcgtggaaccaactcttatcacttatagtattcttttcaagggtttgaccaaggctaaaaggattggtgatgcttattttgtcttcaaggaaatgacaaagaaaggctttcctcctaatgttattgtatataataatttgattgatagtttcatcgaggctggaaatttgaacaaagctattgagataaaggatctcatggtttccaaagggttgtctctcacatcgtcgacgtataatactctcataaagggatactgcaagagcggtcaagcagataatgcggagcgtctcctgaaggaaatgctgtcgattggttttaatgtaaatcaggggtcctttacatctgtgatttgcttgttgtgcagtcatcttatgtttgattcaacacttcgttttgttggagagatgctattacgcaacatgagtcctggtggtggattacttactacattgatttctggtctctgtaagcatgggaaacactcaaaggcagtagaactttggtttaaatttctaaataaaggttttgtagtagacacgaggacttcaaatgctttacttcatggactctgtgaagcagggaagctggaagaagcttttaggattcaaaaggagatattagggcgtggctgtgttatggatagagtttcctataacacgttgatttctggatgttgcggaaagaagaaactagatgaagcttttatgttcatggatgaaatggttaagagaggacttaaacctgacaattatacttatagcatattgatttgcgggctgtttaatatgaataaagttgaggaggccatacagttttgggatgattgtaaacggaatggcatgcttccagatgtttatacatattcggtgatgataggtggatgttgtaaagctgaaagaacagaagagggtcagaaactgtttgatgagatgatgagcaaaaacgtgcagccaaatactgttgtttacaatcatcttatcggagcatactgtagaagcggaaggctatcgattgccttggaactccgtgaagatatgaaacacaaa

SEQ ID NO: 183176 - DNA, 78 bp, Arabidopsis thaliana landsberg
gaggtcgaaattgttcttactgctcatcctacccaaataaatcgaagaaccttgcagtacaagcatattagaattgct

SEQ ID NO: 183177 - DNA, 167 bp, Arabidopsis thaliana landsberg
atggatttgtatggaatgagagttgaatcacctaaaggtgtcaaggtacacttataatcgtttatgtaatttgactatgtccttctttcatacctttgtggtattaatatcttattcatcttttcatttttagaatgcagaaatgggtcataaagagattgaaaaca

SEQ ID NO: 183178 - DNA, 85 bp, Arabidopsis thaliana landsberg
atggaagaaagctcatgggaatccggaaccaaagtcgctggaacggaccagcatcaagataaatctttcatctccatcaaacatt

SEQ ID NO: 183179 - DNA, 58 bp, Arabidopsis thaliana landsberg
atgagtcacacaagaatcgtgtttagagaagaacataacactcgcaagattgattttg

SEQ ID NO: 183180 - DNA, 777 bp, Arabidopsis thaliana landsberg
cggtgaatggggactatttcatggcaaaggacatagggttcgagaacacggcaggagctgcacgccatcaagcagtcgcacttcgagtttcagccgattttgctgtgttcttcaactgtcatatgaatggttaccaagacacgctttacgtccatactcatcgtcaattctaccgtaactgccgtgtctcaggcacgatcgatttcgtcttcggtgacgccaaggccgtttttcagaactgcgaattcgttatccgccgtcccatggaacaccaacagtgcatcgtcacagcacaaggacgaaaagaccggcgtgagacaactgggattgttatccacaatagccgtataaccggtgatgcatcatatcttcccgtgaaagccaagtaatgataattactataaactttggataagtactagctagatatcactttagttaatgctcattatatatatggacttctatatatacaggaacagagcatttttgggacggccatggaaagagttttcgaggacaattataatgaacacagagattgatgatgtgatagacccggaaggttggttgaagtggaacgagacgtttgcgctcaacacgttgttctacactgagtaccgcaacagaggtcgtggttcgggtcagggtcgtcgggttaggtggagaggtatcaagcggatctctgatagagccgcaagggagtttgctcccgggaatttcttacgtggcaacacatggatcccacaaacgcgtattccatacaatgctaactga

SEQ ID NO: 183181 - DNA, 931 bp, Arabidopsis thaliana landsberg
accaacaacatttatgagacattgagcacatttgagaatcttaatgaagaagaagagttcttgataaagattctatatttgttcttgagtttaagttctcgagggaatggcaagaggtagaataaggtcaaagctgagacttagccatatatacacatttggatgtcttaggccaagtgcagatgaaggtcaagatcctcacccaatccaaggtccaggatttagcaggactgtgtactgtaaccagcctcatatgcacaagaagaagcctttgaaataccgttctaactatgtttctaccactaggtacaatttgatcaccttctttccaaagtgcctctacgaacagtttcaccgtgctgccaatttctacttcttggtagctgccattctttccgtgttccctctttccccgttcaacaaatggagtatgattgctccactggtgtttgttgttgggctcagtatgttaaaggaggctcttgaagattggagtaggtttatgcaagatgtgaagatcaatgcgagtaaagtttatgttcataaaagcgatggcgagtttcgtcgcagaaagtggaaaaagattagtgttggagatattgtaaaagtggagaaagacggctttttccctgctgatttgcttcttttgtcatcgagttacgaggatgggatttgctacgttgagactatgaacttagatggtgaagcaaacttgaaagtgaaaagatctttggaagtgtcactgccactagatgatgatgaatctttcaagaatttcatggcgacgataagatgtgaagatccaaacccgaatctctatacctttgttggcaatcttgagtttgagaggcaaacatttcctctggatccaagtcagattctcttaagagactcaaagcttaggaatacaacctatgtttatggagttgtg

SEQ ID NO: 183182 - DNA, 635 bp, Arabidopsis thaliana landsberg
  unsure (1)..(635): unsure at all n locations
atgnacaaaaaagaagaagatgagagccccaaaactgtaccgtttcacaagctgtttgccttgccagattcatttgacatcattttgatgatcctcggaacaataggcgcggtgggtaacggtcttggcttccctatcatgacgatcctcttcggagatgtcatagatgtgtttggacaaaaccaaaacagttcagatgtttctgataagatcgctaaggtaataaatatattctactcttttacctttctagtttagacccacaaaaaaagaccacaatgattgatctttaatacaactttactcacaggtggctctgaaatttgtataccttgggcttggaactctagtggcagctcttctccgtaagcacacactcgttgattctgtccgaaatctttagtgggtttgaatgtgaaagattttaatcttttagtggatgttattgtatataatcagaggtttctggttggatgatctctggggagagacaagctggaagaataaggagtctgtatctgcaaactatattgagacaagacattgccttcttcgacgtcgaaaccaacacaggagaagttgttggaagaatgtcaggtgacactgtgcttatacaagacgccatgggagagaag

SEQ ID NO: 183183 - DNA, 355 bp, Arabidopsis thaliana landsberg
atgatggtaagttctttgtagtcatctgttaaatgttttcttacttagttcttgtgttttggatatgatctatcagtcttttcctacaatactaatgtgatataggatttgaaaagctagggtggatagagtttattgaaagtctcagttttgattgtctatctagcttaactaggttttgctataggcatataataatggctgtgaaagactaactttgagatggttactggtggatttttttcaattgctgttttgtgtcttagatactaatgctgcaccacatttgtgcagatttgcaagttttttatgcagcagaggtgtcggtttggcagttcttgtcgttcatcacatg

SEQ ID NO: 183184 - DNA, 3359 bp, Arabidopsis thaliana landsberg
taatatccaagctttggatactgcagaaagtaatggacattccactgaaggtatttggcttcttatttcattaccataggctacatgcgatacagaatctgtgttaaaatttgtcttatatatgtacaatccgaacgtattatataaaattattacaacacttcaaatttaagctggataagaaataaaattactggaatgtgaaacttaaacgatgtgaaatatgaactagtctggctgaattacatagcggacactatcaagttattcttggtcaaggcatgctcatcatcttcttgtactgttacaggtttaacttttgacagtgatcgagtgctaaagctgatcccagagtgggctagaagtgtaagtacaagaatacgtcatgcttgctttgctatctttgaaatcaatccatttttgtttctaaagtgcatgtataggcaccatttacgaactgttggtgcactactgaatagaaaatggtaactgaactattaactctgaaccttcaacacaaactttttcaggcattggttgtcccttttttcccttccagtactatttccttttatctaattgttttcttgtgtatgtgctgggaaactcttcgcatgggaatgaccaaagtgaccaaagcttgtgccagctataattaggcaattagaatatatttctgcctgttgactgaaatcaaattcttacaggtacaaaactggaactcactgatcggacctttgcttgacaagatgttcttggagccatccaatgccatcatggttaggtttcttagttgcatcagtgaatctttggcagatacgtcggatttggtccttccgcatgtactttcacatatgaagaagcaaaacaagtaagtacaatacgtaccataattgtgatttctgtggtaagaaaaactttcaacgactcccaaagataaaacaatattgattatctataatgtcaattctaatttagggtggatgcgagcttcatatccagatctgatactaaaagttcagttgacaaaactaaatcggagaaatctctatttgaccacctttgcccactgcttatattaagactgcttccccaaagagtgtttgatgatattgattcttctacaatttatggtaaattcctcagcggggactctgtgaatggtaagtatgcttatgcctttggttttcttttcctgataagagaggattggatatttatcataaggtcgtttgatccttattctcaattagattcaacgctttagctatattttcctaagcggcatgatcaagagtagatactgacaatcttagacttgattcactacatctatttcttgtcatgtgttacttatcagactaccaagacatcaagtttgaggattgtcaatgcattgctactttcattttggaaaggttattttactctcagtgatcatcaaatacaatctaccctaatacttattttatatctagcgaactaactctagtaatacagggcattttctaagtttgaatttgaagaagttcggaaactctctgctgagttatgtggacgtctccatccccaggtgctaattgactaccttccttgctcttgtattgttggtcaatcttgtctaaatgtttatatatgttttaagcctttgtttcaaagtaaattttatataccaagaaacaatggtagatgctccttaataagttttctgtcaagttcactgctatcttcatgcgaaagcaaagcacatgcaaaattttctcccgtcataactaggttctgttagtatggagaagggcttggtgcattttcttatatctgaaattttctaaatgcctacttcagttttacttatacaacagtctagcctactcttcatcatccaaatttgtaatatgtcggcacttttactcaacaggtgctatttccaactgttttattgcaactcgaaaaggccacagagatacaagacagcctcaagattaaagcttgcctattttctatatgcacatctcttatgggaatatatttaatttttcgtgtccttaatgaacatattctgtgatccctgttgtcacttgttcgatgcactatcaattggattagttttgtaaattacaagttttccgtcacttgcaggtccgaggctgggagtctctctcacacagagtaacacctaagatcaggaaagtcctggaaaatattttgttatggccttctgttgaagatgaaagtaagacaccggctagtggctattgatttatatctcaagctctgttacctttcacttcctcacttcatggctgttatttttccttacagtttccaaagtacaacatgggtgcattgattgtctggcactgatgatatgtgctgaactgcaacatcttaaatcttcaaaaacatctggaggagaaaaaatacgttcaacagggaaggacacatctggttagtattgatgttgtctaacaatagcttttccagacttgtgtatacattgtatcctgatctttaggtgttgatgcgtcaggttattctgtcctagattacactatccattgtttaatagaagaccgaagtaactgctcgtctatcccaaagctgagtactgatatcctaactggtgaaaatcctcttcctattccatttcgtctatgcatggcaaatgttatcatcagtgcttgtcaaaaaaaccctgagtcttccaagaagacttttgcccgaaaagctcttccgcctcttattcattccctcaaggtactttttgactgcttacactcatttcggatttggctaaatttgtttgcattttgtttagttttcaacaaaattccttaattttgtgcaggtcatatctgtaccggaggtccgtgcagcttgtatccaggtcttattctcggccacatatcatctgaagtccacacttcttccggtttcatctgatctgctgaagctttccctgagatttcttgaacaaggatccgaaaaggtaccagaaatctattaaacttatttctaacatgtatacaatggtatggaagtagacaaagagcttcacattaagacatgaaacttcctttctcaagtgactactgtcgacatttctgaatcccacaatccatatccgaaactgcctgcatctatccacatctgaactcgaatatttatgactgccttgaatttaaggttatgcggaagtcaaacattattctcttgttgcgtaggaaaagctggctggcgcaaaactaatggcatcactgatggcgagtgaacacgtgatactggaaaacatttcagagggattgctcgaagcaagatcagttctgtccaaagcatctttgtcagacccttgtcgatac

SEQ ID NO: 183185 - DNA, 678 bp, Arabidopsis thaliana landsberg
atgcatagtgaaacaggggaagctctagaggataaagaaatttcaggtgaatctggtgatgatggagaatcaaaatcaacgacgcacgagaatcatgatcacaacgacaaacatgagacttcaaaaatcagtgttaatgtctctctggttcttgtgttaagcataacacaaagacaggttggtagaccaaaatatcttggggattacgttttacttgctgaagaagaatgagagtttatgcttttgtgcttaaactatgaaccaagaaatttctagggacttcagaagtttagagccgggtctagtagaggacgttgtggatggcttcaaaattcatcaaggttcagcatttcttcctttgcggtgtctatggcagaagttggtgacgttgtagtgactttatcttcttggcatgcatggatttttatcttcaaaggccaccaacctctgtataccggtccggtgaagtctccatgcgttgtcattcagagagatctggaatggcaagggatgggatataccatagcgggtcagattactaggttaggatccgattacggtagaaccgtttgtcgaggtgatgagctttcagagcgcaaagtgactttagtcggaaaccgaactcttccggcggtggttgttaatctttcaaggcagcagagaagttgggaacgctga

SEQ ID NO: 183186 - DNA, 306 bp, Arabidopsis thaliana landsberg
atgactgagtcactggtaagcagaccgattggctcgtcatggagtttttcgtggtatcggcggaggtgactgtttcaagtgtttgacttaaaacagctttttcttcttgttgatgactgagtgggagtgacctaacatagtctctccctgcctcatgaaaaatattcaaggtggccgaccgtgacaacatgtacgcggcggcgctaccacctggcatgcgggtctttcggcatgactaccgtctcaatggccggcgcgaaactctggcgaggagcgttcctcccgctcggtctacaacaagaccga

SEQ ID NO: 183187 - DNA, 168 bp, Arabidopsis thaliana landsberg
atgggcatccatctctcatatcgtaaacttacctgccgagccaatttatattgccatcgtgacgactacagcaggtttcaatgtccactggttcagtatctcaggtggtacacatccgaccggaccgcctatcgaacgtacaatctgtctgtaagctttcaacgaaag

SEQ ID NO: 183188 - DNA, 58 bp, Arabidopsis thaliana landsberg
atggacaaagaaaaactatatctccgctggattgttggcccccgagggagactacaag

SEQ ID NO: 183189 - DNA, 45 bp, Arabidopsis thaliana landsberg
aacggttggtctaaaccggccgttagattacgtaaaattcacttg

SEQ ID NO: 183190 - DNA, 1918 bp, Arabidopsis thaliana landsberg
atcctcgcttgaggatttccaatcactgaaacttccatttcacaagaaaattgaagaggagattatgattttatccaaattcaaccaaaaaagaaccaaatttgcagcagaagatagaaaaaagattaggataaatcgcaaaaagcgtttctgttatggacacaaaggagatagcttgaggattgtggatatggtgaggattatggatttggtttatataagaaaagaaaagaaacgttaatctgcttatgagatgaaaggtggtggataaacgttgcctattaggacattacacgtgtcgataccacaatgctctcatacttgtagccgcttaatatttcactttttcatttttatgcttttgcatttaatgacaattttaatcttcaagtgtgaccacgaaaaatgaaactattaaggaaatttaaaacttagtttattttcgtcaaccgaggatccaaaaaaatatcgttgtcaaaaaaacttaaaaagtattttctagtggtatagttcaaatcgagaaaaacgacaatacaatatcgatcatggaacaattataatgctcgtttttaattacgtgaaatcggaaaatgtaagcatacatgtaattatgttagttttaataaccttcgtcaatgacaacttatggtttctcatcatcacatcgtttaagaagagtagcgtacggtggtgatatggattttagctctaaataatattttagtttatttaactgatttttcctctatataatctattcatttttcattaccatcataattcttgccaatctgttcaaatagttggaatatcgagacgattggaatcttatccaagttaactgaataaacctatgcttgcaagattcaacgaacaatatccagaaccgttctgattggtgaatgatacactaaaatacattaaatgaaaattattttttctgaatgattgcttgccaatattatgatgggcttggccagttggctagaggtaaggaacaacaaattatctccatgcaatcaaatgggaaaaacacaatcatattcataggttgttcgaaaactgatgttacgtcaaaaacggaaacagtaagtggataatattgtattgtcccgagaaaccaacgtggttatgagaaaaagccacgtcatgtcaagttgtcatcgacgaaggtgtggatcttttaaattaacgtactgttcagacaggttaacacgtgtcgtaacatgagaggttaagaaaattcatgctgactcaggtccatgcaagtatgttccctttagattctctatagtactgtgaagctgcgactaattgatttgcatatcgaccacatcctctctctgcttctctctttgtggttttcattatagttttaaaaatataataaattgagtggacaacttgtccatcttctgcattgtatatcgttggcaaaaaatagctatgatttctcacagaaatttcaatttatatgggcttgatatgagatgccaaaggagagataaagtactatacagtcggtaatttatatattttcactatcatttatctagtttacaagttgcggtataaatagctgttattagccaaatatattgaactttgattgatgatagttaaccacccacatagcaaattctcaaaccattcagaaacaacgagccacctgtctttatagtctaagtaggaaactagaaacgtaggataagaaagcgagaataattcatttaaattatatatgctgtagagtttttatttccaatgactttaaaacgagatacttgtaccaattttattttattttataaaattgtcgcattataggaaaaatgcaataagaggcgtcgtggcactttatgtgtcactaaaattaaaacaggaaatcggcgtttgggaaccaacaaaaggcctttag

SEQ ID NO: 183191 - DNA, 1443 bp, Arabidopsis thaliana landsberg
atgcagcgactgcgagagtcaccaccaccgaagacgcgttgtcttggagaagcttccgacattattccggccgccgatcgatttctccgatgtgcgaatttgattctcccatggctaaaccctcgagaactcgccgttgttgctcaaacctgcaaaaccttatccctaatctcgaaatctctaaccattcaccgatctctcgacgctgcacgatccttggaaaacatctcaatcccgtttcacaactccatcgattctcaacgatacgcgtacttcatctacacaccttttcagatccccgcttcatctcctcctccgccgcgacaatggtggggagctgctgctaatgaatgtggatcggagtctagaccttgttttgactcagtgagtgaaagcggacgttttggggtgagtttagtggacgagtcaggatgcgaatgcgagaggtgtgaggaaggatactgcaagtgtttagctttcgcggggatggaagagatagctaacgaatgtgggtcgggttgtggatgcgggtccgattgttcgaaccgggttacgcagaagggggtttcggttagtttgaagattgtgagagatgagaagaaaggttggtgcttgtacgctgaccagcttatcaagcaaggccaattcatctgtgaatatgcaggttacaattacatttcgatttcatattacatgattagaggaatattagcattaggtaacgttaaccaacttttggtttcctaatagtatagtgattcgttttattgcagtaggtcactaattttggaagattgataattggaacttgaaaatcaagcttaagattacatgatttgaggaatattagcattagttattagccttttacacttggactgcatatgatttagctcgatgcgttgagatgagattctagcatggtattaagagtgatctccatcagtgaaagatctgagctttcgaaatgttcttgtttcaatcgtttagaggtagtatcacaatgctggatttggagattagagataatgacaaatctttcttctttcttgaatgtgttttttctttgtgatctgccttaatgacttggtttatgcaaaagtcataaacttgattttgtcgtctcttcttataggtgagctattgacaacagatgaagcacgtagacgtcaaaacatttacgacaaactcagatcaacacaatccttcgcttcagctcttttggtcgtacgcgaacacctcccttcaggacaagcttgtttaaggataaacatcgacgccacaagaattgggaacgttgctagattcatcaaccattcttgtgacggtggaaatctctccactgttctgttgagaagctcaggagcgttgcttcctcggctctgtttctttgcagcaaaggacataatcgcagaggaggagttaagtttcagttatggagac

SEQ ID NO: 183192 - DNA, 82 bp, Arabidopsis thaliana landsberg
atggcgtcaactagcagggatgatgattttaggacaactcgtagtggtgcgaaacggaggaaagaagatattggcaaaactg

SEQ ID NO: 183193 - DNA, 2092 bp, Arabidopsis thaliana landsberg
  unsure (1)..(2092): unsure at all n locations
ttctgtttccactgacgagacatcttcttcagggcctgtcttgctgacaagagagattcacccgactgatgcagatgtccagagtgttctatcacttccactatcagtggctgatacaaaaagtgacgatgctgctgtggtagctcaagaaagtattgtggatggtgatcgttctgagtcaaagcatgctgatggagatattccaaatgattcnnnnnnnnnnnnnnnnnnatctttacctgacaaagaaattgaggtcgttgtcagtgagaacctaatgaatgctcccaaaaatggcacacaacgagagttagatgattcttcaaaaagagacgtggagaatgtggattctgtagcccctgctccttcggttaatgaaggaaatgtggctcaaagcacgggcgatgaggtgaaagttggcacttcaatcaatctggagaaagaacaggaaccgaagtttcctgtcacctcaaccaatctgaaaagagagcaagatcgtagagctgatacgacttccatgaagattcaagatcaacttgaagaggttagttagtctatggaaaatgaagaaaaattagaaaaggatgtgtctgccacttgaatttccatgtatgttgttcttaaaagtctgttgatcaatctatccactaatgctaggctcaaggtttgctaaaagctacagtttccactgggcagtcaaaagaagccaggttagcaagggtaagctcaaatatccattgctactttcctgcatcaaatttgtgataaagtactctttcatgcctgtggttggttctgagcaacctcagatgtatccattttttgtcttcattttcctctaggtttgtgctggactttcgtcccgtcttcaagaaattaaagcggaaaatgcacagttggaagagcataacactgcagaggtaaacttaaacagtttgagtttcttttgacccaaattagaaaaagtaaaagtgatacttgaaggttttcagtgcacctaattttatttcttcatttttattgtaatagcaagagcttaccaagtcatatgaagctagcattagacacttgcaaaaagatctgtcagctgctaaaagtgaagtgacgaaagtagagtcaagcatggttgaggcactagcagctaaaaactcagagatagaaacacttgtcagcgcaatggatgcccttaaaaatcaggctgctctgaacgaaggaaaattgtcgtctctccaggtttttaggcctctcatttgctcatttttctttttgtgtgcttcctatcatagctcaccatgagtctttaatggtcctagttacttcgtgtcttcagttgccattttctttttcaaccaaccagcttttagtaaaatcatttactacttttatcagggagacatggagtctattatgagaaacagagaattggctgagactaggatgatgcaggtattactataatttttttcatcaatgactaaccataatttaccgccgtgtatatacaattataaacagataaggtcctcagaccattgaatcaatattttcttattacaggcattgcgggaggagcttgccactactgaaaggagagccgaagaggagcgttctgctcataatgccacaaaaatggtttgttgcctgaacgatgcgaaaactgtttataatgaaaacattatatcaattttttgttttacgtgaatttctctttctaagacaggctgccatggaaagggaaagggaactagagcacagggctgtggatgcttccacagcacttggtagaattcaggtgagacagaattcttggataggcactactatcacttctttacatttcaaataggccttagtttctgagtgttggctttctcttcttaaattgttttctctttttgtcagcatggaaatttagaaaccctttgtattttcatatgcctacatatatgaaagatgtaaagattctatgtgaaactcttgtttcccaaaaactacgttgatctgactttttaattggctggtatttcagagaattgctgatgaaaggacagcgaaagtggcagattttgaacagaaggtggcattgcttgag

SEQ ID NO: 183194 - DNA, 181 bp, Arabidopsis thaliana landsberg
gaaacctgccgccatttcgacacgcggggcgatatcgcgcctcaccagggcctcgaacaaagcctgcttggtcggataataaagatagaccggtgccctttcgacacctttgccacgcgcgccacatcttccatgcgcgcgccctcgaagccatgccgggagaattcctccagcgcggcgg

SEQ ID NO: 183195 - DNA, 1456 bp, Arabidopsis thaliana landsberg
atgagttttgaggtcagatctgaaaagtttgatacgatagcattaccttcgggtagttttgcgaacatgctgataccttatcagggtaggttagcatgtgttactaataccatgaagaacgatgtcaatggtggtattatattgtggactttggatgatgcagagaaacacatatggtcatgtaaactctttcttgctccttttgcacatatggtcattattgtatgtatgtatgtattattgtctcacaacagcaacaaggtaagtatgtgtttcttggttcccaagttattaaggttttcaagttttggattctattttgagtcctttttttgttgatgcgtctaggattacaatttttgcaagatatatcttactccacaagcaataaagaagaagaaagaagtggaagaagagaagaagaagcagaagaaaggagaagccgttgtttcagttgcacatgtggaagcattggaagagcagcaaccttgcaatgtcgagtatcatcaaccgctagcaagattcttgccaaccgcagcgtcatgatttggaatatcaacagcagcagttttgtccaggcccgctggattcttatcaaccgcatcctcatgatatggagagtcagcaaccgcataatccgctgctttagccagagtcatatgatctggagtcttttgagattgtgtatcatcagaaacaaacaacatagtcgcatgatgatgatgcaagagtcaatattgaggataagattgtatcttatgcgataagtttaaatcttatgtgataagtttaaatcatagttatgatatgtttagaagtcgagatatgtttatcttgtgtcgatcccctcatgtataaataccaaggttgagttcattaataaatcaagttagttcaataccttttcctacatggtatcagagcaagaaaaatcttaaaatttttcagttttatggctatcggtgatgagaatccggtgggttcaggaggagcgctcgttgtgcagcctccctctgcatcatctgttgtgcagtcgccttacaccttggctagctccgacattccatggacgatgatttcctctgttcttttgaacggagaaaactacattgaatggtctgaagagatgttgaatgctcttcaagctaaaagaaaaacaggtttcattaatggcacaatcaaaaaaccgtccagtgaagatcctaatttcgataattggaaagtggtgaattcaatgatcgtaggttggattcgggcttcgattgaacccaaagtcaaatctactgtgacgtttatttccgatgcacatcttctatgggacgaactacaacaacgtttctcggtgagcaacaatgttcgggttcattacatcaaagctcaacttgcctcatgtcatcaagatggacaaacagtaatcgattactatggaagattgtgtcacttggggaaccagtag

SEQ ID NO: 183196 - DNA, 996 bp, Arabidopsis thaliana landsberg
atgtcggaaggttcgagacggagtagggttactataactctaggtcgtagcggtcaggtacgttgaaggtttcatctctcagtttttgtgttaaaggagtttgatttggtgaatctggaaaatgaaagctttagaattgttttatagagatgagttggtgtaggatttaatgagtttttgagtctagaaaagtgcttattttggtgatgtttttcttttgcaggtggtgaatcgagctgcaagtgatatagatgatgggtatgagttacctagagttgggactaagcggtctgtcaaagagagattagggaatccgttagatagttctgtttatggtggagaagaggtggtcagtaaaaggtgttaactttttccctcttatgtgtactactgctgcatattgattgtcaggagcttcttaatctgtgatgttgctcttattatcatgatatctaggaccttttttgtttgttcacggggttgtgaatagatgagtagtgagaactctggaggaactgatggattgtgtgttctatgcttcggttttatgggttttgaatttggttacttgttgctgcaaggtacactagattaaagtttttggttttctttgtttatgcaggcaaagaggggaagcaagtttcagtggaaatggtatagatgtgaattactggatacacactagcgcatgtttgctgatttctgacccacccctctttgttactaagatttgcagatcagtcaaaatgatctccgattcaaactgatgcaaaagaatgcccagagacgagctcagagcgatgaaggctgcactatggatcttcgtgaaaagctctcaaggagtgaacagcctcctcgtagccttgatacaagacctcgtatggctgaagcgagggatcgtcctttatcttcatcaagaactgctcgtggttcctctcagatgatttcatcaagtagttcgcaccctgcatgggctctggaagaatttcgacgaag

SEQ ID NO: 183197 - DNA, 1731 bp, Arabidopsis thaliana landsberg
atggtgaaagtccaaactttttagacgcgtcagtatgaaccaaaaaaacaaaaatatgattaaggatttgtgagaaaataagaggtttagcttaagaattcacaacatgtataataagattttagtataagggatcttagtataatttttacttttttttcccaaggatcttaatataattaacataaaaagaaatattatagtataatataagtatgctaaaaggtaaagaagtttctctctttcttcttcgtcctcctttgttctcctttctctctttccatcggcaccgatccgtatcatcaaagatgcgaggaaattcttattagcccactagagagatacgtacatggagagataaaggtcaaacgctttattctttttcctctctcttcctagaagcagagatcactgtatcaaacaatcacaaatgccttccttaagagcttctccgccgccgaggaagaagatgaccaactgggtcggaactcagaagctgaaagattcaatcctgaagctgtggagaaagaagaagatccagacaaaatggatgagaaggacgaaagtggagatgaggaagacgacgtgaaacgtgaccaagtagaagcagaggatgaggaagcgttaggagaagaagaaggtgaaagtttcgttttttgctcttgtttatagtcgtggatatatttatatacgtatgtgatgtgagatacatgaatcaatcaatgcgttagtatgtacaacatgaaagtctttaattggtattaacagtttcagattctaaggaaagaagtcaatcttcttcagcaggagagttatcagaatcagagtaacaattcttttccctttcgacattttctgatgattggtttcactgttgtgtttgataggttttaagcggaacatgtggtctctgatgtcctcagtgttttgttttcattgatccgatgcattgtttggttcttgcttgcatgttattgatactgttgtgtttaaatgccgaggattgatctgtgttgattagtctctttttagcttaacataagtttttgactgagacagacttcttatagtaggcaacaccagtagttggtgatctttgttatttgataaagtcttgacttcccttgcagatatatggttgttgatctagcggatatctgtaaggacgtgcaatgctcgatatgtttaggtactcttctccacatttatattacaaagtcaatcagcttcagttgcctctcagtcaccattattgtgaatgtttaactacctaataagaaaaatcaggcttcagctactttcatcaaccaacataaagctggtagtcattgtagactgttcaggcttgccaacttttctcattaccctgtttttacatagtcattcactctatctttactaaattcgactgatgccagcactggttttcatttcctagggattataaggaaaacaaggactgtgatggaatgtctccaccggttttgccgagagtgcattgataagtcaatgagattggggtatgcattccatttgcatgttcagcattctttagggagtctaatgtaaagcttgttctgtattatattaactggcaaatgcattttcaggaacaatgagtgtcctacttgcagaaaacattgtgcaagccgacgttctttaagagacgacccaaactttgatgccttaatagcagctttattcaaaaatattgataaatttgaggaggag

SEQ ID NO: 183198 - DNA, 221 bp, Arabidopsis thaliana landsberg
tgtcttcttcgactacggttgttgatgatcgtgaccatgatggcaatgatgatgatgatgcacatgtagaagaagaagaagaagttgttgttgatcatgttgatggtttgttgactgaggttgttagagaagaagattgtgctctagaggcaaaaaaggaagaagaagaaagtcttagtaatggggaaatcttaaaagcagtctcaagaaggaggtcttag

SEQ ID NO: 183199 - DNA, 1105 bp, Arabidopsis thaliana landsberg
atggcagctccggaagattcaaagatgtctccggcgaattcgtttggagctgtcgttctcggcggtacgtttgatcgattacacgatgggcatcgaatgttcctcaaggtaattgggtttttcttctctctcttcggtttctgcttacgtatgggtttcttgagaattgaagtacaactatcgatttttttgggggatggaaaaatcaggcggcggcggagctggccagggatcggatcgtagtgggagtctgtgatggcccaatgttgacgaaaaagcaagtaagtgatagtgatcacactttcagtctcttgtagatttgtttccctttttggttagattagtagcaatatagggaaagttggtaacttttgtttccctttttgcttagattagtagacccaggagattgatttcttatattagctagtaaattcagttactttgattgattacgatttggagtgatgttcttatgatcaagaggcaaaagaggaccctttgaacatctttgttctgatgttgttttgtggggtttaaagctcaaagtctgaaactgttatgctttgctgatgagctctttccaagtctcatgtcattcatttttcagtaccatatctttctgtttgatagtcccaggagattgatttgtaagtagagtcactttggttgatttcgagttggaatgatattcctatgatcaagaggcaaaagaacaaacaccctttgaacatcatttttctctgatttaaaactattgctttgttgcagttctcatcctcactcttttgtgtgtacagttctctgacatgattcaacccattgaagaaaggatgcgtaatgtggagacctatgtcaaggtaatttctccagaatgtggaatctcttatattggcaattacttgtcattcttaatgtgaaatgagagggaaagagaatgatgaagtagagtttctgttgtatgagttttctccatgttcttgtgtagtctatcaagcccgagctggttgtacaagccgaacccattacagatccatatggcccttctatcgtagatgaaaatttggaagctattgttgtcaggttttcaccatctatgtattaa

SEQ ID NO: 183200 - DNA, 6012 bp, Arabidopsis thaliana landsberg
atggcggctccggctgacgcgacaacgaagggacaggcgctcgctctcctcgccgctgccaaaaaccacggcgatttggcggtgaagctctcgtctcttaaagaggtgaaggagattttgctgtcattggagccgtctttgtctgctgagattttcccttatcttagagaactctgcttgtcccctgaagttttagttcgcagatcccttatcgagtgagttactcagaaattttacggtttcgtacctggttttactttcttctttcactacggatgatgttttcccttgctctacacgaactcgtaaagacttttgttttgttgcgtgtttagggttcttctctatttttcccaaacgtttgatctttccaaacccagctgctatgttgtagaaattatgcaaacgatgcctccagtctgcatgattgtttgtttttggtgggattaatttgaaacttccacagcaatatggtggatattactcgtccgcttactttttttttagttcacctcgcatagttttcataagttatgttaaatagttacttctgtagctattcatggtgattaaatttgtctgacaagttaagagacatgttgatcgatttcttctggatggcaggatcattgaagaggttggtttgcggatgctggaacattcttatgttctagtgagtgtcttaatacacttagtaggtgacaatgatccaactgttgcagagaaatctatttctactggcacaactttctttcgcagcatcttggagaagatggaaacgcaggtccatactgtttctcaagttggatatcttgtcgtatgcatatgttgttttgaaattccttcttgagatcttttcaaaaatcctacatttggagtcagtatttaccagcaaaagtatattttacatgctcgtagctgctgatgagattgaactattgttaacccatggaaactttcctcttgttttcattttcgaaacttcggttggtttttatgttggtgctacttatttgatgtttaaggctactgtcataaggctgtagggtaatatgaaatagtgaataaaataaagcactgcaagcattggtaattttctgtttaagtttttgttggatatcttatatgatactctcgctgatatgtattattcttgatgatctctgcagttccatcaccatggtaaagttgatcgttggtgtgtgaacctatggacattgatggttatgttcaaagatgctgtctttaacattgcattggatttggaggtatgctgactgtttatagcctctcttttttgtctgtctgttcctctcccgagattcgattttggtttagtatttgctctgcttctctctcaattttaaggttttctaactcaagtccgtttttctctttcacaatagcctggtcgtgtagtaggggtgaaagttcttgctctaaagtttatggagacatttattttgctcattactcctcatgcatctgatcctgagaaagtttccacttccagcgaaggtattatgttctaatcatgcagtttttattattattattccgattatattgtattttatctggaactgcaccatacatgctttgttcattttgttgtgcgcgggtcaacttttccaattctactgcaggaagtagacagatgatcaatatttcctcccttgctgccggtctccccatgctgaatctaacagggctcatgtctgaagtaaatcagacacttgtccgcttaggatctttcttacaggcacctactcttatacaggatgcactgccgatagccgttattgattggtatgtttctgtatgcagcccactattcttgtgttacttttctttatattcatcatgatattagttgtgcttttacctgttacattttttgctatccctcttttttagttgaaactatgttagttctttttccactcagtatgctgatttgttcttgcaagtaagttgatatggatgttttggcgctcagaaatttttgtttcctattgttatgttcataacgtgaaacactcgttctcacatgtatgttggtgataaaatagctatacagaatgtgtcttgctacactggaatgtgtcctgaatgatagggtaatattaatagtcttctttgcaatagctttatgtgctcatgtttgtgaaatacaatatttgcagatgatctttcacttgtaaatagtttgataatcatgattggctgtcctacttgcactttcagtgtcttgaatcaaattggctttgtaaatattttacatcagggaaattgaactgctcggtttccatttgtatgtctactaaaattttggctgatagagataaagcatggagacaggttaaagcaccggttcaacccctatgatgaggtgcagctaactgagtcatactcctcagttgaagctgcatcagttacacattttgacagttgcctgggtatatagctccactatgcaagtgataaggacatcaaacgatggatagaatggtcacctctactagttagaaatgttttttccaagtaacgcagaaaaatacttgaagaaaaatttatttggtttttgtgaactggatgtatatatatatatatatatatatagatatatatatatatatatatacttatgactgtatgttgggatattaaaaatgtatacagtacagtatagcaacttatgcacagtatcatttggcaatcagagcgttcttctactgaattctagactaacatttacttgcattgtggttattccttctgttatcatgaatgtttctttgtcatatgtaggattaggtggattttgatatggttgatggagcgttgaatacatatattgctgcttgatcttatattatgtgatactgtttagatggatatagaagttatctcgtggttttcatgtccagtaggtggcatatctctaatcactttgaacaatcaaagtttccttcatctgtttgagagcaccttctgattaacttgggaaatctctgcatagccaactaagttgtcacttttgaaaaaaaaaaatcttcagtagtagtaattatcttgcagatgtttgtttttgtttgaactaatactaccatagaatgtctgggggcacttatctttctagatagatcaatgtcaaatcctgagggggagagactttgtctagagagatcgatggttttagatttttcggttttacctaatgttttattaatggagctgtcgtcttaaagtaagaaatatgtgaaaattgatcatcttcctactttggtaatggtaacaaatcatctttttgtattatgctggcagttagcctgcaattgcaggaaatctttgagatatgctagcttccagactaaatcttctgactcctctaactgtgataataatcttctttgcgtaagctttaagtttgcctcatgtttgtgagatacaataataagcagatgatctttcacttgtaaatagtttgataatcatgattggctgtcctacttgcactttcagtgttttgaatcaaattggctttgtaaatattttacatcagggaaattgaactgctcggtttccatttgtatgtctactaaaattttggctgatagagataaagcatggagacaggttaaagcaccggttcaacccctatgatgaggtgcagctaactgagtcatactccaggggaaattggctcagttgaagctgcatcagttacacatcttgacagttacctgggtatatgtggagctccaatatgcaagtgataagtacttcaaacaatggagattgtcacctctactagttagaaatgtttttccaagtaacgcagaaaaatgctttgggatattatttggtttaagaaaattttatttggttttgtgaactggatgtatataaacatatacttatgactgtatgtggggatattaaaaatgtatacagtacagtatagcagcttatgcactgtgtcatttggcaatcagagcgttcttctactgaattctagactaacatttacttgcattgtggtttttccttcttttatcatgaatttttcttttccatatacaggattaggtgaaaatttgatatggttgatgatgcgttgaatacatatattgctgcttgaacttatattatgtgttactgtttagatggatacagaagttatctcgtggttgtcatgtccagtaggtggcatatgtctaatcactttgaacaatcaaagttctttcacctgtttgagagcaccttctgtttaacttggtaacaaatcatctttttgtttaacttggtttttgatttttctgttttacctaatgttttattaatggagctgtcttaaagtaagaaatatgcgaacatagatcatcttattgctttggtaatggtaacaaatcatctttttgtattatactggcagttagtctgcaattgcaggaaatcttttagatatgctagcttccagaccagatcgtctgactcctcttactgtgataataggataagtaaaaatttagatttaggatagtttcatgttgttaaggagcttattcgctgtgtggtatgctgcataatcaagagtaaagtttctcacatgaatggttgctctataaagttatatcaaactctagtatcgtttacgttagataattgtatatgttaaaagcagctcctcacacctaggactgtttcattaacgtcagtatagttatttttgtttgctgagatgtgtagtgattcaataggacatgcttgctgaagcatacctaaaccatttgcaattttgaatattacgtatttaagcactggtttcttaactgacagtagcttatctttcagtcttgcagtggtagcaaggaagaggcctgtccactacgacactgtcctctctgttctgggatttcttaaatgtacttcctcaccgatagtagaggtatacagttcacactttattactttgtttcttctcaagtatatctaaactttagtcatctattactcctcaactctacccttttttttactgaagaacttttgctacctttctagtcaaactgtgaaccttttgttatctgctttgtctactctagaaatgtgccatgccttttttttgtcagatgcaccattcattttcttttagtaaaaggttctcaatgactatttagtgtcatttccttcagtgaagccttgtagtaggtcgaatagagtgcaaagaagtgtttgcttgatcagatcataaatcacaagtatcacataatttcttattgtttgctagtatttgttttgttaatgagataatttaactttctttgatttttagtcaagagacttgcttcttagagcatttccagcaatggatcctgcagatgtttctgatcaagttgtccgtgaagttgatgaattattcagagtaaacgagcatgctgctaatgaaaatcggtcaagccaggtaaatgttttgttttcgttctttctttcctactcttctatagctctacatcagctgttatgtcaaagtcagtttcaggcaaaccagctgttgtctcaaataagctgaatctgttaaagcacgttagtctgattcactgccttaggattgtaaaccgctactagcttatcttgttttcaataaagggttttgaactcgagccagaaacaagctgttgtctcaaagaagctgaatctgttaaagcatgttagtctgattcactgccttaggattgtaaactgctagctactaacttatcttcttttcaataaatggtttttgaactcgagccagatcctacagttctaacctgaatctccgttgttattgtttgctctaactattatttttatttttcacgttcacagatactggaagtgtttcctacgctctcttcgctttcagtgcagcttcgtgatcatcttcaacagatgattcattggttggatgaagctattattggagatatgctgcctctatatgaacgtcgtaatgacatgcgtcag

SEQ ID NO: 183201 - DNA, 389 bp, Arabidopsis thaliana landsberg
atgacaagtttaattgcatttcttttcactgtccttgtcatcgtatcttctgttcattgtcgtatgacaactgctagtactccaggtataaattgtttttttcttcttcttatatccccattatgaacaaggtattgttttgtttttaattaatgtacatactacattgtgttaataatttttatcaaccactaggttatgggataaagcaggaggatcgtctatgcatccaaggacaagaaggaacaaagttatgtagttctggaacaagtcgcgactgccttaacttttgtttaattcgtggttatgctggtggctcgtgttatgcttatactcttgatcaatgttgttgtcgtatccctcctccacggctccggaccgaaaagtaa

SEQ ID NO: 183202 - DNA, 57 bp, Arabidopsis thaliana landsberg
atggattccttatcggtcgtgatgctcgaatctaaccgatttgaagattgttggagt

SEQ ID NO: 183203 - DNA, 687 bp, Arabidopsis thaliana landsberg
aggatatgatgtgttctcgtgttaagaacgtaaagtctactaaaaatggtcagaagaatatagtagatgaccatgcttcatcgataaaaggatcgctgtcttccattgaagaatctggggaaaatgaccgtgacagtgagacttccacaagtagatcccattcgataaaggaagaaaacgaagctcagggtagtgtttctccagagccatttttcccttggtatgaagaacttgaggtacttgttcgtttgggagtgccaaaggatcttagaggagaggtaaagttcatactaacttatctaattggaataaattttcacttttcttgcctaacttttgcatttacaggtttggcaagccttcgtaggtgtaaaagcaagaagagttgagagatactatcaggatttgttggctcaaataactaactctgatgaaaactcatctgatgtccaaagaaagtggaaaaaacaaattgaaaaggttttgattagataaatgcatgtttatactttggtcatgactcagtcttttgaatctggaacgttttcttattgccatcatgatctataacaggatatacctcggacattcccaggccatcctgctttgaatgaaaatggtcgagattcgttaaggcggatacttctagcttatgcttgtcacaacccatctgttggctactgtcag

SEQ ID NO: 183204 - DNA, 1299 bp, Arabidopsis thaliana landsberg
atgaaggtaagatttcctttaatttccttgatattttcatgtacatatgtttgatttataaatgaaaattaagtgattgtgtgtttttcaaagaaagaaaaatgaaataaattttggatagtattgtcagcgaagcagcaacaaggcccacaaacataattttgaatggccggttgctgcggattaatgtgtgtaaatacatacattccgttcatgtcaatcccaacgtatattcgtatatatgcatttttcgctttctaaagaaacagaagttgcaagagaattgaaataaaaaacactttaatgaaaatttggtccagaaataccacccaaaaatggttttagttcgaaacgtacaaaataaaataagactcgttcatgataaacattaccaatatgtgctaacctttttaagattttactcatgtatgtcttatatgcatatataatttatgttagaaaatcgatatcttgtaaacaaaaagtaacaacttcgttgatcatcatcaaatgccataatactatattatatgagttctgtaatatagttttctaaataacagaaaaagggaaatttaaggtgagctggctaactctaaatagcaaaatcttctcaaaaccaaccaaaagtttgagtcatgcaacaacaaccacttacttttcccatgcaaaccctaattttcgcatcctctcttaattctctctctttcgtcttctctgtagaccaatctccaccacacatctcgtaactcccacctttctccgatggaggggccacggcgtcctccttccgccaccgcccctgactctgacgatgacaaacccgatgatcctccgtccgtttggcaccgtccaacctctagcctccccgcattgccatctttagatcctccatcgcacggttcacaccattggcgtaatcattctcttaatctgtctccactcccaacgacatcttctccgcctcttcctcctccggattcaatccctgagttagagacgtacgttgtccaagtcccgagagatcaagtctattggacccctcctccggaacatgcaaaatacgtcgagaaacgcagcaagaacccggagaaaaacaaaaagaaagggtgttctaaacgtcttttgtggttcttcattatcttggtcattttcggattcttactcggtgcaatcattctcatcctccatttcgctttcaaccccactcttcctgttttcgcggtcgagagattgaccgtaaatcctagtaattttgaggtcacatttagagccgagaatccaacgtctaacatggga

SEQ ID NO: 183205 - DNA, 525 bp, Arabidopsis thaliana landsberg
atggctgtgtatcaagaaggagcatatgagcgcctttgcaggtacatatctgcttgtttttaagaagacttgttagtagcaatttagagtttggatctagcatgacctcctcattgataatttggtgtagcctgaacttctctgcaatgtctctttacaaatccgtttctttccaagaaggcttgttggtagaaacttagtgtgtttgtatttagcatgaattcctcattgctaatttggaaacctagatagtttgggtgaatgtaaactgtttcacatggtttgtactttgtatgacgataatttgttttcaaaaaaggtcaccttttctaaatccgtttagggcgaacgagaaaactcagtactggctgttaaagcaggatgttcattattattgcctttgtttttgccgtgagcctagagtttcatagaagtttgaggtatcaaatgtaaccaaagaaccttgaattttctaggtgggtccaggctgagtgtaggaaactcggtgatatggataacccagag

SEQ ID NO: 183206 - DNA, 1495 bp, Arabidopsis thaliana landsberg
cataaagaaatagattacgaatgtgtggatatctataagcaacctgcatttcaacatccattgatgaaagatcaccaaatccaggtatgtgggttcatgatcattagaaagatgagtttatctatacacaatttcatatcaaaattatttatcaagtgcttatttgtctctatcctagatgagaccaagtgtcgagttttataaccacggtatcgacggagccggaaacatcagatttattcactggtaaagctgaagaaaggtgtcctaaaggacaagtaccaattcacataccgcaaattaactatactagtgactttatccagccgaatagaataattacagaagccaatctacatgtaagtattttaaccacgatgttaaactacagtattttaaaaatagttatagaatttgtttttgcgactttttatatataatttactaacatgataaattatttttggttagtatgcaattattagaccatttgagaattacacaaaggtatggggtggagcgcaagcggttttcaatatttacaaaccacgagtattgagaaatcaatttagtaaagcttggatttggctaaatcacagagaaaaagatgtaataagcagcatccaatttggttgggcagtaagtatactacaaaacctagctgtccataagaatcatcatatgccgaattatgaacttatcgcacaattgatcttctttttaggtgcatataggattgtaccgagatgatcgcccaaggttaacaacatactggatagtaagtgatctttactttatatttcaattcaaatgtcaagcttaatgacttttaatatctttggtttttgatgtgttagttatcaaataagtacttattatttatatatattacagtcaaatagacaccaaaacggatgctacaatgtgttatgtcgaggaggatatgtccaagtccataagacaatctaccccggtatggcttacaataaaattagtgtcttaggcaaaagacagtccactgctcatcttctcgtcggtcaggtaaaaaacatatagtaacaaaatatatttaaatatttagtaggttatatatagaacttatatatgtacaccaatcatacaggattccagaacaaaaaactggttattgatgacgagaaaaaccttgataggctattggccctatcaaatttattcgatgcaaggagcatcacaagttttcttcggcgggtatacaggggggttagctggagctatcagccctcctatgggggcaggaacttttccgagacaagtaggatatcgcaacaagtttgcatgtttcatgaaacaactcaagtattttgaggataaaagactagtagatattgattcgaacgagtttgaggaatatgtggatagtccaaagtgttacgatgtatggtatcgcgagtttgaaatacgaagtggagagatgctaaccttcggtggacctggtggacaatgtggtatctaa

SEQ ID NO: 183207 - DNA, 355 bp, Arabidopsis thaliana landsberg
atggggtcacgttcacctacaggtgacgcaaacacctattgtctctatgataatattatgcataacaacgtgaatgaattaatacaatcacaatctataaagcaagggtgaaagagagaaagacacgtagccgaaaattaacaaatttgaaagaataaaaactcttaagaacacaaaaatatttctatatatatcctacatagctaagaccgaaatatcactcagaatcatctttgtcaatatttctctaccatcttttgtctcatagctatgggtctagttcaagaagagggaagcggtcctgttcatggctttcggttatcaaccgtgagtgcgtccctgccgtcagagacag

SEQ ID NO: 183208 - DNA, 1463 bp, Arabidopsis thaliana landsberg
  unsure (1)..(1463): unsure at all n locations
cccttatctgaaaaagcaagtgcaaaaggttcagcaacaaatgacagaacttgatcgtaaagaagctgatatcaaaaggagcgttgcactctcagcaacaaaatacgaggatgcttgccgagagcttggattgcaggtttacttgtaaacttggttgattttcatctatatgttttttaaaaggatcacataaagtttaaacatttaagatatcagggaaacaatgtgaggcgtgagcttttggagactgcgagttcgcttcctagtacctttagcaagattctggaagttatcaacagtgactcagtaacaggggcaatggagtactactctgcctatgttcaagatgttcatactgagaaagatgtaagatcactggttaacttcaatctctttctctctaaatnnttggccttgtttcctggagattgaattgaccgcttttgatctgtctgcagaagccttgaggattgtctacaaaacctgaaatacattcgtgaaaaccctccatcattaagcgttttgggggactctgaaggtctcgatgctgataatattcagtcatctgagaatgcaaatggtacagatgcggctgcagacagcattgattgggatattacgcttgagactcctgagatagattgggatgttagtatggtagaagaagttgatagtggaaatgatctaggttcatatgaaattgtcaatgccagcgatattcctgagaattctccatttaaagcggaagaaagccaaggccttgaggttgatgtttctgagatttcttgggatgtaagtgttgaaacacctcaggtagaagaaataggtgattcagctttgctagaatcaaaccagacacagttgacagattctacaactcaagtcttagggagtggaggagagaggagccagctgttggagacagaatataggaataagatccttgatgatttgtatgaggtactcttatcactaactatctaattctcagtttaatcctggatatgcttcttgagttgatgtcgtttctcttgtgtcaggtcaaggcatttttgaaccagcgtttgatagaactgagaaatgaagatacgctgtccttgcaacaccacgtgcaagcagtctccccgatggttcttcagcagtattctcctgaaaccatagagccaatggtggttgacatctccatggccatttcattgctaacaaacaagaaatctcgggatctgatcatgatcctcaactccaaaaggtgcgttaggataaagaatctctggcaggggatcacagtgagtaccacagcttctgatatatgtatttgtttgtcgaacagattcctagataggcttgtttcagagctggaggagaagaagcaccgtgaagtgaagttaagagagagcttgaaagatgtgggtagaagacgcatggagctgcagaattcactttctgctatatggccaaaacag

SEQ ID NO: 183209 - DNA, 196 bp, Arabidopsis thaliana landsberg
atgtggcgtttttacgtcgatgatcaaaggtgagaaaaggcgggacgtgcaaactaagaatggactcatgacaggatgtgcatgtgacaccaatatctgcggctttttttttttacttacttgctaagtctcttcccttattgattcagatctaaatcaatgctatgtactgtgtcatttcagaatcaacacatga

SEQ ID NO: 183210 - DNA, 311 bp, Arabidopsis thaliana landsberg
atgggttgtggatttcacttccgttggttcttcttcttgatcagtggccttcaagctcctctgtcattgtccctcacttcccaaggttagatctttataatcattatcttcttgttcatgttttaaatgatatgtttagggttttcgttcatgctttaatttgtgttgaattcaggatccgcattgttgaagttccgggcaagagtcaactcagatcctcatgggactcttgcgaattggaatgtttctggtattaatgatctctgcatttggtcaaggataacttgtaaagacggtaaagtgcagattct

SEQ ID NO: 183211 - DNA, 1265 bp, Arabidopsis thaliana landsberg
atgaatgttccttctatgtcaccattgctccaaacgctttcggtgcctctagcagttccaaaagttaatcaagtaaatgactcttacgctcttgcggtgtttgttatacttattttcgggtctaacctttttctcacttagctattgcattatgtactatggtatagatgatatgtcatgttttcatctagtttggtgtcttgatgtatgttcttagtgaattgtaataccttcttaaaattgttgcatcacttgaatcatgttgtcccatgattagtagttttaccatgtattggtccagttccctctggtcatgtatgagactccacaagcacccgaaatatactgtgtttgtgactttaacattattgcctttatactgaacgagctgtttttcgtggatacgtcttttgtctccttttatcctgtaattcaaacatggtgattcgttgtaatttttcttgcatgtggtatctagcctaaaatccaggatgaggtgatcatagctcgagaaattgttatcaacgatgctgaggcttctcttaggcacaggcttaccaaacgctcaactcaagaagatgtatgtgtaactttgctatgcgtattagttacacttttcctatctctagtttaacttctattcgtcgtgcagattcagaggtctaccggtgctgtggtgattactaggtttgtacaacatccaactcatggagaagaaagtcttacaataatctttctagattcaattgtttaacttcttttgtaggggcaagtatcgtcctccaaatgcacctcctgatggtgaaaagccattatatcttcacatatctgccgctgcccaggtttgttatcctttttggcctaaaggatagactctataatatggcagaaagtaaaacgtttgtggcttaaagaaattcccatattcatatttgagaagctttatttgaccgcctagctttgagatgttggcctggtttttacgtatgttattgcagttaaaagagactacagaacgtatcttagcagttgatcgtgcagcagctatgattgaggagatgatgaaacagaaatcaatttcacagatcggatcagttggtttacagacggtcaaggtatatactgcgtgacacttcttttttgtagttatgaaattggaacagtaagaaattaaaccatatttccagatgctgagcacatgcgtatatttgggtttcgaagctgacccatcatctaatgttgctgctcgtattcgtgggcataat

SEQ ID NO: 183212 - DNA, 985 bp, Arabidopsis thaliana landsberg
  unsure (1)..(985): unsure at all n locations
atgccccattcatcatcctcctcccaactagccaaggattcacccttaatggaagaggtaagtaacctcacgcatctctcgtttatgaatttggattttattgcgttgctttgtaactttgagctgctctggtgcaacnnnnnnnnnnnnnnnnnnnnnnnnnnnnnnnnnnnntgcatcagttggataatttgtgcaatctgatgagggaaagctcagcagaaaggtcacgcctagcaagaacagggagcagcaatagcggtaacagaggcagatcaagcaaaagctccttcttgtccaatgtggaatctaacaagctccctcttgtgttaaccgtggctatttgcagcataggtattatagtgatcaagagctacattaacaagcggcaataacatctattagccactatgggttttctcttctttttttgttcttttgttttggtatttttctcactggaggcgttttgtgagcttccctggtttctctacgtagacaatgacgccagttctcttcccctaaattagtcgtttggaagacgttctcgattatttattcaataaagtttaggtttttagtttacaagtcacttctttgggtttttacaaggatcaagacaagacctggatgcagttgaacacagggtgacagggagattgttaaaacttaaaagtaccaaatacaaaaacaacgttatagactggtagactcatccattattatactcattcaaagaaaaaattaagagttgctaaattgggacatgtcattgtaccaactttcataacacccaaattcaaatcaagtactattgaaggaaccgagtcttcaaagtggcaattgcattgacaaaacaatatacaacccatgaaaatcgttctacgagctagaccaagagaacaatctaatgcaaccacttgacattacattgggttgaatgttgtttgtttcatcataggtgatgaatgatgaggacgggtga

SEQ ID NO: 183213 - DNA, 815 bp, Arabidopsis thaliana landsberg
tgcctaagagatggtgtaacatattcatgttcagatttcacaccaactgtgggtaataagccaccatcaaaaggaaagaacaggactggtactattgtgggcgtcattgttggcgtacgacttttgagcatccttgcgggtgtggtcatgtttactatccgaaaaagaagaaaacggtacacagatgatgaaggtatgtaatcagaatacaacaagcccttgagctgaagaattttggccctaaaattagacctgactatcattttgtaaattggttaatctataaccgaatcgttgtttgcagagctacttgggatggacgtaaagccttacatgtgtacttattcggaacttaaaagtgcaactcaagattttgatccctcaaacaagcttggagaggggggatttgggcctgtttataaggtaaggtacccataccgaaatggacgacatatctgatatctgtatattcttagatatactaggaaagaagagtgtctgtttatacgttttgttttgaaaaacacattcaatagggaaaccttactgatggaagagtggtcgcggtgaagctattgtcggtgggatcccgtcaagggaagggacaatttgttgcagaaattgtagcaatttcttcagttctacatcgcaacctagtaaaactttatgggtgctgctttgaaggagagcatcgtatgctcgtatatgagtatctacctaatggaagtcttgatcaggcgctatttggtaatgaacagaaacatgacttatctaacactgcttctgcgaagcttaagtactcatttatgcccttg

SEQ ID NO: 183214 - DNA, 122 bp, Arabidopsis thaliana landsberg
aagggaaagagagagctagcaagggaattcaacgcaagagagaagatggagacctgattaagaggaaaaaagttaaggcctatcagcaattaaaagcaggaagcagagacctagacaccaag

SEQ ID NO: 183215 - DNA, 761 bp, Arabidopsis thaliana landsberg
atgggtcgtgtaaggttagtcactcctagttcgagtgaaagtgaagacgagagggtcacgatcatccgtgaagcggatatgaaccgtgaagaagtggcagaggaaaacaaatttgaagacgaaaactgtgaacaagagcctccggaaaaccttaacgaaccggaagaagaaaatatttctgaggtatatacaaatttatgaaaattttgtgtgaatattgatatagtgtttagggacaactagaaaacaatgagtacaagttaatagtataggtctatgtaattggtgcatggatatacgtgattaatcatacattgggttgcattagaaaattgaattctgaaaaagttgataatgttgttctgagataactagtacaagtagtacagcgaaatattaattttatggttgtgtatgaattttcaggaagttgatgatgaagaaccaatgcagtctcaggggatggaagaaaaccctaaagaagaggaaaaagaaggggaagaagaagaataatctgaggtaaatggttatttctgtaaattgtgtttgaatattgaaagtagtgtatagggaaatcaaaaccctaatttcttttcaatccaacccaaaacttaccagagaacttggatctggcgggatatgagaaagattcggcgtcggcggaggttcgtcgtgttgttcgtcggcggaggttcgtcgtcagagaagagagaaggagagaagaaaagttttcgagagaagaaaggagaagaaggaaataa

SEQ ID NO: 183216 - DNA, 340 bp, Arabidopsis thaliana landsberg
atgcagctgcgcaaggaccgatatttcactgttgaaggccagcatatgccttttggtgcatctccacaggtaaagtctgtcccttgtcttattttgcttcttctttgatctttggaactaatcatttcgtgcttcgagcaggatgtatggactgaattaggtcgaccttgtgggatccacccaaagcaggtgatctataccgtatctctaaacttgtttgtatatcacgatcagatgcttccattagcttctcttactatgttacctgcgttatctgttacagttcaatactcaactggacatttgtatttctgcttctgaattgtcctttgctttccag

SEQ ID NO: 183217 - DNA, 419 bp, Arabidopsis thaliana landsberg
gctcgtgtctgaccgaactgacggaggatctaacatcaccggcggaagttatcggtcaccgtccaaaaacaccaaaaaccaacggttccgcacaattattcgtcgccctaaaaaaattctatgggttcacgctgctagtgcgcctcggttaccacatggggtcagacttaaccaacagcataatcgttcagccaatgaggtaacgagtcgtggcagaaatacccagaagagaatgattcgggagtaaattaacttaatgtcaagcgttggatctaaagaccctctaggctccgggtggaggataaccgtacagcccttctctgtccaaactggaactgacctttccggtacaggacgtctccgggaaaaggaaaacgaccggtgatagtctcatggcaaaggacatacccggtgattga

SEQ ID NO: 183218 - DNA, 640 bp, Arabidopsis thaliana landsberg
agacggcgaagaagaaacaagcgtcgtctcagccatagaaaacggagttgtcagattcgaacctccttggagcttaatctccgaaaccccaactctgggttccgattcagcggcagaggagagagacgcgttctcaggaggagtacgaaagacgtcatcgttgatagaatcgaggctagtcggagaagagaacgagagaaccggagttttaacaaccgccggagaaatctggttcccgagaacctcagtgttgtcagaatccgtcgattttgtcggaagagcttcgtgaccggcgaaaggacagtttttgaggtaagatttctgagaagaagagatgctttcgaattcgctcgagtcgcttccaacattttccgccattttttgatgagtgagtgagtgactcttccactgtcgactctccactgtctcagtctcttccgttaaaaggagcgctcagtgtagtaaccaagtctggtttagtaaaattaatcccggtccggtttactgccggtattctcttacaaaattaattaatgattatatgcaatgaatcttaatgtaatggttaatttagtcggtacgtcagaacctcgagccactcaacatgtccaaccaatctcgtcgattaaactctaagtga

SEQ ID NO: 183219 - DNA, 131 bp, Arabidopsis thaliana landsberg
ctcaggtcatcaatctccataccgcgcacgctccagctgtcacgcggaccccaccggtctgtcgcctggtaccgcaactacgctattatcgctgtatggcgggcccacacatcagccggggtcttccgtga

SEQ ID NO: 183220 - DNA, 557 bp, Arabidopsis thaliana landsberg
atgaaagtacttgctctggacaccttgcataacaattttatccgatccaatagcaggtatttttgtagttatcccggtttagagaaacctctttcttatctagagggttactgtgaactgttgagagatttacagtagaagcaaggtgaggacgaaaccttatctttgtggttgcagacatggcaggtacttctctaccttcgtgtctcctcagtcaaggaccttcgttactcttctcttcttcgaatcaggactcagaagctaataaatgtcgaattgggataacatctggaaaacgttgtcttgttcgttgtttcgctaagaagaaaatcagttttgtggatcagattctcgattatatcgaaggtattctcatttccatggaaatttgaatttgaattttttatgagaagaaaaattgagactttttaactgtcttgagtttggtctttgtgtgttcttgttttaaggcggtcccaagcttaggaaatggtatggagctcctgaacttcggccaaaggatggatctttaagtggagacgacgatgaatttgaag

SEQ ID NO: 183221 - DNA, 236 bp, Arabidopsis thaliana landsberg
atgcgcgccaaggagcgctcagaggaccgtacctgggagcgccaatacttcactgccgtcgagggcaaggatgacgtcctccagcagctcggcaaggtcgtcagcgtgccagtcgacggagacgccgacaagactggcggcctctggcgattcgacaagaccaaggccgaagcccaggctgcccaggagctcacagacgaggacgtggccaagatcgagaaggagttgctgggctg

SEQ ID NO: 183222 - DNA, 231 bp, Arabidopsis thaliana landsberg
gtatctagaggaatgggtacatgttgtacatatatacacgcttaatagtgatggttactcgtctatgttagaaaacaccgaaccaaaccaaacgaaatcaatttggtcgacaatggttaaccaaccggtaagatcgacctgaaggggctggaccatggaatgttgaaaaagatggccaaacagtggatcggatcggttctgatcgtggctgataacaagtccccacactag

SEQ ID NO: 183223 - DNA, 94 bp, Arabidopsis thaliana landsberg
agcttgctgcaacaatgacttcatcgaagctgatatagagtacctaccgtacctaaagtgtttcattaagttgatcaaacttgtgaggcaatga

SEQ ID NO: 183224 - DNA, 100 bp, Arabidopsis thaliana landsberg
atgagtatcgtcgtcgtcggcttgaaaagacaatggtccaagtgtcgtgaagacacgcaccaatcgtgggaggaccggacccatcttctctggctgcggc

SEQ ID NO: 183225 - DNA, 223 bp, Arabidopsis thaliana landsberg
ccggtttagtatctcctctgtttcccataaaaattctccaaaacgacgacgttttcttactcctaccatgatccaaaccggaatcaataaccgaatccggtttaatcgggatcgccatagatttcgatctccgaaacgccggttcacattcaatcaaactcgcgactcggcccaccgatccaacgccggatatatccacactgatatactccggcgaagatag

SEQ ID NO: 183226 - DNA, 1684 bp, Arabidopsis thaliana landsberg
aaaattcctgtgaactacttctctgagcacatcgagggaaaacacgaaggcaagactgtaacgttgagaacagatgcgtcggagagaacatgggaagtgaagatggagggtcatagactcacggaaggttggaaagagttcgttgaggcacatgatcttcgtatccgcgacttcgttgtctttagacatgaaggagacatggtgttccatgtcactgctttgggacctagttgctgtgagatccaatacccacagtctatcagccatgaagaaggcgaagagagtggtgaaaatggtatgaatcatcattcaatgaacctttatacatttatcttaggctattcttgaaacgtttcaatttctgattcagaaatatccgagaaagaagttgaagagaatttgcaaaaagaatctgataagtcttcatcagatctgaattgttttagccaatccgtgacgcattcaaacatatcaagagatgcagtggtttgtcggattagcggtttctttgtttttttctatgtttatatcagtcctaatgcaatttgatgactgatgcagagtgtgccgagagatttcgtgaagcgaagtggttttagtaaaggaaggcatgagatagttttgatgaacgaagaaggaaagtcatgggaatcagaagtaaagagttatatgtctggtgcggtttattaaagttggaggttggacaactttctgcaccgaaaataaattagatgttggagattcttgcacattcaaactgttgcaaaaggcgaaaacgcccgtgtttcagctctgcagccgcacaaaggtggagagtatgaacataactggagaaagcaagtttgtgaagttaactcctacaccaagcagccttgcgcttggtaaacaggtgacttttggaaacctctgtctctggtttcttcaatgcactgactgtctttataattctgaatatttttgcagcatctaccgttaagtttcacgaaagtgaatggactcatcaatccggggaagataattctggtggacaaagacagagctgagtggtcgatgatgcttaaggttgatagtagaggagctgtgtatattattggtggtaatgactggaaaagtttctgtgccgcaaatgaagtaggcgcaggggagtcactagctttggagttgatccaaggaggtgtaagtcctttgctcaagttctgctccaaggtcagtaagaacgtcaaatagcttgcaatccacgtttaaggtttgcttaaatcaaataacgacttgttttcagatggagcaaccctcattcaaagcagaggatgggagacacaagagagctcgagtccaaaataggagccaggaaacagataagggagcagaaacttctagagcatctacaatgggaccgaagcttgagataactgaaaaaggagaaccctctcgagcatctacaatgagaccgaaagttgagataagggagaaaatagctgaaacgggagaaccctctcgagcatctaacaaatctagtggtattgaaggaaacttgcagcacacgaaaccttgctcagtcaaaacagatcagttggccaaggtgaaagagagcgttgtagatacgttaactagtatcgggcggttccaagcagagctcgagacaatgaaacgtaaactagaagattcattgcaggaactcaactag

SEQ ID NO: 183227 - DNA, 105 bp, Arabidopsis thaliana landsberg
catattgcgaaggccctatgattcccggttctggggtggacctcgtcctgcgcaacatgaacattgtgtcacgcaacacggatcacaaccccatgtcacggtgtc

SEQ ID NO: 183228 - DNA, 648 bp, Arabidopsis thaliana landsberg
agcaaagggccaaccgaaggctcctttggtctggtgcaccggactgtccggtgtacaccggacagtgtccgtgcaccagaggactcaaactcaaactcgtcaccttcgggaaaatccagaggcactccgctataattcaccggactgtccggtgtacaccgacagtgtccgtgctccaacggctccaaatcttcaacggatccggcgccaaattaggaaagcaatctgcaccggacagtgaaaagtgtctgtccgggcaccacccgacagaaggcaaggattgccttcctggattgctctcaacggctcctagttgccttggggctatacaagggacccctaggcgcatgaaggagaacaccaagcatactttgagaactcttgatcattcatactccatctttgcgcactcgattgacattcttagtgatttgagctctgttctactggtgaactttgtgctattcatttgagctcaagccttggctgtgtgtgtgcgtattgctgtggatttgtgtgtgttgcttccctcccttactctagtgctttcactttgatccttattgtaagggcgagagactccaagttgtggagattcctcgtaaacgggaaagagtcaaaaaaggaacaccgtggtattcaagttga

SEQ ID NO: 183229 - DNA, 443 bp, Arabidopsis thaliana landsberg
atgcatacctactgctatgacaaggacccatttttggctggatgtggcatctccattgaaaaagaaatgactcaagttgaaggccgtgttctcaagcccccaatggtaaacctgtttatgttttgtttgcagatagaaagatatgatctaccatggaaattatagtcccatattgacccatttgtaatatacagctgaagtttggcaagaatgaagattttcaaccttgcaacggacggtggaactttaacaacaaggtaattgtctgcaaagatttccgggcatcactatttcccttttatttttaccctttgtttcttgctttacagatgcttctagaaccaagagctattaaaagctgggctatcgtcaacttttcttttccatgcgacagtagtcacatttcccgtgagcttataagctgtggcatgaggaaaggcatt

SEQ ID NO: 183230 - DNA, 208 bp, Arabidopsis thaliana landsberg
atggtcgcgcgaccatcagtgtccttcttcagtgtagcttcacgtgcttcaagaagttctgacctccatatcgctgaggaagatgctgcacctgaagatactgttatggagtcaactgtgtccgaacaagtctttgtgatgttgtccgtggctgctatttcaggaggagaattagttaatactatgaagtttcacggttgtattcaag

SEQ ID NO: 183231 - DNA, 124 bp, Arabidopsis thaliana landsberg
atggagctaatgggtctaccgtttttaatatcggatatgccgccaaaaggctcaccaacggttcaagaagcgttaccaaaaggatttgaagaacgagttaaagggcgtggaatcgtttgggaag

SEQ ID NO: 183232 - DNA, 229 bp, Arabidopsis thaliana landsberg
atctgattccaaaacctgtgaaagtctccaatcacagaatttctgcggaagtttcctcaaaaattacaacaacgccatcgacattctctctttcgatttcgattccatgatcgttaaaccttttgggcaaattacgtttctctctttctctcgaagttctggacccatctcttcgccgctccaacaatcatatctccatcaagaggacgtttgtactctcaaacgttga

SEQ ID NO: 183233 - DNA, 627 bp, Arabidopsis thaliana landsberg
taacatttttcgatgcaattttggataaggctctccgcagcatagttgctttgattgcaagtcgaggacgtggaaaatctgctgcacttggtttagctgttgccggggctgttgctgctgggtagatttcttgaattaattttactatatgttcttctactcatcagtattaatttttctggatgtttgtgagaattattgatgtgtgatttacttgctcttaggtactcaaatatttacataactgcaccaagcccggataacttgaagacattctttgagtttgtttgcaaaggctttgatgcacttgaatataaggtaatgcaaagttcttttcctacagattatttttatattgtatttgttctatttcattgagaagaacctgcaaggtgagagacatatgcatagttattgagataattattgaatagacctacactatctcaaggatagaagaaatcattaaaccattttgcgatgtggtcatatatggttctaaattacgttccattattatttttataggagcaccttgattatgatgttgtgaaaagtgcaaaatctgacttcaaaaaagctgttgtacggataaatatcttcaagcagcatagacaaactatccag

SEQ ID NO: 183234 - DNA, 625 bp, Arabidopsis thaliana landsberg
gacttaggagatgtggaaagagttgcagagtgagaaagactgatcattcaggaaccaaacatgagagcttcacttctgaagaagaagatctgattatcaagatgcacgcagcaatgggaagcaggttgtgtagatatcgcgaatcactcgaaaactctttgagattttacagattctgatgattttgtttgtgtggatatatagatggcaacttattgcacaacatttaccaggaaagacagaagaagaagtgaagatgttttggaacacaaaactgaagaagaaactgtcggaaatggggatagatcatgtcactcaccgtcccttttctcacgtacttgctgaatacggcaacatcaatggtggtggaaacctaaaccctaatccctggaaccaagccggatctcttggacgcaatcactcgctcaatgatgatggtcatcaacaacaacctaatgattcaggagatctcatgtttcatttacaagcaatcaagcttatgacagattcatcgaaccaagtcaagcctgagtctacgtttgtgtacgcctcttcgtcttcttttaactcgtctcctccattgttctcttcaacttgttctaccatagctcaggagaattcagag

SEQ ID NO: 183235 - DNA, 57 bp, Arabidopsis thaliana landsberg
agaggaagtagtgtcagtgatgatgtagttgtggacaccggaagcgcgctaaattga

SEQ ID NO: 183236 - DNA, 62 bp, Arabidopsis thaliana landsberg
atggggggagaaggtgatgaatggaaaactgcattacaagctacaccgggtgtatcagaatg

SEQ ID NO: 183237 - DNA, 93 bp, Arabidopsis thaliana landsberg
agtaataagacaaagaaggatgaattctccggtgtaacgccggcgaaaatgtttcggcgactgttcgaggaaggagagaaatcatcaggataa

SEQ ID NO: 183238 - DNA, 580 bp, Arabidopsis thaliana landsberg
atgatcgatgatctaatcatcagactaatcaatatttatttttctaaatactacacaccggacgtagatataatcgcagaaacgacagttggcctagacgcgagcgttctgggattgatgacagatatcgatatgaagtacaaactcaacagtctgtctgggtctgtagaatctggatttggacttgagagatatgcacttgaagccacatctgttatggacgatatgtcaaatgaatcgccttctcccacatctgacgactccaacggtcttgttgggatgtatcgtcataagaaagcggtctatggattgcttgatttggaatctaagaaccaggtccgtacaattggcatttggggtttccaaggcgtcgggaaaacgacacttgctgaatgtgttttcgacgacatctcaagccactttcaacactactgcttcctaaccaatgccaataaaatctatcagaaccgcatctcaccaagtttactaaaacatcttacaaggagaaggagttctgaagacatatttgatgccatcaaaccaagtcttgtaaaccaaaaagtcctgtttgttgttgatg

SEQ ID NO: 183239 - DNA, 654 bp, Arabidopsis thaliana landsberg
atgagagcaaatggtttcacgagaagaattactcttaatcccacacttaccacctttaatctcacacctactacatcttggaaccctccaagtaagccagaggttatcactcaaatccgaagacgacacgatttgctcataaaacggccaccgaaccggaacataaacggttttcattaaccggcatgattgagacgacaagtagtttatcactctaggcgaaggagtagcaaacaccgtgctgtttttaccactcaaacacgttatcggattcaacggcctaaaacggagatactctgaagtaggacagttaaagaacgtgaactgacgcatgtaaacgccactaaacggcgtcgagttgaggtttagctctaagatccgttgaggaagacagttgtttgggtcgttgatccaaatctcttgagctgcgtaatcgatctcttccacggtgaagttaccggaaaacggtaacgttatggttgttctgttaccggcgttaatatcgcacgttaagtcgaagcctttgtcgtaaccacaagaatgagattgttgatgttttagacggaatggaaaacggatgatcgggccgtcacggcgacaaacggcgttagtgcatgtaacggtggaagtggtcgtcgtcgtcgtcgggattag

SEQ ID NO: 183240 - DNA, 620 bp, Arabidopsis thaliana landsberg
atgattacacgtttcaatcaaatccgtaaggaattttccaaatttaatgatggtgagatttctaaggcatatttttctctcttgtaggtgcccactttgtctcctccttcattctccctttcgttttcttttcttagtttgttttcatactttgatgtctttgaaaattcatgtggagatgcatacacgagctcgtcacgtaccgttggctataacctaaacctaactacatagttctatatatatccactatttccatacaagttcaatatcaattttcattgaaatgagtttgaggataaaacaagaacaaaaaatataagttgggttcgtaaatacgtaagttatcaaaaaaaaaattgaaactctaaaatcaatactatttgtggatctatatccagcaaacaaaggaaaaggaatgtattactgaattccaaaataagatccagtgggcgacaaacccaagcccaattgtaattcaggcccaatgggcctacaaagcagaacaagataccaaattaaggcacaagttagttcgaaaaactttctccggcggaaacttacgccggcggcacaaactttgtgtcttgctcaagatgattgcgtcgaattttatgtaa

SEQ ID NO: 183241 - DNA, 200 bp, Arabidopsis thaliana landsberg
tttagtgtcgacaagcggcgacctgaacgagaaattaccttcttcttcttattctccttcttcttccattgttagttttcttctcctttgttcgtcagtccttgcttatatttttcttacgtcttcttcttcttcttcttgttcttcgttcttcttcttctgcaactgttgaagatccaaattcaacccttactaaatag

SEQ ID NO: 183242 - DNA, 1255 bp, Arabidopsis thaliana landsberg
atgggccttataaagaattatgaaagcttctgtgtcaagaagaaggttactttaaatctgtatcaatatcagctccacgacggcgattcgtcgttgtcctccgaaccaagcaaactccgatccctcaccgtggctccggatattttacggcggttgttcccggctcggactcgaagaattggccggattctccctttgaccaggctggagatgaaccttttccggttctgctccggtctgaaagtcctcggctatttcatgatccttcttgtcgtcgccgtcgttggtgtatcttactacgccgtcgtagttagcacatggtggccgatcttgatccgcggagaccatggagctttatccgccctcgctgccttaatcatctttgttttccatttcctggtaatttccaagtctcataatttcagattaggttttgtttctggaattgtaagtctaggttttctgctacttaacctctaaaccttaaacttagggatgtggcatgaaacttatgtagccaagagaatgagaaatgcaatgtagttatgaagcatgaagcagtgtagatacataatcattgtttagaccattgattgttagtaaatgtttaggctccctgagtttaggtttacaattatacttctgatttgcttggttctttgcagctgataatgctgttgtggagctacttcacaacagtttttacagacccaggttctgttcctgagcatttcagaagagaaatgggaggtggtgacagtttggaggctggtacttcgacagatcaaggagcttttggctctttaggttactgtaccaaatgccggaatgttaagccgcctcgttgccatcattgttctgtgtgtaaggcgaaatctgatttgtttatactatgttctgcttgtgtttctactgatagagaaagaaagctttattcggttctttgtttccttatgtaggtcaaagatgtgttcttaagatggatcatcattgtgtttggattgtaaactgtgttggagcacgcaattacaagtttttccttctctttctggtaaatattcatttccattgtagtctcttatggttcttaaaaggtttaagcgagcattgggattatgtgatttgctgatttcttcaccctctttttttaatttgtagttctatacttttcttgagacaatgttggatgttattgtcttgcttcctagtttcattgaattcttcagccaagctataaagcattcttcttctccgg

SEQ ID NO: 183243 - DNA, 292 bp, Arabidopsis thaliana landsberg
tggccatttgctgctggcgctgttgacccaggccgagttggtacaaatggcgcagcgcgcgtgcgcacaattcgcgcgcttcaagctggacgaaatcaagcacgacttcgccaaactcaccaagggctcatgcgaagccagtgaaagcgtggatttcgccgatgcaccagcaggcgaaggcaccgaaggcgattccggtgcgcccgtgccgaatgcgctaggcaaaacgcccgcgctcgatcagttcaccaccaacctaacccaacgcgcgcgcgacggcaagctcgatccg

SEQ ID NO: 183244 - DNA, 332 bp, Arabidopsis thaliana landsberg
atgaagagcggtgagataagctctagccttagtggattgtgttggaaactaagatatcctcaagtctgttggtttgccatctggatttttcaatagtcggattgagtcgaacctgtaacattcatcaactagacaataatctagagaaatatagatcatgattcctaactaaactaaacaaaaacattttttttttagaaagtgactcaataaactcaaaaacgaaaaataataagaatcaaaaataaaaacataattagtaagtgtctccttcagatttaaacgacacagtctccagtagcattcaaatccgaaaaaaacgagaaaaataa

SEQ ID NO: 183245 - DNA, 622 bp, Arabidopsis thaliana landsberg
atgttggaaaaagcagcttgtggcagcaaaggaagcacgacgacgtgatggactgtgttatagaatagatttgggttatagactgttgaatgggactagtcggtttagtgaattgcatgagattgttagagctgctaagtctatgctggaggatgaagttggacctcttgatggacctactgctagaactgatagaggcattgttagtaggcttcctgttgcagctaatgtgcaagagctttgcacttctgcaattaaaaaggcaggggagttgtcagccaatgcaggtagaggttagtattggagatatgtttattgcaatgaatctgaaagagagagtaatgaaataagttcatatatgtttttgcagatttagttccagctgcgtgcaggtttcatttcgaagatattgcaccaaagcaagtgactcttcgtctgattgagctacctagtgctgtagaatatgatgttaagggttacaagttatggtatttcaagaaaggagagatgcctgaggatgatttatttgttgattgcagtagaactgagaggaggatggtgatatctgaccttgagccttgcacggagtacacattccgtgttgtctcttacacagaagctg

SEQ ID NO: 183246 - DNA, 160 bp, Arabidopsis thaliana landsberg
cgagaaaaattcaagctttgttaatggcaatgtgagtgttttgaaggtgaatgcaaaacatctggtggatctagtcaacaacaaagtgatggattttggaatttataactggattcgagaagcacgttactacaaagtccttttgacttgttattattga

SEQ ID NO: 183247 - DNA, 133 bp, Arabidopsis thaliana landsberg
ctcccatgcacgtgacaaaacatccacacgcatatgtaacacgtggcttaatgctgattggctattcgaaaacgctggaccatctctgattgacggcgaaccgaaagtggtcatgaatgcaatttggtgttaa

SEQ ID NO: 183248 - DNA, 88 bp, Arabidopsis thaliana landsberg
atgcgcttgcttgctgaatgcgtctacggtgcttttggcagctgccgtatgcgcgcctgtaatgcatcgtcgggcataggacgcacag

SEQ ID NO: 183249 - DNA, 409 bp, Arabidopsis thaliana landsberg
atggattctgcaaagggttggtttaagaagcggcagatgcgtggaggatccagatataaaggtgcttcaggtggagctggtggaggtggaagtaatggctctgccgatgagcacaacgtggaaactgatgaagaagctgtttcaaacactaccaaacagaaagttgcagcagctaaacagtacattgagaatcattacaaagaacagatgaagattctacaagagaggaaagaaaggtattctcttgttactctaccaaagtgtacatctcttatttgcaaatggagcgtgatttagtgtttttttgcttaaacaggcgaagcatgttagagcagaaactggcagatgctgatgtgtctgaagaagatcaaaataatctcctcaagtttctggagaagaaggagacaga

SEQ ID NO: 183250 - DNA, 342 bp, Arabidopsis thaliana landsberg
atgaatcataacatagaccatcgcaatacagatgtgttcatcatagacaaaaaaggtgtagctgcagcgatcaatgaaggtctgtttgaagcactggaacaggagcgactggacggtatccgattcgatggcttcgtcacgatggcaaatgatatcctgatgcctcgcggatggctggaagcaatggaaaagcatgcagaggctatacccgaaagcggtatggttggcatccactgcgttgaaaagttgccacctgttcgggagcacaatggattgatgattcatcccatattcaccgcattcggttatgtgctgatcacccgcaagcctttgatacaattg

SEQ ID NO: 183251 - DNA, 499 bp, Arabidopsis thaliana landsberg
atgcgcctctttatgggattacttctggccgccttgggatggattctgatcttaatcgctaacggaactattaacttcggctagtatgaaacatattgttaaacgtggtgggcactccgaggcgtatgatcaacgcaagctctatgccagtatctatgcagcttgtcttagtgtgcgcgaacagcccggcagcgccgagctggctgccgaaagaatagtctcccaggttgaagcctggttaacaccaaaacatgaggttacagctaatgatattcgcagagtagcgcataaacatttacaagtaattaactcagatgcagcgtatatgtatctgcatcatagggtggtttggtaatgtacaaacttaaacacaagcgtccccggcggtttgattttgacctgattgtgatcggttcaggatcgggcggtgccgtaccagcgcacatggcccgcaagctaggcaaaaaggtggctgaagccgaaaactttaaaattggcg

SEQ ID NO: 183252 - DNA, 433 bp, Arabidopsis thaliana landsberg
atggcagccgccatgatgaggtcatactggtcgtcactgcggcacggtggcgcccgctgtgggaggaatatctcaagacccggaaaggttcgtgaaagcacctctttagaggcggtcaaagaccgcctcttttcttttaaaatgtcttcaaatatgccgagtaatgttcacttgttataaaagacaatatcctttatgatactttttatgagagacaagtttcttaaaccttactttccaaatgagacggaacagtccatctatgaactttgggaaaaatctggttatttcaatcctgataatttgccaggtgagcgaaaaaaaacatttactatgatgctgcctcctcctaatgtgacaggagtactccatcttggacatgcatatgaagattcactacaggacgcggttattcgatatcaacggatgcggg

SEQ ID NO: 183253 - DNA, 507 bp, Arabidopsis thaliana landsberg
cgcgcgctgctcagcatttccgacctgtccggctcggacctgaagatgcccgacatgctgctgggcatccacggcatcgtcagcacgctgatgtacgcgaagaacttcttcatcgtgcggcacgacccggagcgcaacgtgatgcgcttcctctattacgccgacaccgaggacaacgaaggcccgagcctggaggaaatgccgttcgcgcgctggcacggcacgctcacggcgcacctgctcacccacggtcgaccactgatgggtacggccgaggagctcaacgagcagatgggcggcgcctatcggctggtcggcccgagcagcatcgactggctcggcgtgccgatgatgcgcgatggcgtggcctgcggcgcactggtggtgcagacctacgccgaaggcatccgctacacgccggaggaccgcgcgttgctgcagttcgtcagcagccacatcctcacggcgctcgagcgcaagcagggcaaggacgatctcgaaaaccgg

SEQ ID NO: 183254 - DNA, 51 bp, Arabidopsis thaliana landsberg
atgttggatcttgcgggtcaatacatcaaggacctgcaagaacaagtgaag

SEQ ID NO: 183255 - DNA, 182 bp, Arabidopsis thaliana landsberg
atggtgagagggaagatcgagatcaagaagattgagaacgtgacgagcagacaagtcacgttctcgaagcgaagaagcggtctatttaagaaggctcatgagctttcggttctatgcgatgctcaagtagccgccattgtcttttctcagagcggaagattacacgaatactctagctccca

SEQ ID NO: 183256 - DNA, 1076 bp, Arabidopsis thaliana landsberg
atgaaggaaagtggtacaattcaacaccaaaaaacactggatgagaaagatattccaaagaacttgagggaagaagaagaaaaaccgagtgaagaaacaaaaattctgatatcttcacttccttggaagatagattaccttgggaacaagctgttcaactacgaaggatattggtacagcgaagacattctccaatcaatccccaatattcacactggttttcagccacaagaaactgatataattcttgcttctttctacaaatcgggcacgacttggctcaaggcactcacatttgcactcgttcaacgatcaaaacactctttggaagatcatcaacatcctttgctacatcataatcctcatgagatagtgccgaatctcgagctagatctgtatcttaaaagctcaaaaccagacttgaccaagttcttatcatcatcatcatcatctccaagattgttctcaactcacatgtccttggacccgcttcaagtacccttgaaggagaacctttgcaaggtcgtgtacgtttgcaggaacgtgaaagacgtgatggtgtcagtttggtgtttcctaaatgccaacaagggagtagactggggagattttaggcaaagcgaaaagatcattcgagcggaggattactctttggaggctatttttgagtcattctgcaacggagttaccctacacggtcccttttgggaccatgccctgagttattggcgaggcagcttggaagatcccaagcattttcttttcatgaggtacgagggatttgaaagcggagcctcgtactcaggtccagaagacttgcaaagttcttggattgtccattcactaaggaagaggaagatagcggttctgtagacaagatcttggaactttgctctttaagtaatctaagaagtgtggagatcaacaaaccagaaacgtccagtagagtggatttcaagacttatttccgtaaaggacaagttggtgactggaagagttatatgacccctgaaatggtagacaagattgatatgataatcgaggaaaaactcaaaggttccggtttgaaattctaa

SEQ ID NO: 183257 - DNA, 572 bp, Arabidopsis thaliana landsberg
atggagatgatagattccgcacttacaagcattctccgccgtacaaagggaaagaaggtcctgagagacgatctcaatgacgcgtcaccagtaatgcttatgttaatccacttgtgtggatacaggatgtggacgttgacaaacggcaagaagaaggtgagaggagcactatgcgtaggtggcgttgtgacgccaattctggtagcttgtggagtaccgctgaaggaaccaaggttagaaccgagaatgatggatttggatcatttgcgtcaatgtgagttcttggagcatgacatggttggcgacttcgcctctgcattgacgctactaggattctcgagggaaggaacattgacttcaagcctgcgcttgaagatctttatttcgagggcagtttgccaactaaggagatcactcacacggaaggagctacaacagaagaggttgatgagacggatgaaacagatgaagtagagtttgacacgagaatgtatcatttcagtgagcatgtacctccagcgagggagagcaagagttttagtgaagctcacaagaacaacagcaagttatag

SEQ ID NO: 183258 - DNA, 156 bp, Arabidopsis thaliana landsberg
atgacgacaattcgtacactcttgaaagttgcttctgctcgaaattgggaattatttcaaatggatgttcataatgcgtttttacatggggatctagaggaaaagatatacatgaagcttccttcgggtgttgaaaatgtggatccttacaagtgt

SEQ ID NO: 183259 - DNA, 150 bp, Arabidopsis thaliana landsberg
gagattactgatgaccccatggatgtgtttgttaccccactacaatcagagcactctaatcaggctgatgcaaatgaaggcaaccctatttatgacactgatgtcaaagatcaaaatgctaatgagaaagatgttgatagccaaatgcag

SEQ ID NO: 183260 - DNA, 489 bp, Arabidopsis thaliana landsberg
taatggaataatagcttctgtacgaaagatctttctggcatttgtaagtgaacccattccactcttcttgcatttgtaagtgttttctaaatttctactcctgcatgctctaatttggccccaacgagaatttgtgtgtttgagtggtcattgaatcgaactcaaatttagcatttttaggattttgagtcaattctagtttaggattcgtctctaatgtttaatttagtgaaggctatgtcattttcaggaatctgattgttttccgtttaaagatgagaactttgatgaattctgctgctacaatgagagctgtgaagaaggagtttattgtaatagacttagatgctgataaagatgaagatgttcgttgtggtaaagtgaaagaagagtatatgatggatgctggcaaaactaatccttccaacatccaacaggttgtttctgctgttgcttctgatgatgatggtgatgatgatgatgactggg

SEQ ID NO: 183261 - DNA, 147 bp, Arabidopsis thaliana landsberg
tagatgctcctaaggctgtagataaaaccatcaaggaaattagaaaatcaaccatagatagttatagaagaatcaagaagataatgagatatatacatttgcttctgatgaatcgccttctggttggtacaaaaggtttcggtgacg

SEQ ID NO: 183262 - DNA, 311 bp, Arabidopsis thaliana landsberg
tttggatggcttccgcgaatccacggttttgcggatgcgcgatgacacgtacctgcgggaactgcgttcccagcacttgcaggctatcgtcactcgaaccatcgtcgacgacaatgacctcgaccggcagaccatccgcctcgatcgtggcgaataccgaaggcaggttgcgcgcaagcaggtgcgcaccattgaagttggggatgacgatggtgagtgccgactgcatcgctagccgctcgttcccctcgctctcagccagaagataccgcccaccaccatcccgatcacgtagaggttatagctcgtga

SEQ ID NO: 183263 - DNA, 464 bp, Arabidopsis thaliana landsberg
atgcttctaacagttacagtttcaggcaaagactttggtaaaaatctggtgaaagaaatgggtagtacctgcattatacaatctaaaagtttcaaccaaatagaaatctacagaagaacatctcagaaaaacccacaaaaaaaacagagagaagagaagagtgttttaccatatcatctccggactcatcaggtaagtaaactttgaagaattttggaacacaattatccaaagaaactcctgttcgatagcaagaaaagatcaaaacagaggatacatggtgtaaatgtagaatcaagaacaaaaaagaagaaacctttgttcatcttcacttctgtctgctctttgtctagatctctgtgaaaccctaattgtttgatttaactgaaggttaatatgcgttctccgatcttattgtttgatttagtgtttttttccttttgtagctaaaagcagagacttga

SEQ ID NO: 183264 - DNA, 2395 bp, Arabidopsis thaliana landsberg
  unsure (1)..(2395): unsure at all n locations
atgggttattattcagctggtttgaacgttttcggtgctatcaacatcttatttatggaattgtaagttccatctctctaaaacatctgtctttatcgtgaatttaactattaactcaatttcgattgcgttagtgtgtcagtttacagtgtacttgatttatgacatagcaaatgaactcttgnnnnnnnnnnnnnnnnnnnnnnnnnnnnnnnnnnnnnnnnnnnnnnnggcagagagttttgttggacagcaggggaatcattacttcgaaggttggaatcagagggcgtcattaaacaaatgtttcctcttcatggtaagctactctgttatatctgttgggttacaaggagtctagactctagatggttaagaattctcacaaaaacatttggttgtagatgaactcaagagaaaggaacttctccaaaattgggcattaaattggtggaactgcacaaaccaaccaattgatcagatctactcttactttggtgcaaaggtagacacttataaatattaatatgatttatgtagcagaaaggtgttgatatgaaactcataacatagaaaaatcacagattggagtctacttttcgttcttgggaatgtatacgcaatggttgatatttccagccttacttgggtttatagtgcagatggttgattttgggtaagttcttaactctgttacaaggtcttaagtaaatactaatagacatgccggcacatccatcatgcgttgttttctatctctttgatcagatccttgcagtttcttgctctcccaagtttctttgtgggcacaatactctgggctgccttgtttcttcagttctggaaacgtaaaaatgcggccttgttagccaggtaggaaactcctacactgatgcataattctgcaacaattttagatttgttttctattttctgatttcttttttttgtgtcaattctctatcaatagatggcagataaattgtttagttggccccagccaaggatatagatttctcggaatggaatggagttcccttccttttccaaaggagcttattaagaatctcggaaatgagagagccaaagagaaggaagcctaccagagatatgaatggtttgcttatcgcaagaggtttaggaatgatgttcttgttatcatgagcattatctgcctccaacttccatttgagctcgcgtatgctcatattttcgagattatcacatctgatataatcaagtgagagcttactcatttttttgtttacaagctttaccagtcccatgtgttagcaactttgttacaatcatgacaattttctatgatggtctcaggtacgtattgacagctatctaccttctaatcattcagtacctcactcggctaggagggaaagtatctgtcaagctgataaaccgagaaatcaacgagagtgtggaataccgagctaacagcttgatttacaaagtaagaaaagcattgttttgcagagtcactgtttctcttttctaatcattgctatggaaattttcggcattgcaggtttttgggctctattttatgcagacatatattgggatcttttatcatgttcttttacatcgaaacttcatgacacttcgacaagtattgatccaacggttaataatctcacaggtaaaagagagaagatgctgtgataaaaactttcctttgaggatgttgttacctgcatatgtttaaactacaatttttctgcaggttttctggactttgatggatggttctttaccttatcttaagtacagctaccgaaaatatcgagctaggtacgctctttattcatctatgcagcttataaagcgtatgcgcaaaagttagaacttgcaagaaatgtcataactgcttcctttttccaggacgaagaagaaaatggaagatggatcatcaacagggaaaattcaaatagcctcaagagtggagaaggaatatttcaagcctacatattcagcaagcattggggtagaacttgaagatggacttttcgatggtaagaaaaacttatgaagtcaatgatcttttgtggttatgttttgatgtagcttgcaaatgtctcagctaaaaatttattttgcattgcagattccctcgagctggctttgcagtttggaatgattatgatgtttgcttgtgccttccctcttgcttttgcccttgctgcagtggtaacgttacttctagtactattttctcaatgtcatccttagcttttggttttcttgaaaactgaatgtatgtcttacacagagcaatgtaatggaaataagaacaaatgctttaaagcttttggtgacacttcgaagacctcttcctcgtgctgctgcaacaattggagcttggttaaacatctggcag

SEQ ID NO: 183265 - DNA, 569 bp, Arabidopsis thaliana landsberg
gtccctgcggatggagtgctaattagtggtcattctcttgctattgatgaatctagcatgaccggtgaaagcaagattgtgagttcattatggttctgcttgtgcaatttttatggtcatcttccctttctatttgctaacacagacctttgtttgcaggttcacaaggatcaaaaatccccttttctaatgtctggctgtaaagtagctgacggagtcggtaacatgctggtaaatctttgaaacttttgtcctgttcttagttctgttttcacatagttgttcatacttcctagtagttattctttgtgagtgtttcaataggttactggtgttggaatcaacactgagtggggattgttgatggcaagtatctcagaagatactggtgaagaaactccattgcaggtatatcatcttgatcacttaaggtctccacaatgtgttgaagaaggctaacatttccttttggtaatcttgtaacaggtgaggttaaatggtcttgcaaccttcatagggatagtggggctctcagtggctcttgttgtcctggtggctcttcttgtgag

SEQ ID NO: 183266 - DNA, 113 bp, Arabidopsis thaliana landsberg
atgacggtcgcggcgggtatcggctacgcgctggtggctttaggaccgtctctttcacttttcgtctccgtcatctccagaaaaccctttctcatcctcactgttctctccag

SEQ ID NO: 183267 - DNA, 2876 bp, Arabidopsis thaliana landsberg
  unsure (1)..(2876): unsure at all n locations
atgtctcaggaaaagaaggttgtcatggaaacgaagctgactgaagaggagaagctatttgaggagaagaaggttgtggatccttatattgctggatttgttgagtcgatggcaaaaacaaacacatagaaaattactaaagagatactggaaggtttatctgaagatactggtgacagcgacagttatgatgtggaaagtggggatgaggattctgaggatcgtccctggcgaccaagtcattcagtttatggtaaatcaactatcaaacagagtcatcttgagaacatgagaggaagatatttccgagatttgtccattgtgagggccgatgaaggggagaagacttgtccacaccctgaagagaatgaagtcgtagtgtaccgaagttttttgaaagctgggctacgatttcccttgagcaacttcgtcgtggaggtgttgaaaatcttcgaagtctatcttcaccaacttacccccgaggcaattataaggctgaatatcttcgtgtgggccgtgagaagccaaggtctggaaccgagcgcgtagtgtttttgcaatatgcacgaattatcatacgagacaaaaccttggggtaaagagcagtatcacaacaacttcggttgttatggattcattgctcgttctgggtcaagctgtcccgtgccaacctttcggaagagatggcccggcgactggatgacagaatggttttatgtgaagaatgacctgacagcgagggaggacatcaaggaggttatcatgcgccccatatggtcccgctttggccttcgaaagccgaaggttgaaattgatgaagctgccgaagcgtgtcagaaggccttcaacnnnnnnnnnnnnnnnnnnnnnacaagatacttagttcaagaacatgtagcctacaggatatggccactgatagacaactgggaaattccaaaagaaacaatcactaaccctagcgaaggtggtctggttcgattgaaatataccttcaggtttggagaccagtttgtcgaaccagatgatgattggttgaaatgtgttgaagctacaagcgatgaactgcttgggccatatttgaaggcggaagataatgcactatctgcggccttccggaggccggaagaagaaaaggttcaaccgcatttttgatgctattggatttgtttatcctgactaccgttacccattacagggtcaaaaaagaaaaggtacgacttctatgaaggaagttgcttcggccgctcctagtgagccagcgccgaagagaaaaaagatgaaagttcttacgcaccggccacgctttattgaaccggccacagtgcctgagtttgtcggtgagacctcctcggccaccgaagccaaggagccaactcctctgcagaaaactgaagagctgactgcaacgccgaaggttgaaaaaattgaagaaccgagagctgaagggacaataacatcagaaattttaagtccttcagcaagtgttgagacaataaaaaaccaaaagggcccagcagtgaccccgaaaagaaaaagaatggtcaatgtgctagatgtactggagacaattaagtcctcaagcacgactccgaagaagactgttgaaacttccgaagcggaaactgaaatctttgatactaaagctccaaagcaacaagctgagactgaagctgggccttcagagcccacgaaggtaaaatccttggaaaccgaggaagaaaaaatgacggagccaattcttgttgaagaaatcagtgctgttacccccgaagcatcccccaaagtccttgattatattgttcgacatgcttcggggaaaaagttatcagaagaagaagaacaagaggcccagcactatgcccaaaaactgaaatatccgaagggggcgttaatattcaatggcagtggagaagaagatttcttgtattgtctccccgacagcaaggaaatttctgtctgtcgggagatgagcaaaagcttcggatttccaactttagaagacggactttcggtgctgtcaaaagatgaattagccgacaattagcatacaatagcttaaaggtgcgacaaatggaattcttatatttttgttgaattcaaaatttttcgtttgttaaaaactattgacacagacatattcctgtctgcagggcctgatactcagcaatgccctcagagcacagaaagatgctgaggacgaaggatgtactatagccctgagcaaccttcgttccgaagtaattgaactgaggaacgaaggtctcgaaaaagacaaaatattatactcattgataaataaaataaaggaagatgaggctacttttaaagttcaagctgaagctcaaaagcgtgaaattgaagatcttcgaaaacaactggccagagctaaggaagaacgcattcttgaagaaacaaagcgtgaactcagcgatcaatgggcagatcacctagaagtgactgttgaagagcttcgttcgtcaaaaaagagatgctataacaaatctatagattgtgttaagaaattaaaaactagctttgccaaggtcggcgcattctcaagtgaggaaaacttttcgagaggcaatcccgaaggtgtcattgaatggattgaccacgaagctgaagccttcgaagaaattttaaatagccgaggagatatatgtgccttctctggcgccagagggattgccactatcttagagaagaagggctgtgaacatgtaaaaattttagcgcagtccgaagctgctttgtcctttgaagatataaaagatcccttggcccaagctaacataattggtggaaaatttttcaccgacgtctgggataaatggtggccgagaaatggcaggagaaattattcaaagaagtga

SEQ ID NO: 183268 - DNA, 154 bp, Arabidopsis thaliana landsberg
aagttatcagaatcaggaacgagatcaaatcaagcgaaatctaattagagcttctccaaatcctaaaccaaatcggatccattctaaagccaattcatcgtccgcacagaatccaaaatcgacaaacttaaaaacactaccagcgaagaaataa

SEQ ID NO: 183269 - DNA, 346 bp, Arabidopsis thaliana landsberg
atggtggttccaggtaaaaactccactatttcgccggattatttcacggctagtcgaacaagtcctttagatatgatgaaattcccgtcgcctggaagttcgaagaggtacgataatggcggtggaattggtttaggtatcgtcgctgcgcttgagaaatccagcatcgggatcaatccggtttgccataccggtgccggttccaaaggatttgacctggctcgatattccaagagattccaattcgcggcggggattgatctatctgactctgaggaatacacttgcgtcacgactcgtgatggcctgaccaaagtctattacaaggaagaagagtttgaatttg

SEQ ID NO: 183270 - DNA, 81 bp, Arabidopsis thaliana landsberg
ttaagacgtgacgtcgtcgctaatcacaaaccggaagatgtgaagacgacgaacgtgggatcaaggaagcttccaccatga

SEQ ID NO: 183271 - DNA, 91 bp, Arabidopsis thaliana landsberg
atggagcctgtgaatgagaagaaaccaattgatgaaactggtggatcttttgatgttccaagcattataccagaagcaaaacaccctacag

SEQ ID NO: 183272 - DNA, 401 bp, Arabidopsis thaliana landsberg
gcacagcggcagctgacggagtacctgttcgcgcacacgctggcgaaccgggtggaggcgtggaccgagaccgactctgtcgcggagcggcggtctctgaaaaaggcgggttttacccaggaaggcgtccggcgcggctccgcctggcgggctggcgcctggcgggacggcgtcatgtacggcattctccgggaggaaaccgtcgggtaagcggggtcctaaacagccgtgatcgtcaggccacctcgtgtgtgtcatccgcgacggttcacttaatgacgcggaaggacaaaaactcactggcggtcccgatcggaccgccagtttggtgccgggcgtggcgtgcggcgaaatcgggactctccgtccatgctttgaagtccgcatccgaacgccagcgg

SEQ ID NO: 183273 - DNA, 356 bp, Arabidopsis thaliana landsberg
atggacaacgtgttgattggaggagattttaacaccatcgttaggttggatgagcgaacatgtggtaatggtcaattgtcgttagattctctagagtttgggagctcgattaacgagttggccttgatcgatatgggattcaaaggaaacaaatacacatggagaagaggtcgagcagaacagacttacattgctcagaggttggatagagttctatgctcagcccatttgcgattaagatggcaggaagcagtagttaatcatctccctttctccccgtcagatcacgcacctctttatgtgcaattatgtccagtgacaagagaaaatccaagttgacgtcctttcagatttga

SEQ ID NO: 183274 - DNA, 76 bp, Arabidopsis thaliana landsberg
acgacatcgttatggtcttatggagtatgggcacatggaaaacgcgtttcggtatcgctttgcgtttacatattag

SEQ ID NO: 183275 - DNA, 828 bp, Arabidopsis thaliana landsberg
atgctaatgctctggataaagatctagaagctagtgggttcacaagaaaggagcagactgacctcgataaagtatgtgagcctatgaccttagttataacactgcttatcaatcttcaatcaaccgtttcttggtattgcgtatatattttgaatcttaggcagactaatttgcagcactggtctctgtgtggttttgtttcctcattctctctggtatatagaatgaacatatggtttctgtcttttatagtttattgaaggtggggtggagaagagtgaagattctgatgaggatgaggaatctgatgatgaagagcagacttgtgaatcaaacgaagaaggaaacctaaatgaaataaaatcattacagttgcaagacaaggtataaaactttccaattcatcatacaactgaaacatgtaccaagtaaagatgtcctctacttacagtatatgcttttggcatgatgtaggagcaaaaaagtttagatggtgttgaggcagaagttgagttggataataccgagaacggtgaaagcaatggagatgaagatgaagtcggaagtaatgaggttagtatcttgtgtgtgagtaactcggagagtgaagtaatgaaatcacttacaaaaatgagttttgctacttcctttgtacaggaggaggaagagaaagaggcagagctggagaaaaatttgggcaaggtaagacgcagagccatggcagcagccaggggacgtagaaagtcacagtcttcaagaaacacatacaaggacaaaggacgcggatcccaaaactccaagatccacagcaacatgagcggcttttga

SEQ ID NO: 183276 - DNA, 100 bp, Arabidopsis thaliana landsberg
atggcctcctggtgggacgcctgggccgacgtgctagccaccaggccgctggctggcccgcctggcaggccgcctgggctggtcccatgggcccagaatg

SEQ ID NO: 183277 - DNA, 195 bp, Arabidopsis thaliana landsberg
ccgagtaagaaagccgagtatacttcaagtccttcctttgacccacgaactcgagtttgtccatcccttgtgctagaaacctccaagttgagtccaaaagtacctgattcacctgtaaaacactccaaatgcaagtatgctatgcaatgcaatgcaaaatgtgcaaaggaaggaaaaaagattaagaatgcatga

SEQ ID NO: 183278 - DNA, 170 bp, Arabidopsis thaliana landsberg
atgtcgcatcgacttcgagggagcagttcggtccaggaacgattacctaaggccctatcctatcgggatttgatgaagtgagaagatcttgtgcctctccaagaagcagggttccatgaatgttctaatatcccgcagcccttcttgtgatacagagctccttgatcaag

SEQ ID NO: 183279 - DNA, 596 bp, Arabidopsis thaliana landsberg
agttacccgtgaagaagattccagtggtctgtgagtatgcagatgtctttcttgatgaattaccaggaatgccaccagaccgggacattgaatttgccatcgagttgcaaccgggaatggcacccatttccaagaggccttaccggatgccacccactgagttggcagaattgaagaagcaattgcaagatttgctggacaagggatttattcgcccaagtacttcgccttggggatgtccagccttgtttgtgaagaagaaggatgagagcttgagattatgcgttgattaccgccctctcaatgcggtaactattaagaacaagtatcctttaccccgcattgatgttttgtttgatcaattggtcggagccaaggtgttttccaagatagaccttcgctctggctatcaccaaatcaagatcagggcaagtgatattccgaagacggctttatctaccagatatgggctttatgagtacttggtgatgtcattcgggctgaccaatgtgccggcattctttatgtatttgatgaattcagtgtttgtgcgggagttggatatattcgtggtagtcttcattgatgatattctg

SEQ ID NO: 183280 - DNA, 83 bp, Arabidopsis thaliana landsberg
tgatcttatatatgatttcttaatgacattggggaaacggctgactaaagttgatgcttttactatcaccactgttttagatt

SEQ ID NO: 183281 - DNA, 388 bp, Arabidopsis thaliana landsberg
ctcttgtcaactcacatgtggagatatccagatcccgtacccctttggaattggagataaaggttgctatctcgacgagtggtacgaaatcgaatgtctatcaaatactgcttccaaaaaagattcccccatccttaaaaaaatcaaaatggaggttgtgaatatttcccttcctctggcctcttataatctcggtgctacttctccgaaagtctcttcaattcgtgtcaaaagctcgattgcatccatgggatgttctagcgatggaaaagagtttggattgactttgaatctgacagacagtccttttttctttggggacgaaaactacctcgtagctgctggttgcaacacccaggcgtcgctgacaaatgtagaaccaagtatg

SEQ ID NO: 183282 - DNA, 1138 bp, Arabidopsis thaliana landsberg
  unsure (1)..(1138): unsure at all n locations
atgattgtggataagcaaggtggtaaacaagcaacctatcatccgaacttcccctgttctcttcatactgctcgagcctggctggagcacctgcctccggggcagatctccaactgggacgacctggtccaagccttcaccagcaacttccagggcacatacgtgcgacctgggaactcctgggatctccgaagctgccgccagcagccgggagagtctctccgggactacatccagcgattctcgaagcagcgcaccgagctgcccaacgtcaccgactcggatgtcatcgacgcgttcctcgccggcaccacctgccgcgacctggtgagcaagctgggtcgcaagacccccaccagggcgagcgagctgatggacatcgccaccaagttcgcctctaactaggaggcggttgaggccatcttccggaaggacaaccagccccagggccaccagccggaagatgtccccgaggcgtcaactcagcgcggcaccaagaagaaaggcaagaagaagtcgcaagcgaaatgcgactgcgccgacgcggaccttgtcgccgccgccgagtacaagaaccctcggaaaccccctggaggtgccaacctcttcgacaagatgctcaaggagccatgcccctatcaccaggggcccgtcaagcacacccttgaggagtgcgtcatgcttcggcgccacttccacagggccgagccacccgcggagggtggcagggcccatgaaagggaattaggcttacacctagtccctaattaattttggtggttgaattgcccaacacaaaatttattggactaactagtttgcccaagtgtatagattatacaggtgtaaaaggttcacactcagccannnnnnnnnnnnnnnnnnnnnnnnaacaaaggagcaaaggggcaaccgaaggcacccctgggtctggcgcaccggactgtccggtgtgccaccggacatgtccggtgcccaacggtcccgcatctgcaacggtacgttcgccatttaaggaaggaaatcgggcacggacagtgtccggtgtcaccggactgtccggtgcgccacgcgacagaaggcaagatttgccttcctggaatgctctcaacggctcctagctgccttggggctataa

SEQ ID NO: 183283 - DNA, 243 bp, Arabidopsis thaliana landsberg
atatgggatgcgtcacgctgcaagagaacaagaacaatggaaggtcatcgtctaagagttggagccctggcatggggttcatcagttctgtcatctggtagcagagacaagagtattcttcagagagacataaggtgtcaagaagatcatgtcagtaaattggcaggtcataaatctgaggtatgcggactcaagtggtcttatgacaacagagagctagcatctggtggaaacgacaatagg

SEQ ID NO: 183284 - DNA, 213 bp, Arabidopsis thaliana landsberg
tccagcgacacggtgagctggaagacggcgcagggctttcaccaggcgatcctggacgcgttcaagcgcgatgacgccgacgccgcggccgccgccatggccgggcatctcgcggccaccgcgttccgggtcgtcaccagcgccgatccgggacgagacctgcccaccgtgcagagcgccatcgccatgctgcgactgcccggcacttcctga

SEQ ID NO: 183285 - DNA, 137 bp, Arabidopsis thaliana landsberg
aaaaaattaggcgaagaaatcacaggaagaagaaaacaactaaactttcttgtggaaagatctcaacaagaaagccaaagagatctcgtggaaatgaaaccgaaacctcaaccaccacttcaactgcttgcttataa

SEQ ID NO: 183286 - DNA, 787 bp, Arabidopsis thaliana landsberg
ggaaattaataaggcactatgtggctttttaaattgtagcaaggcttgggagcaccagaatatattcatggatgaaggagataatgaaattcagcttgtccgaaacggcagagattctggtcttctgcgtacagaaactactgcggttggaatcatcctacaaacctttagtaccttttttcatttgtagccaatttgaattagcttttgaaaaataatgtttcaactttttttgttgttctctactgtttctgatgcagtcacaccgaactccactaaatgatgttgagatgaatagagaaaagcctgctaacaatcttatcagagatttttatgtggaaggagttgataacgaggatcatgaagatgatggtgtcgcgacagggaattggggatgtggtgtttttggaggagacccagagctaaaggctacgatacaatggcttgctgcttcccaggtgcttttatacatcatcagctaaaagtaatgaaattattattttcctggagtatacaagttgagtaccagtaggccataagaataaaaacatatagatctttctatgaaaccacagacttagtctgttttgactgtaagaaacactccattgtcacttttgacttaatttttctagaatgaaccaaagcttcgacttggatgatgagatatatagcgattttcatttgatgcttctttcttaactcggtcatggctatatttcagactcgaagaccatttatatcatattacacctttggagtagaggcactccgaaacctagatcag

SEQ ID NO: 183287 - DNA, 429 bp, Arabidopsis thaliana landsberg
gggctccagttctttatgtttgaaatccagagcaagtgggttgcttcggttttgtcgggtcgtgttaagcttccagcagaggataagatgatggaagaggctatagctttctactctaagcttgaaggtttggggattcctaagagatatacacattttctaaccgatcctcgagggaatccaatgctcgggacgtttaaaccggaggatgcagttgtgatctctcaaagtgattacttcaactggatcgcaaaacagtgtggttgcacgtccatagaacgttggagagagcgattatacaatgtcgccatcaagaaagttttctttggtggcgacagctatcgcgatcgatgggacgatgatcaactcatcgaagaagtgtaccgcgagttcgccaaattgaaaccgaaccaagattgttcttcttag

SEQ ID NO: 183288 - DNA, 810 bp, Arabidopsis thaliana landsberg
atggcgatcataccggagaatttctttgaggaagcggataaagggatgatccggtttaagaaatcatcaaaatggtggttttatgaagaagggattgtgtttgaagatgggacgacattagaagctgatgttgtgatacttgctactggttatgatggcaagaagaagctcaaagctattgttcctgaacctttccgaacttggcttgagtttccaagcggtgtcatgcctttatacaggtacatagacataaaaatcgtctttagattaattgaaattatgtgaaaatgcattagttgcacacttaaaaagacgatcatgctataatatatagttctatgactataaacatattcagtggtacaagtggaagcctatatattcttgtattagtatactcatgaaatttggaccgttgcttatacaaactaaatcatttacaggggaacaatccatccattgataccaaacatgggtttcgtaggatacgtccaaagcagctcgaacttacacacatcagagctacgttcaatgtggctaagccggctagtggatgagaaattcagattaccaagcaaagagaagatgttggatcaattcttaaaagaaatggaagtgacgagaaactcaagcagattctacaaacgtcattgcatttccacgttcagcatccaacatgctgatgatatgtgcaacgacatgggactcaatccttggcgtaaatccaacttcctccttgaagcttttagtccttatggttctcaagattaccgactcggtcaagaagaaaaagaagatatgactgcttaa

SEQ ID NO: 183289 - DNA, 102 bp, Arabidopsis thaliana landsberg
atggagctttatgatgtagttttgaagagtaagcgaggagggggaacgagtgcaagtggaggtgcgaattcttgtaaagggagagtctttgggattgagaag

SEQ ID NO: 183290 - DNA, 229 bp, Arabidopsis thaliana landsberg
ttggtttgaaggcagtttgttacttgaatagttacgagaaagatttcataggcggtctttttcgttttcagagtggtgaaccagtaaccgttgctccatcggctggtgtaagtattgttctttttcagttggcttagtggttacttagattgaataatgagtttgtgttcttgagcaggatgttatcatgtacacagctgatgaccggaatattcactcagttgatgag

SEQ ID NO: 183291 - DNA, 128 bp, Arabidopsis thaliana landsberg
gactggacgagagttttaacaatacatatatcatcaatacacccattcaggaaacttcattaaaaatgaagttggtaattgtcagcgatgggaacatcaaacacatcgacatcctaaacactgtttga

SEQ ID NO: 183292 - DNA, 444 bp, Arabidopsis thaliana landsberg
tgaagcaaactacattagcaaccaccaagagatcggtacgggagtatagttcagggataagcaacccttttgaaggtttaccagagggattcatgggcaaaatgctggtttacaagagcggtgctgtcaagttgaaagttggagatgccctctttgatgtaagtcattttcgtctcatcattattatatgtgaacccacatatctgaaactgtgttggaattcacctccgcttgtagcttttcttcatctcttttaactctcggtcctatgcatatatgcaggtctcgccaggtccaggtacaaaaatccctaatgatgtggtagcaatagacatcaaagggaggaactgcagtcgcattggttcttcagcgaagtttgttactgttactcccgatgttgagtctcttttgaaccctgcttcagacatggaaacacagaagtga

SEQ ID NO: 183293 - DNA, 141 bp, Arabidopsis thaliana landsberg
atggggttaactcaaaagcacattggggggggccctcctccaccggctgatgcaccggtgaccacattcgacggcgtgggtcctgtctgggaatgtgctgatttcctcggccacgacatagagcttgccactactacacac

SEQ ID NO: 183294 - DNA, 389 bp, Arabidopsis thaliana landsberg
atgggagatgctatacctggagaaaaagttcttggtgtgggtttccagtgcgaggaaccactctctgtatgtttcaggtataatctttgtaaatcttttggtagtaagagtttttgaaaacaaacttagtggatgaaaaatttaaaaaaattcccggtttgttgtttcttcttgaaaagtgggttcggcatcttgaagatggcacaagacaatacatcgagggtaagatttgatatatttgtcttaccagcttttttcagctatttaaaaactggactatggtttaaacatatgcaggagccacccatccagagtatattgtaactgcggatgatgtagataaactgattgctgttgagtgtattccaatggatgatcaaggtcgtcag

SEQ ID NO: 183295 - DNA, 425 bp, Arabidopsis thaliana landsberg
atggtgagtgtggtgatttgatctagcctatataatcttctttgagatttgatctgtcttgtaacagacttttacattcttcttcttatagttgactgatgatacccgcaagtgcttccgcgataccttttaccggcttgcaaagaactcacaacagaagtcagactccaactcggatgagttccttgaggatagaaccaggtaaagagagcttttttcattaatcatactttgcttaaaaatggactcatcaccttcaatagttctaatgactcatcaccatctatgacgtttttgtcagtagggaaactgaatctgaaaccaactcaatcgacagagccgtggccaatctcacattcaacaagatggaatcccacatgacaaatatgcctccaccgaatagactttcttttgttccaggataa

SEQ ID NO: 183296 - DNA, 579 bp, Arabidopsis thaliana landsberg
acaattcttatagtagctgttggttcttgcggagttgtgcagcttggctctttgtgtaaagtaagtaagatgttctaactgtatgcggtgttcaaagtagcttatacaatatagtaagagagctttcccattgaaaatgtaaacatttgaatgcctctgatcttcctgtatacttttggtggaacaggttgaagaagacccggctttggtgactcatatcaggcatttatttttggcacttacggatccactagcagaccatgcatcaaatttaatgcaatgtgatattaacagtccatcggatcgggtaatgatctttctcattcaatgttcgtgcaaaattggaagagatgtgatttctgagtataaccatgattcgttgtataattttcctgcagccaaaaataccttccaaatgcttacatgaggcatcccctgatttctcaggagaatttgacaaagctatggatatggaagggttaaatattgtatctcaaaacacaagttatagaagtaacgaccttccatacaatttcactccaacatattttcacatggagaggactgctcaagtaattg

SEQ ID NO: 183297 - DNA, 166 bp, Arabidopsis thaliana landsberg
agcccatctaattctactgagagatgataacctaatgattggtctcatctacgatcaatgcaaattcaattcagcagctgaaactttgagatacggaaacagagcaagaacaataacccaagaagaaaaacagaatctttgtatgagagaaatcggatccggataa

SEQ ID NO: 183298 - DNA, 928 bp, Arabidopsis thaliana landsberg
atcgaagtcttggcatagcggaatcattagcttccacagctctttgtggaattattcattcagtttttggtggacaacctctcttgatagttggtgttgcagaacccactatcattatgtatacttatcttcacagcttcagcaaatccaggcctgaattgggtcagaaactctacctagcttgggctggatggtatgtaaacttctcattttcctttctgttgttattgcggattcctctttcacttacattgaaactctttgtttttctcttttttgtttaacagggtctgtgtctggacagcagttttgcttatgcttcttgctatgttaaacgcatgcaacatcatttctaggtttacaagaattgcaggagagctctttggaatgctcataactgttcttttcatccaagaggctgttaaggtggtgatgggtatttacatggttatagtcatacaaaagtctttcaaacattttaaaacttaaaaggtttgtgttttccttatgcagggacttatcggcgagtttcttgtcccaaaatctgacgatccaagtttggaagtgtatcagttccagtggcggtataccaatggtctgcttgcagtcattttctcattcggtcttctttacactgctctgaaaagcaggagggcaagatcatggaaatatggctttagtacgtgaaaaatttgccttggctttttagataaaaacttgaaaagttcattgaacaatactaactatcttcacttttgcagggtggatgcgaggttttatcggggattatggaactctcctcatgcttgtgttgtggagcgcattttcatacacagtccctagaaaccttcctgaaggagttccaaggaggctggaattgccacttccttgggcatccgagtccttgtatcactggacagtcgtcaag

SEQ ID NO: 183299 - DNA, 47 bp, Arabidopsis thaliana landsberg
aaactgtggacatgatcacccagacggaaaaggaccaatacgattaa

SEQ ID NO: 183300 - DNA, 453 bp, Arabidopsis thaliana landsberg
atggtcgatacctggtttgagggacagcggaaagcagctattcgctcgcaggaatcggggctaacgatcgtacggatgacagtgaagaatgtcccgaccgtccttgaaatcaatcctaatttctatgaaaagctgtttatcgaagacagtcgcttcgaaaacgtgagtgggccggcactggtgatcagcaatgaaaataatgcgtatacccaggtaagtttgcggaatatagcatgtaaaaaagtaccggtactggcccattttcgtgtcagcggcaagcaaattgcgggacaaggggagatttaccgggtgaagagtctgaaccacggcttgcaaatggccgctatcgatgcaaagccggtacatactaccacgctggacatcgatacgcttaaaaccgaaactacgccagccgcaaaagacattccggcttttcccgatatcagcacctgg

SEQ ID NO: 183301 - DNA, 1030 bp, Arabidopsis thaliana landsberg
atgttgaagaatgttctgtatattcctgagttcagactgaatctacttagtgttagtgctttgaccacagatattggtgccagagttgtgtttgatccgacttgttgtgtggtacatggtcttaccaaggggtcaacgattggaagcggtagaagagttggaaatctatacttgctggatgttgaagattcagtgtctgaagacgttgtatctacttcttttgttgcaaactctgttgttgatgcatctgtttggcatcaacgacttggtcatacatcttttgatctcatagacttgctcacagatgtacttggaatttttaaaaccaagaataaaggattgttacattgtgatatttgtcagcgtgctaaacaaaagaagttaacttaccctagtcgtcataatatttgcttagcaccttttgatttgctgcacatagatgtctggggacccttttctgaaccaacacaggaaagatatcattacttcttaaccatagtagatgattacacacgtgtgacatgggtctatctcatgaaatttaaaagtgatgttctcaccattttcccttgttttatcacgatggtagagacacaatatcaaacaaaagtcaaagacgtccgatctgataatgctccagagcttaaatttgaggaactatacaggagaaaagggattgtagcataccactcatgtcctgaaacaccagaacagaattcggttatagagagaaagcatcagcatatcgttgctagtagctgcgatagagagacagaactgttgagaaatggtttgcagcgctcctttaagctaagggatttgggaactctcaaatattttctaggcctagagattgctagaaatgctgatggtatctcaatctgccaaagaaaatacacgcttgaattgttggctgaaactggtctccttggatgcaagccaagttttgttcctatggaaccaaatcagaaattctctcaagaagatggtgagttgatcgatgatgcagaacattatagaaagctggttg

SEQ ID NO: 183302 - DNA, 403 bp, Arabidopsis thaliana landsberg
atgctaggacatcaattctggcagcagctaatcctgttggtgggcgatatgataaatctatcccagcttaaggtaaggtgatccaagaattagaccaagcaaatgcatatttgtattcctttctttgcttaagaactttcatggaaggttttatatctaattgtggtttgatcatgctctttttcagtataacgttaatcttccacctgccattctttcgaggtttgatcttgtgtacgttatgattgatgaccctgatgaggtaacggattaccacattgcccatcatattgtgcgagttcaccagaagcatgaagcagcgctatctcctgaattcactaccgtacaactcaagcgctacattgcatatgccaaaacgttaaagccaaaggttgttgactaa

SEQ ID NO: 183303 - DNA, 97 bp, Arabidopsis thaliana landsberg
atgaagagtcgatcgaataaggaaagtggcggcgttgagcagtgtgaaatggcggagaaagggatccgatggcgagagagccggagagatggaaacg

SEQ ID NO: 183304 - DNA, 628 bp, Arabidopsis thaliana landsberg
atgggtggctacgggtgcgacacggcggcgattgatgcaaaactgtcgtaccaacatgtgttcgtcaggacaccaagccatcttcgttcggcgacatgtggtggagaggtgtgagctagttccggtggggcatctccagccacacattcggctaagcaagtgacaaagctgcttcctccacaagcacctcaacgacacgaccagttctaatccatacgtccgaaactgctcgatgatgcaacagcttgggtcctaagctgctcaacaacatggccttttcttgaccacaaatctgacaagtatcttaccctcctgcttgatcggaagctgatcagtgacgtgcccaatcgtcgatcacacacctatcgcgaatcaatcatgcattgcccagggtcgtccatcgctcaccacgggccgatcctgcatcgtccgtgatcgtctgaatatctatgtcatcgccccaaactcgatttctctcgcccaacttccatttttattgttcatcttgcaatttccctcgatcaaaactcttgaaagtatccgaaaatacttcggctcatcgccaacaatcattctctttgatattggccgatggttctttgatagccatccctcggtcaatttgtag

SEQ ID NO: 183305 - DNA, 96 bp, Arabidopsis thaliana landsberg
atgcgtcacataaaaacggttaggatcgttttgagtatctctggaggagatgtttttaagaagaattttctagtcttcgacacatcaaataaagaa

SEQ ID NO: 183306 - DNA, 765 bp, Arabidopsis thaliana landsberg
atgggaatggagattaatatcatggaattcaaccatactaaatcgtgtaaggccgctgttaagcaaggagagagatcatccggttagtcaccacaaacaaggtgactttgttcttaacctgtctttctcacggattaatccctatgcttattctcacacgagggacggtgtgaagtaagtctgggggattaatgaatccattactactaatggtactctctattttgttgacttgaaacatttttccacttttaacaccgatatgttctaacaaagcaaaaggtttttctttaatatcgagtaatgttttattgagtcaaaaccagtagggaaccgtgatcttgttatatgatgattattgaccattatgtgttgagaattatatcttaaggaacacttacaaggtcgaaaggaacggccaatcctgaacactacacccggaccgtcccccaaaagtttaaccccgcggaaattaatgttggatccgacgtcaactctaccctatattggacgattaaccagaacttaattctttctcatgaaggggtgttagatcggggaaacgagcatatacattcaggacttcttatccctttttaccactctctcctgatcctcaatggccactcacttttaatggttcctacccttaaaccctatcctctttttaagcctcatgaattctcgttttctttttcatttagcagatatgtgcaaaaacgtcagcgagaaaggaacaacacagttttccgccacaaagactga

SEQ ID NO: 183307 - DNA, 90 bp, Arabidopsis thaliana landsberg
atgacgaagaagaggaagaagtcgtcgctgtcaaaaaaagaagaagttgtcattgtcttcgttgaggtctgtggttgtttgaatgacaag

SEQ ID NO: 183308 - DNA, 344 bp, Arabidopsis thaliana landsberg
atgttattggtcaatttcattgtttctacgccatcatccatagagcaacaataccttgttgtttttatcaaacaaaatgtgaagaagaatagaagaacaataaaaaaaagagtgcttttgaagattccacgaaggtatgaagtgtgacataaacggctctttgcgtcgtccaaaagccgcctcccccaaaagctttccctttataaccccaactttttgggttcaacccaactacatgcattatataatgcatatctactctatacatacaattacttatattatgtaatgcaccttgtttaatcttttttagagtttgtattcatccggagaatgtgtggtag

SEQ ID NO: 183309 - DNA, 480 bp, Arabidopsis thaliana landsberg
atgcggcaccaggagctgtttgatcccaaggaaccggacgagatggtctcggacgtgctgaatcagctcgacgaactgcacgccatggtgcacgacaccatggctgcctgaccagccggtgctgcccgccgggccattccggcgggcagcctggccccagttccggaaccctggttccggaactggggcgccgcgccgccgacgctccggatccggggctgggcaggcccggttacggctcgtagtatcgggagagggtttccgccggcgcttgcgagtcccgccttccattggcgtccggcggggacgcagtgctgctcgatgcgcagtgctagtcgatgtgcagcgctagtggaggtggtccgcacgaattcgcccgcggtggccaagttcctcgttcccgatgtcatcttcggccgcggcgtgctgtcccaggcgggccgggccgcccgtcgccagggtggcgaccgggtgctggtg

SEQ ID NO: 183310 - DNA, 210 bp, Arabidopsis thaliana landsberg
atgtcagctattgatgaaagcttgagtgatcgatctgcgttgagtgaagcttctgattcagaagatgatgaagaaggtacatgctacaccttctctctatatttccttatagatatgcttggatctcctatgtctgaccgtgtcttgatttcaatgttatatgcgctgaaagattggatgactgaacattgcttcaacgatgaggaaaag

SEQ ID NO: 183311 - DNA, 1807 bp, Arabidopsis thaliana landsberg
  unsure (1)..(1807): unsure at all n locations
atgaaagattctggtggagatatagtaaaatggacaccgtctgtggatgatatagaaggggaatactggcggatagttgagcaaccaacagatgaagtggaggtttactatggagctgacttggagaatggggtgcttggaagcgggttttataaaagagccgagaagtttaccggtagcgatatggagcagtacacattatctggctggaacttgaataacttaccacggcttcctggctctgtactctcttttgaagattgtgacatatccggagttctagttccatggctatatgtgggaatgtgtttttcatcattttgttgggtaagtacactttcactctttgattttattataaacattttttctctaatggttggatgtttgatgtgatatttctttgtcttgaacagcatgtggaggaccatcatttatattcacttaactatcatcactttggggagccaaaagtatggtatggtgttccagaaagcaatgcaaccgctctcgagaaggcgatgaggaaacatttacctgacttgttcgaagaacagcctgatctactacatggcctggttactcagttttctccttcaatactgaaagatgagggagtccaggcttcccggagaagtgcagaattcaggggagtatgtattgacattcccgagggcgtatcatgctggattcaactgcggtttcaactgcgcagaagcggttaatgtggctccggttgattggttggctcatggacagaacgctgtggaactatatagtaaagagacaaggaagacttctctgtctcacgacaagcttcttcttggagcagcttatgaagcggtgaaggctctttgggaactctcagcttctgagggaaaggaaaatacaacaaatttgagatggaagagtttctgtgggaagaacgggacacttaccaacgcgatacaagtaacgaaaaacagatactacttgagtcatgatactgaatatagttttcactttctaatgcttactttggttcatttgttttgaaaatgttgacaggctcggttacaaatggaagaggggagaattacagctcttggtagggattcttcaagcttgaagaagatggagaaggactttgattcaaactgtgaaagggaatgtttctcatgcttttatgatttgcatctctcggcttctggctgcaagtgctctcccgaagaatacgcgtgccttaaacatgcagatgatctttgttcatgtgatgtgaaagatggatttattcttctccggtacacaatggatgagttaagctcgttggtcagagcattggaaggggaatcagatgatttaaagatatgggcttccaaggttttaggcattgaacatagtgatgaagatcagacaaagactagttcagttatcagtgaggagaagaagttaaaggaaggttcttttgatctgaacattgacttagagatggattatcaagaagacgttaaagaagaagccagcactagtggcggcgagttaaccgcctcagagaaccttggtgtatcggtcgagcctataaacctcgggttcttgatttttggaaagctttggtgcaataagtatgctatattcccaaaaggtactatctttgaaatgctcttttgttaatgttacttgatcaaatttgctgaaatggttgttgatgtttgttttacaactttaacaggattcaggagtcgcgtcaagttctacaatgttcttgatccaacaagaatgagcaattacatctctgagggttttggatgcaggactcatgggtccattn

SEQ ID NO: 183312 - DNA, 65 bp, Arabidopsis thaliana landsberg
gaaataacaaaatacttgtgggaatgattcttgctgtttcggtgtttgcatttttgggtttatga

SEQ ID NO: 183313 - DNA, 1309 bp, Arabidopsis thaliana landsberg
atgaacggtgatggattttcttctgatcttgattccgttgaagaagaatcaactgatataccgatcaagaacacagagactgtgccgagctataaaggtgacgatgatatcctgttcagccccttggacaagaaagtgaaactcagcatgctccaggatagggcttactattatgttctccatgccttcaaagcagaatctcctgcaatatccagcgtaatctaatcgttcttgttctgtatatgcatttgattcgcttcttggaacttgagttcatgtcttctcttcttcagtcaaggatcgtgatcatgcaagaactgttgaaagaattgaagattgagtacaagactcaccagacttatcacaatgcaatcgaagctgatccaatggtcctgcaattgaggtatcttaatcattggttttactactgcaacgatgtgatcttctccccttgcttctctaagtttgtgtctgtttctcaggaatgtttcattggcgtctgatgagaaggaaatgcagaaacttactgtcgctgaagaaccggaaattactggcgtagatggccaacctctgataatccgtatcaaactgaacaaggatgacaatgccaaaattgtaggttttgataatcatcattttccaactcctaaaaaattcaatctggctttaattctatgtctttctgattgcttagcaagacagggttttagctcctgcaaagataaaagatggaaaggttttagctcctgcaaagatacaagacgaagaggcaaaaccgagttctacttctgatgattcacctgactcgagctggggccaggtttctcctgggtctcttgttggaagacgggtccatatacaaatgcctgacgaagacgagtacattgaattcctcatcacaaagtatgacgcaaatacggtaagtcacttcatgtttacttgtgtgttgttcatcaggtcagatctcagcccttctaagaaatatagttttgaatctacaggaaacgcaccacttgttgagtgctttcagcaataaggattatgaggacccatgcaactgggttgatctcagacatgtaaaatcaaattgttcttcctcttcttcaagttttatattcgtccccttttttgtcagcagctgaaacccctgatctcaaactctttgcaggttcaggcagaggatatgaaatggccagagggagatccagatttaccagtatggaaatgctctcctaaaccaggcgaaactctcttccacgaaaccagtacaactcaaaacaagaagcaagttcatgaggtatcttgctaa

SEQ ID NO: 183314 - DNA, 547 bp, Arabidopsis thaliana landsberg
atgtatatatgtgagaaaatcccccgcaaaaacatgtgtcgaaaaaagaccgcgacaacggtcttcggcattcgaccaattcgaagtcaccgcgaggtaagcgctagccaccctcgcgtgcgacaaatccgcgcagaagtcgcctaagggtgcagccggaccaagcacaacaagtgcaaaaaaatccgatgtctatcgcgaagactatccgcgcagaagtcgcctaagggtgcagccggactaagcacaacaagtgcgagaaaatccgatgtctatcgcgaagactatccgcgcagaagtcgcctaagggtgcagccggactaagcacaacaagtgcgagaaaatccgatgtctatcgcgaagactatccgcgcagaagtcgcctaagggtgcagccggactaagcacaacaagtgcgagaaaatccgatgtctatcgcgaagactatctgcgcagaagtcgcctaagggtgcagccggaccaagcacaacaagtgcgaaaaaatccgatgtctatcgcgaagactatccgcgcagaagtcgcctaa

SEQ ID NO: 183315 - DNA, 1691 bp, Arabidopsis thaliana landsberg
atggaaccagatgccactctttcaagtgaaaggggtcgattggaaatctcacccaacacagtcaaccaagaggaaggtactaaagttgattttggttatatacataattcttatttctttcattctccatcttcaagttacgcaaaacattcctgtagaagattcacagtcggaacatttagagtcagctcttagagacgctgcaaccagatacaattcagctcttgacatgacgctgaaggtaaaacagtttaccaactaaaacactatacaatacctaaactctcgtcttctgaatcaaatgattatctttgagaagttcacaaaaacatgtggtattacaggcccttttgaacattcaaattctcaaagaagatttgatgcaaccatttcaagaccacccggaagaacacgttcctcctgcactacgaaatttctttactgctattgtgtcagatgggatcaatgttgagggagtctacagctgcctcttgcgtgacttacttgcttccctagaagaagttatttccatggttcgtgtggagaaaataagcttctaagcatggtattaatataatttctgtgtgtaagcttaattgtcattttaaagtatttctctttttatacccttttcagtcgagtgatgctgctgaggttcttgtaaccatccttgagtcttggcattgctggaagaatgctgaaagggaaagcttggtaactcgcctttttacgttggaggaaaatgaaagaatgagttgtagaaaatgcagaaagaaaccaaattatccagagcaaagttcatatggcattgttatggctgcagattctatcagagacttgaaggtacgttttatttatttccctctttatgcttcctagagaaactaatacttcccctgatatggttgtgttgtgtgcttatatatatgcagtgtgctcttgggaatatagagtttgtggatatccttaaggtgatccggatggattatacaatgctatgcgatgttaaaaccggaggctgtggaataacaaaccttgttcatcacatcttaagtaaatgtccacctgtcttcataatcggtaaattaagaccaccatgtttgtgatgttttgttttcatttcatttattatgcttatgataaagccaatgctggtgttttgtgggtttgcaacattagtgttagaatgggagaagagtgaaactgaaaaacaaatatcagaaacaacaaaggctttatactgggagatagatatcagcaggatgtacgaaggattgaaaccaaacactaagtaccggcttgtgtcaatggtaaatcatctaaaacagtgtcacaaatgtgttggttattgttcttgtgtgttatttgttacagtcttagagtttgggatgtgatgcaggttggttgtggtgtagaagaagaagaacacatttgcatagcttatgaaaataatcggtggttcaatctcagacatgatgctttaacaagagaggtaagacgaaccagctgattctgtctctccttgatttgagttatgaatttagataggccaaaattggattgatgcatttctggtaatgccataggatgttggtaactggaaaagtgtggttggattctgtgaagagagaaaggttcggccagagattctgttttatgaagctaccggctcgatcgatagcctaaactaa

SEQ ID NO: 183316 - DNA, 177 bp, Arabidopsis thaliana landsberg
atggagggcacatcaacatggattctaaactatgaatctaagactcacatcgtcgatcacaaaaattcaggatccttctcaataagtatccaaggaattgagcggattcttatccggagtcctagcggtcgtgaaactttggctcaacaaaaatcgctaggagagaagaatgcaaca

SEQ ID NO: 183317 - DNA, 207 bp, Arabidopsis thaliana landsberg
attttgagaatcacattcaagaatttgaagttatgattaacaattttggttatcgaaatagaattgatatcaatatcctactcgattattcgggtgaaaataaagcatgtttagaagtttatagtttaaaagaaattatagcttttgtttgtaatgttggtaaagaagttgaagacgataatgtggaatttttggaaatagtgacac

SEQ ID NO: 183318 - DNA, 432 bp, Arabidopsis thaliana landsberg
atgattgccacgtataacaataaaggcgaagatgctgtttacgatgcattggttaatgagttgggcattgatgaaaaatatcgcagcaagctggaaataatgctgcttacatcaaggcttccgcttaaattgttgttgtataagaatatgcttagctttatgcaggaaatagttaccgacagaaaaaagctgtttattgtaactaatggcacaccgcaaatgcagcttaataaaatacgacaagttgagtggcatggacttgagccgtatttaacctgttactttgctgatgaaacattacctaagcccgagccggatgcattaaacctgttattaaaagaacatgatttggagagaagggatctgatgatgataacaggttctgaaacagatatcttatgtgccgaggcttgtggtattgactatgtgccg

SEQ ID NO: 183319 - DNA, 723 bp, Arabidopsis thaliana landsberg
atggtggtactgcactgcaagcccagacaatgttgatcctactgatgaagtagccttcagcatgcacataatcaacctagcgtgtctggtaggtgtttcagttgcatagtatcctttgaaggttgagttcacattccgtgttttctgtacccatcacaatcgccagtgcatcaatttaaaatccaaactgttttgccacctgaattatattgttttatctccagtctttggagctcctgaagatagccatatttgacaaagaatgtgaagcccgtatcccccctagtcagtttgatatattatctgtaccatcgtttcctacttctattttttactcatagagggtcattccttgacgctgataagtgttctccctcgaaatctatgggaatatcatcggcatgtttgagctgaataacctgtaagagtcgtcaactcctgtttatactcttacatttacaatgaatttacccacaatatgctttgatctctggcagagacttggtggtagcatcaccagtagaggactatttcttgtatattgatgatcttcctgatgcagaaaaggtctgaacagagtaatgctttccacctgtttgttctttgaccaaaatctatcgacgcttaccagtttcttattctcattatgataggaagaaaccgaggaaatcacaagaccgtttctagatgctcttggtgatgagtactcggactgttgccaag

SEQ ID NO: 183320 - DNA, 898 bp, Arabidopsis thaliana landsberg
atggcttcagatcccgaacttgacatggatgaaggagatctggagaaattggagtcagatgtgaagcagatggcaagaagatctccgagtacaggcaaaccctaccggatcatctcaggaacactcttgattctgcgctatcttcccacatacccgttttccccaacatcgattccgggtcggatcgtcttccgtcgtcatgcctcactatcgcaggcaggttccttctttgttccttttttttttggtttttgcgaaatcactttttggttagagaaattataagcaggtctaaatttagggcttattcctggaaattatgtgtcttttctcttcgtgagaattggtgatgaatcaactacactcactagaacttgtcaaggttaaagctaaaagctagagtcttttttgtagttttgaagatcttgtcaagtattcacagtatcgtagagaaacataagcttgcagtgattcttttcttcttcctctcttatcagtatgatatatcaatcaatctgctgtgttttatatttaatgcagaaaataggcgcataataatgttgtagttcataagagactttgcttgagaagagttcatagtattgtagagatacacaagagcctgcactgatctttgtcatcttcccctcatatcagtttgctgtattaaccaatcttcggtgtttttcttttaaatgcagaagcacaggtacctggtgtgttggaagagcaagactctgaagagaaatggattcagctcaaggaaagaatgtcgaggaacgctgcgaatatacctaaagttgtaaagagaatgcgagaatgtatagagagtatcgacaaactcgattctttggaagttaccattcacccggcattcaaaaggcaaagaattaactga

SEQ ID NO: 183321 - DNA, 82 bp, Arabidopsis thaliana landsberg
atgagaagattagaggacgaaggcggccttggtagatcttgtaaacacgagccggaacaagatgccaatcaatatagtgatg

SEQ ID NO: 183322 - DNA, 571 bp, Arabidopsis thaliana landsberg
acaagaacaaggattatgttattgctgagcatcaagcgttgttaaatgcttctacatgttcatttgttgcaaatttgttcccaccagtatctgacgattccaaacaatcaaaattctcctctataggtacccgtttcaaggtgagtctgattttggtctccactttcatcttagcatgttttaatctttatttcttaatgttactgatttcatatttatgcttttttgcagcaacaattggtatcattgcttgagattctcaatacaacggagccacattatatcagatgtataaagcctaataatcttctgaagcctggaatctttgagaaccaaaacgttctacagcaattgcgttgcggggtgcgaatgacatctcttttcggttatatatcaagcttctcctaaaaattattaaatccccaagattgattgtattttgggtgtttttctgacctcagggagtgatggaggcaatccggattagttgtgctggttatcctactaggaagcactttgacgagttcttgaacagatttggtatcattgctccacaagtgttggacaagaa

SEQ ID NO: 183323 - DNA, 455 bp, Arabidopsis thaliana landsberg
atgaggtacttgaaaaattcttcctttactcttctaccaattttcatatagatctctctattgatatagtcttattgctcaatgtatctaacaattgagaaatgggtttgttcgttttatagtaagcttaatagtgatactcttagagaagccattgaaaatatcactcgcccatcggaggagaggaaactcaaaatgaggtacttgaaaggtctttcattaagatatctcttattgctattgttctagtttttgattcctatgctaagattgtcgtacatagatgtatcatatattgtccaatggattattgctagatctaatttacttagtgaaatgggtttgttggttatatagacaacttgagagtgagtctcttagagaagccattgcaactattgagggaaaatctgaggagaagaaacgtaacgttgggaagacagtgaagcttcaaa

SEQ ID NO: 183324 - DNA, 352 bp, Arabidopsis thaliana landsberg
ttttagagtctgagctagagaagcttcgtcattgggtgggccagactgttgagtgcattggggctcgcgactccttctcggtgggacgcttagacagtatgtcgtgtcacatccgagatattatggattttagcattcaccgaggggtgggcgtacgttggtcgtcgaggagcttcggtctggatgctgtctctaggacgtcattggtcttccttaggacattcctgatgatgggctggaagacatattggagggtttcgatgaggttgtcagtcccatcgtggacaggctatctgcgaatgataccattcgcaaagcctattgtataatatgtcttgttgtttccttttga

SEQ ID NO: 183325 - DNA, 420 bp, Arabidopsis thaliana landsberg
gactagtaccaccataaaaatacccggtgccaattctctgcaactgctccatcatcctcaaataagatggaacctcctcagcaaccgcagccctctgctgcacctccgccactcgtggcgcaactggagcctgcactggtaccatacctggtaaccgctccaacaactgcctcagcaggcccgccaaaccactggaacttgggtttttccggctgcggcacccatcactcctgggtccttagcaccaacggcatggacacaggcaccaacaccagctccaccagcccccactctggctgcaccagctatatcggcaccaagacttttcctcgccccgggctccacaaactcaggctgcgaacccacagtctgctcaactgtgggactatggccatcactctcgccataacaattggctaa

SEQ ID NO: 183326 - DNA, 334 bp, Arabidopsis thaliana landsberg
atggctgctaaagcaccaactggagctgaagaagctgaacttgccttgctcgcaagaaagaagctagtgacttgctcttgcgaagaaagttatgtacaggaaggtgaacaaggaagagtactgcaacttttatgcttatgaagggtttcagcgggatctctagaaacttttcaaagaaaatgtgactgcggctcttgctggtgacaacccgagaactcgaaaggagagggaaatgaaagagaatttgaaacgagccaaggaagagaagaggcaaagtgacactctcaaaatggccgagaaccggatgaagaacacgagaatcaagcctccatga

SEQ ID NO: 183327 - DNA, 101 bp, Arabidopsis thaliana landsberg
atgcggcggcgggcgcgagcctctggggcaacggcgcggaggttgtggacgacggctgtggtctcggggcgcggaccacagcggcctcggctgctgacgag

SEQ ID NO: 183328 - DNA, 1257 bp, Arabidopsis thaliana landsberg
atcaagcaactgcaattactgttcaagccgattgtattggaccgtgcaatgacgattgccagcagctttgcaagtcgaaaggttacacagactggacttgtgcatcatttagaaccaagtcgagttgttgttgcaaaccaccgagacatcaaatctttgaacaaaatgctcaattgaacaactaaaaccgcttttatattgttctcaatttgtatgatcattaacaaatattcaaagataagaaataatttagagaaatcaattgatatcattttttcttatcacttatcatcattctactcttgattttgggctattttgtaataagataacctgaactacaatagcactgtttgatcatagtattttcatttgattaaaacggcaccgtttaggttaatcttggtcttagttttcgattcggaaacgccgccgtcacaatcacacaactgggtaaaaacgatatggaagacgatggtcagagctccgtcgccgaaaccctagatccggcattgcagaagaagcaccatgatatgctcgagcgtctctccgctcgtcaccaagctcgaaaatcagattcacctgactcttcctcttcgtcgtcctccactcttgaatcgacttcctcgtttctcgctaaattctccgattcaaagcgatccatcgagtctcggatcgccgagtcacgactcgcttcctcctctacggattcgtcaaagcttaagtcggatcttgctgagatctccgtagccattgacaatctcgagaagcttctcgctgagaactcgtattttcttccttcctacgaggttcgatcctctttgaaaaatcgtatccgatctcaaacagagtcttgacattttctccggcgagttagtcccgaagaagaaattctcgttcaagagcaaatcaacgaccaaaaagccggagatacagaaacccgacgtcgttttacctccgaaactcgtccccgtacgcgattctccgggattgagaaacaaacacggagagactcttgtgaaaagcttcgaaggctcgtcgatcggagaattcacattgtcggatcttgattcatgtcaagtaaaattaacaggaacggtcaacgctctgttccttcaccgactgaagaagtgtagtgtctacacaggtccagtgattggttcgattctgattgatgacgtagaagattgtgttctggtattggcgtcgcatcagatcagaatccattgcgctaggaagagtgatttctacctgaga

SEQ ID NO: 183329 - DNA, 105 bp, Arabidopsis thaliana landsberg
ttagacctgtcctccaattttacgctttgtacatacagcattcggcgaaagcacatgaaccgaccatttacacatcctgagacagtgtcggtcaaaataaagtaa

SEQ ID NO: 183330 - DNA, 242 bp, Arabidopsis thaliana landsberg
ggtttaaggaagggaaaatggcatgttgtggaaccggaccattgcggggaatcaatacatgcggaggccgaatgggagtatctcaaagttacgagttatgcgaaaaagttacagattacttgttctttgatcattttcatttgactgagaaagcacatcaacaaattgcagagctgatttggagcgggccgaccaacgtcactaaaccttataatctccaagcgctatttgaacttaattaa

SEQ ID NO: 183331 - DNA, 359 bp, Arabidopsis thaliana landsberg
  unsure (1)..(359): unsure at all n locations
atgtcgacttccattgttttaccgagctggtcgacgaacattctgttcaccattcgttggtaggtagttccggcatttttcnnnnnnnnnnnnnnnnnnnnnnnnnnnnnnnnnnnnnnnnnnnnnnnnnnnnnnnnnnnnnnntagccgtctcgacccataagtatttggttgtacccggagaatgcgtccatgaaggacaatttttcgtgtcatacagtgggttcgaccagtcggtcgatatgcggaagtgggaaactatctttaggacatgctttattcaggtccctaaagtcgatgcatactctccacttcccatttttctatttaacgacgactgggttggcgagccagttagg

SEQ ID NO: 183332 - DNA, 1096 bp, Arabidopsis thaliana landsberg
atggcggtgaagaaagggccatggtcgacggaggaagatgccgtgcttaagtcttacatcgaaaaacacggcaccggcaacaactggatttccctccctcagagaattggtatttctataaaatcctttgtttgattttaaattcttttatatactttatagttgtgacatataatacttaacaattttacattttgatgagaagggataaagaggtgcgggaagagttgtcgtttgagatggcttaattacttgaggcctaacttaaagcatggaggcttcaccgatgaagaagattacatcatttgcagcctttacattactattggaagcaggtttgttacctagctagatctcttatatattcctattatcctatatgatatagatatgattttatttaaacgctgcatcaataattggtgtatatttattaaaatgaaggtggtctatcattgcttcacaattaccgggaagaacagacaacgacatcaaaaactattggaacacgaggctgaagaagaagctattgagcaagcaagggaaggcatttcatcaacaacttaatgtcaaatttgagcgtggaacaacatcatcatcatcgagtcagaaccagatccaaatgtttcatgatgagaacaccaaatcgaaccaaacattatataatcaagtggtggatccatcaatgagagcttttgccatggaagaacaaagcatgatcaagaatcagatattggaaccattttcttgggaaccaaacaaggttttgtttgatgttgattatgatgcagctgcttcatcttatcatcatcatgcatccccatcattgaactccatgagcagtactagtagtattggtactaataattcatctttacaaatgtctcactacaccgtcaatcacaatgatcatgatcaaccagatatgttctttatggacgggtttgagaatttccaggccgagctatttgatgagatagccaacaacaacacggtagaaaatggctttgacggaaccgagatcctgatcaataacaactacttggatcacgatattagctccttcattgattatcctctatacgataatgagtag

SEQ ID NO: 183333 - DNA, 936 bp, Arabidopsis thaliana landsberg
gaaattgaggaaggaaattacagaaaatctcattcgttaaggaaagatgtaagggcagtgagccaatcagcaccactttttcccgagaaccgcacaactcctccttcagaaaagctgttacggatgcgatcaactctgacacggaaattcaacacttatgcattgccaactcctgtggaaacaacgagaagtccctcatctactacaagtccaggtcacaaaaacgtggggtcatctaatcctacaaaggcaattacaaagcagatttggtattcatccccacttgaaactcgcggacctgcaaaggtttcctcaagatcaatggtagccttgaaagaacaagtcctgagagagagtaacaagaatacatctcggttgcctccgcctttagcagatggactcttgttctctcgtctcggtacactcaagagacgatccttctctggtccactgacaagtaaaccgttaccgaacaagcctctctctacaacatctcacttatactctggtccgatcccaaggaatccagtttctaaattgccaaaagtgtcatcatctccaactgcttcccctacatttgtctcaaccccaaaaataagtgagctccatgagcttcctagaccaccaccaagaagctctactaagtcctctagggaattgggatattcagctcccttggtttcgaggagccaattgcttagtaaacctcttattacaaattcagcttctcctcttcctattccacctgcaatcactcgtagcttctctatacctactagcaaccttagagcatcagatttagatatgtctaagacaagtctgggcactaaaaagttaggcactccctcgcctcctttaaccccaatgtcattgatccatccaccgccacaggctcttcccgaacgtgcagaccacctaatgatgtccaaacaagag

SEQ ID NO: 183334 - DNA, 1194 bp, Arabidopsis thaliana landsberg
  unsure (1)..(1194): unsure at all n locations
acattctttgttgttcacgaagatcgtgagttgaaggctactgcgaaaacagaacattcagttgaagctgaaggagaaaatgatgaggacgctgacgatgaggatggtgatgatgcttccgaagctggtgaggatgcttcgggaactgaatctattggtgacgaatgttcacaggacgataatggcgttgaggaagagggtgagcatgatgagattgatggtaaagctgaaagtgaaggagaggcagagggaatggagtcacatcttatagaagacaaagggttgtttccgtcatcagaacgtgttctattatcagttaagcctctgtcaaaacatatagctgcagcggctttggttgatgagaaaaagaaggattccagagtattctatgggaatgacgacttttatgtccttttcaggcttcatcgagtgagtgcaattgattcttatgatttgctttctcacgttaatctgaaaaagtacttttacccttgaaaatattagtaaattctttttaatggcttttaattnccagatcctgtacgagagaattctgtctgcgaaaacatattgctccggcagtgaaatgaaactgagaaacactaaagatacttgttcaccagatccttatgcaaggtacattccttaaccaatgtagatatacaattggtccattgcttttatgtagactatgcaggttctttattcacttcagtaaaatttataaaccctcgtatttgtatgttctgcaggtttatgaatgctctgtttagtctgcttaatggctcagctgaaaattccaagtttgaggatgaatgccgagctattattggaaaccagtcatatgttttattcactttggaaaaactgatatacaaattggttaaacaggtaatattcactctctttattggttttaggttgatcatgtttccttttcaaacattataatccttctcaaatctgactttgtttcatctgttgcagcttcaagctgttgtagctgacgacatggacaataagcttcttcagttgtatgagtatgagaattcccggagacctgggagggtatttgactcggtatattatgaaaacgctaggatcctccttcatgaagaaaatatttatcggttagaatgtgtaagaacccgaaaccaattctcacctttctcctatctcttcattgaggattag

SEQ ID NO: 183335 - DNA, 132 bp, Arabidopsis thaliana landsberg
attgtaaactggaaaacctgcttgaagttccctgatgaagctaagctctccatcgaggtaaaagatctcatccgaagactgctctgcaatgtcgaacagaggcttgggaccaaaggagttcacgaaatcaaa

SEQ ID NO: 183336 - DNA, 1713 bp, Arabidopsis thaliana landsberg
gttgtgagaaagtccgtcaaattgcataagatggcccgacatctagttgaaaactgtggtctgttgtcatggtgttcgtcatttttctcaatgttgactacaaagcccactggagatgaagattcgcgcttcgtagttgtcttggaggtgtgtacagtattcctcaataatcaaccatatttgtttgtctggtttgcatcaagagtcctttgtgtagaatactgtactcctcaattgaatttgctatgtgatatcgttgtatcaggtcataactgatgcactcgcctccagaaacgatacagagtggtcgcaaagatctgccctagaagggctaatggaaatatcatctcgtttatacacacttttgggtgatggattagtatcaatgcaagaaaatggtacttcagttgatttgatttgcaagatactatctgctactctaaagatttcacagaaacgaaacatgtaccagccacatttcaccatcacaatcgagggaatattccaactctttgagggtgttgctaattttggttctcctcaagtcgaagctagtgcagagagtgggcttattactatattaatgagcaccccgccagttgacatattatgcatggtatctctctccctttctctgactattgagcatccctccaattttgtttgaagagcttaaagtgtttgtatcatatgatatcttttcaggacgtggacaagctgagaaggtttcttttgtggggaacctccacagcattaaagagtgactttaaaaagggatctaaacctagtgagtctcatgaagatacaaaaatactcattgaaggtccacaagaggagactatggtagcaaagtttctacgctggctgtcggcttcagttattcttgggaagtcttattctaaagccagtgattcggacccaacattcttaagtaaaacaaaaccagaaactttgctgacatcgttagaatactttaagaaaaggaatctcgaagacagcatgcaaaattcagagcacataataggggaagtaattgtgcacctccaacagttcctgagtacaaactacatgtttcttcttccctctgttgtatttgcactttctctcatgcttcttcacaatgacctcgggactggaggtatgctgcttttcaccgacatacacaactcttgttttccgaattacttagctttgattgagaattgagactcttgactagattaggtttgggttttgatattggaatcaagatttttgcttgtctttttcatttggcgttatattaagaaaaatgatctgtggaaactatataattatccaggcttgttcttaggtgttaagctgcatctacatcagagtccgatgtcgacatctacaaatctgaagctaaaaaatttctttcttcttttcagagtctgatggcgattacaagctcatcaaatctctgtgttctaaaattagtagtcctcctgaggctattccgggctggagatggtaaacgattccgctattgctcatcattccaaagttttgcattgtttatcactccaaatcttgacctgaatccttctcctcaggtcatattatcaagcgtggagggatctgtcatcggaacaagccacagatctggataagatcaatgaactccatgcgtgccaacaccttttgctgatattctctgctatgcttgcagaaacgccacaggaaatctaa

SEQ ID NO: 183337 - DNA, 2664 bp, Arabidopsis thaliana landsberg
atgacgagttcaccggaaacgagatttcctctggttgcgaaagattacgagattttagaagagataggcgatggtgtttacagagctcgatgcattctacttgatgaaattgtagccatcaagatctggaaccttgaaaaatgcaccaacgatctggttcgtatcttcatctttgttctttgtttgttcatatttaggatctatcatcggaaattgatatttagtctgttgttggagataaattcaggaaaccataaggaaagaagttcatagattgagcttaattgatcatccaaatctattgagggtgcattgctctttcatagatagtagcagcttgtggattgtgatgccttttatgtcgtgcggctcttccttgaacataatgaaatcagtctatccaaatggtcttgaggaacctgtaattgctatattgttgcgggagattcttaaagctcttgtttaccttcatggactaggacacatccatcgaaatgttaaggtacttttaatctcaattcacgttatgtacttcgtttttttccgatcatgttttgatagcagaatgtatccttctttctaggctgggaatgtactggttgactcagaaggaactgttaagctcggtgactttgaaatttcagcatccatgtttgatagtgtggaaaggatgcgtactagttctgagaatacttttgttggaaatccacgctggtgagtgcttaatccgactatagagagtagactttccattctaagctgttttctttagcttgaggatatctttgctctttctaggatggcacctgagaaggatatgcagcaagttgatggctatgatttcaagtatgtctgctgttttctagtgtagctgtactgccatcttaaaggagtgacttgcctaggacttattagttttctattcaactttttagagtggatatgctggtcgtttggcatgactgccctggaacttgcccatggtcattcacctaccacggtgagtcttaccttataagattaaagttccatcatgcactgtattttcccctttattttcagtctttttaattgtttacctgaatcctactatagtatctgtttctagaatgctctgtttttcatgattgttttcaggtgctaccattgaacttacaaaattctccctttcctaactatgaagaagacacgaaattctctaaggtcagtggaatggaatgattacacctgagaaatgttgatttcatctttcactcattaagaaagatactatatattgttgcagtcttttagagagttggtcgcagcttgcttgatagaagatccagaaaaacgtccgaccgcttcacaactactggaatatccgttcttacagcaaactctttctactgaatacttggctagtacatttcttgatggcctctctccgcttggtgagcgttatagaaagctgaaggttagatgaaaactttccttctctgttggtggtatcaccattgctttggactgtgtgattgaaccttggcaacactgcaggaggaaaaggccaagttggttttaggtttagatggtaacaaggagaaagtatctcaggtgtacgtctggacatacaaagataacttttctttcaaaccattttagtgtaactaagccataatcaactcagttattgttattttaaataaatgacccggtaatctggattagtagaaaataactttctatgatccttcaacttctgactcttattgcaatcctcaatccctctgatatacaggaaaatgttgaagcgctgctgatggaacctgctagtcttgtgaaccctgtttcttgtgatactgctcaagtcctcccaatcttacagaatatcctgatccaaaatgatatccaaagggttattgccatttaaaaacgtttcttgttgatatttcactcatgaatatcgtttgggtttccatctcctggtagtttcacacaatttctctttgcacaatcctcaatccctcttatatacaggaaaatgttgaagcgctgctgacggaacctgctattcttgtgaaccctgtttcttgtgatactgctcaagtcctcccaatcgtacagaatatcctgatccagaatgatatccaaagggtttgccaacgtttcttgttgatatttcactcatgaatatcgtttgggtttccatctcctggtagtttcacactatttctctttgcttggcagaaaaggttaatcggtttaatgcaactctgtgatccaactgctggtaagtttgctgttctgtcactagaatttgcatcttctctgtgttacaagttccatgacctgatcttgatttttgtacagaaatcagaattccgattggcaatacagaagttgggcaggttgggtttgcttctcatactttgctagtgacatatgcatagagagaggccgagaactaagagccaaaagttctgaattcacagatatcaacaacagagacagatctattgtctgaggttcacgttttgcagcagaggtaatgataaattccacaagctttaaatctcttaaagaaggaacgtgagaaaaatgcttgattgtttcattggtttcaaatgctacagcgttaacaatcttgaagaagaggttgagaaacacaaaaaagaaaatgctcag

SEQ ID NO: 183338 - DNA, 313 bp, Arabidopsis thaliana landsberg
agacgattccagcctgtaccggtggctcggcaaggtctgcggccagctcacggcgggcacgctcagccccgcccacgccgcccagctccgggccctgggcgtcaccgggcagacgagactgcaggcgtccatccagcggggcctgaacgccctggacgcatacatcgccggccacgggcacgccgccgtcccctccggtcatgtcaccaccgacggtttccggctcggcaactggatctccagcaagcgcatggcccgcgacaagctgcccgccgccgccaaggccgccctcgacgagcgcggcatgatctaa

SEQ ID NO: 183339 - DNA, 77 bp, Arabidopsis thaliana landsberg
atgaattcatccgccgatgaagaagaagtccgatcagttcccgccacgtctggatggcagatcctggctaatctccg

SEQ ID NO: 183340 - DNA, 780 bp, Arabidopsis thaliana landsberg
gtattaaggtgtttgatgttgtgccatttgatgaggatcagggtactggggacttacgatatgttcaggtgatttatgtttgagttttttttggctgttctgctatttaatctggtgcagtgtggtgatgagttttttttttctttctatagatggctgttacgacgcatagtacaaatcttcgtgctccagagagatataaaaatggttgaacatatttttctatggttttagtttcttttcacagtgatatcgctgcattgcaattagagtggtttctgagtttgaatattggtttcaggaaaagtgcaggtgtccttggtttggaactcgagaaatgagagatctcataatgcagataagttgcaagcattgtccaccgtgagtcttttggacgtcgtgattcctttagcttgtttcattcatttttatcacttatatatctctcatttgcagtacttgtggagaaagggtggaccaaacagcaagtttcacctgatacattctgtctgggctaactttcagacatcaaccaacaatgtgagtcagagaaccagattttcttatgctacggctaaatattcagagaaatttctgtctaaaagtgttccgatttcgtttgttcggttgcttaacatccggctttaattattcccgttgtcttagataatctttggaaacagatggaggcatcttttaggtgagagagatttctgggaacatgtaggaggaattgacatatccttggatccttccagttttggccaggcaaatactcgg

SEQ ID NO: 183341 - DNA, 350 bp, Arabidopsis thaliana landsberg
atgcagctgactcgcttgaccgaagaaaatacgcgactgcaggaagtaacacggcgtgcgcaggaacaaacgaccgcaaccaagtctgagtgcgatcaactgtcttatcagcttcaggagagcacttcggcacgccgggaccttcaagggcacttggatacaacccaccaagcgttcaccgaagcgcgcatggccctggccgcacaagaaaaggaaacgcaactccttaccgagcggcttggccagggcgaacaaaaaatagaaaagctggagcagcactggctggcactcctcacagagagagcgaaaacaagcgctggtggcgaagcggacggaaaaggaagaaaaag

SEQ ID NO: 183342 - DNA, 848 bp, Arabidopsis thaliana landsberg
tataagtctcaatgtagttttagcacatgagacggtcgtgaatcctccaaacacgatcaaagatatagagccgtacatctcgaatagatcccttgggtttgtgttgaagttggagaataattgtcctataagagaacagctaagatcattctttgagaagctaaaggatcttttcaagttggagtcttcggttacgccgctaatcgaggacaacgaaccaaagacattcaagtttgatcttaagtcgaaatccgaaaatctcttgcaaacgatgtttatgcttgggagagaactggtgagttatcttgaacaaaaatatttcaaagctatgaacacaaattctaacgtaaacactaccaaaaatattttgcatttggaacaaccaaagttctagtctcattttatgtccatgcacaatgaagatagttataacgttatagcttatgaacttatggacctaatcaatgtttttattttgtgaatatgatagttgagttcaagtataagaaaggagatgtttgaagtgatgaaatcactaactgagttacatgctgcgatcggtagagttattatagagaaacatataaaaggtgatgaagcaatgtctctttccttggaacaaaagaacgcggtagaaacctcgataactcaatgggaacaaacgattacccgaatcgtgaagattgttgtagaggttaagtcaaaaagttcaagtgaggcttcgtcggaagaaagcagtagtactgaacacaacaatgttactacgggcagtaacatggtggagaccaatggagaaaattcagaattcacgcaagaaaaaggagatggcgttgaaggaagcaatggag

SEQ ID NO: 183343 - DNA, 1323 bp, Arabidopsis thaliana landsberg
atgcaggcggcatgcaactacaccaagggggcgcaccctttcgacttcgacgcgtctagcatggaggcccaggcccacacgtcatgtaaccagtgcgccggttactacgtgcaagaaactgcaccgccactcgcgctagtaccgcgccttcttgactgcggaaccggtgccgcgactcgaggcgaccctgcgcatggcccaacagtgccaatcgagcacatcggtcacgggtcagtcagccgcgggagaaggcgcgacggtcgatgcggccaaaaatgggccggcagtaatgacggtggcaggcgggcagaagcagcggtcacgtcatcagccaagctcacgtcacctcgtaggacagcgagagaaccctctctcacagcgtgaagacgacgcgcccgtgctccgttcctcgaacgacccgcgcacgcacaacggctgccccgcgaaccactcgccacgtcgcattaactccgcggcggggcaggcggcgcctctggcaggagaagtgagcgacgcttcgccataatgaccgcgtcaaaaaaggtacgccacgtcattcgatttcatatccttttccttttcctctttctctctcttacaacagggaccgggaaaggggatattccaaaaagggtccttctcagcgaaggcaatgggccccgagccctcctttctgatcaggggttccaaggttgtgccctccggggttcggcaaccgccccagagcactcgggctccgagccctttactgatcaggggttcaaaggctagaccctcggaagggttcgacagtcgccccagagcatgcagagtcagggatgaccctgggtacgtccgttacatggccgaggctcgggctacgctcccgaggtaccctaggacatttccgagaccagcgggaacgatttgtaatggaatcccaccggagggaggcgccgagccatcggaccctatcgaatgggtccaggtccagcaaatcaccagcaggtacttttggagcgcgcctctgggccactaaccgacccttatcgaacggggctcgggcgtccactcggatcacccgttagcaactcactagaaacaccatgttcggcgcccccccgagggtaacatggcacgttcccccccttcctccttgcagaaaggcgatgaaggggcgtactataatagtcgagatggtccttgatcgtcctctcactccgtgcagaggctcgggggctgctctcgcaacccggctgcggccaaactgttgacagcgtcaacgaaactaacttaaaaactcagagcctgaccatgcacccgggctacgaccaggccacatga

SEQ ID NO: 183344 - DNA, 211 bp, Arabidopsis thaliana landsberg
agtttccactaaacgaagcaaagatgataggaactcactcactggatttgccgtcaccgtcgcacaatcagcctctgtttaccgattaacagtcaaacttgaagaccaccaagctgcacgtcactgtttctacgccacgatgccgttttgcgagaccaatcttattaaatgggcctatttggcccaagttctccaatatattccccaatag

SEQ ID NO: 183345 - DNA, 247 bp, Arabidopsis thaliana landsberg
atgcttcccattcacaacaaccggaggcgcaccctgcgtcttgtcgagatattcaatcagatcttcgatcgtacagaccttaatcccccactgtttcccaaacttcaagcaactatcgcgccgcatcatgtcgttattccccccaatctccggaagaccatcgacaagctcgccgtcctccaccagttccgcaatgacacccgccggcgctttcccggccaaccggcagaacttaattggccgctcc

SEQ ID NO: 183346 - DNA, 666 bp, Arabidopsis thaliana landsberg
atggataatctcaattggaggcctcctctttcaaccggagagcctgccatggatacaggtgactggagaacgcaattgccgcctgattctcgtcagaagatcgtcaacaagatgtaagtcactctagcggcgttgttttgtctatgccagtcaaatactacagaaatagaaggttattatgttccttgaccaatagttagtttgtttgttttacttatttgcttgccacttgcgcagaatggaaacactaaagaagcaccttccattttccggaccagagggaattaacgagctcaggagaattgcagctagattcgaggagaaaattttcagcggtgctcttaaccaggttattatgaacatatattcttgtttcgttagtatggtaaatatagagatttgtgaggcaatggactccacaacatggaaaagaactgactttcgttatctgtaaagctaagccacaatatgttgggtatgaaatccatgtataccttcctgatactcttttatatcgcctttcagactgattaccttcggaaaatatcaatgaagatgctgacaatggagactaaatcacaaaatgcagctggttcttccgcagctatccctgccgctaataatggcacatccatagattcgagtaatcacgattctcaagcatga

SEQ ID NO: 183347 - DNA, 135 bp, Arabidopsis thaliana landsberg
atgcgtagtctagagccgcctgaagcgcttggtcgtaacatcgaaccgagcaacgcaccacatcgcagcggaggaacggaagagaagaaggaggaggaaggagagagtttggagacagagagccattgggaagtg

SEQ ID NO: 183348 - DNA, 396 bp, Arabidopsis thaliana landsberg
attcgtatggatactccatctggcattaaagactcaattcctgcttggatcaagttctcggtgcaagctccaggtgaaatcccattcaatggcatatactatgatcctccagaagaggtaaggttctacagtcttttgaataattaccttgtggaaaacaattgtgccagtgctagtctgaaatttttgaagatttagatttatcgataagttttctcagtcaattccatttaatatatgcttacaatttaatataaaaacatcaacatatacttttgcttgccccttcaacggttccaaatttcttttcaggagaagtatgtattcaaacatcctcaaccaaagagacctaagtcgctaaggatttatgaagcacatgttggcatgagtagcacg

SEQ ID NO: 183349 - DNA, 333 bp, Arabidopsis thaliana landsberg
aaccgaaactccggcgaaaagattatggcgggacagtcacgaaaatggatgatactggtggcgacgatatggattcaagctttcaccgggacgaatttcgatttctcagcttactcgtcagatttgaaatcggttctagggatttcacaggtgcagctaaactacctcgccgtggcttcggatctcggaaaagtattcggatggtcgtcgggactagcgcttatgtatttcccgctttggacggtgcttttcgcggcggcgtttatgggattcgtcggttatggagttcagtggcttgtcatcactcatttcatctctttgccttatatcatg

SEQ ID NO: 183350 - DNA, 1329 bp, Arabidopsis thaliana landsberg
caattttcaggaagtgtagcagtttcagcacttttcgctttcggagactcgataatcgataccggcaataacaacaatctaaacactctttccaaatgcaatttctttccgtatggtagaaattttataggcggaaaagctactggaagatttggaaatggaagagttttctcggatatgattggtatatctatcaacgttaacatctactatatctttatacacctcgacacaactatataatgtttcattttacctaatatttatgatttgatattagtcttttttgtgcagccgaaggtttgaatgtaaaaaaactcttacccgcttaccgcgatcccaacctttcgaagaatgatcttccaaccggtgtttgttttgcatccggtggatctggacttgatgaacgcactgccagatcacaagtaaaaattacttgtgttgcttagagtttacattgtaatcattcttgattatcttttataatatgttctcttgttgatgtatagggagttatatgggtgcctgatcaggtgaaagatttcaaagaatatatcatgaaactaaacggcgtcgtacgagataaaagaaaagtaaacgcgattatatcaaacgctgtttatctaatctcagctggaaataacgatcttgcaatcacctatcctactctaatggcacaatatactgtttcaacctacactgatcttttggtcacttggactgataatcttttaaaggtacactattttaaaatacttgtgataaaacataattgtatgattggtctttttcgaaatctattaattttgttttttggttatttgaagagtctatatgcaatgggtgcaagaaagtttgcggttcttggaacacttccgttaggttgcttgccaggagcaagacatacaggtggaaattttgggaatatatgcttagtccctataaatcaagtggctgctatattcaaccaaaaattatctgcaaaacttaacaatcttcacacaatacttcccggcgccaaatttgtctatgtagacatgtataatcctctccttaatctcatcaacaatcctcgggcttcaggtaatggcctaactcaatgaaaaattagatatatacgtcaaaaatataatatgttattcttcttcgttgatggctattatagggttcattgatgtggctgatggatgttgttgtatgccgacatcgccggttccgtgccctgatgcatctcagtatgtgttttgggattttgcccacccgagcgagaagtcatatatgacgattgcgccaaagattatagaaggaatcaagaagaatcttgcatga

SEQ ID NO: 183351 - DNA, 108 bp, Arabidopsis thaliana landsberg
atggaagtcgattttgaccatcatggatggcatctctaccgggactttcccgtgaagggtggccacggtgaggtgtacgactttcccgagggatatagcgctcattgg

SEQ ID NO: 183352 - DNA, 108 bp, Arabidopsis thaliana landsberg
atctggggggaggaaaacggcatcggcgcccgcagtgccgtggggatgggctcgctccccggccacattgccgtggagatcgaggggatcttcgaactcaacgcctag

SEQ ID NO: 183353 - DNA, 82 bp, Arabidopsis thaliana landsberg
atgaaccacacggtggatgatcagaacatggcttttatctctcaactgtaccctgatgtctacactcagatagtacaaccag

SEQ ID NO: 183354 - DNA, 863 bp, Arabidopsis thaliana landsberg
ctattgatcttgttgacgaagctggtgcaaagctgaagatggagatcacttctaaaccaactgaactagatggaatagatagagctgtgatcaaattggagatggaaaagctttctcttaaaaatgatactgataaagcatctaaagaacggctacagaagattgagaatgatctgtccacgctcaaacagaaacagaaagaactcaatgtccaatgggagaaagaaaagtcgctcatgacaaaaatacgttcgtttaaggaagaggtaaaatctttctcaatcactatgccttttcgacttaacgtctcataaaaataattttatacaagacacactgcagtttcttgttctaaattcgtacttttagtggtagtacttgtggtggttgctttcgttgttggtatatgtcgacgttaatgtcctccgtaacatgttctatgttctatgttttacagattgatcgagttaacctcgaaattgaatctgctgaacgtgaatatgatctaaaccgagctgctgagctgaagtatggaacacttttgtccctccaacgccaattagaagaagctgagaagaatctcacgaatttccgacagtctggacagtcactactccgagaagtggttaccgatcttgacatagcagaaatagtaagcaagtggactggtattccactatctaatcttcagcaatcagagagagagaagttagtgatgttggaacaagtgctccaccatagagttattggtcaagacatggctgtaaaatcagtagcagatgctatccgacgttcaagggctggtctttctgatcctaaccgcccaatagctagtttcatgttcatgggtccaacaggtgttg

SEQ ID NO: 183355 - DNA, 72 bp, Arabidopsis thaliana landsberg
atggttaatgtggaagtaagtaaccgacaagagttggatatgatggatgtgttgccatcaagagtaaatggg

SEQ ID NO: 183356 - DNA, 529 bp, Arabidopsis thaliana landsberg
atgacggcaggtcgtcgtggcgcaggatttacactggcagagcgtagtgccggtcgtgcagctagttctgtgaaacgtggtgtgatacgcggtagtaggagtgccggaaggatcattcgtggtggccgaagtgttggtattgacatcgatttaaatgctcaaggtcgggaagatgatgaaccaattgaagttgaagctgaaattactgcaaataattcggtgagtaattttctaacacatggccattgctaatttgtagacatttgtaatgttcatatctgatatgagggtgttcaataacgctctaacaaaatatgccactatttttccacatcctccaccaggtatcatattgtttattatataatttcaatttataaattattatggtctactctcatatgtcggtgtatttttaggtaaatattatcttgttgactcaggatatcctaatcgatctggatatctagcaccatacaaaggaacaaaatatcatttacctgagtatcgcagcgggtccccgaactag

SEQ ID NO: 183357 - DNA, 144 bp, Arabidopsis thaliana landsberg
aaaggaaggcggcctgactaccccctggcattagtcggaaagcattctaaactcgggacagacagtgtggtagtccttcggggacaagttcactctgaagtatttcagtacgtttctaccgaagctgaccggatcagccgatag

SEQ ID NO: 183358 - DNA, 276 bp, Arabidopsis thaliana landsberg
ccccttttgatccttcttccttcatgtggtctccaacgcaagacacatttaatagcttatctcagatgtatggtcaagattgtccagaaagatcaagtcttgaggatcaaaaccaagggagagatctctctacctttaacagacgttggtggattggaccaagtggtcatcatggcttttctgttatggaaagattgggtcaagcagggacacacattaaagatttcactagtgagagaggctctcttatacagttgtgggtgcctgtggatagag

SEQ ID NO: 183359 - DNA, 806 bp, Arabidopsis thaliana landsberg
agatgctgttgatgaatattggctcactatagaatattgctatggtgcttctgatcacgaagctgctaagcaagcatttccaggatctgtttctcaagaggtataatctttgatcttctacatcatagcttgttatatataatttaagttatgttttcagaaaacagtttttaactgtctttatattttaggtttttggtgtccgctcttgggcctcagatcatgtcatgacagcagaacagcgtgcgaagctcttacagtgtatcgatgagaaggcaaaactctcattcaaagagtgtgagaagtttgccaaggatctaaacctgaccatagagcaggtaaagatatattttgtgtgtgtgttgtatatttgttaagaagtatgagtatcttatacttattggttggtcactccaggttatgcatgtctatcatgcgaagcatggaagacgtgtgaagtcaaattcaaaagataaaaataaagctgtagaaaatagtccttcatcttccaagaaaagaaaaagagcatctcttgtaaagactaaaggagaaggtgtcaaatccataatagtagatggacagaaagttctaaattctgatgccattgatgcctcaaatagtgagagttttcaagattcattacaagatgaccaaacccccattcaaatgcatcgacaagaacatgcagagataagcaatcttactgaagctgaacctcagtgttctaatatcatcaataggcatgcaagttcaaagaccagatcacttccttcacaaagatttacgtggacagatgaggcagacag

SEQ ID NO: 183360 - DNA, 635 bp, Arabidopsis thaliana landsberg
ttgggaatgaaatttgatgatgccaggtcagcatcattagtccgtcatactataccattcaacccgaaaaagaaatatggaggcgtggcactacaggtaacataaccttgtctacaatgttgttgagaagatatatatgtgcacacacgcacacacacaacacacacatatatatatatagtatatttctgttagaactccgcaattgtttgactgtaatctgcctgcatattttatgctatgtttgattcttctgtagttctttctcacttcgtatcatttatttctagcttggtacacacgctcacgttcattggaaaggatctgcaaaaactattctgagttcatgcgaagggtatatggatggggccaacaactccagagctattaatgaacagaaacgaaaggtttgtttatgaacgtagatgactaattcaaaagtacactattatttcttgttctgttttttatataagagtccattctttctttagtcttttgaaggaacaatagaaaatatgagtaaggagggactgcgttgtgcagcacttgcttatcagccctgtgaagtgggaagtcttccaaccattacgggacctcgaaaccttgttttgttggctattgttggtataaaa

SEQ ID NO: 183361 - DNA, 525 bp, Arabidopsis thaliana landsberg
atgaattttccagattcttcattgttcacaccaaattttgcttatgaaaatgatttagatttctctagtttgatcactccttcaacgcatgtatcattccaagaacctaaaccatgtaatccagtcattcatagtgcagggattgaaaacgatggaagacaaaactgtgagacgaccatgacattaagcgaaatcatgaaaggagacgatgagccgaagaacaagagagctaaacataaagagcttgagagacaaagaaggcaagaaaacacatctctattcaagattctaagatatttattgccatctcaatacataaaggtaagtaacattttcaaatttttcttatacaaattctgtctcatctcatgaagtcaaaaaatttctatagattatatagaagatccccttagtctaatcacggtaattaattaacaattgtgtaaatagggtaaacgttcctcggcagatcacgttctagaagcagtgaattacatcaaagacttacagaagaagatcaaagag

SEQ ID NO: 183362 - DNA, 189 bp, Arabidopsis thaliana landsberg
atgcgtcggtattataatataaaagacgatcaaaatcgatcttatttacaagagaatttgtttctcgaagaagaagacgttaatggcggaaaccgtggagctcccgagtaggttagcgattcttcctttcaggaataaggttctcttacctggcgccattattcgaatccgttgtacttctcatagcag

SEQ ID NO: 183363 - DNA, 216 bp, Arabidopsis thaliana landsberg
tcaaggtgccagaagtttctctttgacaaactcaaagattctgacatagtagtgagactaaagaaaattgcttcagacgaaaatcttgatgtagacttgcatgcgttggacctgattgctatgaacgcggatggctcacttcgagatgctgaaactatgttggagcagctgagtttgctgggaaaacgcatcaccacagctttagtaaacgagcta

SEQ ID NO: 183364 - DNA, 665 bp, Arabidopsis thaliana landsberg
atggagcttcggtcccgcaataaggcgattcgtccatcgactgaaggtaatcttcacacgaccctttcgtgatttctcgctgttgattttgggtttgatccctaatcgtcccattgtacccgagaaattgcggatcatagtgaacttgttagtgtctctgtttcagtgcgatctgaactctattaattgatttttttgggtattgtgctctgatgatctctgttaatttgatgatatagttttggtattgtgccctgatgtctttgtgagggtagaaattgaaactttagggccttagatacggtcgagagattaatttataatcttttcttcttctcaagtagttgtggatctcgaggaaggaactggtatcaaccctgatgaagaaccttatgctatatcttcagatgacgattcaatcggctctgaatttcaaggtattatgattcgtcactaaaggtgtctgttttaaagttgattctctttgggttaagctctgactttctcacgattcgtatttgaacataggtgacgaggaggaggaggaggagttagaggaggttgttgctaatgatgatttaccaaatcctgtacctgttttggcaattgtaaacctaccaagagcaagcaagaaaaggaaaaaacctgatgcacgcaaagagaaa

SEQ ID NO: 183365 - DNA, 517 bp, Arabidopsis thaliana landsberg
aaatggtgatgcgtatgctggggagtattttgcagacaagatgcatggttttggagtgtatcactttgcgaacgggcataagtatgaaggagcttggcacgagggaagaaggcaagggcttggtatgtatactttcaggaatggtgatacacaagccggtcattgggaagacggtgtactcagttgtcctaccgagcagactatccgtcctggatcatcttttaccataagccattccaaagttgttgatgctgttgaggtaaaagttaactagtagtttatctttagtactgcaaacaccatatatgtattaaactaagcttgttctctctttctccttcagcaagcaaggaaagcagctgagaaagcacatgaagttgtgaaagtggaagagaggatcaagagagcggtgatggctgcaaatagagcagcgaatgcagctagagtagcagccgtgaaggctgtccaatcccagacctttcacaggaatgatggcgatcttgaaaccaattgttga

SEQ ID NO: 183366 - DNA, 909 bp, Arabidopsis thaliana landsberg
atgagggtcccaacgactcgtgaggagcaggatatgcttctgaagtaccggtaactcgaggggcttggtgtctttagagtcagtggtggatctagaacgttattctacctcggacaccactaattatttacaaataatgtataaattgttgtcaaaaacaaaaatgtataaataaaatatgtaatataatacggctaaaaatgttacatatgctaatttttttgtaaattttgtattgattttgaagtttattgtgattggataaatttttatgctaaactattttatataaatttttacttataagttataaccattaagaaaaggaaagtgaaagaaacttagggaatcaaatatacaattaatattgatggtgggatattggattatagaaaatgaaataaaaagtgttgttgaggggaaagaaacctaaattgcaaagtaaaaagtgttaattaccataaataaaacaaacgaataataagaaagagataataaacgaatcaaaagtctatttagcctagggcactattgaaaatttgtcatgattttaccatgattcaataaaataattataactataagcataaaattttcaagagtagtgtagggcacgtgcccatatagccttgcacatagatccgcccctgtttatagtgcaaggggtacggtggcttcgggtgacgatccgagagcacggtttagcgtgttaactcgagagcgagttttgaggtattattttctccaagtgtcgtaactcgatgactttgtggctgagagtgagccgacacaactctgggtttgactttgagtagggaagataatacgtgtgatacccgagataccgtaggccgatgcttgagagtgacggtttatgctcgaagattgcgatctgagagtggagagtga

SEQ ID NO: 183367 - DNA, 353 bp, Arabidopsis thaliana landsberg
atgttccagcgtgtgatcggtcggccattattggcgaaggtgaagcagacgactgggatcgttgaggtcagtgctgatagacctcgatagcaaaacgctaaaggaaaatcctggtggttcctgaatatgaagactagcggaaagcagtggggagcttcatgcgccaccgtctcaaggtgtgtccggaagaagaagactggggagtgattgagaagcgacttgcttgtggtaaagtcgaggagctcatcgaggaagctagcgatgagctcactctcgttggcaaaatgatcggttcgttacaccctgttctgttctgttttgtgatccatattcttgatcttacttgttgttaa

SEQ ID NO: 183368 - DNA, 1031 bp, Arabidopsis thaliana landsberg
atgacagagtctgatggagagactgccaccctgttccctaaggctgcaaggttgagaaatctcacatactctgcgcctttgtatgtcgatgttactaagagagttattaagaaagggcatgatggtgaagaagttacggagacacaggattttactaaagttttcattggaaaggtgtccgaactcagttcattgtgtcacatttatttaggtgtttccatgtactctactgttctgatagtagaaatgttttcttcttgtttgattatttgctaggttcccatcatgctccggtctagttactgtaccttgtttcagaactcggagaaagacctgacagagcttggagaatgtccttatgatcagggtggatacttcattattaatggcagtgaaaaggttctgattgctcaggagaagatgagtacgaatcatgtttatgtgttcaagaaaaggcagccaaataagtatgcttatgttggtgaagtccgttctatggctgaaaaccaaaataggcctccaagcacaatgtttgtgcgtatgcttgctcgtgctagtgcaaaaggggtaagagaaagctaattagtcttaactctactatatccttcctcgaaatttattctttaaattctagataatggtaaataaattacattctatgttgcaaatggatgcagggttcatctggacagtatattcgatgtactcttccatacatcagaacagaaattcctattatcatagtatttcgtgcactgggatttgttgccgataaggacatattggaacacatctgctatgattttgccgatacccagatgatggagttgctcaggccttccttggaagaagctttcgttattcaaaatcagctggtatccacttttttttcacttggttaatgacattttattatgcttgaggaattgatcttgcaatcacttgataactttcatattacttcaggttgcacttgactatattggaaaacgtggtgcaactgttggtgtaaccaaggaaaaaaggataaa

SEQ ID NO: 183369 - DNA, 204 bp, Arabidopsis thaliana landsberg
atgaagacctggccaccggatgaagcccaggtctgtactgtggtgagcaaaatatcaaagaggaagcggcgtggggataagctcccagagatattttcattttttaatttaaagaaatacgtagatatttcggatttaggtttttttagcgatgaacaaaaggatcaacgcactagacgacaactggctaacaactttgattaa

SEQ ID NO: 183370 - DNA, 174 bp, Arabidopsis thaliana landsberg
gatgaaggactagctgcctcggccttcaacaaatcctcgctcttccctaacgaacgccatacctgtcttatgaccaaggagaaaaaggtacgtgttcgggacacacccaagtacacttcatctagtgatgaagaatcctccgatgatgaagtagattactcgagttttgtctag

SEQ ID NO: 183371 - DNA, 950 bp, Arabidopsis thaliana landsberg
atgaacgttgaccaatgccagtggcggaagaagatgatgggtaggggagtggacggaggttgtggtgctgaagagaagccttatcgaccatttcgtagggttgcgttagataaggagaatgggtatgaggatatgggttcgttggaaatcgatttcttagctcaagctagcaaaaatctatctgagaggtctccttttgatgttcctgaagatggttctacttctgtgttaagtgtgcctactctacctattgctttagctaatttgctgaagaaccattcggataataagaaacggcataagaagtctcattctggtgcggataagaagaagaagaagtcttctaggcaaggggataagttgagaagtgggagtatctggcttgaacatgaggactactttaggcgcttagattttcctgatttagaaactttgtctgatttagcatctctacgatctttatcttctagaaaattgcttttccattccatcggtgaaatacgattctattgattgtcaacagagggaaactgatgcgagtgcaaagaatgaggatgttgtttgtgaagatggcgttgttctggaacaaattaagaaccttctcactaaagatatatctgaaggcacagtaagaaaagaagaggatgttgttaagccaatgggtgttgacaatgtagggaatggaatctcctctgggtcagactattctggtagtttagaatgggttttaggtaatagaaataggattttgttgacatcagaaaggccctccaaaaagcggaagcttcttggtagtgatgcaggtttggggaaattaatggttgcggctccttgtgaagggaatgcgttgttatgtgatttttgctgcactggtcatcatcagttgattgtttgcacttcctgcaaagctacagttcacaaaaaatgctatggcctgcttgaagattcag

SEQ ID NO: 183372 - DNA, 691 bp, Arabidopsis thaliana landsberg
atggagacttctcaaaaggtgattactacggtgatacttcaagggggaaactacctaacttggtcaagaacaacaaaaacggtgttgtgtggtcgtgggctttggagccatgtaatctcatctcaagctccaaaagaagccaaagaagaaggagacgaagaagaaacggagactatatctcccgaggaagaaaaatggttccaagaggatcaagccgtccttgctcttcttcaaaactctcttgaaacctctattctagagggatactcttactgtgagacagcaaaagagttgtgggatacacttaaaaacgtgtatgggaacgaatcgaatctgacccgcgtgtttcaagtcaagaaggcgattaacgaactaagaaaagaagacttagagtttactaaacactttggtaagttcaggtccttatggtctgaacttgagagcttgaggccaggaacgcttgaccggaagattctccacgaaaggcgtgagcaagacaaggtgtttggactccttctcaccttaaatccagggtacaatgacctaattaaacacttgcttagatcggagaagttaccaagtcttgatgaggtgtgctctaagattcagaaagagcaaggatcaaccgggctatttggtggaaaaagtgaactcatcacggctaacaaaggagaagtagtggcgaacaaag

SEQ ID NO: 183373 - DNA, 363 bp, Arabidopsis thaliana landsberg
atcgccgaaggatttaataataacatcatttggaatgtggcgcaccctattgccgtacaacagagtctctgctatgttcgttcgggattagatattgtggtggagccctctttttatgaagcgtataagccgggaacgaagccggagcgcgccttgaatgaaaaagagatggaggccatccggaaattagtgtttaccaccgtagatcaacttgaatcggactaccgggacaagagatttatccactattctcccgtggctccttttggtgtggagataaataacattgatgaggccttatcgtttcttctttttcatgaaggctttcatttgagttacatcatggctttgaagcgggcttag

SEQ ID NO: 183374 - DNA, 3216 bp, Arabidopsis thaliana landsberg
atgttgttgggcttcaaaattactaagcccataacacttgtgacgattcggcgactatggggcgactacggggtaagttattgggcttttaatcgtcgaggcccaaacccaattgatttagtgacaaatgagcgacaaatatacgactactccagtgttgaaaaccctaattcgattcatttccccttcgatccaaacacttagccaaaaattattcttcttcttcgaacttcttcttcttcctcgatcttcttcgatcttcttcttcttcttcttctttttaaccctaaatcgattctcttcttcttcttcatcttcttcttcttcttcttcttaaccctaaatcgattctcttcttcttcttcttcttcttcttcttcttcttaaccctaaatcgatccgtctttcaccaacaaaccctaatacatctcgattcatctcgattctctcttctttgattctctcttcttcgccaaactctcccttgcctcttcgatccttctcgattctctcatctccaagaggatgcctaacgccggtcgtggaggatctcgaaagaggaagaccacaccaaacgtgactcaaagagccggaggttcaacgcctgctggaagaccctcttcgctaccgcagcagtacgatttcaccccggcggcggcgacggttcaagtttctgcatcgattccgcctcaaggagccggcgccggcgcctcatcctttgccccccactaccgtaactacccaccaccgcagcaactcttccaacactccaccaatcaaccacagcgtgtagatccgttgccaccacaagagactgctcagcaagaccctcctctttcgccggatccagaaactgcatctcacagtcatccctcgtctcaaggcaacaacttccaagagggcattcctgcagtgttgccgtagctccaagaagactccgtggttgctctgaatgacattctctctgtgcctggcagagaagcgtggtgttgtgtgttgtctcccattccccggccaaaaaccgaatggtaagttcactttaaattccctgttttcttgttctgtatgctctgttgtgaatcaaaccgaaaatgtgaaccttgttggctgttgtgttgtgaaacattgttggctcttgtgttgctagtgttttcgggttaggcatttagtcaagtttagttctagactcattagtttatgtagtaatgcctgttttattgttgtttgatgctctcttgtgaattggtcaaacatagatgagtgttgtgttgtgattacattagttcttggtcattagtttagttcagttctaaactcgtgttatgttgttctatattacacaaatgatgatgctttgattgtgaatgatgctatattgttgagacagtactattgtggaacatagtttatagtcgtgtgtgacttgtatttcttttgggaacataactttgttcacttttgtaacatgtttacttctttctttgttggatttggaatcaaaccgaaaatgtgaaccttgttggctgttgtgttgtgaaacattgttggctcttgtgttgctagtgttttcgggttaggcatttagtcaagtttagttctagactcattagtttatgtagtaatgcctgttttattgttgtttgatgctctgttgttaatcggtcaaacatagttgagtgttgtgttgtgattacattagttcttggtcattagtttagttcagttctaaactcgtgttatgttgttttatattacacaaatgatgatgctttgattgtgaatgatgctatattgttgagacagtactattgtggaacatggtttatagtcgtgtgtgacttgtatttcttttgggaaaataactttgttcacttttgtaacatgtttacttctttctttgttgcatgtggttggaggtttactcgagacagaggatctcgcttggttaggaagatcactagaattttcttacaaaaattcgatgctcccttctataattggtcatgtgtgccagttgataaaagagaaagattatttttagagtttgcggtaaacttcctctatatctgctcttgttcaagttaagtttatgtagtttcactaacttcttccttttttttgtaaaaaactcaccactgggatcccttaataacagggacagtccagtattacttcaatgagattgtcaagaggcgcttgaaggacatggttagcaccgcaaggacaactcgagagcagcctccatggattggagaaacgctgtggggaacaatgtgtgcttactgggacacagaagcagcacagaaaaggagtcggacctattccaaagcccgtctctctgaccgtaacggtatcggtcctcacgtccactactctgggccaaaatcttttcaagaaatccaagatgaattggtaagtgtttctgcagattctcataagttagagttttctgttttctgttttcaatccaatatagtctgttttcttgtgagtatgttgagttcttatgtctgttgactactgttgatattgatttgtgtttgtaggaagagaagttgggaagaccagtccatcttggttaggtgttcatctaaacacacactaagtcggatggctcatttgttgattagaagtcggagaagattgctcaagcttatcagcagaatgtgagagataggttgtcagcactagaggcggctgcttctgctgtctctgatggctcttcacgacctccggagctcacactagatgattatacagccatctttctcgaggtaagatgttttagtataattatgagtcttagagtccaattaatattctgtcactaatgagcttcttctctatttcttgcagtccacagaaaatgattcaagaggcaatccttatggactaggatgtctaaaagacactctaggcagcgccaaccgccatcactccggttcctcatcatcctttcaagccctagaagaacggctgcaggaagctcaaaggaaaatagaagagcaggctgcatataatgagaagagatctgagattgctgcccgagaagctgagtcatcccgagtcacagctgagcaaaaggacaagctcgagcaattgtctttagtcgaaaagtatctccgccaaaccgatccgcagttcttggacttcatggcaagtcactctaccacaaccacagaacgtctaccaagtcctccacctaatgatccttag

SEQ ID NO: 183375 - DNA, 701 bp, Arabidopsis thaliana landsberg
atacgcaggaggaagctgctgcagcatatgacatggctgcgattgagtatcgaggcgcaaacgcggttactaatttcgacattagtaattacattgaccggttaaagaagaaaggtgttttcccgttccctgtgaaccaagctaaccatcaagagggtattcttgttgaagccaaacaagaagttgaaacgagagaagcgaaggaagagcctagagaagaagtgaaacaacagtacgtggaagaaccaccgcaagaagaagaagagaaggaagaagagaaagcagagcaacaagaagcagagattgtaggatattcagaagaagcagcagtggtcaattgctgcatagactcttcaaccataatggaaatggatcgttgtggggacaacaatgagctggcttggaacttctgtatgatggatacagggttttctccgtttttgactgatcagaatctcgcgaatgagaatcccatagagtatccggagctattcaatgagttagcatttgaggacaacatcgacttcatgttcgatgatgggaagcacgagtgcttgaacttggaaaatctggattgttgcgtggtgggaagagagagcccaccctcttcttcttcaccattgtcttgcttatctactgactctgcttcatcaacaacaacaacaacaacaacctcggtttcttgtaactatttggtctga

SEQ ID NO: 183376 - DNA, 343 bp, Arabidopsis thaliana landsberg
atgagggtggtgttgggtatggatatcttcagactcattgagtatatggaggatcaaataggtactgaaatatttcaaatgtccaaagacttgatttgattaaagtatcttggagacgaggaaatggttagactaagaaattattcgtttttgtagggttctggctgattaagaatccacgtaacgttttggaagatggtgtgattaaatatcttaagcaagggataaatgtaaagcaccaaatcagatttcgtaccgttttcaataattttgatattttgaagaatgaagttgttctcggtggtggtgattcggaactggaaattcagatggaggtttctat

SEQ ID NO: 183377 - DNA, 66 bp, Arabidopsis thaliana landsberg
atggccacagagatacggtcactgtatattaaatatttatttaccaatcaggccgacaagagtaac

SEQ ID NO: 183378 - DNA, 2926 bp, Arabidopsis thaliana landsberg
atgggccccgaagcaacttggatactacacgctattctgagtgcaccagctacttgcagaaagtaaggcaataatattctagtgcattctggaatttgcaagtttgctctcctgaaataacctcagaatatacttatcttacttgaactagtctttggtggacccaatttttaagagtgctttttgagttcttatgaaattagcattatttgcactggttacattttacttttgttttggtttattaagtttgtttttctgattctacagcatgctcgccaaaacctgcttgggtttatgttccgccatggtcactttaaagatgcatgcatgttattctttccgcaaagtggtcttccccctcctttgcaaacttcatcagtgggcgcagtaagcacatcttcatcacctcaacgaactgatcccttggcaactgaatatgggaccattgaaagtttgtgcgagttctgtgttggttatggagctatctcatcccttgaggaagtaattacagaaagacttgaatccgcaaagaatcaagatcaagccataaatcagtacatagctggagctcttactcgtatctgtgctttctttgagatcaaccggcatttcaattacctatacaagtttctggtaaggtcatctttgctgtcatggttctttaactataacttaccgttgggttgtttccacttggaaattttcaccttttgctatactaacaagtaactagatctaaatttcctttgtttcatgtgctgcatgcgcataggttctgctgtacagttatagagtcatgtagtcatgtagacagataatcactgcatatataagagtacacaactgtgcatcttatcccaaaattcttagctagtcttattctctctgctttgcacttcctcttctgcaatctgaaccataacccctgatcctaagcttgaaattagtttccagtgcatccttaaaactgcagatcctgtagttgtaagaggtttatagtatgatttttatgactaaggctgtgcatttatggtattggtagaaattttaactctgatgaaacaaaaacgtttttgtgatcatgtgttgtcgatcatggcctattaatgttattttttctgtttagagagacaagtggctcgtaaagctgtatgctacatactgggagcctaactttttttctaaaatacttgtgaaacataatgctaattcactcatttttataattgttcaggtactcaagaaggattatgtcacctctgggtattgttgtattcagctttttatgaattctacaactcaggaggatgctgtaaggcatcttgagcatgcaaaggtatctagtcagtagctctttcctcaccacccattccatctgtgttgagtctgaattggattaccgcaatgtatttacatgcaatgcccatctgaaaacagttaatacctaagtgaatccaaagtatgtttttactgattgcaggtttttcaaatgcatttttttgtgtgtggaatgttaaattttaagcattataaagtggtttagagtcggttgaaacaattaggcaagactttgttgattttctggcagttggtggcacaaaaatttggatcagacacgcttaatccttgcttttttttttttttttctctctctctctgctggctaaataagtaaatataatgcaattatttgaactagagcttttctaaaatttgcctggattacattaagacaagtttttgttgcttaaaccaacttattcatatgtgataactacttgtatgaattatatattacatcttgttttggggcctaaacgaagaacagcccgcagtcataagcatgccagtgctgcacaaaaccatgataacgtctatgttgcatgtttctctcctttttttcctagaaatactggtctctaactatcctcggggtacaggcacactttgaagaagcattgacagcgcgtcatagaggttcagactcaaaaaaacttgttacaaagggtgttagaggaaaaagtgccgcagagaagctgagtgaagaaactcttgttaagttgtcctcacgggtgaaaatgcaggtaactctgaagtctgaacaccgtttatgtcatccttttcattaagtagggcttttttgatttatgactccacctttgtgggtttattcttcctatagattgatgtggtgaagtccttcagtgactctttttgggcgggggggggagcattccttggttgggaatccaaatgattcagagacatccaggtttgtcctcaaaacaaatttcttgtatccttacgcaagtttaaggaatatgtatcggtagattatagacctgtaattctttccacactgtcatcatgattccagtccacttatgtacacccaaagagagacttacctagtatttctaaatcgattccagctttctcttcacatagccatgatgcgtattaaatgaatgatgtggatgcttttcccttgtcgagataaattgaacacgtgttttttttgcaatccttgaaggatgtgctactccaaatgaaaatgaaagacgaaacttagtattcatatttcctttggtgaagatttaaagaaaattcttcagctgatatgtctttccctggctcttactttcaggagaagatgtgaaatagtggagactcttgttgagaaaaatttcgacttagcttattctgttatatatgaattcaagctctcaggtgcttatttgttttatgttaatatctgtgtaatgttgttgtgcatggtatctgacttttcccttgcttctaagcagctgttgatatatatgctggtgttgctacgtcactagctgataggaagaaaggcagtcagttgacagaacttttcaaaaacattaagggaacaatccaggatgatgactgggatcag

SEQ ID NO: 183379 - DNA, 1718 bp, Arabidopsis thaliana landsberg
atgaaccacaacagcaacctcgttcttccttcccatcaaaccgagacgcagacgcaagatgaaaccgatatcagcgtttggcgtttcaggggaagcgacacagcagccaaagcctccagcgttacgatgagagtcatcgtctacaagctcttcgatgaatgcagcctggatgtgaaaaagcctcttttaccccttgctcacggtgacccttctgtctacccttgctaccgcacctccatcctcgtcgagaacgccgtggtcgacgtccttcgctccggcaagggtaactcttacggccccgccgccggaattctcccagccagacagtaatattttctcttactttactcttaattactttgttccacccactgtaagtctgtaaccattcaaaacctaaaagtgttttcatggaatgttttgttaatcagggcggtcgcagattacgtgaaccgagacttgacgaacaaggtaaagcctaatgatgtattcataactgtcggatgcaaccaagggatagaagtagttcttcagtcactggctcgaccaaacgctaacatccttctcccaaggcctagttaccctcactacgaggctcgtgccgtctacagtggactcgaggtccgcaagttcgatctccttccagagaaagaatgggagattgatctcccaggcatcgaagccatggcagatgagaacacagttgcaatggttatcataaaccctaacaacccctgtggaaatgtttactcttacgatcatcttaagaaggtccctattcatacttttaattagctttgactcgtgagagactccaaatattggtgctgatgaatgaaacctttataggtggcggagacggctaagaagctgggaataatggtaatcgcagacgaagtttattgccaaacaatcttcggagataatccttttgttccaatgggggagttttcttcgataactccggttatcactttgggcggtatatcgaaaggatggattgttcctggttggagaattggctggatcgctttgaatgaccccaaaggaattttcaagtccacaggggtctgttttccttttaccgatcatcatactaacttctgtttttgtagcttgtgttacaagtaatcactctgttttttcctttttccttgtaacagatggtacagtccattcaacagaaccttgacataactccagatgctacaactattgttcaagctgcacttcctgagattttagggaaagcgaataaagagttgtttgcgaagaagaattcgatgctgaaacaaaacgtggaattggtctgtgataggctcaaggagattccttgcttggtctgcaacaagaaacctgagtcatgcacttacttattggtacaaccaccaacatctcttatactcttccgtgattctagatcaatttagatgattcttatttcttaacaaacaacaattaaactgcagacgaagctgaagcttccattgttggaggacatagaagacgacatggatttctgtatgaagctagccaaagaagaaaacctcgtcttactaccaggagtggctttgggattgaagaactggataaggataacaattggagtagaagctcagatgctggaagatgcacttgagaggctcaatggcttctgcaaacgccatctcaagaaaacagaatcttcttttcaagctctgagcaatggcaaaatctaa

SEQ ID NO: 183380 - DNA, 72 bp, Arabidopsis thaliana landsberg
atgggctgcattgatatagccggccactatgtgacgggctttctcgtatgcatcggtagctacctggctcag

SEQ ID NO: 183381 - DNA, 697 bp, Arabidopsis thaliana landsberg
ttggattctgaagactgactatgtggctgattcaaaggaagctgggaaactattacaagaggagccttatgaatggcacagttctggtcttagtgctgatggtgcgataaacctcgagtccccaaagaaatggcggctcgtcagggagaaaacaggacacggtgctttatatggactgcgcattgttgtatacggtgactgcaccatcccttgtttggtaagaaatatatttctcacatctctgccaattttcttagttcttgatttcattggcagagtgaattcgtctcagtacaataaacactagaatgattcttcacgtgtcgcacatccttgtcattttttcttggtttttgatgtctatatttattcttttctccctactcaggatacactaaagcgagctgtgaaagctggggatggtacgatacttgcaacggcgcctccttacacgcgtttcttgaatcaaaacacggatttcgcgttgataagccccgggatgccgcgggatgacgtctggatccaagagtttatacgccacgaaatcccgtgtgtcctctccgattacctggtggagtacgtttgtaaacccggatacgcacttgacaagcatgtgctctacaacacgaactcatgggcagaaaagtcgtttaacaagatgcagcttagagcagatttgtgtgtaccattaacttaa

SEQ ID NO: 183382 - DNA, 267 bp, Arabidopsis thaliana landsberg
atgaaaactaacatcaagttctgcatattctgcgttggactgcgaaacacgcagacttttcgactgtgtacgcggactgttcgaccatgtaggcagacagtctgtatgtgtttgttagggtttgcatggaatacggtggccctggtgcggatttcggtggttcgggtcggaaaacgggaccggtcgccgctggtccggacacttcatgctcatgtgcggacggttcgaccacgcacagatcagtggatttacccccgatctgcatag

SEQ ID NO: 183383 - DNA, 262 bp, Arabidopsis thaliana landsberg
atgacccatcatcaccggagagagtccttctcggttactccctctaccatgggaggttccgtcgtgctttgtcctaataccgaccttctttggccatttgggaagcttgaagggcttgatcgagatgatattcgtgagacggcttatgaaatcttcttcacggcttgccggtcttcaccgggttttggtggtaggactgctctcacgttttactctaaccacaatagccatgaccatcatggagacggaggaggaggaatag

SEQ ID NO: 183384 - DNA, 585 bp, Arabidopsis thaliana landsberg
atgaaactgtgtaacctgaaggttatggcggtggccacggaggacaaggtggtcacgaccatggaggacacaacggaggagggggccacagacagacccggtccataagggccattgaagcaatagatttaggcctcaatatttaatggctttttactttaaatttattttgagtccttttaccataaatatatttttagagccttttaagattttgtttaggcatttagatacaaactaattagtatctctaatagtgaaatttgatttattgtgaaatgttttttcaaaattggacttttcaacattttttggaatttattttgttgtttaagtgtatttttgaaatttgttttgttgttaaagtgtatttttagaggtttaatgtatattttattattatttatgatttttcataatgtataaaaaggactgtttttaagctttgcttaaggtatcaagatatgtttgatcagcactggccacagacttgacgcatatggaggagtggaggacgtggaccatgtggtggtcacggtggtggaggtggctacggaggaggatacggagttggaggacacatga

SEQ ID NO: 183385 - DNA, 12 bp, Arabidopsis thaliana landsberg
atggcggccaag

SEQ ID NO: 183386 - DNA, 374 bp, Arabidopsis thaliana landsberg
atgaaagctcacttttgcagaactgtgctgtcattgccacctattatcaatggtgcacattcagcaattaccttacagacaaagaatgtcttcattgaatgtactgcaactgatttgacgaaggccaagattgttttgaatacaatggtatgttgttaacaaatcaaacctacagtgctaactgatcaatagctaactaatcatttaacgttttccaggttacaaccttctcagaattttgtgccagaaaatttgagattgagcctgttgaagttacatacgacgatggaaagtcatacatctatccggatttagctgtctatgaattggaagttcctctctctttcattacagactcaattggagtctcttaa

SEQ ID NO: 183387 - DNA, 143 bp, Arabidopsis thaliana landsberg
gatctgatcatgcgccagtgataatcgagattctagaagaaatctgcactaagcgtggacaatttcggtatgataaaagatatattcacgccactgattttgcggacgcggttaaaagagcttgggatcgaggacaaacagac

SEQ ID NO: 183388 - DNA, 405 bp, Arabidopsis thaliana landsberg
atgatgtacggtgcctattctacaacaagacgtctggctgtttctcgcatttttcttcgtttcatttggtttggccttgcttccgtcttcatctctttcctctatgtgtatgttaatattcttttcttgtaccttcttcagctttcattttgcatttgctattttccttaatcttggcatagcttttggcattactttgtttgatagtttttttttgtgtgcaggaaatcacttaaagcaccaaattctgattcacctatagttcagctttatttgatcgtcatagccatctatggaggtgttcagttcttttttagtatcctgatgcgtatcccaacttgtcacaacattgctaataaatgtgatcggtggcctgtgattcgattctttaagtggatgcgccag

SEQ ID NO: 183389 - DNA, 1042 bp, Arabidopsis thaliana landsberg
agatttctcttctaaacctttctttgctgcatccttttgaagaggttcgaagtctggacttatcaaactccagattaaacggattggttgatgacgtggaaggtataacatcatgcttttcccaatgtctctttcttacctattatggtctccatttggaaacatttttccctgcaataaaaaaggtttgaattatagattcgtgtaagttgataccgtttagaactatgccatgaagaacaaaattactgaattctgaagtgtctgtacagttttaaattctcataattctatattgacatgtagattagactcagactgtaatggaacttatcatagttattagagttttcgtatactttgttaacaagaatttattttcttgcaggttataaaagcctaaggagattaagaaacctgcagattctgaatttctcttcaaacgaattcaacaacagcatctttccctttcttaatgctgctacatcacttacaactctttctcttcggcgtaacaatatgtatggccctattccccttaaaggtatgtttctccttctagtacacctacttattgctgatgtatcattggttagattgtttgatttttatgtagtatatatacgctacaatttgctgtctctttattttcttatcagtctactattctcttggactccctttcagaacttaaaaacttgacaaacttggaacagctggatctaagtggaaacagaattgatggttccatgcctgtaagaggtatcatttacgtcactggtgactgtccatataaaatatgtctgtttcttttctagagtagaactttaacacatttaaccctctacatagttattgaaattatttatgccatctttaagaacatcatatccatattaattgtagtaggtgcctaatttgcttttggtttctttgttttgtggcagagtttccttacttaaagaagctgaaagctttagatctaagttctaatggaatttatagctcaatggaatggcaaggcaagtttgctcaagtttaa

SEQ ID NO: 183390 - DNA, 169 bp, Arabidopsis thaliana landsberg
agactacagcgaagtgagcgaacaaagaaagggagaagctttagattcagaaagaaccaaaaataaaaacttgagacgatcgaaaaccaaacgatatcatcaaaccataagaggcctccgatggtcgacaaatctcaccttttttacttctcgattgaaacaagtttaa

SEQ ID NO: 183391 - DNA, 64 bp, Arabidopsis thaliana landsberg
gatttcggtgttcggggcccaggcctggcatgtgactgccctagagcagagcgatattgtgaag

SEQ ID NO: 183392 - DNA, 144 bp, Arabidopsis thaliana landsberg
atggcggcaatgcagttaacgagaacggttttcttcgggatctcaaaggctttccctaaaagccgagctcctagaactcttgcggtagcgattggtcggaaaagctctcgtgtcttttctgcatcgtcggttacccattctaag

SEQ ID NO: 183393 - DNA, 553 bp, Arabidopsis thaliana landsberg
atgggagaatacctgactaaacgtatccgagaacagatgctctcgaagatactaacgtttgaagtcaattggttcgatgaggaagagaactcaagtggtgcaatttgctccagactagcgaaagatgctaacgtggtatattttctgccttattaatttgaccttcaatgagaaatatatttaccatttattgatcttgaattgctttgtcatgataggtaaggtcgctcgttggtgaaagaatgtcattgctggtacaaaccatatcaacagttatggtagcttgcacaattggtttggtcatcgcttggagattcaccattgtgatgatttcagtacaaccagtaattattgtctgctattatattcaacgtgttctgctcaagaacatgtcgaaaaaagccatcattgcccaagatgaaagcagtaaactagctgcagaggctgtctccaacatccgaaccatcacaaccttctcatcacaagatcggatcatgaaattactcgagagagttcaagaaggtccacgaagagaaagtgcccgccaatcatg

SEQ ID NO: 183394 - DNA, 137 bp, Arabidopsis thaliana landsberg
atggtaactttcctcaaacaaccagccgggaatattcgacgcttcaatggcccagttgcgtatgagcgtagcattgatctggcgcttgggccgccgccctgtaaacagggccagcatatgcattttatcagtatcag

SEQ ID NO: 183395 - DNA, 155 bp, Arabidopsis thaliana landsberg
atgctaggagcaagaggactgctaggggaagcagattcaccagtgtttgtggtgagattattatcaaaaagcggaacaactgcccaagcaaaagactctcggtaaggcataatgcgagaccagacctgcaacttttgcttttccctctcagttaa

SEQ ID NO: 183396 - DNA, 401 bp, Arabidopsis thaliana landsberg
cggctctacccgatcccgaccgaggaactgcgcgcggagctgtcccgctaccccgcggacgcggagctggtctgggtgcaggaggagccgtccaaccagggtgcctggccgcggatggccctgcgcctgccggaactgctcggcaagccgctgtcggtcgtcgcgctgcccgccagctcggcgcccgcgtacggctcggccaaggtgcacgcggccacgcatcgcgagatcgtcgagacggccatcccggctccagcggaggggtaacggcgatgtacttcacggacgcgggaattgaggaactcgatgaccggcgcggcgacgaggaggtctccctggcctggctcgccgagcgactgcgggacttcgtggacctcaatcccgagttcgagaggcggtag

SEQ ID NO: 183397 - DNA, 198 bp, Arabidopsis thaliana landsberg
attcatgaacaatctggctgtgtcaagttgcggccccatagcggtcccaaccatcttgacgaaccattccggcttgaatcaaacaaacctgtgcgccaatagcattccaagtaacggtccagagcggttccggaacaaccctggtttccacacagtcaatccgtccaacaatttgttctcgtcttcatccgtgggaaa

SEQ ID NO: 183398 - DNA, 71 bp, Arabidopsis thaliana landsberg
atggctttgcgacgcattgtgaccaccaccaacttaggaaaagggctaggggccgtgtttctaagtgggaa

SEQ ID NO: 183399 - DNA, 342 bp, Arabidopsis thaliana landsberg
atgagtaattcattagcagctacaagtggaacttcaaatgtctgtcagagaagaagagttgagagtgtgccgaaattgtgttggtgtggagctagtatctcggccttaatatccaagtcagctacgaatccatacagacgttactatcgttgtgcttatgctgcaggacataaggtaatgtgaatgaaaatttgtttgattataacaaattcatatgctaattaattgatttttaagctgatcgatgataaccacactttcaaataggttgacgaagcaatgattgatgagatcaaaagattggctagaagaacggatgctcttaaacaaacaatgtcctag

SEQ ID NO: 183400 - DNA, 198 bp, Arabidopsis thaliana landsberg
atgcccgagtggatgccggaagatgcactaacgggaagggataagctgcaatactatgaggtaagatttttcatgtgttaaagattaaaatattaaggatttgatgttgttgatatggtacagatgaaagattcaaagttagaagaagagaagggatggcttcatctatacgccgaactcgcattgttctccaaactg

SEQ ID NO: 183401 - DNA, 98 bp, Arabidopsis thaliana landsberg
tgtgtcgttccacgaattatccacaacaggaagtagcttttagtacgaaagagcagccaagtgaattaacccggctcaaaccggtcgtcgagtgttga

SEQ ID NO: 183402 - DNA, 510 bp, Arabidopsis thaliana landsberg
atgctggcatatacctcctttcccgttagagcctttacacccttccaaccgccgttaaatcgccgtcgactggtaccggcgttttccttccccggagatactcaaacccttctgattccccgaagaaaaaatcaggtaactttactcaattttccgttgatttcacattttgagtttctgaaatttgagaactttcgttcaattttgctaatctagaatcttaattggaaaaaaattttggatttttcaggagatggatgtgttaaggttgttaaccagcaaaaacctaaaattgaagtgttaccggttcgctgtaaaccaaattcgaaagctggtctctctacaggacgcagcaaaatcgattacggtactacttcaaaacatcctctgtttttaatttcagttctagacaaaacagacatttgattgagtctattcgtttgttttatagtagctggtggtggatgtctgaagcatgaaaagcctcttctacaagaatggatgtactga

SEQ ID NO: 183403 - DNA, 348 bp, Arabidopsis thaliana landsberg
tttctccagtgtaaaggaagtaaaagttctgaaaaatcaaatggaaaacctttagagttcggccaagtaacgcttttatcctcttctcgatactctgttttgagtgatcatgaggataatggggacaaagaagagacagagcgtgtggaacaggtggaagttttggattccaacgtgggggctctgaagaactcggcaccggagacggagaaaacaggggcgctgagagtcaatcttcctcgttcctcgaagagctcccataaagttctgtcggagacttttactcaaaaagcaagagacaatgtctcaagaaattcgagcagaagaaactccaaaaaacttcattaa

SEQ ID NO: 183404 - DNA, 204 bp, Arabidopsis thaliana landsberg
tgttcgatcaaaagatcgacggtcatgatgatgagcaatctaaaactcggcgtggacgtgatcggagcacacaatctcttcccaaaagatgggcaaggaacatcgaacgcttacgttgagctttacttccgatggtcaaaagcaccgagcaacgatccaagatcgagacttaaacccggtttggaacgagaatttcttctttaa

SEQ ID NO: 183405 - DNA, 4 bp, Arabidopsis thaliana landsberg
atgg

SEQ ID NO: 183406 - DNA, 301 bp, Arabidopsis thaliana landsberg
atggctttcaatccatacggtggtgagatggggaggatatcatctacggtgactccgttcccatacagagccggtaatctctggaagattcagtacggtgcgaattggagagatgagactttaaccgaccggtacatggaattgacgaggaagttgtaccaattcatgacaccatttgtttccaagaatccgagacaatcgtttttcaattaccgtgatgttgatttgggtattaattctcataatggtaaaatcagtagttatgtggaaggtaaacgttacgggaagaagtatttcgcag

SEQ ID NO: 183407 - DNA, 320 bp, Arabidopsis thaliana landsberg
tttgacgtattttactattactatccaagccgattggatgaagtcctttttgtagatgctccattcatatttcaaccaatttggcaattcactaaaccgttggtgaagcaatacgcttctctggtaacttccataccatattgctatgtttttatgcatcgattctaattgctatatactacatagtgtggttattcagaggactggactagatggatttatatactttgctttatgtgaaggtcaagttttgctcagcagagaccgtcagaaaggagtactttactgaagaaacattaccatcaaatttccggagctaa

SEQ ID NO: 183408 - DNA, 531 bp, Arabidopsis thaliana landsberg
atgtgctctgacactggaaagagtatgatggaggccatcgaagcaaaggaggcagagcccgtgctgatcgctggaaaagaactttttcccagatctttccttatgggcataaacatcatgggtgagaatctgagtgagccagccttaagtaggacctggtactggtctccaatagaaggtcttaagcctgagggagcaattaggaagacgaatgacttcataaggtaggagattgcaaggatgaacatccatcttgaaaccggtatcaactctaccttgaggcgcaagaaaggtattgtcattggggtggcaagggctgtatccactaaaatgtatcgcatagtccccggaaacctcacagctgaagagatggacactgcaaaactggtggtgggagatgatgggaagaccatagtgatcaaattcgacgtggactctgttaagttgttgctactcttagctcagattcacacaaggaaaagtataaacccaaacttagagaattacgatcgaaagagagattcaaattga

SEQ ID NO: 183409 - DNA, 856 bp, Arabidopsis thaliana landsberg
atggatatagtagaaacaagaaagagagtgggaaagaaggaaaaagaaaaatttgtattctccagtgagggtgagtgaaatatataaatgacttaatgtaacttttccagttgatttagtggactgactcttaaaagaagactatattacatgttttggtcctccacttgagctaatgaattaaattttagatgacacaaattctatcgcgtttaaatccgatggtgacatcggtacttacaaactatactacaaattttgtggtcaaataacataccatgtccctaatttagatttttagctattaaataactttgtgtttaacatttttagtcaccagtgttttcagtatatatagattattcggtgactagttcatatatgattaggaaatttagagtaatgaaactaaccagtacagtactaatctctaaataatctaaaacaaaaactaaccgttactacactagctaaaactttatggaaaagatgacacaaaggtgacaacaaacgcagaaagcctttggttatgggagttgcttctggtggctcagtctttcttactatccacatttgccgtcagcctgcagattatattgaaaattttaacaaactatatcgaaatttacataacgacttcaaattcaaaacaggtaaagaaaacgaccttgcacgctgcaaagttatcgcaaccgcatatcaaattgccattcgcaacatcaaccgcttgcggagctcctccaccatcgcttctctgaactcacacacacacacacaaaaattcaataagacaagatccagacaatcttcaaaaactagaaatatagatgtaccttgtagaaatcgactgctatga

SEQ ID NO: 183410 - DNA, 119 bp, Arabidopsis thaliana landsberg
gccagggcgagcgggcgagacgctgagaccgcgtgggccgcgcttccctaagccagagcagccgagctcttcgtcgttcgtgattcgttgggccatcgccagcgacgagctgcaaccag

SEQ ID NO: 183411 - DNA, 363 bp, Arabidopsis thaliana landsberg
atgtcgcgaactcgtccgggggcaggtgcgattctggccgggcatcaattctttttggcagcagctttcgcgctctgtttcgcaggcgcttgcgcgctgactttcttcgtttgtggagcagctgcagcgttcgatgattgcgactgcttggcagcttctgctttcggcttgctgccagacgacgaactggaatcagcagccttggaattcttagaagaagttgctgtttgcgacgccggctttgcgccagatttgtttgtcgattctgaagaagggcttgcgctgggattcccaacgccagatccagatgcaggcttagcattcgactctgtcttacaatacgaggttgatgtaactgtttga

SEQ ID NO: 183412 - DNA, 154 bp, Arabidopsis thaliana landsberg
atctatgcgggtcgcaataattactcctctcaagcagtgcaccagcggcatcgaaatcatctatgctgttaacacgctacaggcttcggcttccacaatggctttcaactatgaccatgtcgtacagagcgcctttggtcaccttgaagcatga

SEQ ID NO: 183413 - DNA, 362 bp, Arabidopsis thaliana landsberg
  unsure (1)..(362): unsure at all n locations
ggtccagttgtggaagagattctagcgacgtacaccacacccaccgaaattgaccttgtacacatcctcgtgacgggagagtcagctggtggactgctgatcatcaattctgccctccagcttgcgaattcagattttgaaggatttcccgtgcgcgctgccattggcatgtacccaactgtagacnnnnnnnnnnnnnnnnnnnnnnnnnnnnnnnnnnnnnnnnnnnnnnngcagcatttcgacgaatccatcatcagcgcgattctatacaccgattcagacgggcctatcacttcaacatgcggagattacctccctctgatgctggccgcgatcgaatactggtacctgggggattg

SEQ ID NO: 183414 - DNA, 1087 bp, Arabidopsis thaliana landsberg
  unsure (1)..(1087): unsure at all n locations
atgaagaagaagaagaagcaaattgctggtgaatatgacgaggacaaggatgaggaggatgtttgggaagatgtgtcggtcgtggatgcggtgtctaaattaatctctcccttaaactcaaggtttaacaccgttgatacaagcatcaaagaaatgtcctcccgtatggaggtgattggagatcaagtggaagcgaggattgatgcaaagtttgaaagtaggtttgaatctattgagaatgagttcaaacagatgaaagagcatctgaagaccattggagtaggccttactgactaaaatgcccaagcttactcaaaattattctctaaagtgaaaattagagatatgtttttaacagttgatcaacaagaaatgccgaaacccaaaaatcaactaacaccaaaaggtccaaagaaacctccaaataactactatgttactagtcctcctcaagtaagctaaccgttgagttatcaatacgctatttacttacgattgagttataattatgttatggctgagttatcgttatgttattaagttacgaccgagttataattatgttatacggctgggttgtctttaccttgtttacttttggctgagttagaactttttatttacttatggttgagttatcgttatgttatacggctgagttgtctttatcttacttactttcggctgagttattattatcttatttagttacaactgagttatcattatacatatgacttagttatcgttattttatgcttgagttatctttacgtttatgcagtcaaaggaagttgtagatttggtggtagagaaggatgtggggtcagtaggaatcttgatggcgaatttgttaagaccactgatgtaaaccaagctgatattgatttcannnnnnnnnnnnnnnnnnnnnnnnnnnnnnnnnnnnnnnnnntggcgaggagaaattctaaagcgaaggcagattcaaagaaagaaagctgtcgttaaagagaaaaccgtaaatgagccaaccgtcaaagagccagccgccaaaaagaaaagaggaagaaaggcagcggcgcttcctcctgctccactcacaaag

SEQ ID NO: 183415 - DNA, 62 bp, Arabidopsis thaliana landsberg
atgaagaggaatgggaagccgaaatctaaactgaaacagaggcgtcacccaattatcaattg

SEQ ID NO: 183416 - DNA, 281 bp, Arabidopsis thaliana landsberg
atctccctgatttacccaattcacctcctgaatcatcttctccatttctcgcccacacgatccgacggctcagtaagtacagaatcaccactgctcccgtggccgttaccattacacccgccgccatctccgatcctcttcctctttattcagaaatcgattcaaaaatccaatttcactcctcagccgaatctagaaaacgtaacacgattcagcgattcgaaagcaaggacgaagatgtcttcacgaatttcgaaactaatcatcagagatcctcataa

SEQ ID NO: 183417 - DNA, 366 bp, Arabidopsis thaliana landsberg
atgctgtacgggattggtttgacagaacacgatttacaaaaagcacaggtgggcatcgccagcacaggctacgatggcaacacctgtaacatgcacctcaataaactcgcacaggaagtaaaaacttccgtttggaacaatgaactggtcggcctcatcttcaacacgatcggtgttagcgatgggatgagtaacggaaccgaaggaatgcgctattcactcgtgagccgcgaaatcattgccgactctattgaagctgtatgtggcgcgcaatattatgatggactcattgcagttgtaggttgtgacaagaacatgcctggcgcattgatggccatgggaagactcaatcgtccatcgatcatg

SEQ ID NO: 183418 - DNA, 178 bp, Arabidopsis thaliana landsberg
ccgcaacgacttgcgtttgccgcagcgtttggccgcaacgacgtgcgtccatcaaacgaacaacacctcttgcgtctgccgctgccgcaatgacatgcggccactaaacgaacacgctagttgtaacagaacaactgaaatactaaaatttaatatccatttaaattggaacagatag

SEQ ID NO: 183419 - DNA, 288 bp, Arabidopsis thaliana landsberg
atgcaggtcttggctagcaaaacgaaaattaatatggtaatggaacttgttaccggaggagaattgttcgacagaattgtaagactcttactagcctctatgctcaaagcaaaaaagttttttttctttttttgacgagtgtcatttttgctaaactcacactttgatgataactctcaggtttccaacggaaaattaacagaaactgatggaagaaaaatgtttcagcagcttatcgatggaatcagctactgtcatagcaaaggtgttttccacagggatctcaag

SEQ ID NO: 183420 - DNA, 155 bp, Arabidopsis thaliana landsberg
atggaccaaaagtcctcctatactcatgaagtagaggtccaagtactagtaaatggagttagtggccgccaaaagagcagcaccgagcccagacacgtctttggtatgtttgatcgcaacgtgacttgcaagcttatggccaagaagctcgacta

SEQ ID NO: 183421 - DNA, 395 bp, Arabidopsis thaliana landsberg
atgagcagcagccgcaagcctccaatcgctgccatgctccgaggagttaccagcgcggccagtgacaagatttttccgccgagggtctgtgtcgctgtttgggctgcaccctcttttcccctggtttttttttttttttttttttttttttttttttttggactggcgtattccaactccctcactacgtagtctcagtaacaataactcaaatcttttcaatgttcaaccgctccgtgtggccgttccagctggataccacgttggctacattgaaactggagcttcgctcggcccttttgtgcgatgcgccttctgccagtctttgtcgtttcaacctgggacatcgagtcacttattatcgccagcttgccaagagcactatgttagttgaa

SEQ ID NO: 183422 - DNA, 182 bp, Arabidopsis thaliana landsberg
atgaagagaggacacaaacagacctcactatctcgacactacgacttcttcactgtgaagccaattacctctcgatggtacggttgaaatactaaaaagactgccggtgaaatctctttcgaaggtcctatgcatttcgaagctatggtcatcaattattagtagacgtagagacatcatag

SEQ ID NO: 183423 - DNA, 201 bp, Arabidopsis thaliana landsberg
tcaccgtacttggacgaagatgcgattagggagttgggaaacggtcttgaggagataattgctgccccaccggagagcgacgagattgtcccggagatcagccggagacatgtaacttccgaagtcgatagcgctccacgcaagcatcgtagtcgtaaaagccatcggaaaatggaatttaatgttgtctccggcgtcgta

SEQ ID NO: 183424 - DNA, 274 bp, Arabidopsis thaliana landsberg
aagtgctcttgaaatcttagaaatagaaacaagaggatcaactggtccagaatcacaaggtcctactccagatgattcagtggttagtagtatttgtatatttttctttgatacgaatctaatatcaaggtcaaggatggttatagtcttatagaccttggtcttattgtcctcaatattgcaggtgaggatggatcatatggctgctgcattatctaagacttttaaatctcctgtagttgagacaattcagtctcttcctcaacaccaacaa

SEQ ID NO: 183425 - DNA, 238 bp, Arabidopsis thaliana landsberg
atgaaggagctaaacatggacgctttccgattttcaatctggtggtctagattaatacccagtaagtttttttactctctctctctttttgttgattttttttttttattaacacttatttatacgaattcgttatgtggtgaatttttaattactataggtggaaagctaaaggatggagtaaacaaagaaggtgtacaattctacaaggatctcatagacgaacttcttgctaatg

SEQ ID NO: 183426 - DNA, 198 bp, Arabidopsis thaliana landsberg
atgatgaaagagatattcatggatatggtgtattttccagaggctggtggtttaaaagagtttccttcaccagaagatgtcaagtacaaaattgtaatatctacaaagcctcctaaaggtagcttaagaaaggacaaggattctgagtcagatgcatcaggaaaggcgtcatcacctgtcccagcagacgatgagaag

SEQ ID NO: 183427 - DNA, 820 bp, Arabidopsis thaliana landsberg
atggtggctcccgtgatcaatccatatgagccaagcatggttaaagaagaggtggtaaaaacatgggagcaatggctaacaaagaggaaattcatgtactttttagctcggcggtttccaattcttctacctttcttctaccgtagatcttttctctctggtaacctcgatcagctcaatcagtggatggcattgtcattaggagaaaaggtactaaatctcctccattgtagatcacaaacacaaagagaggaattctctaggagaaggagtcatcatatctgctaactctgttttcatctttcaggataaacttttaatccaagatccaacgttccaagaagtttaccaaaggaacgtggaggaatcagtccgccaaggaatcacaaaaccgtttgtagaagaagcggtgcttcaagtatcgaattggggctttactctttcggaattccgctcacagaagaaatgtgcaaccaacggtgtcctttcttggctcatgtcaatgtacagtgaagctgaatgtgaactaatcggatttcgaaaacccattcacatatggcaggtgagttctgcaccatacaatgcatcagttagtttatttagcaaagttaatcaaaccttgatttctgtttctttaaagggaatggaggatcgagtggctccaccatcaatgagtgactacattagcagaatgattcctgaagcaactgtacataagattccaaacgaaggtcacttctcgttcttctatttctgcgatgagtgccatagacagatcttctatgctttgtttggagaacccaaaggccagcttgaaaga

SEQ ID NO: 183428 - DNA, 2078 bp, Arabidopsis thaliana landsberg
ggttatctagcgcaggttctctctttccaatataagcactcagtggttgcaatcgattcttcctctcatcatggaaaggtaacagatgcacgcgcagcacgcataaaaaagcattttgcagcacagatgcgtaaatctgggtaaggggttagctcattataagtttatttcaaacctttaccaagtatcagatgtctctttccatttttagcttgaagagtcgctcattgttttcctaattctttgtgcacagttctggtattttagacttgtgaatgctacttaacctcttctctgttagttcaggaaacaagtgcccagatgttccaatgacgattacatgccgtgttttatccacagaaatgttgaaggccttgactgattgtcatctggagaaggatgagacggattctagtggaagtgcattgaatgaagaaggtcaaagcagatcacaatcatcaagtgatgcaaacagatcgtgttcacttgttcttgctggccttcatgcatgtggagatctatcagttacaatgctaaggttagttaaaatgtttgctgcaattattcatttgcgatatctgttatcttctgaatacagtattggtcctgattgctgtgttagcccgtgaaagctgaaccaatatgcaacttgatttcgtcaggacttttttggagtgtgaagaagttaaagcattagtgagcattggctgttgttacaacttattatctgaaaaaagtagtgaggattcttgttccaaatgtggctatccgatgagcgctggtctcagatccttgggcttttcccttggcaaaaatgcccgtgatttagcttgtcaggtatagtccactattgtatctgttttggatgttgcaacattgttgttttgagtcattttgtttcttctctgtgacccatttgtgtaaagaaattacatgtgttttcttagagtgctgagagatggagcagtttaggagaagatgctggtctgcagaatttcgagttgcattcttttcgtgctgctttccaaatggtaatatggtttttggttatgtggtttcttccaagatctgtgactagttgttaatagaatcttaacttatagtgattgtctttaagaagtaaaaacctaattaccctttgaaggttctgtcaaaacattatccagaggttttggcgacaagtccatccattgggcgccaaggtaaggcattccgtcgtcaacagcaacgaaaatcccttgaaactccagcagcagtagatacaactaggaaaggtcaggagtttgatagactaaattctattataagtgagaccaagatcactttgctaatatctatagttcactgtagacacggtggacaagaaacccatgaggcagacaagcttgaattccgacatgtgttcttcttttgagaagttctgcttgtcagcattttcccgcttgaatctagaacaccctcgagatctcgacctgaatgccacatggaatgaagctgatgcattcactgtaagctattcctcaatgctctcgctttctcttcggtctcagattctcataacttgatggatgtttgtctttggtattgtcaaactcaaaaaaaatgcaggaactgatagggccttactggtctattcgagccgcattaggaccagtgcttgagacattgatcttgcttgatagacttatgttcctccaagaacaaggagactccataaaagtggttatgcttcccatctttgatcccaccatctcacctaggaatgtggccattattgctagaagactttgaccctaaagcttataagccctcttttgatccttcttaaaaatttcctcttttgatccttcttaaaaatttgggtaatgtgtgaaatgtgtttctgttggaactgacgttgaaagttttatgcattgggtttcatttatcaaactacattttgcagtgaagagaactcatctaaagagtagtataagattaagcactctgcttttaccgttacccatatttcgtagtgtgaacagagtaccatttcttccttgtcgttcgtgacgaacaagtacaacaataaaatgtga

SEQ ID NO: 183429 - DNA, 125 bp, Arabidopsis thaliana landsberg
atgatcagtaccaggccggaggcagcagcggcaggaggataggtggtcaaagtttggatgcagaaggctttgtttttgactctctggcaattggaatcgatgaattccctgttgaccaaggctga

SEQ ID NO: 183430 - DNA, 413 bp, Arabidopsis thaliana landsberg
atgaaggttagatctgagaatgaacttgaagttgaggataagcttgtatccaaagatgatttagagccaagaaattcaacaaagcagtaggaggattggttaatcatatttggaaacaatcaaatcacttggaaaattatggagaaggtcttattaaaagttccatgaacaccacatatttgacaacgaccttgatatcctttaccttaagagccacgattgttggagcgggaatgttgtgtttgattctgctgtcactggttgttgttattaccacgagcagaggagcgattgttacagttgttgttgttattgtaggagactacgttagcggtaaccggagtagaggaacaagggatcatcgcttgaagtttaagctcataattaatgagcttctcgtgtatcatagttaa

SEQ ID NO: 183431 - DNA, 172 bp, Arabidopsis thaliana landsberg
tttgaaatcttaaccaaccttcagaaagatcagagattggtacagatagagagcttgcctcgattaaggcttgcacctccggctgtgtaccatgaaaaagtgagcaggctctcgggttttaccccgggagagagtagcggtaaagacacaaaacctgtaaaaaccggacagg

SEQ ID NO: 183432 - DNA, 304 bp, Arabidopsis thaliana landsberg
atgatatttggtaggacaccgtttaaaggcgataacaacgagaagacgttagtaaacattctgaaagcacccttgacattcccaaaggttatagtgaatagccccaaagagtacgaagatatggtgaatgctcaagatcttattataaaattactggtgaagaaccctaagaagaggttagggagtctcaaaggctctattgagatcaaaagacatgagttttttgaaggtgttaactgggcactaatcaggtcaataaacccaccttcggttcctaaagaagaggctagtcacaagacaaaag

SEQ ID NO: 183433 - DNA, 200 bp, Arabidopsis thaliana landsberg
atgaagtgtaaagatgaacaaggactgaaagtgatgccggttttctacaaagtggatccatctgatataagaaaacagaccggaaagtttggaatgagttttttggaaacttgttgtggtaagacggaggagcgacaacataactggaggcgggcgttgactgatgctgccaatattcttggagatcatcctcaagattg

SEQ ID NO: 183434 - DNA, 491 bp, Arabidopsis thaliana landsberg
  unsure (1)..(491): unsure at all n locations
atgccaattgcagggtttcgtgcaaaaaatctcctgagcgtcgggcacgccaaggtgctgctcggcatggaggacgcgccgcaaaggcccttgctcgcgcgccgcgtattccagaagggcttgagtgtgcgcgccacggaaaagctggcgcactcagcgaaggccaacgcaggcgtcgccccccgtccgtccacgaaaaccgccgtgcccataaaggatgccgccgcggtcgcgagcattcagcataagctcacgtcgcatctgggcgcgcgcgtggcgttgctgcacactccgaagaagggtcgcatcgtgatcgnnnnnnnnnnnnnnnnnnnnnngcagcgcctgttgaaaaagttgggcgtcgaggcttaatcgggcgcaggcgccgcgacggcaacgagttctccgggtagggcgggatggccgcgcccggcacgaccactcctcccgcgttgctctcgtcgactggcgcaaacagcaaacgcgcc

SEQ ID NO: 183435 - DNA, 924 bp, Arabidopsis thaliana landsberg
ttattttttggtggtgtgccttcttcaaatgtttcgatgcccttgagggagattgaggcgaagttgtttgctcttactgcggtgagcacttttgagctcttttcttccaatcaagttatttcatcttaagtttctgatttcagaacaacccagagaggggtacgatcacattgtatgggttttctactgttagttgttttgtctcttttagtgatccatccattatcacttttttttttggagatttggaaatcatagcttaagtttgacagttttcaggagttttagtttctattgttcatccctgtctttattaatggattctaccatttcaggtttctgaaattattttgcaagagggagaggcctttgattttgcattgatcatgcaattgatttctgcattttccgttaggccgtccagcgagctcaaggggtttatatctgttgtatgtcagttcatacctttgcctcaccaacaattttcttgtactgtaaatgcagtcaatatttgacaataatcaacttttaggtatacagatcactggcagatgttgttggctcctattcaagatggatctctgtttttccaagtaacgccagaccgttgctgtaagtctagtttcttcaatgaccgttcacaataatgcaataatttttttagcatattagcttgaaactgttcatatttatttcttttttctgatgctatttttcaatcttgtgtaaggatgttcaacatcaatttctctgataacataagtgctgcatggtctttctggtttcagattatttctcgcaggagggatttccgatcctatttgttcacatgcttgtgcttctgctctgcgtaaaatttgtgaggatgctcctgctgtaatccaggaaacatcgaatttagatatcttaatgtggataggagag

SEQ ID NO: 183436 - DNA, 273 bp, Arabidopsis thaliana landsberg
atggtgatgcgacatgctcacaatccactatttcagctccattgcatcttagaaaaacatgccacggtgcgagaacatcacacacgaaagctttatatatcgttatagataattgcaaactaaactttcaacttatgaaaataccttgttttaagataccaaatacaggtatatgaaaacaaggtttactgggcaaatgtgtttgttggggaaataactttcatcatgttttcatattttcagcaaattcggagatcgtgtgtttcacattga

SEQ ID NO: 183437 - DNA, 82 bp, Arabidopsis thaliana landsberg
ttgcacgctttctgttgttgagaaattcaaatcgggtgagatccctatagacctcctgcaaaagcctatgccaacactttaa

SEQ ID NO: 183438 - DNA, 1349 bp, Arabidopsis thaliana landsberg
atggttggacatgttgttgtgtctccttcatcgagcgttcagctccggatgcacaatgttcactctagtcaaacaagctgcttctccacaaatcctcgtgtaaaattttcccagaggtttgatctcaatatctcttctttaacatatgaaatggtttagtagtaacaatgtatcactattgtgttaagtcatggtttctattttgtaggagttgcaagatcgtatcaaggaaagcttacaaatttaatgtttctacttccttgaatcttggatcgtcttgttctcagggagattctacttgtaagtgtacttgttttgcttctctggcggattttgatggtgttgctggttctggttgggttcctattggtgaccaagttctcttgacggctagtatatttcttacgtatatggctggagtgattcctgttcaaaaaacctctacctactcttcgggaaagagtacgatcgtggaggagataccagaagttggaacttcaaaatcttctggtaggtaagagtaatcatctgaaaaattccatatgtgaatgatatctctgttccattttagctttaagatatcaataaaataaactgctgtgtatttacacacctcctttcttctatgcattgactttagggagacagattttgagggtgatttgaagtctgtatgggatgtggtgaaagtaaagcttttagattctttagacgccatcaagcgtgagaatacacttggaagcaaagttctcaaacccaaacctccccaagggaagcccccattgagtttgtatgcgatatctgaagggcctcagttgtacttgctctggtcatgttttcagaaacttgaagaagaggtcagcttttaccttctttctcctatagttcactttgcgcttatctgctttcaaattccaatgatttctaattctagttcaggggcatatatcaataaaaagcagaatgtgcactttgagttaaggaattgcattaatgtccgttctagtgtagtagaaacctgccatttaaaaatctttatggtaagaaaatttgattcacattacctgtggcaagaacttactgattcattcgattgttttcttcctctctggtagtaagatctgtttattctctagccttagtagcattcaagacattagttttctttgattcttcatacctgctgataagctattgaatttgctttgcagacaaataagatctctggcacaatcaattcagatgagtggatgggtagttttactcaaattgttcgagaagcatatcaagcagcatgcacggcttggctaaaagaggaactgtatgtggaaaacactgattctgacaat

SEQ ID NO: 183439 - DNA, 397 bp, Arabidopsis thaliana landsberg
atgcatagatcaattaatgtggcaataaacattcaagtggtgcttccaagtgatgatgtagtgagtattctatataaactacatgcaagcatcattatttatttatatttttcttaaaactgtatccagttcaatcaagggaaagaaatgctaatatatatgcaagatctaaatttcaaatatggttggaaatttgatcatgtattggaatattattaaaaactttgaaggtttaaagatagtgtcatccccgttagaaaaatttcaaatctatgcagtttcaggtatatatctttaaaagtcggaaaattctttttctgatttcgttatacaggattctccaagtttatcttcatttattattaatttagatattgaagatgttgcacaaaagtaa

SEQ ID NO: 183440 - DNA, 513 bp, Arabidopsis thaliana landsberg
atgaatacgggttatgagttcaataccttttgccgcatgcggatagcggtcaatgccatatttctccggaagggccagctggaaggatatggacattatgtgaatgaactggtcagccgcctggctgtgcagcatcccgaacatgaatttatactggtgttcgacaggccctacgacccctcttttgtgtatggcccaaacgtaaccccggtagtggtaaaaccagcggcacgtcatatactcgcattcaaatactggtatgatataaaagcaccggcagcgctgaaacgctataaacccgatgtatggatacaaccctatagcttctgcagcctgcatacgcgcatcccgcaggtactggtactgcacgatctttccttcctgcaccacccttcttttattccctggcagcatcgcctgtattacaggctgtacatgaaaaggtttctgaaaaaagcaaagcatataataaccgtttcagaattttcgaagaacgatatcccgcagcactaa

SEQ ID NO: 183441 - DNA, 134 bp, Arabidopsis thaliana landsberg
gtattctatgcagtcggaaaacaatggagatgaggagacattttggagaaagagctaaggaaaaggaagctaagtacgatttcagttctagattcagagagagtatcaatcaacacactactggtgtcgattga

SEQ ID NO: 183442 - DNA, 162 bp, Arabidopsis thaliana landsberg
ctccttcatcaacataaagacaaccgctttcgtataaagccttttgaaaacactctgacagaactattgtggcttatatctatgcagaccattcgcaaacacccaatgactgtttatggtgatggaaaacagactcgtagctttcaatatgtttctgacttg

SEQ ID NO: 183443 - DNA, 382 bp, Arabidopsis thaliana landsberg
atgttcgcgtccgagatcgtctttatcctgatcggcagcatcggtatcgtgcgcgcggggccaatcaccacgctcgcggctctctggctcgtccgtccgtccgtggacgggacgcgtggtagaatgcatgcgcattaacgcacatcgtatgaatacctcgcttcccgaaaccttagtcatcgcgagccgcccggtccgctatgcggccacggccgcactcggcgtcctcgcgctcttccttctcgtcctcacctggcacgcggccttcggccgacacgagggcgatccgctcagcaccatcacggtggagggcgagggcacctcggccgcagcgcctgacatcgcgcagatcacctataccgtgatcgaatcggcgtccacg

SEQ ID NO: 183444 - DNA, 173 bp, Arabidopsis thaliana landsberg
gacccatcaatattgtaggcccattaattaaaacaaaacccaatttagacagagttcaaccatatctttcactctctttggaatcgtttggacgaagctcagatatttttactcttgcaattcagagatttcgaaaccctaatccgatttcgcgatctaaccagctctgctga

SEQ ID NO: 183445 - DNA, 924 bp, Arabidopsis thaliana landsberg
atggatgtggaggagagaatctcaacgaagaagaagatagatttggaaggattatcagtaatctgcagcgatctgggtcttcccgaggaagacgaagacagaagaagaattgggtactcgaaaagcgagtactgtctcgacaatttgaaagatttactgagatttctgagacgcgacgatcctgagagcagagaagttttcaaacaagtctgtgcgtggaatatagtctctaaagatttgattccgatcattgagcattaccaagatgaacataacttagttttaaatgcaggtactgagtttgctctgttgcccttaaataaaagtgtgatactttgtaatttttctgatgagattgtgatctgtttttgttcagttaaagtgttggtgtttcttacaatgcctatagagccttcttcagatgatattcctcagcagttagagtatctatggggattgaaatctgcaattacttttagtaatattgttgcagtgattgtgtctttgcttgaagctcctcttgagaacttagaattgtaagttcgaaactcattgttgtgttaagtaatgcaaaacgtttttttctttcttactgatattatttatgctttacagagatgtattcaatgaggaagattggaaattggttcagcttgtgcttactttattcaggaatttacttgctattcatgatgtatctccgattcagaaagctggagagtctacttgttactttttgtcgttgagggatcagtttctcgaagttctgtctcgtgagaatgtgatggatatagttcttgtgataactcagactattgagggtttcaatagttggttgaggcatgacaacttacttctgcttgagatttatcattatattctcttgggtcaagacatggagcctcgtgcaaggctcctgagagg

SEQ ID NO: 183446 - DNA, 300 bp, Arabidopsis thaliana landsberg
atgatggtatgtacacatgttacactatgacctaacttatctccacgtcattacgttactagtcttcttcagtctagtgcatttcttattttcttttattttttggcatacaaaaagacatcccaagtcgaaaatgttcatcgctgaatatcaaacatcaattttcgtatttattgctcactgatgattttacatcgactatggttttaatcatgatcatctaaaggaaacgggtttactcgagcataaaatttggtcatctctccttaggatcctagatctcgatcgatcgtggaatag

SEQ ID NO: 183447 - DNA, 439 bp, Arabidopsis thaliana landsberg
gggtacctgaaatggcttgcgatttctgccagctggtttgtcgttttgtttgcttcagttgcctgtagtattcaagtaggcgggtaagtcggtccttcttttaaaatgtaccattgcgcttattttttgcattcagatcttcagctccatcctggcaaggacctaacaaccgttttatttccagatactttagtggtgtgaccaaaaaatcagatggaactccaatgtttatctacggaattaccactgccgatgaagcaatagaatttgtgatcacatccctgagttttggggtacgtgaatgctgaactttaccttcgtggctacagtgatgatatgtggtcttttcttgtaacctcgtcgccaaaatatgaatttttcagattgcgacaatagtagtggcagtgcctgtaggactttctatagccgttcgcttgaa

SEQ ID NO: 183448 - DNA, 351 bp, Arabidopsis thaliana landsberg
atggcgacggaggaggagaaccgcgcgctggcggacgcgaggatcggccgctctcgctgcagctggacgagcggcttctgctgcgcgcgacggacgcgaggcttacggttacgggcttcaacggcttccgggggctgctgcacgcgctccacaacgcgagctcgctcctcctgctcatcctcgccagcggccagtctcgtgcgcgcagcggccggcgcacgtgcgggcggacgacgccggggccggcttgttggcgtccatcgtgatgctgcagcagcggatggcggaggaggccgctgacgctgagtccgacgggcctggcgcgcccgggatcgggatgtgcgagttcag

SEQ ID NO: 183449 - DNA, 242 bp, Arabidopsis thaliana landsberg
gtggctgacttcgccagccgcactgcgtcgggggccctcacggcagctgtggctgcgaagtcgagagcttcggacacaacatgctgacgccgtccgtgagaagtcggccgccgacagcaagtgtcgcaagctggcggacaaggtggccacgctggagggagagaaggctgacctccggcgccactggcggcgggagaggagggagaccacgaggctcttgttaaggcgcaacgtgcgcaggc

SEQ ID NO: 183450 - DNA, 405 bp, Arabidopsis thaliana landsberg
atggggatgcaagttaactctcaaaagaggattggatcagtccccgggatcaaggttggagataaaattcagttcaaagcagcactcagtgtaatcggtcttcattttggcatcatgagtgggattgactacatgtataaaggaaacaaggaagtagctacaagcattgtttcatcagaaggtaatgattacggggatagattcatcaacgatgtgatgatctattgtggtcaaggaggtaatatgaggagcaaggatcataaagcaatcaaagatcagaagcttgttggtggaaatttggctttagctaatagcattaaggaaaagactccggtgcgagtgatccgtggcgaaagacgattggacaacagaggaaagggatatgtgtatgatggtttatacagg

SEQ ID NO: 183451 - DNA, 129 bp, Arabidopsis thaliana landsberg
tggggatgtaacggtatgcttcttgaagttcttatgagaaactttctcctgcgagctaatctggccgaaaaaaatatggagagtttggtttcatgtgatcttgaagtgaattataataatatgcacaag

SEQ ID NO: 183452 - DNA, 705 bp, Arabidopsis thaliana landsberg
atgaggaattttagatcatcagttcttgtggtgctaagtctgataatagttttgaacgtcgcacgagctagtgctaagagcaaggtaaatttgatagtttttttttatcatacattgaacaaaaaataggttttaaccaacttctggttgttttgtgatgatgataattatataggttcatatagtgtatctgggggagaagcaacatgatgatcctaaatttgtcacagaatctcatcaccagatgttgtcttcatttcttggaaggtacacagctgattcaattccaatgggtcgcattatgtctaaagctcttactgaagagttttattcttgtgtcacagtaaagatgatgcccatgagtcaatggtgtatagttatcgacatggattctcaggctttgcggccaaactcaccaagtcacaagccaagaaaatcgctggtactcttaactcacacccatgtctttagcttcttagcactcaaatactttgatcgtctgagctgaatgttttcattgctgatgcatttttattctgcaaattacagattctcctgaagttatccatgtcataccggatagttactatgaacttgcaacaacgcggatttgggactacttaggtccttctgctgataattcgaagaatctcgtaagtgatacaaacatgggtgatcaaactatcattggtgttattgacacag

SEQ ID NO: 183453 - DNA, 2244 bp, Arabidopsis thaliana landsberg
  unsure (1)..(2244): unsure at all n locations
atgccgggaagcgaacatgaaagcgaccgtggggagttcgtcgaagacaccccagacaggatccagcatgccgccgtcgctccaacaggaggtgagcagggcaaagacgcgacgaacccgatcgaggtcaatcccgtggagaacaaacccacactcaacacaccaacgccgaccgtgggattggagccaggagtacaagggatggaaggacgcccagctctgactccaccagcaaggccagatgatccaggagcattgatgcgtaacattctggcgcaaattcaagctcaggatcgaaagaatgtcgaacggttcgacgttctcactaacgcttacacggacctccaaggtcaaccaccagcttacattcggaaggattcgcaagcgccatgcgccgagcaaataacacaaggccgagcggtctaaatgccgttggacgtggatatcaagaacgatctcaaaacgaggaaatttaggagctgagaagtacaattcaggtgatgtcccagaaacttcatcaggcaaccagctccactcccgagttagagcagatcctggaaaaaaaccagaagacgccttttgccgtgcatattagtaatgtctcagttcggcatgataagaagatcaagttaaaaagttatgaaggtaacacggacccacaacaatttttatcgtctttcagcgtcgccacacaaagagaccatttccatccgagcgaagctgaggtcggcaagtgtcagttattctccgaacatctcacaagggcggccttgaattggtttttcgacctacctgctaattcaataggaagttttctggaactttcaatcgccttcctgaagcattactccatgtacatcgagcgcggcacgacacacgcagacctttggactatggcccaaggcccaaaggaaccgcttcgcaccttcattgacaggttcaaggcagtcgtttctcacatcgtcgtcccggatgaggcggccatctcggcactacgcaacgccgtgtagcatgagtcaccctttcgcgatgatttgttgttaaaccggccggtgtatctagaggaccccctccacaaggcgacgcgctatattgaaatggaagaagaaaagctggccttcagcaagaaacatacttctaacaaacagtcgaaggaaaaagttcaagatgactattgcgaaccccgccaacactacaaccacgagtaccggcaggagaccgaaaggaaggctgcatcgtatctcgtaagcgaggcagacccagttgctcagccagccaatttcgataaggctcggcgaacagatgaagagaatagattggatcaatattgcgatttccacaaacgatctggccattccaccgccgtatgtcggcacttacaaagtatcctactgaacaagtacaagaagggcgacatcgaggttcagcatagacaatacaaaagccataacaatacctacgcggcacgtggaggccgagatggcaataacgtgttccaccgtttaggtccacatactggccgtcagcaagaagcaccaccagctaatgaagaagaacgatatcctgacatggaaccctccaaaaaaaatcgagaaaacgaccaacaacataacgacgcaccagttccccgccgaagggttaacatgattatgggaggttcaaccgcttgcctcgactctttccgatcaatcaaggaatacgttaagtcaggggctgccactttatggtcgtcacctgcaacaaagaagatgaccccnncctaccttcacctcagaagaccttttcggcgtagatctgccacacaatgatccgttggtaatcgagctccacatcggagaaagtgaagtcactcgaatcttaatcgatactggaagttctgtaaacgtcgtattcaaggacgtcttgcaaaaactgaaagtccatgaccgccacattaagccatcggtccgccccttaacaggtttcgacgggaacacaatgatgacaaacggaacaattaaattgccgatctatctgggaggagcggcgacatggcataagtttgtagtcgtggataagccaacaatctacaatataatcctaggcacgccatggatccacgacatgcaggcgattccctcgtcatatcatcagtgcattaaaatcccaacaagcatcggcatcgaaacaatcaggggaaaccaaaacttagctcgtacgtgtttcttaattgaatgtaaacttcgaaaggagctggatttatag

SEQ ID NO: 183454 - DNA, 85 bp, Arabidopsis thaliana landsberg
atgggaacgatcgctaactcttctgctttagactcaaaacgggtaattcccactggtccaaatccactccacaccaggaacgggg

SEQ ID NO: 183455 - DNA, 339 bp, Arabidopsis thaliana landsberg
gatgagtctaacacgcggacgggtgaggatgctgatcatgagagtgaccatcatgagtcaatgggaagggatgaggaggaacatgctggaatgactaaggataaatcagagacggggaggcagaacgtcaagctatacgcagcggaaagcatgttgaatacaaagaaacagacagcatacaataagaataggaataaagcaaagaaagccggacctgatgaggaggatctgatggacggaaattatgatttcaaactggattatatgaagaacaaagatggtgaagacgacaaattccagatggatgctaaaaatcccaaaggctggacttttgcctga

SEQ ID NO: 183456 - DNA, 118 bp, Arabidopsis thaliana landsberg
cttcccgcagcagagctgctttgtacagccagaaactcttatccgaatccgaaaccaaactccaaccagaatcgtctctatcggagatttccgacgaagcccagtaccaaacccatga

SEQ ID NO: 183457 - DNA, 230 bp, Arabidopsis thaliana landsberg
gtgtgatggttacaatgtttttccctcacttcgtcctacatattcctcgcactcctgctatgtttagcaagtttttagtttctcatgtgggtatagtcgatgacgacgatgatagattaatagtcccaatggcctttatgaagaagaacttgagaacaagtagaagaaaggctagagtgtgggaaggaggaagaagaatcaaagtggcaaagtgtctgatcaagaagtag

SEQ ID NO: 183458 - DNA, 67 bp, Arabidopsis thaliana landsberg
gcaaagggtgcagcgctgctacctgctccaagcccggtcccgcagcgtttttggcaccaccggcggg

SEQ ID NO: 183459 - DNA, 780 bp, Arabidopsis thaliana landsberg
atggaacaagaagaagtgaagattatacctctttgggtgatagttaaaaatgttttgccaaagtatttttcatgggaagttctgaaagcaataactagtcctttaggagttcctcagaaactccatcctgatactgaggcttgcaaatcttttgaggaagcaaaagttctagtagaagtggatttgacgaaaaagctacctaagtttttttctttcaaatctgaaagagggggagacacaattgtcgagttcgtatatccgtggttacctccaagatgcacagtttgtgagaaatggggtcaccaaaactcggattgtttgggtggaaaaaagaagaacatggtgttaacaaaagttgtgacagaaaaggaacaaggagaagttcaagttgctgaggaaaaaatagagcaacagggggaacagagaaatgaaggaaaaaatgataatgcaaacgctgtggtaaatctcaatgcaacagagcaaaggggtatgagagaggagatgctggatggaaacaacaaggagtggaatactccgacaaaagttggaagaagcccgattatgaaaaaagatctaaaatatggtgaagtgtccatattgacaaacagtttctcttgcctaagtaatgaaggagaagaggaggaaattccacaagaagagaatttacaagacacacaaatcgaagagttagaggataaaggggcagatatctctataggggagaagaatctaaaaaagagtgacgttgcgattaaaagtgtttctcaagggacagaggga

SEQ ID NO: 183460 - DNA, 581 bp, Arabidopsis thaliana landsberg
atgattaacaaattcaacgcccagaacgacaagaatctgataccaactgatagaaaggcagaagctacgagcggaggacacggcggctccgttttaatagggagaaaacagagtatgaagatgacgattagtggtgatgaaacgatggtgagatgatataaccgagatcgattccaggaatcgatatcgaattgatttgcaagtcctccttgcagggctttaagacaaagctcttttgggtagttaagactacctctttttggtttttctttgatagatttcaaaacaagatggaatgcaataggtgactagtttgccaacacaccctttcataaaacatgatgagaatatctcctcaatgaagaaaatagaaaacttaagatagtagtaaacttgagtaaaaaccaacaccaacggcagttcttgatgggcaaggcaacccacgacgaggcccttcaaaagcttaacggtttgctgcatccacgacgagaatcaggagattcttgatttcgctcatcttgacctcttttctctttctgcaggttcaatcaaggatacaatttcaacaattgacacagtga

SEQ ID NO: 183461 - DNA, 963 bp, Arabidopsis thaliana landsberg
atggaccaaggcgcgacggagacactcccggaaaaaccgtcggaagacgagttctccctcgccctccgcaacggcctcattctctgcaacgtccttaacaaagtcaatcccggttctgttctcaaggtccaatttctaatccttctatattcttctagtctaatgcaatgaactagggtttaatttctactttccgatgagattaagagttttttttgttgttgttgtgattgattcaactttgttttttgttgttgttgtgattaatcttctacaatttcgagtaatttctgaattacttgtgattttgattgttgaataaggtggtggagaatccgattacgccagctattcagtacgcggatggagcggcacaatcggcaattcaatattttgagaatatgaggaactttcttaaagctgtagaggatatgcagcttttaacatttggagcttctgatctcgagaaggttctatttcaatatcacattatgtagttgtttactttatcttttggcatatgcatatgttatgttcgatgaaattccccagagaatgataatatgatgaatgatgcatttcgtaagttgtttaggatatgaaagatttgttttttttggcttttgtttttgcagggaggatcgtcgaacaaagtagtagattgtattttgtgtttgaaaggcttttacgagtggaaacaagcggatggagttggagtatggaggtatggagggactgtgaggatagtatcattcaatccaaaaggcacttctccgccgcagtatgggattggtagtgaaagtactaccgatgagtctgtttctttggatgaatctgagtcttctcagtatgaccagcttttggattttcttcatctttctaatgagatctcagctgaggaatctgaaactgcaatctccttggcttttctttttgatcatttcgcgcttcagcttctacatg

SEQ ID NO: 183462 - DNA, 613 bp, Arabidopsis thaliana landsberg
ggtttacggtggacgcagatttcttattgaaatccaaacttgagaacctgagaaatcccagaaacgagtacgacgagaagcttaaaagcagattctcctcctcctctcttacagcaatattcattaacagtctcaatgaaacactcttcgatgatcaaccacacatgaagatcaaatcatttccgatagctcaatcgtaaaaactagcctattaatctgacagatccagatactattccacagcagaaaacaataacaatctcgttcgattgagcaaacgaacaactacccttttgagatcgatcgaaatcaatacctctcagatccaaacgaaccaatcaataggaaaattcgttgcggagatacaaatgaaaccctaccgctaattcacgaacaggaaccgaaatttctgtggcgatgtatataagacgaagttatcggagaagattcaggaaatttatggggctgacgatgagcgactagaggctcgccgtaaaatacgtagaaataaggaagacgatggttttctcgattcgaaaattcggtcacatgctctgtttactcattggtcgcgcattttcacaggcttgaagaaacagagatacctttttag

SEQ ID NO: 183463 - DNA, 204 bp, Arabidopsis thaliana landsberg
atgacatgccagaaaaagaaagctaggaagagcgtcggaccttcctcctgcgccgtccctccacaccgccggcgcttctccactgtggtcacagcccttctcaaccggaatccgaagctgcagccccttaacctcctattcatcgatttccatggccaaagcatccaaaagagagaattcctatcaacaaggaattcactaaag

SEQ ID NO: 183464 - DNA, 441 bp, Arabidopsis thaliana landsberg
atgtttgtaaaagattttaatcaaactccacaggatgaacgaaaagatcttaatgtaaaagaaacaccaatagacaaaatcaataggtgtttaaatcaagctcttattaatataacaatcagagtcgatgaaactgattcattaatggtaactagaaataattcaagtgagtatagtttggcgcaactttctgatggagaaaggaatgccatatttatagcaattgctatttttacgtcgccaaacggaactaattttttgattgatgaaccagagaggcatttgcatccttcaatttcacattccttagttaagtcacttttgaatgaacgacctgattgttcgttcgttatatctactcatgatttatctttaccatctgcggtacctaaatcccaagttttgcttttgagggattgcatctatgaaaacatgcgtcct

SEQ ID NO: 183465 - DNA, 103 bp, Arabidopsis thaliana landsberg
atgaatcttgcgaaatccgtgtttcgtgtagtcaaaagacatacatgtgaccatctcgtagatgcgtcaattaataccataaaatatcgaaacggcccgcacg

SEQ ID NO: 183466 - DNA, 1539 bp, Arabidopsis thaliana landsberg
gtgtggcaatagctgagttagaattctacacacctcaacatgtagcaagagccgagaaatcatggaaattgattgcagactcgttccaatctgtgttaggatgcaacgttgagatccaaatgaatcttgttatctctgcgtgttctccaccaaagagtgctaaagcagcagcaagtcttttctttggacttttcagttgttctcgtagaatgcttcacaagtcgtatttgactacaagaaccgactctgactgcgcatctgaaaagcctgcagttacaaattctctgagaagttgccaaggaaatgtcttgagggctcgaagtgttcgttcttcagccaatgcatcatcgcgtatgagctgttccagtgatcaaggcgatgcaacttctgctatgtgtactccacacattcctccgggtgaaaaaaggtaaaacatggttcatatttattcatttcaaaagtaagttgttttgtgatttggctagctactcaagtatactctgcctctgactttgtgcaggccagaagatgacactgatgtgttgtgttggaagaagactcccctaggcaaggtaaacatctcgactatgcctaagaattcggtttcagatctctgtctgtacctttttggtgtttctaatttgtgatgatgatacatgtcttatagggtcagagcgagacacagaacagcaagagctcacggcttatcggccgagtccttccctgcagcactgcagctaattaagggagctcgatgagggtaatacccattttgtggaagtggaaccaataggttttagcaaacccattgtttaggacaatgtgacacaaaaatgtatagttgcaaaatgtgtttcaagaccatattttagattagcatatactaatcactcctttaacagacctgaattttactgtctttggacccttttattgactgagctcattatgttttcacaaattatctcattcattaaaacgaatcagaataaagtgaatacattagtcttcaacttttttgttacaaaaagtggataatgtttaattttttcaataaactgatttgaaattagaaacataatttggataaggttttagtaatttgggataagatattgacagagagatatttataaattatctggtttcactattttggtaggaaaactccaaaattaaatccataaccctaatcgatatctctcttggacaggccagcacatgtaacgagcaatcgtgaccgttgagacagtaacacgtggcaacagtccttatgatgagacctttgatgagaatcagcagcctccatttctgtaagctttttgttcctcccaaaattcccaaatccatcttcttctccaaacaatcttctctcaaacattactactattttccaggatagcttacgcagcttcagactcgggttcttcttttcgatctagcctccgtcctctttcttcttaccacggatctcgcctgctctttttccgtacgacggtctgctttgtggatagtttggctgacgacgaggcgatttga

SEQ ID NO: 183467 - DNA, 352 bp, Arabidopsis thaliana landsberg
atggcagttcagaaactcttcccggatgcaaaagtgacgataggtccttggattgataatggtttctactatgattttgatatggagcctttaacagataaagaccttaagaggatcaagaaagagatggtgagtttctgataaagtctttgagggaagaatttaaaagagtattcatggttttctttgtactttatctggtaggatcgtatcattagtcggaatttaccacttttaagagaagaagtatctagagaagaagcgaagaaaaggatcatggcgataaatgagccttataagatggagattttggatggtattaaggaagaacccatcaccgtttatcatatcg

SEQ ID NO: 183468 - DNA, 311 bp, Arabidopsis thaliana landsberg
atgaagaaatttctggtcagtctttcaatcgcaacgtgcagtttgggtgcttgtgctgccacagtgaaatcggacaatcaggcggtcgatcttgctgcaaaagcagttcaaaaataccagctaacaacacttgcagttgaatgcctgtatttcgacaccgaagacgagaagaccaaatacttggttcgtgttcgggaaaaacacaatgcaacatgtggggacgatccagagacctcgcccaccctcttttttattcgggtcaacaagaaagaaggctacctgtcccccaccgccagaaacaccaatgaaaa

SEQ ID NO: 183469 - DNA, 2049 bp, Arabidopsis thaliana landsberg
gttcatgcagagtctagaggggacctggggcctgagccacgatttgattctgtcaatgttatagctctcgtcgtgcagaatgacgatagttttgtagctgaagtatttgtgcttttatttagtccagatagcattgatcagaggtaatataccagatttttttttttttggtttcttagaaatcttgcgcctgacgtattcatgcttttattgttgtctcactacagaaatgttgatggcctatctggatgcaagttgtctgtattccttgaagagaggcaactattcagatattttattgagactttatgtaaatgggatccagatgttcttctgggctgggatatacagggcggatccattggttttctagctgaaagagctgcacagcttggtataagatttctcaataatatatctaggacgccatctccgaccacaacaaacaattcagataataagagaaaacttggtaataatctgctgccagatccgttggtagctaatcctgctcaagtagaagaagtggtaattgaggacgagtggggccgcacacatgctagtggtgttcatgttggaggtagaattgttctcaatgcatggcgtttgattcgcggggaagttaaactcaacatgtacacgattgaagctgtgtcagaggctgttttgaggcagaaggttccatcaatcccctataaggtattgacagaatggttttcaagtggtcctgcgggtgcaagatatagatgcatagaatatgtgattcggcgagcaaatttgaaccttgagataatgagccaacttgacatggtatgtaacatttagaacttgatttatatagtgaattatctgcaagttgttgatcccactaaatcattgtttgcagataaatcgtacgtcagaacttgctcgtgtttttggtatagactttttctcagttctctcccgaggttcacagtacagagtggaatccatgcttttgagattagcacatacacaaaattatcttgctatttctccaggaaaccaacaggttcgttttatctgctacttccaagtgatttacttttaacgtttcttggattataaccagtcgtctggccttattcaatggactggtcatgccttgttttgtcttcatgatagctttcataatcttttcacgcccttcttactcattagtattctcctaactaaatcatgtgatcatgtaggttgcctctcagccagctatggaatgtgtacctcttgtgatggaaccagaatctgccttttacgatgatcctgttattgtgttggattttcaatctctttacccttcaatgattatagcatataatctgtgcttttctacatgtctcggaaaacttgcacatttgaagatgaacacccttggggtcagctcatactctctagacctcgatgttcttcaggatttaaatcagatcctacagaccccaaacagtgtgatgtacgtgccaccagaggtaatgtgcattgtttttcttgagcaaattaaatcttgtatttaaagtcatcataatcaatgcaaacaatgatcttatttcccgaaagcatcattgttttctgcatcgatgagttcttttcttatttagcttaagcatagtagtcaccttctcttctttctataggtgcgtagaggaattttacctaggctgctagaggagattctgtctacaagaataatggtgaaaaaagcaatgaaaaagttgactccttcagaagcagttcttcaccgggtatggttatcttgatcagagtccaaatttttggtttgaagataaaatttgcaattttgatggtatacagtgtcttctttcagatatttaatgcgaggcagcttgctttaaagctgatagcaaatgtgacttatggttatactgctgctggcttcagtggtcgaatgccttgtgcagagctggcagatagtattgtccagtgtggtcgtagcacacttgagaaggctatttcattcgtcaatgccaatgataattggaacgctagagttgcacatgcccacactgatag

SEQ ID NO: 183470 - DNA, 663 bp, Arabidopsis thaliana landsberg
atgtcaaagaatatagcaaacccgactcctaacggacttaacaagcttcatccattcgaattccataaagtgagtgacgtgcctctcacggtacagctcactttctttgaatgtggcttcttagcactcggaataggcctttctcataaactgtgtgatgcactgtctggtctcatcttcgtcaacagttgggcagcttttgctcgtggccagactgatgaaatcattactccttcttttgatctcgccaagatgtttcctccgtgcgacatagaaaacttaaacatggctacaggtatcacgaaggagaacatagtaaccagacgcttcgtgttcttgagatcttctgttgagtctttaagagaaagattcagcggaaacaagaagatccgcgcgacacgtgttgaggtcttatcggtattcatatggagccgtttcatggcttcaacaaaccatgatgataaaaccggaaagatctatacactgattcatccagtgaacttgcgtagacaagcagatccagatataccagagcccatgttcgggaacatcatgcggttctctgttactgtccctatgatgataatcaatgaaaatgatgaagaaaaggcttctcttgtggatcagatgagagaggagattagaaagatagacgcagtttac

SEQ ID NO: 183471 - DNA, 439 bp, Arabidopsis thaliana landsberg
atgtcttcaaaatttaaccataccggtcgtgtcaatccgaccaagaatcgtttctttggtccggtttacaccaacccaaatttctcttatacgctaaaagcctacaatagtgagctggcttgaataccaataacttctttatccacaaaattcaaatcatatattttagtgattagtaatgttacttatacagttaactaatctggtttgagtttctttgtattgactagtgacataattaaactaacaataactgatacgtaatttagagatatgagggaaaaacttcaactcttttgcttcttcttctccactctctgcaatttcttccatttaagataaatttgatatgccaaaccaccaaagaccatcgaaacacatccccattgcttcaacgacaatggatttccgctcattactgatgatacaacaatgctaa

SEQ ID NO: 183472 - DNA, 106 bp, Arabidopsis thaliana landsberg
cgtaagcactaaaaatgggtcttacgcgttgaggaaaacaatgacacgagccccaaaatttctcctccttagaaaagatccaatgatgtatgctttgattcattaa

SEQ ID NO: 183473 - DNA, 282 bp, Arabidopsis thaliana landsberg
atgtcctctaatttccaaaccggagacaaaaccggtgagaagatcgctacaaaaattaccaatctctaacaaaattatttaaattaaaaatctccataaacttatttttccctctctgtaattttggataggtttttaatacggtcaaacgcattttttttacttctactaatcaagcacatttgaccatttccggttttggttcaaaccggaaaacgcacgatttcaatttgactgattcgcacgtgtcgtgtgggaatagcacgtggagaatagcaaaag

SEQ ID NO: 183474 - DNA, 329 bp, Arabidopsis thaliana landsberg
ctaaaaaaaagaatcaactcaatttgggggaaagagaaataaacgattacccagaaacgaaaacaccagtgccgaatcggaaaaacaatccaattgctgcacccaagacatcgaagagttttccggatttgacggcgaaccgttttggctccggtggcttgaaaccaggaggagcagtgaacacaacaacagctccagtgtcgtcactggtcttcgtggagactgaaacagactcggaaggttcagaggaagaagctttgaccataactagggttcgaattgaacttcttcgcgaagaagaagaaagcgatcggagaatcggaggttga

SEQ ID NO: 183475 - DNA, 246 bp, Arabidopsis thaliana landsberg
atgtttgagcttcatgcgcggaatttgatttccgggttgcttaacaaagatccgactaaaagacttgggtcacggcgaggtgcggcggaggttaaagtgcatccttttttcaaaggtctaaactttgcgctcattcgtacgcttactccgccggagattccttcttccgtcgtcaagaagccgatgaaatcggcgacgtttagtggtagaagtagtaacaaaccagcggcgttcgattacttttga

SEQ ID NO: 183476 - DNA, 395 bp, Arabidopsis thaliana landsberg
atgcctattttgcaacctccggagagtgaatatgttgtccacttcaagttccccgaagttgagaaactttctccgccaatcattcagatgacaggtgttgccttcgggtacactaaagagaaacctcttcttcgggacgtggacctggacgtgcaacttgactcccgcattggtatagttggtccgaatggtgctggcaagaccactgtgttgaagcttctcattggccagctgcagcctacgagcggcctgatatctcagaatcctcgattgcgagttgggtactttgcgcaacatcatgttgatgctctggatctaaatgatagcgccgtgggatttatgtccaagcaatacccaggcaaaactgacgaagagtatcgtagacatctcggcgc

SEQ ID NO: 183477 - DNA, 303 bp, Arabidopsis thaliana landsberg
atgaatactcttgggaaatacgtaatacacatagacatagaaaatgctgcagattgctgtatatccgaaagaaatacttgtgcaactgtgtttatactaaacctagataactggcatgcaactgaaatcctttccgctgctgatacctttgagcaggtttacctatctatattatacttgcggattcctgagactttcaagataattttgcgtggtaaggttgtcgaacatcataacgttgctgatgatctcatgcatccgcagtacatcttgtataagcctcaggctgctggatctgaagag

SEQ ID NO: 183478 - DNA, 373 bp, Arabidopsis thaliana landsberg
aaaccaaaagactcaagaagctttgtcctgcctccaagccctccttctcttccaatcatcggtcatcttcaccttctcctctctgtcctaactcacaagtctcttcagaaactctcctccaagtacggacctcttctccttatccgcatcttctatgtacccatcattcttgtctcctcttcctctatggcctacgagatctttaaggcccatgacgtgaacgtctcttctcgcggtattattgctcttgatgagtctctcatgtttggggcttctggcatcttgaacgctccctatggagattactggaagttcatgaagaagctcatggccactaagctactccgaccgcaagtgctggagcggtcacgag

SEQ ID NO: 183479 - DNA, 233 bp, Arabidopsis thaliana landsberg
atggctataattcagcagccaacggtcaccaaagcaacggtcggccgcgcaatccatgggcgacgcgtggcccacgccaacggtcggctagggacactggactgttcggtgtgcaccggacagtgtccgtcggccaaccagcccgaagctgcaacggtcggctgcccaggaatggaaggaaatcgcgcaccggacatgaacagtggctgtccggtggcacaccgaactgtccg

SEQ ID NO: 183480 - DNA, 466 bp, Arabidopsis thaliana landsberg
tcaacaaggtggacattggtgccagatacgaagtggtgcaccggacaattcaggtgttctcgtccccatctgctggcaagctgatgaagcagggcgattatgaggtcgcgggcattattcccttcggcacggcatttccaattgtcaatgaccgcagcatcaaaacggtggaaggactggccggtaaaaagattgcagcctttgactacgacaaggcccaagcggtcatgattcagaaaattggcgcgcaaccggtgtcggccgacatcaccaactttgccgccaagttcaacaacggttctgtggacatgattgccgcacccgcccttgcctacaaaccactggagttgtaccggggcattggcaccaagggcgcgatcaaccgcttcccgattttgattttgacctaccaaatgattgttagcgattccaaatttcctgccggttttgcagagaaatccagaac

SEQ ID NO: 183481 - DNA, 127 bp, Arabidopsis thaliana landsberg
aatcttgtcaaagaaaggagcttccgtgacgggaaaatgcttcaaagtagcgaaggagcataagtcccgcttctacataatcaaacgctgtgttttgatgctcgtttgctggcacaaacattcttga

SEQ ID NO: 183482 - DNA, 38 bp, Arabidopsis thaliana landsberg
ttacacacataacaaacgaccgctacgaacataagtga

SEQ ID NO: 183483 - DNA, 1173 bp, Arabidopsis thaliana landsberg
atgaatacgagtgaagtgatcacaccgcgaggtgggtgcgacgacgagatcaaaggtatccggactgaagagccaagtgggatggaagacagggcccagggagaccgaaatccattcgaatttgaacgtttgaatagttaattcaaagaccaaaacggacacatttaagatggactaattgtgtgtaaatgagaattaaatgtatttctgaagtataaattatggggtagaggccatgtaaagagacacacattttttgtgcaaacctactatacatattttcttacaaaactcatagttttttctataatcattagttcattttctcacacatttgtcctcaagaataatccttctcaataaataaataaatacttgagtatgtgaatccgacttccacattttggcgtcgtctgtggggacggaggatttttgagacgtcagattttctctatatactacatttccgaggtaagcaacaatatccggagaagacgctaccaaagcttcaatagccgaaactctcaaaaccatgcagcaaactatggcggaaatgtcgcagaagttctcgactgtggaaaaactgtcgaaacactacaaacagcccaggtatcgctcagtcaaaatatagcactatacaatcttgtgttcgttctttgaatgcaggcaatgtctcagagtttgaagaactatcttcagttctccaaactcccttgcgcgaaatgcaacaaatgaacaaacaattccggatgatgcaaatgcggaagtccaaccggaagatggagaaacacatccaggagacaaagatcagttcgtgaatcaacacgagcaagaaaatttcaaccagttcgaaaccatgagggaagtaagccttaaattgaaagaaatgaggtcgaaattccatcaggtacaagctcggaaccggatataaaccgggtcatgaaagaagctaggcgaacacctttcgtcctgcaaattgctagcttgagaatcagagattctcgaaagcttaacctagaaccgtacaacggcttggaagatctgaaaggctatctcgtagcttttctaattgcttctagacgggtcgatttgaatgaagccgacgaagatgcaggatactgcaagcttttctctgaaaatctgtgcggacaagcactgatgtggttcacctag

SEQ ID NO: 183484 - DNA, 587 bp, Arabidopsis thaliana landsberg
atggaaacgatagttaataaatggagtcagtttatgtcgcatgacacgtccttcaacttcccacctcagtctcaatatggaacaatctcatatcctccctcgaaggtaaaatttaaactatatatctcaaagaaatacaaaattaaaattggtgaatatgtaaccttttgttttcaaactaatctcttatccattgaattctcctcatataataggttgatatagcgttagagtgtgcaagactacaaaatcgtatgttgccaccagtaccaccactttacgtagaaggtctcacacacaatgaatattttggaaacaatgtagctaacgatacagatgaaatgttgagcaagattatagcattggctcaagcctcacatgagccacgaaacagtctagcctcatgggacggtggttctgcatccgggaacttccatggagactttaactattctggagaaaaagtctcatgcctacaggtgaacgtgaaggctgtagatatgcaagatctccatgtgaattctaagaaagaaagacttgttgaagacttgagatgggtaggagtatcaagcaaggaacttgaaaag

SEQ ID NO: 183485 - DNA, 927 bp, Arabidopsis thaliana landsberg
atgccggggaaggcgaactgttgctgcccagctaggatgcaacattccgccctcttcctcctcgcattcgcggcggggacggcagcgagatctaccggtgcgcttgggagcgggccgctctttggctttgatggcttgttcgtgtcccttgagcgggaccacgaacaagagccttccggtggccgcgttcacccggggccatggctgctgctgcagaggtcactggcgacgctcacggcgttcgcaaccccgcaggcccgaggtcgctcgtacccacggggacggaaccggagttccgtttgtgatggcactttgaatgccagtgtgtttgttcattgtggctgtcggggcctgaacatgtatgtaatttcggcacggagccgtgttttttcctcattttcgagcgctaagtctcgcctgttgattatctgaaccgctttaccaagcatgagtcgccccatgtcaaggtgacgagtgaggtatccgtatcccggaggcgtaggaatccctcggcccgatcggccttgttgtctggggctcctctagcttagttaaagagacccctcggccgcccttcgatgagccgaggttgggggtagcgatatcagtatgaatagaggcggagttggctcgagaatggggaacctggttggccggagcctagccgtgtcgtccgtcagcgggccaacgccaaagtcggttagtcgaggcctcgagaatcgtggcgcccttggaaagcggttggacggaggccccaggggtaaccggttgagccgcctgctcgggccggattcccgggggagcccctggaccgcggcgccgcctgaggctgggtcgggctttgctgaagacgtcgtcgatgccgagggtgctacagctgccttcggcgtgaagacccgagcctgcaggatccgatcatcttgtagc

SEQ ID NO: 183486 - DNA, 229 bp, Arabidopsis thaliana landsberg
atggcgaggtaaggatcttcttcggaggtgggaacaatcgtcgtcattctctgctcgactgagtctctaacgctaatcctaaatccctagcacaagttcgagagagacaaagcaacaaattgaaagccctaatcaacgttttatggtttttctcggttcagaattgaaccggatccggtctaataataaaataacgagggaaagaaacggttttgtgcatcaaaattaa

SEQ ID NO: 183487 - DNA, 981 bp, Arabidopsis thaliana landsberg
atgatccggatgtatcttcgtgctcgaggtcaggtttctggtcccgtgaatgctcctatcgaggtgatcccatccgagagcgaggacgaggaggaggaggaggacagcaacccctggaagcgggtgaagaatgacttcgaggcagaagtcaagaacgaagcatccacttcaaaccctgaactggcgatgaaggaggctgttcctgagcctcttccttaaatgtttgtgagaccctgtcccgggacgcggtccttacaatgtcccccaaactcaaatactttctctctctctttttttattttgtttggacttattatggcttcgacccatttttatttaaggaagctttcctatttctcttgatttcgaaatatttatttcggagctatgctatgaatgcagggcggactggacggcgtgaatgttccgcgaatcactccgacctcaaatgggatcacatccttgaagggctatgaagacccctataaatggtcaccctaatttccctttattttcatctaactcttttctcttcttgcagtcatgtcactcaatctttgatgttggatccatgccaaacttctctagagtcggaatgattgacgaagacattccaaacgtgccggacagaggacgttctccaccttgtggtttcttcagatcccaaatccgcgctccatgtgcgctgatcaaggacctttcagaagagaccatgaaatcgcgatggccttcatcaaagctctcgcggctcaacacgagaagtgttcttcagaaaataagaaactttgaaagaagatcaatcagatgctacgaagggtcactgtgatatcaagggagcttcatacccttaactcccatcccagggattggattgaactcagaatctccgagtttggtcgcatcccggactttatgatgcccattcttgacctcgccggccaaggagttcaagtgttttgcaagacaacaagagtttcctag

SEQ ID NO: 183488 - DNA, 133 bp, Arabidopsis thaliana landsberg
atggtcaggcacttcaaaacgactgtcatcgtctttagccaaagtacgataatacgtggagcagtgcaaaaaagaaggaacctcgtggatactgatgagaaccatgttcaaagtgaaacacgtttgcaaaagg

SEQ ID NO: 183489 - DNA, 83 bp, Arabidopsis thaliana landsberg
tcaacgacatcaataatatttctaaagtggacgaagaactcatcttgcaacaagtgagcactgaacttgaaatcagaaaagat

SEQ ID NO: 183490 - DNA, 1530 bp, Arabidopsis thaliana landsberg
atgcaggatttttcttcaacggtgtcgtatagcccaagcttcagttactacgcttccggtgaattcgccgccgctgcagttaaagtttcccgcgaaaacgaaagctacaatatcagagatcatgagtccgttaaagtcaactccgtcaatgacgaagacgttgacttcgagtttgaaacgtcgccgttacatgaagaaaccttcgtccacttcccgacgttcaaaaccaacgtcgtttccactactaacaagacagacaaagaagccgccgctgaaaaaatatcagagcgtttccccggaaattgtctgtggagtccactcagatctccggctgcttcgaaacactcagaatcatctactagcacaccgaaacggtgccgtttgaagaaatttctaacgagaagtcatagcgatggtggcgttttgccctcaagtgcatcaaaacggtgctatacttttaaggatcttatgcggaggagccacagcgacggcggcggcgacaccagtaagaggagctcgccgaccgtgaaagttaagaacaaaacggtgtcgtataaggtcggggaaggtgacaagagaagaaaatcttatttgccttaccggcaagatttgatcggagttttcgccgtgattagagggttacgtcgttaattgaaactcaattaatttgtatagttttacacaactggacaaaaaattactataatagcaattaggtacttgtttaaatattgtatttataaatatttccatgtaacttttgtttcgtgtattgaagtccaattcaatgcgttgactcaaaggaacgtttgatatttttattttccatttttttttttctcactgagaggaaaagacacataaggaaattagatacttccacgagaaagcgggacctacgtgaagacacgtggaccactaatttctttcttaccttcctctgccgcctcgttttctgctcacagttccaacttcttccatacacacacattctcggaaaaatctctattggatcggtttaatggcgtttcttcaacaaatctccggtttaggagctctcgaacgatcttgtccgtcaattatgatcggatcttcattccggagcggtaatggccgtgtattcgacggaagaggaattgcgtacttgggttcgagggaaaagttcggattcaacagacgaagaagagtcgttcttagagttgttgcgatgtcgtcttcttctactccgttcaaaatgaatttgaatgagtatatggtcactctcgagaagcccctcgggattcgcttcgcactttcagcagatggcaagatcttcgtccacgccatcaaaaaaggggtattctccgatccttagaatgtcatgtttaagtagtagtaatctcaggagttttgaaaagttattaacttttttgtttgtttgtagagcaatgcggagaaggcgagaatcatcatggtaggagatacactcaagaaggctagtgattcttctggtggtactcttgtggaaatcaaggattttggtgataccaa

SEQ ID NO: 183491 - DNA, 534 bp, Arabidopsis thaliana landsberg
atggtcatatcacagtatccggtagcagaaaacgcatttgaattccaggaggccctagtcgaaactctttatggactcaacatttgggaccggctaagatccctaatcgatgtcctcaagttccttaccgatcagagctctaacgtgagcagacctagaaagagccactgaagaccaatgacgaaaaacttggtgtccacataaaacctttactctttacatgcgtcagctaagaaactgatattgcaaagctaattttgaatagtagtgagcattttgggtttgcatgtaagccctcatagacactcgttttttttgctcgcaagggacttgtgaaatatttgaaaatccactttttccttgttataataggaaactgttgtttggtctcacatcgtgcttgagttcatatgggtagatcagctggtgatgaaacttgataatttcggaaacaaggacaatgaatctgaaacaaagagaaatgaatctgagataaagaggagtgcgtatataattggaaacctggattgttga

SEQ ID NO: 183492 - DNA, 180 bp, Arabidopsis thaliana landsberg
gtactagtaaatgattcatattaccgcgaaattctcatattcgacaatggagagaatattgacctttgtgaccaaactaatgaggaagaggatgcttttatgagcatctttgttgtgcaacagtctcattcgcgcaatacacacaacttcttcttcttctttctcgcgaaagactcttaa

SEQ ID NO: 183493 - DNA, 399 bp, Arabidopsis thaliana landsberg
atgtcggattcgcacactcaaatatttaattatttagtgagaaagattattcttgatgactgtgaattgatgaaaaatgcgtatagtaagtttgcacaaaaatgcgtgtgtctttcatggctcttggccctactactaatactcacaaatgatatttaattcttaattacacataattattctttcttaaatgtgtccgttttggctttcaaattgattgcttaaacgttcgtatttgaattgactctgaccttcatgggcctcgccctttaaccgataaagcccaatccgtccttgactttgactttgcccccacttcgcccgtaaaatgccattctaccaggaatctgacgggccttactccttgtgggattactttttatctacgtggcaatcttg

SEQ ID NO: 183494 - DNA, 272 bp, Arabidopsis thaliana landsberg
gttcgcgcggccgcggtccgcccggacgcggcgccgtcgccgccgcgcctggtgcggggaatcaccctgatcgggcgattggccgctcacccggccggaaacgatgatgacagcgatgtcgcctgggtccccggcgtcacttcgtcccgcatgatctgtccgctcagtcaggagtattcgcagatgcgagtcgtcatgtccgccacgccgcagcacgcccacctgctgccgctgctgccggttgcccgaaccaaagagaccgcggcaacgag

SEQ ID NO: 183495 - DNA, 412 bp, Arabidopsis thaliana landsberg
atgattaacgtcactagaattgtagttgtcatcatcactcctagctcagccatccctgggaaatcgaaaaagaaaatcaaaacgggggaagcatatcggatcaccgaagctagacagggaagcatagaaaacaactattaccatatgcatttccaatctcatcgatacttgagattgagcagacgacgaccaggcaaacggcaagcaggaaccagtttaggacaggtatataaatctggcccataaattttcgagaagtgtgaataattttgagacgagggaaacaacccagagctgttgactgtttaatacatgaaaatgttgcagtcgtcattgtgcgactggcaatcagagctgcaatgttggctatgaaaaggactggccagaatgcagagcctacagaacggaatga

SEQ ID NO: 183496 - DNA, 961 bp, Arabidopsis thaliana landsberg
atgaagcagtccccgatgattgctgccattgttactcaaagtgggaaggtaaatgaaaccagagtattattgtctcaagaatctgcgaatatgatcatgatgtatgatctataatatggttaagttttttacttaaaatataatatatcttctcgaagaacgtaaaaagaagggaatcaagtcttattttaactataaattgactatcgttggacacttgtgattatatctcgaccaaagtcctaagctgctttcaaagcagtagcagataaaagaattatcatgattatagaaggagacactcgtccaaagaaatcaggcagagagctaagaagctgcaaatatcacgactgaaagtgcattcgaagaagaggatcacaagttttattgaaaatgtgatccatactgcttaagcctaagaaagataacaaacttttatcaagtggtctaatattgggaaattcatggagagtaacattgcataaaataacttctttaacaataactcatggagaaatcagcatcccaagaagacatcatactctttcagaagctatcaataagcaaatccatgagaaaactaatatgcccctaattgacaagctcctaataatttacaaaagaccaaaactttctagttcaattcgcagtttctgataacccattgacgaagaacagcctacattaaagcagacataagaaacgatacggaattgaaccaataaaacctgaaaatttaccaatttcaaggatggccaacggaagaaaaaagaattaacgataatgaatcgatcaacgactttaccggaagaaagcaaacgagaaactggtgggtttctttgctctcagaggatacaagaacaattttctcacaaaaaaagattcacactgaagagagaaagagacgacaagacaaggacacttttaactttttcttatttcaggacaaatccaacagtag

SEQ ID NO: 183497 - DNA, 125 bp, Arabidopsis thaliana landsberg
atggggttcattgaaacaaccgcccagtccacaccctgggaagaacaagggaaaaactcaaaaggtgaagatgtgattcttctcctacataaaaaaggttacaacttacaaaagacctattcaag

SEQ ID NO: 183498 - DNA, 1930 bp, Arabidopsis thaliana landsberg
atggtgtcaccagagtatgtgaagttccttgttgatattgctaatgagaagatggatgctaataggaagcgaaccgatgggtttagtgtagctttggctagtaatggtttcaagaatccagatgaaaatgatgttgatgaagatgataattacgagaatctagctgcaaatcatgactcaagtatcaacaacggaaacttgtatcctggtaatttttgtaaatccctatgtgattgttgattttttagatagatagcttgaataatgcaatggaattggtcaagttacagtcttcattgtagtgttgaattatagtcttgtttagtttatactagtgtttgagttatgtctacttggtttgcaggataactttcaaattttaaacgtgatagccagtttccgtatctaaatcattggcaggggttcagaaagaacttataccactcgagaaattatccattgttggggaacctgttgagaagcttcacctttggggacactcagcttgtacgatagatgaatcagaccggaaagaggttatcgtgtttggtgggtttggaggttttggtagacatgctcgaagaaacgagtctttgttgctcaatccttcatgtggcaccttaaagttgattgctgtcaatgaatctccatcggcacgacttggccacacagcttcaatggttggcgatttcatgtttgtaattggaggaaggtctgatcccatgaacattttgaatgatgtgtggaggctcgatatatccacgggtgaatggagctcacagaggtgtgttggaagtgaatttcctccaaggtatgagtcatttaatgtgtccatttcttcgacatgtatttgacctatttccagtgattaacttctatgtactgtatattttgttaaatcaacctcaacttctcggagacgccctccgagactagtaatcctgttattgcacattttgcttaatttcttggatttattatatatgtttttgttgcttgttgcattgacatcccttcagataattgttatctcaaattttcttctaaatgcaaattctttgaatttgagcaggcatcgacatgcagcagccagtgttggcacaaaagtatacaaattcggtgggctttacaatgataagatagtttcctctatgcacattttggatacaaaggaccttcagtggaaagaagttgagcaacaaggtcaatggccctgtgcgcgccattcgcatgctatggttgcatatgggtcgcagtcattcatgtttggaggatacaatggggaaaatgtactcaatgatctatacagctttgatgtccaaagctgttcttggaaacttgaagtgatttctggaaaatggcctcatgccaggttttcacactcaatgtttgtttataagcataccattggcataattggaggttgtcctgtctcacaaaattgtcaagagttgactttgctagatctgaagcaccgattgtggaggagtgtgagattggaatttatgaacaaagagttgtttgttagaagtacagccagcgttcttggtgatgatcttatcgtcattgggggtggggctgcttgctatgcttttgggacaaagtttagtgaaccagtgaaaatcaacttggttcaatctgtgactatcagtgaaaatcatcttcctccccaacctgaagatgtttctctagaatcgaataaaaacaatgcagatttgaagactgagacgtctctgtctcaaccatgggtgatacagctagaaagaaagtatgcaaagttcggcaaggacatacttaaaagtttcggatggttagaccttgagagaaaggtttactcaaacgaaaaaggtctttgtatatgctttcctgtgactgaaaacttttctgaacttttccatgagaagcagctattgggcaaggactttgaaag

SEQ ID NO: 183499 - DNA, 1626 bp, Arabidopsis thaliana landsberg
atgcctattccaccagaagaacttaggtgtcccatatctttgcagcttatgtatgatcctgtcatcattgcttctggacagacttatgaacgggtctgtattgagaaatggtttagtgatggacataactcttgtcccaagactcagcagcaactcccacatctttccctgactcccaattactgtgttaaaggtttgattgcgagctggtgtgaacagaatggaatcacagtccctactggaccaccagaatctcttgacctcaattactggagattagccatgtctgactctgaatcccccaattcaaagtcagttgatagtgtaggattgtgcacaccgaaggatatcagagtcgttcctttggaggagagtagtactataaataagaacggcaacaaaaagaaaaaaacaatgctcctgatgaggtggattctgaaatcaatgttctagaggggtatcaggatatattggcaatcttggacaaagaggaggacttagctaaaaagtgcaaagtagtagaaaatgtcaggatattgctaaaggataatgaagaggccaggatcctcatgggagccaatgggttcgtggaagcgtttttgcagtttctagaatcagctgttcatgataacaaagcagccgcacaggaaaccggagctatggctctatttaacttagcagtcaacaataacaggttagttattatcacatccttcctgtccttagcaatgtcactttctgacatcccattcatggtgctcttcatttgcaaaccttgtcataatctcttctgtttcgttcttttggatgcactgcaggaacaaagagctgatgctgacttcaggggtcatcccactgctggagaaaatgatttcttgttcccaatcccaagggccagcaactgcgttatatctaaacctctcttgcctcgagaaagccaagcccgtgattggctcaagtcaagcagttcccgtttttgtgactcttcttcttcaggaaacggaaacccaatgcaagctggacgcccttcatgctctctacaacctctccacctactctcccaatattcccactctcctttcatcaaacataatcaaaagcctccaagtccttgcatcaacaggtaaccacttgtggatagagaagtcattagccgtattactaaatctagcctctagctgggaaggaaaagaagagatgataacaacacaaggaatgatcagtacacttgcaacggtgttagacaccggtgacacagtcgaacaagagcaagcagtttcttgcctagtgatcctatgtacgggaagcgagtcgtgtatccagatggtgctacaagaaggagtgattccgtctctggtgtcgatctcagtgaacggaagtccccgaggaagagacaagtctcagaagcttctgatgctgttcagggaacaaaggcatagagatcagccatcaccaaacaaagaagaagctcccaggaaaaccgtatcggcaccaatggctatacctgcgccagtttcagctccagagtcagaagtaaaacctttgactaaatcaatctccagaagaaagacaatgacaagaccattcagtttcctctggaagaaaagccactcgatccatcattga

SEQ ID NO: 183500 - DNA, 310 bp, Arabidopsis thaliana landsberg
tttgagattaactatctaagaaatgaacatcttgaatctgttgatgtttactatgatgagtccgagttcggtagtatacaagcacttctattcaaaactaatttcagggcatctgaaattatgggatatgacaatggaactaagtatacactagcagtggatcgaaagaagatcattgggtttcacggaacttctgcgtcaggcctcacatctctgggagcatatttcactccaatatttactcatactagacatgaagcgagaggaggaaaagggggcaaggcgtgggatgatggatccgatcatgagg

SEQ ID NO: 183501 - DNA, 455 bp, Arabidopsis thaliana landsberg
atgaaggtaaatcttttttcttcattattttgatgaaatatggattattcatcctgttcctttttcctcatcttatttctgcccgctgttgcaacatgcttttgcttttttgttttttctgtcaaaatgataattgttgcgcaaacatagactagatgcatataagtttgttaagctcttttatgtatgatatgaacaatggttggtctttacttaatataaaaaggaaaagaaaatccaaaaagatttatggaattttcaattgtcacatcaagcaagttctgttcgtaaaacttataaacttttaaccacacatactggtcatacattgatatttccatgttttatctccattttggtaatagagtaaagacactttgatgcagatttgtaacataacaataagctttttgatatcacgttatcaattcaagtggaaaggaggagctgacaag

SEQ ID NO: 183502 - DNA, 246 bp, Arabidopsis thaliana landsberg
attgacgacgatgcacccttcttcttgctgctggacacttccagaagatctccacgactggtcgaggctaagagctttcgatcagacttggtggccggggaaatgacaagagctggcgagttggcagaggcaaagcgctttccgagaccaggtctgcgcagaggatgttgtttggatgatgatgatcgagagaaacgcgctgaggggtactccaaaagtcgctttgaaaaggaagaatgttgcttg

SEQ ID NO: 183503 - DNA, 128 bp, Arabidopsis thaliana landsberg
atgcttggttcttcctcttcttcttcgtctcttcggttaagtttcaacgatagacctggtttaacagcggcttttacagacaatgaaccggactcaaccggttttcaaggggagcgttggatagaacc

SEQ ID NO: 183504 - DNA, 272 bp, Arabidopsis thaliana landsberg
tcattatgaatacgggtctacgttttcaaaagatagtaccgagttctattatgcagtaattattaatgataaaccccagatccggtggacccggtttgttgctaatgcctggacaacacctcaaacagtgatcgctagcgatgcttacgaatacaatgatccgatcctgtcacccgatgagaaacggctgtattttatatctgatcagccacaaaatagaaaaggagaaaagaaagattttgatatctggtatttagagcgtcaaaaagaag

SEQ ID NO: 183505 - DNA, 325 bp, Arabidopsis thaliana landsberg
acttaacgtgatagtgatttaccgtcccaagaaaacagctccccttgtttgttggcgacataagttagagcatgagcagtttgtcaccattttcttggagattccaacgcacaattttcgcaacgaagctgtaacaatagagtacgctgagttagaaaacactcgtttcaatggacaaaattattctagcaatgattctaactcggtgtgggagatgggcgggatattgttgtgctacagtttggaaaatcacaatgttttgtgtgaagatgacaatcgatccaagaacaaccagtataagccacgatattcattcatatcatga

SEQ ID NO: 183506 - DNA, 438 bp, Arabidopsis thaliana landsberg
atgaacatgcgacctaaatatatttctccaactgattggagaaaatttgtgaagctcaaaaccagccaagaatttaaggtatgcatttagtatttgtaagtttatttattatataatacactagaaattaacattcatctaataggttgtaagcaatagctacaaggaaagaaggcgcaatcagattccacatactagtagtcgcaggggaatgcttagacttgccgaagacatggtaacagttgtacacacttatattgttcatattgctcagcctttttccaaagtccaaacacttatgtattaactgagatcatttttttggtttagaaaactgctagtgcagacccatctgaagtgacaaggctaaaggtttgggttaagtcacgtactaagaaggatggtacaccagtgaatacgaatgctgctgaaaagatt

SEQ ID NO: 183507 - DNA, 258 bp, Arabidopsis thaliana landsberg
atgtcaacgctaacacatcataagaaatctgtccgagcaatgaccctccatcctaaagagtatgtgtagtcgtactgaatctacttttgtgtatcgtgctgaatctactttatctttccaatagcgaagtctttgcacctaaacttttcctttatgttatctctttaattttctttttaggaatgcctttgcttctgcatcagctgacaacaccaagaaatttagccttccaaagggagagttctgccacaacatgct

SEQ ID NO: 183508 - DNA, 142 bp, Arabidopsis thaliana landsberg
atgctcctcgttccgctcgcgctccttccccttcctggagcgaagaaggcgtacgggaccgcgctgcgggggaggagggcgccggggcccatcgccaaatccagggtcgaactcgacgccatggctgccgtgctgctgcccg

SEQ ID NO: 183509 - DNA, 87 bp, Arabidopsis thaliana landsberg
cagatttgctctcaaacaaacctgcagaaaccgatagatccacaatcgataaacccgacactcgatcaataggcagtgagcaagaag

SEQ ID NO: 183510 - DNA, 248 bp, Arabidopsis thaliana landsberg
atgggtccagacgatcgatatgtctttctgctgcgagatctgcgacggccccatgacgctggtgtcgtaaccgaccttgaagccgtaggtggagctggtgtaggtgtgcggagcggacagcggctgcacgcgcggtggtgggactcggcagggcgccggacagaccggggtggtggggatgagcagcttgcccacgatcgtcaggacgatgatcagagcgaggaccccggcgaccgatatcagccatg

SEQ ID NO: 183511 - DNA, 212 bp, Arabidopsis thaliana landsberg
tggttctgaaattcaaaatccgaaccgacccaaacttgattgaaatcgaatcgaacccgaaccgaagttttctatttaccctattgggtcatagaatagtatacccgatatacccgtacctgaccggatattacccgaacttgacccgcatacccgaatgtccagccctagctaggactccaaatgataccaaaacgaacaccggaatttag

SEQ ID NO: 183512 - DNA, 273 bp, Arabidopsis thaliana landsberg
atggaatggatccttctaacgtggagaaaaaggcacaaaagttcttgaactggggacagcgtaatcaggaatctctgggtagactgtttgcaaccttttttattaaggtgctatatcgttttacctttaaacccaaacaccgattacaaaacaagctgcagtacatgcttttgtataacgaattagcatttctgtcttgcagttacaatctgtagaattcctttggagacaagggctctgcgtcagtgtgctgaatggtctttggatatctaa

SEQ ID NO: 183513 - DNA, 166 bp, Arabidopsis thaliana landsberg
ggcttgtcctgagaagatcatagagttcaaggagaaaatggcagcaaaaaagaagaaaccgaagccgaaacaaaaacagaaggaaacgagttcaccgaccaaatcttcttctcttgtcgaactcagcctcgaactccaacaccttgatctcaactcaacctctcta

SEQ ID NO: 183514 - DNA, 440 bp, Arabidopsis thaliana landsberg
aagggtacaatagcacaagcatcggacttttaaccggcgataacagcaacaacactacgaagaaagaatacaattgtgagaatatcaagcgagggttaggttccgacgggttaaattatccgtcactgcacaagcaagtgaattctacggaagcgaaagtgtcggaagttttctatagaacagtgacgaatgtcggatacggaccatcgacctacgtggctagggtttgggcaccgaagggtttgagagttgaggttgtgcctaaggttatgagtttcgagaggcctaaagagaagaggaattttaaggttgtgattgatggagtttgggatgagacaatgaaagggattgtgtctgcttctgtggaatgggatgattcgagaggacatcttgtgagaagtccaattctgttgtttcgatcggataacgattaccgttaa

SEQ ID NO: 183515 - DNA, 852 bp, Arabidopsis thaliana landsberg
atgctgctaatcgcatctgctgaaagtactgagggtgtctctccaacaatcaggcgttgctttagccatgaaatacgtatgggttctttgaatgacgaacagagatctgaaatgctgtctcagtccctccaaggcgtttctcaattccttaatgtatgtgagtacaatgctccaaaacttcaagtatttgttttatgatataatttgaactaaattaaattacctctcattgaaatcttagagatactagatccatttattcttccattttcaaactaaagttaacaacttcaggcttgatggatagatattttcacattgtagattagctcagatgaatttatgaaaggattggtgggacagacttctggcttccttccccgggacttgcaagctcttgtagctgatgctggtgccaacttatacatcagtcaagagtccgagaccaagaaaattaactctctgtcagatgatcttcatggagttgatatacaccaggcaagccaaatagataacagcactgagaaattaacagctaaggaagactttaccaaagctttggatcgatcaaagaagagaaatgcatcagcccttggtgctcctaaggtaacattcacagttttcttgctgtggtgttttctcgtttgtttgtctatttatgagacaagtttgcatatttttttgttactggagatgcacataacttaaaggtttatttgtattcgtaggttccaaatgtgaaatgggatgatgttggtgggcttgaggatgtgaagacatcgatattggacacagttcaactacctctcctgcataaagatttattttcgtccggattgcgtaaacgttctg

SEQ ID NO: 183516 - DNA, 623 bp, Arabidopsis thaliana landsberg
  unsure (1)..(623): unsure at all n locations
gtgttgccatcttaaggaaaaagcatgatgaatgtatgctacgagagcttgctaagaggtggaatgcccataaacttttggttagattatttagcagaaggttggtctatttagacgattcctttctttctaaaaaaggccttccatcactgagggaagttggcttgaattgcttccgcgnnnnnnnnnnnnnnnnnnnnnnnnatatataggttctaatttttctctgcttcgaaagtattttctaacggtctgtaactacgtactttaggtttatcgtgaaatgcagtccatggccgcagaagctatattagcacttgtaagtaatgttatctgtattgataaaaaaaaatctcttgttctgcctgatcttttttttcctctcgaaacaatatttgtattgccagattcataaagaacgtgagggtgaacaaattgatagagaacttgtgagaaacgtaatagatgtctttgttgagaatgggatgggaactctaaaaaaatatgaagaggattttgaaaggctcatgcttcaagatactgcttcttactattctagcaaggcatcaaggtggatccaagaggagtcttgtcttgattacacgctaaaggcatatctctag

SEQ ID NO: 183517 - DNA, 217 bp, Arabidopsis thaliana landsberg
atgagagtgcagtataaaaaaaaccacaacgacgccgtacaaacgatcagtatacctttggaaatcaatgaggcaggacttaacacaagacgtctaatgcccttaagattagctgtggcagcttctctttcttcgagacctaaatctaaagatcaagaaaataagcaaaacatggattctattaagaagcaactaggatctagagggaacaaaaaat

SEQ ID NO: 183518 - DNA, 220 bp, Arabidopsis thaliana landsberg
ggccccaactgcgtaccatctaaccgatcattgtaattacctgaccgatacagagcgacgcgcacaccactaccatcctatatactgctgccggatccatagccaaaaacgttgccgctacgccatccttggacatccatatggatcagcacgagtagctttgatctatgtatcaaagagccataagatttcgattacaacataccgcgtgcacaactag

SEQ ID NO: 183519 - DNA, 933 bp, Arabidopsis thaliana landsberg
atgcgagcagctgctgaagatttctgtgaaattgttgagagaaacaagaataggtgaacatgcaggctaatgatttttcgagttgtgtttagataaacttcctggattgattttttagtcatcttaatcccatgattcactttcaggttcactggaggagttgctcattcatttactggtagtgcgtcggaccgcgataagcttctctctttcgataaaatgtaccttggtaaagacttccactttttttctattagagactatgcctgtaggctttaactcgcctaggcgtttgtaggatcagatttggtcagaatatcttgaattactgttctggtcttttgttttgctgatgtgtattctatctgcaggtgtgaacgggtgctcgttgaaaacagctgagaatcttgaggtaatgaaaggaataccagtagagagaatgatgatcgaaaccgactctccatattgtgatatcaagaacacacacgccggaatcaagtttgtaaagtcgacttggccttccaagaaaaaagagaagtatgatcaagagtcccttgtcaaaggccgtaatgagccttgtttagtcaggtgagtgtagcttctagattaaaatcttgtcaaatccataagcatatacagtcttcgaacaattcttaggcaatcattttcttctccaggcaagtccttgaagtggtggctggctacaaaggacttggcgatctaaatcaagttagctcaaccttgtaccacaacacttgcaggcatgttttctctttttcggtttcacataatttcatgacagaaatatgaagaactgttctaacgtaaaacgttgtcttgatggcttgtcaatatttctgcagggtcttcttccctcaggacttagattctgcagcagatgctctgctttccgggcaccacgagaccgactag

SEQ ID NO: 183520 - DNA, 596 bp, Arabidopsis thaliana landsberg
atggtcagaagtaagttatgttattgttccaaaagtaatttatgattctggtttgattgaaattagttgatttgagtcaggattgtgacggtagtcatatgtgatagctctaagctcttgtagcaatcattagtgaagttgaagttggttgtaacttcaacttggtaattactctacggttctgatgtttcttcactttgaatttgtagatttaccgttttctacaagtgaagattttctaaagagagagttttcagcttttggagagatagctgaaggtatgtttgtggtttcatttacttactctgttttgttgctttaaggttcagttttatggcattgatatgttcactcttctacttcaaaacagtgaagcttatcaaagatgaggcaatgcagagatcaaaaggttatgcttttattcaattcacgtctcaagatgatgcttttcttgccatagagaccatggaccgtcgggtaaaagcttctttcaatcacaagtttacattttaatgtcttgaaatcaaccaaaatgtttcccattctgttgcagatgtacaatggaagaatgatttatatagacattgcgaaaaccg

SEQ ID NO: 183521 - DNA, 76 bp, Arabidopsis thaliana landsberg
atgacgacaggcaaaagcaagaagaagaagatggtccttaaggcagtctctgtcgtagacatcggctgtggcaact

SEQ ID NO: 183522 - DNA, 351 bp, Arabidopsis thaliana landsberg
atggactgcttcaacgcagaagatgagcttataaaaaatctcgggtgtatgactcagctcacaagaataagtcttgtcatggttaggagagaacatggaagagacttgtgcgattcactgaataagattaaaagaattcgattcttatctttaacgtcgattgatgaagaggaaccgttagagatagatgacctgatcgcaactgcaagcattgagaagctctttcttgctgggaaactggagagagtaccaagttggttcaacactcttcaaaaccttacctatttgggtttgcgtggatctcagctacaggaaaacgccattctctctatccaaacgcttcctagattg

SEQ ID NO: 183523 - DNA, 130 bp, Arabidopsis thaliana landsberg
atgtccgataatggcaataataataacttgaaatccgatgttaatgtcaacttttcaccttatggtaatgggtttgggaaaggcccgaccggccgtttttcaaatggccgcactatccctgatattatcg

SEQ ID NO: 183524 - DNA, 663 bp, Arabidopsis thaliana landsberg
atgacggtaagaagtgtctttgtccaccactacaaaattgaatagactcaactaattaaataaaagacatggactttgcaaactcatgtatccgcaaacacaaacaatataagccaacattcattaatagtagttaaaatgaaactaaaattcaacattacaaacacaagagcatgaaacattacaaacgcaacagcatataacaaacacaagagcatgaaactgaatacattacaaacacataaaatgaacacattacaaacttaattcaacatatcagagattagcttgttcttaagagttatctctatgtcagttagaggctcagttttggcaaagagactatcaaacaatttagtgagaccaatcttctcttctttgttaattagcttctctctcatagctaaatatttctccttaatatcccaaataagttgttactctttcacattgtcaccagacacactacttggcttggcttgggattttgttttgcctttggctttagctgccttaactctagggggacgaatttcggtttggctttggttctcttcaatgccaactggaagagatgcacttttcttctatttgttgttccagtcgtaagaaactcttaaccacttatgctcatagtgaaccgccctccaagcatgttcaaag

SEQ ID NO: 183525 - DNA, 946 bp, Arabidopsis thaliana landsberg
atgaggttgacctcaaaagctttatcctctgatacgagttcttggtcatatctacgtaaagggcctggttcatctgaaatctcttctagatctaatctggcacccgttggctcaattgattccctacactcaagaaacggtaataacatgcatcatgttattaggccactacaaaatgataagtggacaaaagggaaagatgggtttctaataaccgatatttggggtcttgagactggcggctcccctgattctgccatccctacaatttggcttcagcagacacaagaaagaatgtatctccttgcctatcagcataaaagtctcaccttacttcttctgatgcctacaaatgccattgtcaatggagatttaagcatctcagccgtgaaacagcaagttattgaagatgttagcacatctcccatcgatcttttttgttgaatctcttttctggtgtcttctaatatatacccaatatatcttttcccggcatcactgagaattttgaaaattgaagagaaaatttcaagagggtggggcggtgagaatgcttaccatattaagggttaccgttacttagtagttgataatgacacgaaagtatccagatcttctccttcaggaaaagtaacaacacttgcaaaggtaacgtctttcacactacgatttactagctgaaattattaccaccttggactcaaagtgtatgaacttcgaaaccgcaggagtctctacttgcactaaacaagcttagagaagaagtggattcagaaaaaagccgtgcaaaaggacaggagaaagacatggaaatatgcatcagagctaagaacaatgtgtgggtgatcgcccgtgtgaccagaggcaaagagctttacatggctttggagaaaggcagcgacactcttcttgataccacagacgctgttggaagattcagcaacag

SEQ ID NO: 183526 - DNA, 167 bp, Arabidopsis thaliana landsberg
atcagaaattccaaacgatctataaacaaagagaatcgaatccaagagattacaacaaacaaacgagaaggatcgaaacagattcaacacagatcaacagaaggagaaagaagcagatcgaagatggtgacgaaaaagcttacctcagagatatcgcaagagagtaa

SEQ ID NO: 183527 - DNA, 577 bp, Arabidopsis thaliana landsberg
atggtaggaaaattcggtaaaaaagggccattcccaaatggccgctttcggttgaagaatcttgcaccccggtgtacccatttcgactttcgacacccatttttccaaatgcttttgacgttccttgcggatcattttgcgtttgcgcgaagaaaggtcggccaggaattcgtcgaagtttgcatagccgcgattgtgccaatggaattgctggtcattgcgttgcaagagaccgtgtccgccgaggcgagtccattggcgctccggcagaaacgtgaagtggagcgaagagacgccggtgcggtttgcgacttccagtgcggcggcgagcaattggtcttcggcggcgtcgcgtcctgctccgggctttgtaagcaggcgtggacctgttgcgggcgtgaaggggacacaggattgcagtttgggatagtagttgccgccagcacgttcgaaggcatcggcccaaccatgatcgaaaacatattcgccgcgactatgacctttgaggtaaaggggcatgcagccggcaagttcgccatgagcgtcctcaaaaagcagatggtatggcatccaaccg

SEQ ID NO: 183528 - DNA, 1171 bp, Arabidopsis thaliana landsberg
atggaaagtaaagtaagaggagaagaagagagacagaaagtggaaagattggtggaaaagttaaagattcataataataatcgatcttcaactccggcgcacattagcttcgtccctaattcaattgttgtttcctctagaaagcttgctgctgctttctgggagtttcatcaataccactacgaagacgaagaagattactcttactcttacctctcctctgcttctgctaaaatgcaccgcggcccaaatggtttcgccggagctagtagccgccgtcaacgtcacggaaaggcggttgcggttaaggagaatggtcttgacctttctcaattccttcgagatccttctcctgatcatcaggtctttctctaagatcttaccttttttggacttttgcaactgttgatcggtttgtcctagattcagctgaatcaatcggtttagtattatgggtagtgttaaagtttggattttgaaacgtgggtcgtgatgatttactgtgaattttgatattttaggtgttgtggcccttgtgggtttagtctagggttactctgttcttggcattttagttctgcaactgcaagtgatttgtattggattcacaatgtaaaagttgctatttttaagtttcatatctcagtatagtatacgcttgatagcttacgctagttaggttagtgaggagagtgattctatatgaaaaactatagttttatctgaatcttaagacaatgcgattgatggtggtgttctcagtcagagtttaaggttcttttatgatcaatatgagtaggtgtggaccaccttgtggttttggatatggatatctgatatggtcctactttttgtctcagccagatagtgcgggaagtctaaggagacagattggtcaaatgttgataaagcatcatcaatcaatcgatagaaacaatcacgctcttcagcctgtatctcctgctagttacggaagctctctcgaggtttaaacaattgagtattttgattgtgttttggagatttgtttgtattttacatatggatgattacggttttgcaggttacgacatacaacaaagcagttactccaagtagttcattggagttccgaggaggaccgtctagagaacctcactacaatctcaagacatcaaccgaacttcttaaa

SEQ ID NO: 183529 - DNA, 340 bp, Arabidopsis thaliana landsberg
atgtcgcgcgtcacagcggcggggctcttctacatcctcgccgttgctgccctcagcgcggccgaggccccggcagagtcaccgaaggaaggcagtgctgccaaggcacctgagtctgccaagagaactgctgcccccgctgaagcacccgaagccgcatccacccccgtcgccgccgctgccccatcgccgtcgtctaggaagtctggtccagctaccgcgccagccaccgcctctacacccccttcttccacggacgaggagttgagcccttccccgccagcatccaccgccgcggcgtcccctgcggctgagggaccggctgctgatgactccgccg

SEQ ID NO: 183530 - DNA, 113 bp, Arabidopsis thaliana landsberg
cccaggtccgagctgacatccgaggcatcttcgcaatctgcggcaacttgtacgaggaaggcatgttcctctttgtcgagctcgatgcttggattttcgataaactccactag

SEQ ID NO: 183531 - DNA, 266 bp, Arabidopsis thaliana landsberg
atggtggtgagtcacgcatccacggtcctcatcctcacgacgtcgccaccgcagatccaaccaacggccaccgatcgatcctcctccacctctgtgaggcgcaggtgagcccatcatttcctcctctggcctttccttccctccctgctcccccgactacgcgtagatcttgtcctatctagcccctacagccgagccagccaacatagccacgaccatgaggagttgtcgcggtgcagtcggagccatttctggagccccctccg

SEQ ID NO: 183532 - DNA, 411 bp, Arabidopsis thaliana landsberg
  unsure (1)..(411): unsure at all n locations
atggcgctgatcgacctcgcagactgcattcgccagaccaccgaacccgccgaaattgcttatgccgccgccgagatcctcggcaaggcgctgcatgtgacgcgcgccggctatggcacgatcgatccgattgccgaaacggtgacgatcgagcgcgactgnnnnnnnnnnnnnnnnnnnnnnnnnnnnnnnnnnnnnnnnnnnnnnnnatacggcacctatatcgacgacctcaagcgcaacgaaaccgtcgtctttgccgatgtcgacaaggacccgcgtacggccgcgacctcctatgcgctgaagggcatcggcgtccattcggccgtcaccgtgccgctgacagaagagggccagatcgccgccgtccttttcctcaacaatgcggtaccccgcgaatggccggag

SEQ ID NO: 183533 - DNA, 304 bp, Arabidopsis thaliana landsberg
agttcagttaccagaatgcggtggcggagcggaagtcggaggtagtgaccatgacggagacggagataagagcgggaacgaactgagagagacggaggatgagaccgccggtggttccgggcatgccttgcacatccttcatcctcactggtggtctatcgatcgctccggcagtaggagccaccggaagagcatcaaccgcgtgaatcgccggccggctcacgttcatcataaaactaaagctcaaacagttcccaccaagaaagagcaactgaaaaagacgtttgggccttttgacaaatga

SEQ ID NO: 183534 - DNA, 1327 bp, Arabidopsis thaliana landsberg
atgaattcacaaggtttaagcagaggttttggttttgttgcttactccaatcctgaagaagctttattagctgtaagtttcaactgaattgacaatctttttacatatacataaatgttttataaaattggtactaaaatgttcattggggttgatgattacgcagatgaaagaaatgaatgggaagatgataggaaggaaacctttttacgttgctttggcacaacgtaaggaagaaagacaggctcaccttcaggtcttttttagccctctcactctttgaacatcaaactctgtactgtgttgtgttgtgacactgagttcttaaactgtcttgatgttttcacgtgtttcagagtctatttactcaaatcagatcacctggaacaatgtcaccagttccatcaccgatgtctgggttccatcatcacccaccaggtgggccaatgtcaggaccacaccatccaatgttcataggccataacggtcaaggtttggtaccttcacagcctatggggtatgggtaccaagttcagttcatgcctgggatgcgtccaggtgcaggcccgcctaacttcatgatgcctttccctcttcaaaggcaaactcagcctggccctcgtgttgggttcaggcgtggtgctaataacatgcagcagcagtttcagcaacaacaagtaaagtttttatcattagttcttatgtcttttagcaagtttattatctttaacacaatcatacgaatatgaatttgttggggcttgttattatcttggaactgtcagatgctgcagcaaaatgcaagcagattcatgggaggcgcaggcaacaggaggaatggaatggaagcatctgctccacaaggcatcatccctttgccattgaatgcatctgcaaactctcacaatgtttcgcaacgttttcacaagccaactcccctcaccatttctaagctcgcatctgatttggctttggctagccccgacaaacacccacgggttagtgatctcctgtgttttcttctcttatctcatttagtacttgcattataacctatatttgttaacaatatcattgcattgtgaattgatgacagatgcttggggatcatctttacccacttgtggagcagcaggagccagcaaatgctgctaaagttaccgggatgttgctggagatggatcaagctgagattttgcaccttcttgagtcacctgaagctcttaaggctaaagtgtccgaggctctggatgttctcagacgctctgctgatccagcagctgtgtcatctgttgatgaccagtttgctctatcctcatccgagtga

SEQ ID NO: 183535 - DNA, 407 bp, Arabidopsis thaliana landsberg
atttggagcattacttccttcggcagcttaacacttcattattccagttcatagttcataagaatctcgtaaggattttgggcaatttcaacacactacaagaaaacacgccagttgcgagggaagaaaccgtcgctagtccctcgcaaagagcacttaacgagggaattgcgacgaactccagttcctcgcaaaacgcgcgtcgcaaaatcaaattcgtagcaagttcctcgcaaatgttgcgaggaacaagttgcctcgcaaaatacacgcaatttgcgagggaagcaatccgtagcaaattcacagcaaatttcgggtctcgcaagtttctcgctagttgcgacgaacgaccagactcgcgaagcacacgcaatttgcgagggacgtactcggtagcatattag

SEQ ID NO: 183536 - DNA, 345 bp, Arabidopsis thaliana landsberg
atgagtttgatacatgtgtaagtttcatggcccactagcgaaagctaaagattttgcaccacttgagagtagtaactatataagtgattgcatggtttgttgtttttcgacagactattcaataataaccaattcacaggcaaaatcccagaaagcctcagcctcgttacaacgttgttagtcttgtaagtagtaaaagattgttacaaaaaggcttattcatccgatccctaacaattttaatctcatatgatgttatttcttttgttaaagacgccttgacacgaatcgattaagtggagatattcctccaagtcttaataatctcacaagtctcaaccaact

SEQ ID NO: 183537 - DNA, 121 bp, Arabidopsis thaliana landsberg
aatgctgaggctgccagtgcccaatggtccgatcggccaatggcaggggcagcaaagggcgaccaagaaagagatgaatgggatgtactgagacatgagaacgaaaccaaggcctctgaag

SEQ ID NO: 183538 - DNA, 619 bp, Arabidopsis thaliana landsberg
aggaataatcattggcgagttcaaagtttggggaaccacccagtagctataaataatggatctggtccagggataccttttcctggaaagtttgaagacaacactgtgacttcgacacctgcaattgttgcagaaccgcaaatcccgattgaatctgacaaagcaagagctataaccggcatatcgattgaaagtcaacctgagttagacgacaaaggattaccaccactacaaccaattcttccaatggtacaaggcgaacaagctaatgaatgtcctgcaactagtgatgggctaggccaaagtaatgacctggttattgaaggtggaaccattagcatctctagtgcctactcgcatgagtgagtctgatcttctaagtcttcctcgtttctgttactgtgctgccattgatgtgttcgcttctaccctttttttttaactccaatgtgtactaatcttgtgagacattaattctgaaatggccaggttattgagctcattaacacaagcactccagaatgcaggcattgatctgtcgcaagcaaagctttctgtgcagatcgatcttgggaagcgagccacccaacgtctaactcatgaagagccatcaagtaag

SEQ ID NO: 183539 - DNA, 92 bp, Arabidopsis thaliana landsberg
aagaactgcgagaaataatggactgtttctttgacttcccaaaaaacaagagaatcccctataaagatgcagaatccagtcagaatcaataa

SEQ ID NO: 183540 - DNA, 127 bp, Arabidopsis thaliana landsberg
gcccgcaggcgcgccaagggaaaccggaaagctggcccgatccttccgcccaggccgcctgcgacccaacctgcggctccgtcccaccaccccgcgtcaggccatgaaggtcatcgcgtcttccggc

SEQ ID NO: 183541 - DNA, 871 bp, Arabidopsis thaliana landsberg
gagtgtgttagcgaaggtgtgaatacacaaaaacaagcactggactatcttgaggcaaaggtgcagtattttagacatttagttatcttacagagtcctttaatagtttttctgttcaatatttgtagtgaacacaaatcgtatacttcgaaaattatctaaaacccagaaaagattttacccccctgttgaaattgagctctttctagtgttaaaaaagaccatagctcatatctcattcagctgaaagaaatctggtataattagttccttccacctcattctgtgatatatagagagtaagtctgcaatttatttccatgttttccattgaggaataaacactctcaacaaaagagtagactatcaggttatgttatattaacaatagattttgacttttgtcaatttgcggcaagaattatgtgacattattttatctgtttattacgtaggtgaaaaaaatatcatacggaactccacctgaaaaggtatttattctgtattccacatttagactctctagttcaactttatacagaattacagatcacagatggataatatgtttttgacccccctgcaaatttgaatatgaaagttgtcttgctaactgaaaattccgcattgtatatttacatgatttactaggacggaagagctctatccatcctcagagatttattccttgcgcatgtaccagtaagtatcttaatttattttggttcttaaaattttagtctttacttactgctattttcttctctttaaggtgcctgacaacaattttcgtcaaaaatgtttctacgttggtgtgatgttgagacgaatgattgaagcaatgttaaacaaagatgcgatggatgacaag

SEQ ID NO: 183542 - DNA, 789 bp, Arabidopsis thaliana landsberg
atggatgtgcatgattcttctgctgtgggatatgaccgttctttgcaacctggttttgtaagtaatactactctgtcgagtcttagtttttataagcaacccaaactcaggctaataagatcttcacttttctacataccccctgcctcaaacactctgcttgttgatgctagtccattaaaaccgatatgtgcccttagaatcttgatcgtagaagtttatgtatttgtcatgtgatgccattggggtccttacgtttgagacaaatggtttgatggtgctatcaatagaatctaaattacatcaaatgactggctttggtgtttgctagataatgatctttcagactctcgatgtcaacttatgatcgctgtttggacaggtgattacgattgagccaggagtctatattccatcttcatttgactgccctgaaaggtacacatgctctctttagactaacttcatgtaaaagcgtggttttgtaggaaagtttgcagccaacaagtatcaaactgtgtagatctgagtggtttgactgcaaatcgaccgcaggatatgacattgatctatcgaccatggttaagtgactttactattgaaatttctcattgcagattccaagggattgggataaggatcgaggatgacgtactgatcactgagacgggctacgaagtgctcacagggtcaatgcctaaggagatcaaacacatagagacattgttgaataatcactgccatgataactctgcgcgaagcttcgccagtttctctttgcaaggttaa

SEQ ID NO: 183543 - DNA, 167 bp, Arabidopsis thaliana landsberg
atggtaaactacaggagaatatttcccgagatcgacgacaatgcggtgcggtgtgatgctgtgcggttgacttttggttgattttggttgacttcagtgctcgaatgttggcagtgcgaattatcaacatatctcacttcaaatgtactaaaactacttgcatgaag

SEQ ID NO: 183544 - DNA, 323 bp, Arabidopsis thaliana landsberg
acaaggtggtgatcggttttgcctatatggccaccgagcgcagcaaaatcttcggcatcgaagggttgatcgatctggaatggccggtcggctgcgaactgaacggcgtgtcgggtacggccattccgatccgcaatatctggtactactacgaactggtcatcgacaaggtgaacagccaggtcgaactgtggatcaacggctacaaggacatcaccgcaccactgcccgccgaaggcacgaacatgaccacctacaacgtgcggtgggggtcggcggtgacgggtggctcggtgcagaccacgcagtacatcgacgacctg

SEQ ID NO: 183545 - DNA, 798 bp, Arabidopsis thaliana landsberg
tcagcgtcacatggtggccagccttgctccatcttcttggcctatgctatggcccacaagggcaaggcgatgttcgacgtcacctataacccggatgacgggcccaaggcgtacatcaaccccgccgtctacagccgccttcatgactacacctccatgacacaggaggtcaatggcccagaatacgatccgaggatcgagcagatcggccccaatgtcctgatgagggtcggaggaggcaagagacagggcgatactggattgctgatggggcaatcgactcgtcctccactcccactctctctcaggtgcgagtaaggagcacgggctcgagcccagccatacgacctcggcaggacacctcacagcatcgtatccagcaactccaggttattccttatctattcatcgttcattgatttttatatatctgttctttgcattatcgtaacattagggcgaaatattacagactcggctagatgatgagaggaggcaacgtgaggagctggagaagaggatggcggagatgttcgcgtacatgcagagccttggcgccgcacagggtcatgctccaccacctccgttgttccctgcagctgaccctacagagttcactactcctgtgagtatcaaaattttagtactgcatgatatttattcatatgttctcacacatacaatcttttctctgtgcagggtcaatcggcggcgtcgaacaaccctcggaagggttcagcccaacgcagcaccagtcaaaccgcccacctccatgagtgttgtgttttcagtgtttag

SEQ ID NO: 183546 - DNA, 610 bp, Arabidopsis thaliana landsberg
atatcgagaggctgaggttgactgcacagaagctttaaatctggatgatcgatatataaaagcttactcacgccgagcaacagcaagaaaagaactcggcatgattaaagaagccaaagaaggtatccctcgcacccatataatcattcattctgttctgttaagatacatacaatttctttattacatgttgctgcatatgtaaggtgattaaaattattcgcagatgctgagtttgccttaagattggagcctgagagccaggaacttaagaagcaatatgccgatatcaaatctttgctcgagaaagtaatattttcatatgcttctttgctgcatttttgccaggttaattttaaatgcttcacaaatacttaactttttgaattttgagcaggaaatcattgagaaagccactggagcaatgcaaagcactgcacaagaattactcaaaacatcaggtttagataagaaaatacaaaagccaaagacagaaatgacttcaaagccagtgaccctagtggccaaaacgaacagggatattgttcagcctgttctaggtagcaatgaaagttcgggaaagaagctcattgaaaatatacaacctgag

SEQ ID NO: 183547 - DNA, 451 bp, Arabidopsis thaliana landsberg
atggcctctgtcatgaaattcaacggcaccagctgggttcagcttggatcggcaggtatctcatccggtactgccacttatacctgcatccaggtaaatgcttacggtactccctacctggcttatattgatggtaccaccggcaacgcctgcgttaaaatgtttgatggaacagcatgggtcaatacaggcgcaacggcagaagtttcacccgggggtgcaagttatttgagcatggacctcgatgcagccggttttccatggatcgggtttaccgatgccaccaacagcaacaatgccaccgtcatgaaatttgacggatcgtcatggagcgttgtgggtgctgccggtttcagctcctccctcagtggtgtaatttatatggacctgaccataagtcctgatgatacgccatacgtagaatatgccaacccgttttcaggtgtaacag

SEQ ID NO: 183548 - DNA, 1971 bp, Arabidopsis thaliana landsberg
  unsure (1)..(1971): unsure at all n locations
agcgaacgtgaccacgtcacttcgctgctccactgaccggcctgacaaaaggacagcgccgcctgcgccactccgactgcagtgccacttgacagagtgaggctgacaggcagtcaggccctgccaaaggcaccataggaagctccgctccgcccgacccagggctcggactcgggctaggtcccggaagatggcgaactcccctccgcccgacccagggctcggactcgggctaagtcccggaagacggtgaactccgctccgcccgacccagggctcggactcgggctaagtccggaagacggcgaactctgcatcgcccgaccctgggctcggactcgggctgagtcccggaagacggcgaactctgctccgcccgacctagggctcggactcgggctaggtcccggaagacggcgaactccgctccgcccgacccagggctcggactcgggctgagtcccggaagacggcgaactccgctccgcccgacccagggctcggactcgggctaggtcccggaagacggcgaactgcgctccgcccgacccagggctcggactcgggctcggccccagaagacgacgaactccgcttcgcccgaccccagggctcggactccgccctggcctctgccgaacgacctccgcctcgcccgacccaggggctcggactcgacctcggccatggaagacagactcgacctcggcttcggaggagcctccacgtcgcctaacctagggcgcaggcagccacgtcaacgggaagcgccatcatcaccctaccccaagctgactcgggtcgcagggaacaagaccggtgtcccatctggccagctccgccagatagnnnnnnnnnnnnnnnnnnncgctctgtgacgacggcgactcccagctctcttacggaagcaggtggacgtcagcaaggactcgaccgctccaacagctgtccctccgccaggcaccgtcgctcctccgacggccacgacaccacaccagcagggtgtcaagatctctccggctgccacattggcatgtacttagggcgtcagtctcccccgctagacacgtagcactctgctacacccccattgtacacctggatcctctccttacgcctataaaaggaaggaccagggccctcctagagagggttggccacgcggggacgaggacgggacaggcgctcccttggggccgctcgcttccctctcccgcgtggacgcttgtaaccccctactgcaagcgcacccgacctgggcgcgggacgaacacgaaggccgcggatctccacctctctcacgcccgtctccggccacctcgcttctccccccttcgcgctcgacccatctgggctgggcacgcggcacactcactcgtcggctcgggaccccccggtctcgaaacgccgacagttggtgcgccaggtaggggcctgctgcgtgctgacgaacagcttcccgtcaagctccagatgggcagtctccagcaacctctccggcccgggacggtgctccgtttcgggagtcttgagttcatgtccttcgacggcagctacgacatgatactccttccaccgccgcgcgacaacgacaatggcggccgatatanccgccgccggcggcggaatcgacgacgtcttccccgtgtggtggaagaacaacattcgagctcgctccgtcctctcccccgtcaacggaggaagaggcggggcaaccaaggccaagcgggaggccgcgcttcgtcggccgtcgagcgaatcgacgcccccgacgccccaacggaaggcacgccaggcgtcgacctcgcgttcgagacgaaggcaagcaccgtccccccgcgacacgctgatcccgagcaagaagacgacgccagcgcgctcgcggaaagcctgcaggacgtcgccctcgtacctgggacgacggtgcaaccagtccccgatgtgactacgtcgctcctcgtcgaccaaaag

SEQ ID NO: 183549 - DNA, 69 bp, Arabidopsis thaliana landsberg
atggctggagttgctgcttcaaggcttggcttgaggatgtttgatcttgccgtcatccaacaaatgcag

SEQ ID NO: 183550 - DNA, 64 bp, Arabidopsis thaliana landsberg
gataagcaagaaaggcatccacatcttcaaccatttcggcgtgggacttaataatcttgggatg

SEQ ID NO: 183551 - DNA, 408 bp, Arabidopsis thaliana landsberg
tgcaaactgtcagagtagtgtgggtttgggtcggaactgccattcttgagtgcttcagcacagtagtggcaactttcatcactttggctctgaaaggaatcaacgtcgagctggaatacttttacaagcgtcaatcaagttcagaagtaagtgctttcatactttcaaattaaattatatgcctctcttcgaagtcttcgagtgagttggcacgaactgaagttcggagttctactttaattgacttttgcctataactgctttcaggcgattacggtaggcatgtgcaacgaatcggttgaaggccacgagcagcggtacgcgggaagagctggtccaacgcccaaaaaccctgacgaatccgaaccttcggaagagacgctgaattggcgcacttgtcctctcctc

SEQ ID NO: 183552 - DNA, 72 bp, Arabidopsis thaliana landsberg
atgactcatgagcttaatgtccgaagcagaattctgaaaagttccaaagaacagagtcagtacatgatcctg

SEQ ID NO: 183553 - DNA, 2598 bp, Arabidopsis thaliana landsberg
atggccctcggtggcttgatttcaaatcggaacttcggttccttcatcggctcaggtatatctatccccctcctctttttgaatctgttagggctttttagttgtttatcggattatgttagtgattaggcttgagcgtagcttgcttctgtgtagcgaacgatatcactaatgtgtgcattgcttccaaatttgctaagattgctttactttgtaggcaatggttgtcagagacttggaaaaagtggtgcagaggtttccaagctttttccaaatggtatatatcggtatcttttatacctctctacctagctatattatgcaatttgtgcttaagcattttcttaatctttgtagcattgttgtgccgtaatcatcaacctctgcaagctagtttacatcatgaatcgggacacatgagaagaagttttggatctttccttcaaccaagaatggacagtgtaattaggtttaggaacagtatcaagatcaacagatctcgtgcttactacaaatcagaggagtcagatatcacggaaggagttgtgccatcggctgatggctcagctgaagctattttagttgaaggaaatctacagaacgcatctccatggtggcagcagtttcctagacgctgggtgatcgtcttgttatgcttttcgtcttttcttctttgcaatatggaccgtgtaagttgtatatcttgcttattttctctacttatctgaagaagtaagatatatattacttaatgagagatgcttgtggcaggtgaacatgagcattgcaattcttcccatgtcacaagaatataactggagtagtgcaactgttggcttaattcagtcctctttcttctggggctatttacttactcaggtcaggtctaatactatcactctctgtagaatctgatcttttatagaactcgaaagagagggtatatttattctaactttagctcatcttctcttggacatagattctgggaggtatatgggcagataagtttggcgggaaggttgttttaggttttggtgttgtctggtggtcctttgccactattatgacacctattgctgctagacttggtcttccttttttgcttgtagtgcgggcgttcatgggcattggcgaggttggcctcttctgttcttcttttctcttgctatacttgtctcagacctgtacaacttctcactagctggttctgtctacctttgcttcagggtgttgcaatgcctgctatgaacaacatgctttctaaatggatccctgtctcagagagaagcagatcgcttgcactggtctatagtggcatgtatcttggttccgtcacaggattggcattctctcctatgctaatcaccaagttcggatggccatctgttttctactcgtttggctccctcggaagtatatggtttttgctatggctaaaatttgtatgaactcctcttcatgacataagctaaatatctgagatctacaaaacctccaagagaattatattttaaacacctttttaattcttctcaggcatatagctctcccaaggatgacccggacctaagtgaagaagaaaaaaaggttatactgggaggtagcaaaccaagggaacctgttacagtgattccatggaagctaatactgtctaaacccccagtctgggctctcataatttcccacttctgccataattggggaactttcatactattgacatggatgcccacatattacaatcaggcacggagttcagcttcagttatatccttactgtttaatattttttgtgaacaagtaaagagactcctctctattgttggtctttgatcacgctgcaggtcttgaagttcaacctcactgaatccgggctactatgcgttttgccatggctaaccatggctgtttttgctaatattggaggttggattgctgatactcttgtgagcagaggtctttcaattacaaacgttcgaaaggcaagaaatacactctttcactttctgatcatttacatgtctctactacctcaaaaggccaaacttgttatgctgctttcagttaaaggagtgacaacaaaccctttataccaataaactactctcatgaatctattatggctactccaaaggatactcacgactaataaactcttgattattgcagattatgcaatcaattggttttctaggccctgccttcttcctgagtcagctgagccatgtcaaaactccagcaatggcagttctctgcatggcatgcagtcaggtattggtgtcaatagatcatatgattgaaagagccatagaattatggataagtttggaactgttaaaaacatgtttgccgttttttatttcacacctgccgacacaagattattcttgtgagagtacaactataattaaaccccaacttaaatacaatgtcggctacaaaaagatacagttgtcacccttagaaaaattcatgagttgtgtacagctctgacataaggactcatgttgtccccaacagggctctgatgcattctctcagtcgggtctctactctaatcatcaagacattggcccacgatacgctgtgagataa

SEQ ID NO: 183554 - DNA, 548 bp, Arabidopsis thaliana landsberg
agaggcagacgagtccagattaagagaagtctgtgagagctttcttggacctcccactggtatggctgaagcagcatcttcagacacaaacttgtcttgggatccttatgttctggtgaatactttctcttgatcagagcctaaccttttcccaatcggaacgctctaaaactcgctttaatttgcagggggtgaagaagcataaacttttgagaaacgatattctacctgcaatggcgtcaaacagaaaagtgcagcgtctactcaatgagtttatagatctcttatctgaatatgaagacgtagaaacagcagatcctgcccccaagggctcgacacctaccatgaactgtggtggagtcccatcttcactggatcaaattggctctgatcctccagccatgacagctactactcctatgactatagacaatgacaaaccagtctctctggagaatccagcggctttggatataggtgtgtgtgagaaaacgggttctgaggaccgggataaacaagaccagaactcaagagactcgggctcttga

SEQ ID NO: 183555 - DNA, 327 bp, Arabidopsis thaliana landsberg
gaattgattgcctatgcaacgggctttatcacgccctgttattttccatactatgtatataaagcgttcggtttaaagaagctaaaatttcacgcttacaagggtatatatctattcttgattttcccctattgtatttttgttattgtcttttggtttacaggggcgctaaaagatgctcaaaatctgcttataattccagtattgtatgcaatttgggtgataatttctttggctaaagcgatcgcgtacaaatacaacaatgactttactaccattgaggcccggcaggaactggttgtactgctctttagtttaacgccctgg

SEQ ID NO: 183556 - DNA, 566 bp, Arabidopsis thaliana landsberg
cttgaagatgcattgagactcgatttgagaatcgtcgctaatgagaacttacaagcttacttcgttggcttgtacgatactcaatcgaataacacgactattcccgcgattcaacgtcgtgttcttgaacgtttggctattgctaggtaagtaaaaattcatgttttcacttcatagttagttacagagttgtgataattaacagtatatgttcatgtagagacaatggtgatgcacaaaatctgcttgcgaaagagtttggtatcgatggaaggaacttcttctatagtgtaaagcagcttgaatctcgaggtttgattgttaggcaaccagcaattgtgagaactaaagaagttgattccaagacaacttcatgtattactaccaacatgatatacttaactcgttacgccaagcctatgggttcacaacagaggtttgagatttgcaaagaagactctgtgtcagagcatgagactactgcggccggagaggacacgctcattaacgattttctaccagcaatgcaggaagtttgtgataagctcgaaaaagctaacgacaaa

SEQ ID NO: 183557 - DNA, 52 bp, Arabidopsis thaliana landsberg
atgcttgaagacgtcgagaattcccggaccagctggtggtcattgatggctc

SEQ ID NO: 183558 - DNA, 155 bp, Arabidopsis thaliana landsberg
atgaaaaaggttaggtaccatattacatgtttttgggaatttatcttgtttaatatgcctcttatgtttttgcagatatcatacaaagagcccgtggaatgtccccaggaaaattattcaaggacaaaagtaaaccagactgctttctcaagatg

SEQ ID NO: 183559 - DNA, 100 bp, Arabidopsis thaliana landsberg
ataaactgatatatctcgatgtggatgagctggcggtaggatcaaccggcggtttctccccattaagagcgactgttgaaggactaaaaacattacgcct

SEQ ID NO: 183560 - DNA, 650 bp, Arabidopsis thaliana landsberg
atgattgaaagtagtgctcatggagaccaatatgatggagttattttttctcagctagtaagggcttctttcttctttcattgcataagttctctcgtcttataaacagctctctcacagtgtctctttcttgctcagaatttgattgacttagctggatctgagagttccaaaactgagacaacgggactgaggaggaaagagggtgcatacatcaacaagagtcttctgactcttggaactgtaggtgtctcttttctgttggagctttcttttatttgtcagatatttccttttcagttataatatgatataaatcagaattaagtataatgcaaaactgccttagaagaacaacctggtttgctagtgtatcttaatgatcaatgcctttattttctgataagcctgttccctttttgtgtccttatgtcaaggataacatctctagtcacctaacctttgaaatcgattttaggatgttttgattataaactatatctcatggttcaaatatgtaggtgattggaaaactgactgagggcaagacaactcatgtcccatttcgggactctaagctaactcgtcttctgcaatcttcactgagtgggcatgggcatgtatcggtacgactcttctgtatctggtga

SEQ ID NO: 183561 - DNA, 191 bp, Arabidopsis thaliana landsberg
gcgcaagatgacagcaagtggcgccggattccagacgttcggcgactggaacctgcgggacgacatgcctgtcacccaatacttgcaagcagggacttcttcatcgttgtgtcgccggcagagaaggacgacaacgaggatctgttcaaagtgccccagtgttccctgccaagccctacaactacaagaag

SEQ ID NO: 183562 - DNA, 351 bp, Arabidopsis thaliana landsberg
atggctgtgagcaatctcgatgagttcacgtgggtcattcatcgtttcatctctcagcgcctcaagaatcgcctcacacgagaactctctaaaaacatcatcaaggtgtgaatcatgtttatgaatgaggtccaagttgatatgttatttacccagtaaagagatgagagtaccttgttataagaattctgtagagcatctttaagatgggacaaagttcagccggagttacaggcttgccctcttcagggtgttgaagacttaacgaggattggttcaacaactcgaaaaatgctttcaccgcagaaaccccctatgaacattacatcatccaaagcacttcatcattag

SEQ ID NO: 183563 - DNA, 556 bp, Arabidopsis thaliana landsberg
atgtctaaagcggcggtgcagaagaaatcgatgatcattgctcggacgttgaagtttcgagagagtgagaaaagtgttcggtggacacttgggttgctaaaacagaggatctctaggaggagagattcgtggtggtggcgagaggtgaaggaggaggagtacggtgtgacagcgggaagatggtggaaggttattgaggggaaggaggaggaaacggaggagatgtaagtggctgttgattccggctgataaggcggtggaactaagataatgtggatggagagagatgggtttttggagaggatggttttacctaactcaaccatggacactaagtgacctattggtggtgcaggatacagaactatagcttcttcacccatggctcttcctaaggtttgatagatttgttgcaagaattggaaagttaataatgatgatatggttaactgtcacacgtctctttgaatgtaagagattgcttttcattaaaaaaattttggaggaaagtgacataaaatcagatggaccaatagatgatatgatccatggataa

SEQ ID NO: 183564 - DNA, 594 bp, Arabidopsis thaliana landsberg
atgaaacaggtttccatggcacgtggtactatcacagctcattctctgatgagtttggaagctcgtgcattactctttgtgtctccgaggctggatgtgagaaccatctaaatatgacatagaaatatctttctcggtttagctgttcttgattggaacaggtgatgtggtctttctgcgtttgatccatgctaatgctgcactgtcttttgtttgtctgtctttaacagtcatatgatggtatgattatcggtgagcattcacaacaagcagatcttgatgtaagtttgttcgacttctcctcttcatactaaattgtcgaaatgccatgagctcacttgcccttgcactgcagcttaacccagttaaggccaaagaacttacaaacattcgctctgctgggaaagacgaaaatgtgaagctatctccacctcgtcttgtatgtaccctttcctcttttaacatgacataagaaaactgttttcttgatcagaaaattttcttgccctttgtggtttaacttttgaattcttttctattcagatgacacttgaggaagctataggatacgttgcctcagatgagcttatagag

SEQ ID NO: 183565 - DNA, 805 bp, Arabidopsis thaliana landsberg
atggctgttattagggacattgattttggggcttgtcgaacactttccgccattgagttgcgtgagattgttgagttcaagaccgttgtacccaaaatggtatgataaatatcatgtggctaaaaaagattacatagtgctctataaacatagggtttgccttaaacacctaatatgccttctactctatttacaggttatggacatcttcattaacagcataaggattaactggtgtgcaaataatatcattgaaaagcaccaagccatttcattcattgattcaacatttgtggttgaattatccaagcattacccaaaattcgtcaagtctgctgataaaggaatgtatgggtttgatcacgacctacttgaatgtacccctacaggttctgctgtggtctacattccatttctcattgatttacagcattgggtagggctttgtgttgatatgagtgcaaggatcattagcgtcctcgactgctatacatgattatggcgtgaaacaaaattgaagaaagtgcttttgccccttactgaaatgttaccatatctatttcgatttgctattaaaatggctggggaaaagaaacttcgtttgaaatcttttgcggttcacagagaaaatgatattccacaggcagattctgtcaaatattctggagttatggcagctcgtttaattgaagcccatgccaatggtgggattcaggcttgcaaagaagtgaagcatgctgatgtggtgactgctgctaacaaatatttcattgccggttttgaattagctaatgggattgtctga

SEQ ID NO: 183566 - DNA, 299 bp, Arabidopsis thaliana landsberg
atcgtgcgatcgtgacgatcaaggaaaacgctacaccgggccggcgccggttttcgctcgggcacgaacttggccattggcaccatgaccgtggaaagtgcctggtctgcggaagcgacgagatcggcaatccgctggcgagcacctcggagcgggcggccgatcgttatgcggctgacctgctgatgcctcgcttcctgttcgaccctgctgtgcgggccgcaggcaaggtcaactttgcgatgctccgaaatttggccaaggccttcaacaccagcgttactgcggccgcaatccgg

SEQ ID NO: 183567 - DNA, 676 bp, Arabidopsis thaliana landsberg
atggaggtttttgggattaagccaactatagtgacttacaacactcttgttcaagggttttctttgagaggacgaatcgaaggagctcgtttgattatcagtgaaatgaaatctaaaggctttcaaccagatttgcagacgtataatccgattctgtcttggatgtgtaatgaaggaagagcttctgaggtgttgagggagatgaaggagattgggttggttccggattctgtttcgtacaatattttgatccgtggttgtagtaacaatggggatttggagatggcttttgcttacagggatgagatggtgaaacaaggtatgatgccgacgttttatacttacaacacgttgatacatggtttgtttatggagaataagatagaagctgctgagatattgattagggagattagagagaagggtatagttttggattctgtcacttacaatatactgataaatggttattgccagcatggagatgcaaagaaagcatttgctttgcatgacgaaatgatgaccgatggaattcagcctacgcagtttacttatacgtcgcttatttatgtcctgtgtagaaaaaataaaacgagggaagcggatgagttgtttgagaaagttgtgggaaagggaatgaagcctgatcttgtgatgatgcacaccttgatggatg

SEQ ID NO: 183568 - DNA, 315 bp, Arabidopsis thaliana landsberg
  unsure (1)..(315): unsure at all n locations
atggtgtttttcggcttgacaaaaaccgacaggccaacagctgacgggatctgtactgacttggccaggtagtacgtcaagtcttcagctatttccccggacannnnnnnnnnnnnnnnnnnnnnaggctgctttaagcccacgtacttggatacctgccaccagcccttgccgacagccctcttaacgtcgatgcgaccgacttatctggccggcaaggacacgtggttattttggccattccccttaacagtcaaatcttacttgtccgtaaccacggatgccccaaccgggccatcgcccatgaggcgcaaa

SEQ ID NO: 183569 - DNA, 3402 bp, Arabidopsis thaliana landsberg
  unsure (1)..(3402): unsure at all n locations
atgggttcttcatctccagaagctcgagctcgagctcaagtgccctctatggtttgtttcacccacagcttccctttccttgattatattgtagagtaatcgagtttttgtttagtgttcttggaatcgtaacaagagatttacgtaatttgcagcttaaaattgcttaatcgaccggtgttgcttccttgcgaccacgtcttctgcgagtgagattatctaactactctgttattctttaacaattcattacaaatttgaattcatatagattcttatctttctggaaattatttgtacagttcatgtgtacacaaatcgtcgcaagttgaatcgggatgtcctgtctgcaaatctaaacatcccaaaaagggtaagtccagtgatatcatttgaagattagtgttcaagacagtatgtgaaattgtgaattactctcatgtgcagctaggagagatcttcgattcatggagagtgttataagcatatacaagagcttgaatgcagctgttagtgttcatctcccacaattacagattccaaatgattgcaactacaagaacgatgcattgaacaattccaacagccctaaacatggcgaatctgaagattctgagatgactgacaaggatgtgagcaagcgcagtggtggtactgattcttctagtcgtgatggttctcctcttccgacctcagaagaaagtgatccaagacctaagcatcaggattggactgaaaagcagttgagtgatcatctcctattatatgagtttgaatcagagtatgatgctgccaatcacgtaagagcatattactgatcattttgatttatcagtgcgcaatattgaaagatgtttataaattcctcttttttttcttcttgctgcagactccggaaagttatacagaacaagctgcaaaaaatgtgagggacatcactgcttctgagcagcctagcaatgctgcaaggaagcggatatgtggtgattcctttatccaggaaagcagtccgaatcctaagactcaggatccgactttgctgcggttgatggagagcctccggtcagatgatcccactgattatgttaaagcacagaaccatcaggtgcattctcgtcttacttcataagttgactattttagtttatcagttatgagtattcttaatcacacatttacatgttaatagatggtgtacttcagtttttgggtaatctatagttttgttctgtgcttgagatcaaacaacttaagatgtgtagtgatcttttgtgtccagcagttacccaaaagtcatacagaacaagattcaaaaaggaagcgtgacatcaccgcttctgatgcaatggaaaatcatctgaaggtccccaagagggagaataatctgatgcaaaaatctgctgatattgactgcaatggtaaatgctctgcaaactctgatgatcagctaagtgagaaaatctcaaaggcattagaacaaacatcatccaacataaccatttgtggtttctgccaatccgctagggtatctgaggtaaaacctttaaaagtctttgccatatcctctgctctagaaactgagcttctctgtttgtgaagtattttactcaactggctggatcaatatttgttaggccactggagaaatgctgcattactctaggggaagaccggtggatggagatgacatcttccgctccaatgttatccatgtccatagcgcatgtatcgaatggtatagaaaatgaaacccaaaaaacttctacatttgctcatctttgtttctgcaagtccatgtggatatagtttggctagtgttataacgcttttggcttttgcatgataaaaatactaaaagtagttgaataaatgttcagggcaccgcaagtttactatgaaggtgacacagtgaagaacctgaaagcagaactggcaagggggatgaaaatcaagtgcactaaatgtagtctgaaaggtgctgccttaggctgctttgtcaagtcttgccgtcgaagctatcatgttccatgtgcaagagagatttctagatgccgttgggattatgtatgttttgccacattctctacattctcattcacataagagttacttaccaatgttctagttataatgtgagattgttttcttggtctttacaggaagattttcttctactttgtccggctcattcttctgtcaaattcccgaacgagaagtctggacatcgcgtttccagagccgagcccttaccaaaaatgtataattctgtttcagcatataatttaatacttacagtatgacattattattcttatgatagcaactaataaatctcattaccttgctccctcagaaatcctgctgagctatgttctttggaacaaacaccagcttttacaaaagagcttgttctctgtggatcagcactctctaaaagtgataaggtcagtactaagttaatcttctttccacaaggttcaaacaagaaacaagtgtttgtggatttaccactcttggttcaaagttggtagagctttttcatataaaaagactaattttctcattgcattgctattccctagaaactgatggaaagtttagccgttcgatttaacgcgaccatatcaaggtactggaacccaagtgttacacatgtgattgcttctacagatgaaaaaggagcttgcacaagaactttgaaggttcttatgggtattctcaatggaaaatggattatcaatgcagcttgtaagttagattgctcactcaagagtttgtcataatctttacttttcaccattaaggaatcttcatctttacatgaatcaaccttgaattgtttctagggatgaaagcaagcctaaaagcttctcaacctgttgatgaagaaccatcangaaaaanttgatactcaaggatgtcaagatggaccaaaaaccgcaagactcagagcagaaactaatgtaagtataaaaacacaccaaaaacaagtttgaaagtgctttgcttcttttagatatctcactctctattttttcttttggcaaacagaaaccaaagctctttgagggcttgaagttctatttctttggagatttctataaaggatacaaggaagaccttcagaatctagtcaaagtcgctggtggtacaatcttgaacacagaggatgagcttggtgcagaaagcagcaacaatgtcaatgaccaaagatcatcatcgattgtggtttacaacattgatcctccacatggatgtgccttaggtgaagaagtcacaatcatttggcaacgagctaatgacgcagaagctttagcaagccaaactgggtctcgtctcgttggtcacacatgggtcttggagtccattgctggttacaagttacatcctgtgattggctaa

SEQ ID NO: 183570 - DNA, 625 bp, Arabidopsis thaliana landsberg
atggggtttatcacgaaaatttcgccacaatttgaaaagtccagaaaagtaagtgggcctagatcattgcaacccagccaggtaatgatactttcttcatcagtgctgaaatttgtaaagaaaactactgcttctgttagaagtatcatttaatctaatttttggtattgtgatttgttctagtggggcatgctatgcccatgtgataccccagaaggcgaatcttgtgggcttgtcaagaacttggctttaatgactcatgtcacaacagatgaagaggaaggcccattggttgctatggtatggtttgctattttttttgctcatatggtcgattaatgcgaatctgtgtttgaataaattttctggaaacagtgctacaaattgggtgttacagatctggaagtattgacagcagaggagctgcatactccggactcattcttggacatattgaatgggctaatacttggcaaacatagtaggccacaggtactttatataaatacatggttttgcaacaagcacaatacacttatttacacctcttcacgagtttcttttgtttcagtacttcgccaattcacttagaaggctgcgtccagctggaaaaattggagagttg

SEQ ID NO: 183571 - DNA, 708 bp, Arabidopsis thaliana landsberg
atgaattatcgactgtcacgtcatcgatacacggaagggctatgttgcaggagatttttcagattgtggtttgacctgtatttatttgacatggaggtttgtcttgcaaaaaaaaattaaattgagggtttttttgcacaaaacccaaaagagtaattgaggtccacgtcatcggtacacgggagggctgtattgcgggtgacttttgagattgtgggattgacttgcatatttcggacttggaggataaatttgcaaacgagatcgacttgaaagattgttttgcagaaaactctaagattaacaatacaaaattttcactttaagaattgattttacgtcttagctcaaaatacaggagtacttaattaagataaattgatcctatttgaaaagggaaaatgtcagaacaaatcgtgaactttcaaatttgggacgaaaatgcaagaactttcgaaatattatttaaatcacaaagtttcgtttgttttttactaataaaaattgtttaagtatcgttgacttgaccattttgggcacgtcgttaaattcagattaacagagttaatcttctgttaaatcgaaatgacgtcatttttaaagctccaaaacgacgttatttcattagaaaataatgatgcaagattggcgtccacaaagactcgaacatatgacctactggactcatatggggcaatataccgctaa

SEQ ID NO: 183572 - DNA, 360 bp, Arabidopsis thaliana landsberg
  unsure (1)..(360): unsure at all n locations
atggggttggtttaccgtgtcctggaggtcaccctggtgtcgnnnnnnnnnnnnnnnnnnnnnnnnnncttctcccggactcgcatctacgccgtggcttccatctccggattcgacctccgcatcccttcccacagcacccaagcagaccacagcaacggctgcaacccctgctggaacgccgtggtacacttccccatcccggctgccgctgacacccgcggcctctcactccacgtgaggctccgcgcccagcgtctatacctgggcgatcgcgacatcggcgacgtgtttgtgcccatcgacgacctcctggccggcgccgacaagggtggccatccgaggcccctgagctaccac

SEQ ID NO: 183573 - DNA, 207 bp, Arabidopsis thaliana landsberg
tttcttcgtcctggaacacaaacagtcccaaataaatgcacaactaaagccaaaccaacaatcaactttgttacaaaggttaaaagcagcagaaccttcaaaacaaaattgagagctgctacagaactctccagatttagattaatagcaacttcaaaaaaagaatctccttcagataacttcttcaaaggtgtctctatggcatag

SEQ ID NO: 183574 - DNA, 67 bp, Arabidopsis thaliana landsberg
atggagatattcaaagaatataaaccatcatcacaagacatgaatgacttacataacagcaatagag

SEQ ID NO: 183575 - DNA, 348 bp, Arabidopsis thaliana landsberg
atgcttctaaaagccaactcaacccaacaaccatacttcacgcactctcttcaggtaaggatgtgatgattctttgagaccaaatggtcaataaatatatcaaagaagtctattatttccccttcctcgtttgttttgaaacacataactgactttattggtgatagtggtaagcagagcaaacgattcggctttcgtggtgaggagagccaaggagaggcttttggtggctaggagagccgaggagaggcttttggtggcaaggagaggcaaggagaggcttttggtggtgaagaagaaaaagtcattagtagtgaggtgaaagaaggagccattgataccatttga

SEQ ID NO: 183576 - DNA, 470 bp, Arabidopsis thaliana landsberg
atgagctatctcaactccgacgaatccaaccaccgtatcaacaacatccaccggagcttccaagaaacgtctcagtacttccctaagagacgatatcgacgttcaagattcagcttcttcctccgcctcttcctccgaggctacttccgccgtcgactacagcatatccgccgtcacggtgccgcagagaccgtcgaagacgatggtgattggtacgatattcggtagaagaaaggacacgtgtggtcctgtgttcaacacgaccgtctctctgttaaaccaatccttctcctcgagctttcaatagctacgagccagttagttcacgagatgggttcgggtcatgttcgtgtcgctttagaatgcccgacccgacccgaattgaagtcttgcttgctgagatccgtacccgtttggacgatgttttgtaccggaaggaagctagggtttgctgtacggagaagtgctaa

SEQ ID NO: 183577 - DNA, 528 bp, Arabidopsis thaliana landsberg
atgcaaggtgaggttgccaaatccattatggagaaaaacggagctccattgtctattgaggaacacaactcaatcgtgtctcaaataagagatgaagctaaagaagctcatgaagaaatgatggaggcaaagggcatgaaatctaaaagtaagtctaaattctttgagtcttttgtttttgtctaacgaatgttatcttagatattattttgtttgacatggtgaaatctatctgcagtgacgcttatatgtgatgcgcgtagaacggaaccaatcatgttggatgataatggttttgttctctggaaattgaagtgttttgaagaagaacaattttttttgcttcaaggtttgaatttacttactctttgtttatgtttcttatattcaaatgtgtttagtaatttaatctccatcttatcaatgcacagatctaggaacatttgatgatttatgtccacatgaaagatggttagcttttaaacctgagcagaaaccagagatagagaaatatatctcttgtaagag

SEQ ID NO: 183578 - DNA, 492 bp, Arabidopsis thaliana landsberg
ggtggatgcaggacagggatggcgaaagtaacaaatgcctatgatctaccagcgaggtaattggtgatggagaagacggtttaaaataaattctttacttattagaggactgaaaaagaaagaaattgtgctccttgaatctagtctctgctctatctatcaactatccttgtccatatgatagagcttctccattgttgactatgtacagttttttaatgctgtgtgagtactacatcctatgatttctgaggaacttctcatttctcaaaataccaaacattctgtgcgactttaatatggactgtgaaatagatttgtgccttagtccccaactcaaaaaaatgtgttttttgtttgtcttttgttcaggagggttatccatacagtaggacccaagtatgcagtaaagtatcatacagctgctgagaatgctctaagtcactgctatagatcttgtctggaacttctcatagatagtgggctacaaag

SEQ ID NO: 183579 - DNA, 778 bp, Arabidopsis thaliana landsberg
atgataccatctgaaccattcttcgtgcctcgacccggtgcaacccatgaggatgatggttagttaaaaattctttagatcttattggtctttcttcgtcgtgagtttaatagttttggttttgtgaaggagtggtgatatcgatagtaagtgaagaaaatggaggaagctttgcaatcttgcttgatgggagctcctttgaagaaatagcaagagccaagtttccctatggccttccttatggcttgcatggttgctggatccccaaagattaactacaaagtctcaacaaagataccttcattatacaaaacacaacatatgtataattaataccctctgtgcaggttttgtaaattgttgtcccttatatatgctttttgtctatatatgtgatgtacaaaaccaaaataaaaggaacggattgtggtggatacagttattaaaaattgcactagaccgaccatttcttgcaattcaattaaattacatcatcctacgatacatcaatatacacccaactgagaaacgctatattacaatttactctattttcttgtttatttccctaggtgaaaacaaattacaacaaaatgaaaagaaaaagtcagaaaattcagacacttctcctctctgcagaaaattcaccttaggttataatggtgctgcaggtgtggagccacaactatccccacccagtgaatcgggtataatcacctgcacaaccttaggagcaggttcgggttcactggttccacctatcaattcgcaaatatga

SEQ ID NO: 183580 - DNA, 77 bp, Arabidopsis thaliana landsberg
agtcaaatagacttcgttcgtgtcctaagaaactacagcaacgacgagccatcggttctcaacatccgaaagggtga

SEQ ID NO: 183581 - DNA, 330 bp, Arabidopsis thaliana landsberg
atgcgcttcgttcttttccggcacgcccacaaaggcctccttcctttcgaagatcccgagctcagcctccccggcttcgaacaggcggtgcgtctccctggcctgctgaaaagcccgccggacaccgctttgccgcgcccgacccgcctgatggtttcgccccgccggcgtgcctcccagacattttatccgctggcgaaggagctgcaactgcccctgaccgtgcaggcggaactcgatcaacggcagaacaccgagagcggcgccgaattccgccggcgcgtgcaggaatacctgcagcgcctgccgcgggaatccgcgccccatgag

SEQ ID NO: 183582 - DNA, 229 bp, Arabidopsis thaliana landsberg
tagccgcgggaaagaaaagggtgacgcggcttactggcggcgagggaggtccggcgaggtggtcagcgatgttcaggaggtcgcgacggtcacgtcgatgtgcgggtcggcgtcagaggtggtcggagctcccctggccacgaacacaggcggcggcgatcgacggcggcgcctgctccggccaaaccacggcgggagagttcaattaatgggcacgaggagcttcacg

SEQ ID NO: 183583 - DNA, 654 bp, Arabidopsis thaliana landsberg
tggagatgaagattctgtaattccacttcttggttcaagaactttggtaaaagaacttgcagatgatctcaacttcaataccacagttccttatggggcttggttcgacaaaggacaggtttgttccacagaaaaccttaagtatgctctggacttggtttgaccattcggtttcgcttggtttcggtttcgatttggttttgtgaaagtaggtttggttttttttttttttttagtataaaaagtggaaaaataatctaaactaagttatatattttatgtgtaataaaatgtattttttggttaatagtttagtttataatgaatcttttaatagactaaatttgttttgattttaacttcgttataggtgtaagaaaattactaccgttgttttcatttttaaatgtttggttcggttgcaatttttttttttttatagtttgttaggttttgtacttaaccctcttattgacgtttacgtaggttggcggatgggtagtagagtatgggaatctactgacattcgcaacggtgagaggagcggctcatatggtgccgtactcgcagccttcacgagctttacatttgttcaccagctttgtgcttggccgtaaattgccacacaagtcgcctcctgctcttcatgattga

SEQ ID NO: 183584 - DNA, 395 bp, Arabidopsis thaliana landsberg
ggaagagacttgactattgctgagaagacaaactatttggtcttcatgattaatgctttccaggtttgttccgtttcttgcatgtaacttttgaataggtcgtaagtatttagaatgctgttgcgcctgtttcagatcagaaaattaatacatgatatagtaagcagtaattgcagacaatatagctgtgtgctactcagtaaattgtttgtttcacgtggaaaaccttattattcatgtttgtacacaaattatatccttgtgctattttgtttttcttcaatattcttaactgtgtgatgttacagagtttggaagacgcggtggttaatgagattgttctaagtctagcaggattacaatcttggcacagcttgtcttatggacgtttccag

SEQ ID NO: 183585 - DNA, 956 bp, Arabidopsis thaliana landsberg
atgcgtcaaaatacagcagatgatgcaacggtgtatagtcaggacatatctgaatgtgacattaagttggtagtgtctgaacacaagccaaaaccgctgcatatggggcctggttctgcgacaaagtcccgctccaacatcagtaacttcgagaaagatgtgatgcagaaaataggtggaacagagttttcaaggattaacagttggcttcgttcgcaatctgaaaacaggagttacgtgcttgacaagactcaacttcctgcgactcatttcctagaaaacctaaacagatcgttggagaagtcaccaacacagagttttacaacggagaagatcactggaaatgaactggaaggtatagaagagactaaaacaaatgagacagtggttaaccctacactgatgcttaaaaaactgtttgagctgcaatgtctctgttctgctgaagaagaggatcagattttgtccagattcccaattcctggctatgaggatgatgatgagtctcgttatcctccaattttagaaaacgatggatttagccagcacatagacaatgaatggtttggagtcaataattacagtgcggattgggagcgagattcaccagccacgatcccgttgttagaatgcgaaccggatctcaaacagctgttaccggaattgggtttggatcgatcacttaaaccaagaggtttggcggtcgccgagggtgcagctccaccattgcttagagcaaaagaaaccttgggagaaagaggtaaacgtttgtgttctggcgtgaaatgtttttacaaacgcaaacgcttttctaagattctgtctttttctgttgttgttgcaggaaaaggtccaacgttcatgcagaaacttcaggctttatgcttccgtattcttctgggattagggtttatggatgtgggctttggtaatgacttcaacaacgggttaacaaa

SEQ ID NO: 183586 - DNA, 274 bp, Arabidopsis thaliana landsberg
ggttgctcctcctctcgtgatatctctaccttctggtgaacttattttgggaaaggtagttatgcttttcctttttcccccattcaatgtatttgttcggttttgaaatgtcgtcttcattagtttcttcttgtacatgtaggagaacattggagtttttgttgatcaaaatgggaagctccttcaaacagagagaatctgttggtcagaggccccaacgtctattgtcattcaaatccgttatgcgatagccttgttacctcgtcgagttgag

SEQ ID NO: 183587 - DNA, 422 bp, Arabidopsis thaliana landsberg
atgcacggcgaattcgacatgatcgtcgtcgacggcaagcgacacttcgacgcgaagatcggtccgttccggctggcggtgccgtcggtactgaactagcgggcgcgtttcgcgcgccgtgcgcgatgcacgcgccaggcctgacgatattcgtcggcgaggtaccgccagaacgcgccgaacacgccgagcctgaagtccgcgggcttgccatcggcgagccggaagatctgcagatagaaccagccctgctgaccgagcagattgatcagcttgaacaagaagaccttggttgtcgggccgaacacgccgggtcccagctgcatgttctgttcgtagcgcggcagttcgctgacttcacgtgcaagcaaacgcttcggcagatccggttcgccgcacagcggccggccgaggccggcgac

SEQ ID NO: 183588 - DNA, 186 bp, Arabidopsis thaliana landsberg
aaggagatatcttgctcttaaaggaattatccaacatcacttgtcgatggacttgctactgaagctacaagaacatggcatgatcagttatgtcatattggagttgattcacagagaagatgttggagaagtacatgaagaagatgatgtcatggagaatatcactaaaaaaaccacgagaatgag

SEQ ID NO: 183589 - DNA, 3453 bp, Arabidopsis thaliana landsberg
cctaaaacaaatgggctgaaacttgaaaaatttcgaagagactcgcatgtcacgcggaagatgtttctatccgccgaaaaattaggattggatgataacatatgtttttctccatatggattcactcatttctctagaaagtatacaaataaggatgatcgaagctgtaagatttttcattatagtctgcagacgcatatgactgcgagagatgatagttatttgaattacgatgtcaacaagaattctattcaaggtgcagaggagaatttcataggagaatcagttggttgctctttccaaggatttctttttttggtgacttgtgatggtctttcggtttttctcccttctatctcaataacctcaaattacccaactattgaggccattgaatatctgcagccattccagaccactgtcatgggataccggggaagagacgatttggcagcaggggaatcacgttttccttggcaagttgaggtcatagatagagttatcttgtttgaaggccctgaagttgcagatcatttatgcttggaaaatggtacgaaacagtactcatgttggttaatgacgtttttgcatccgtaaagcttttaatttatagagtttaaccttccacagtttgtttatagattgatatttatctcttaaccaacgtggcttgtcatgccgaaagagttttaagtacaagtagttgataattagtaactagtttaccaaaactatgtcatacgggtttgtttgataagtcaatacatgtggaaactagcataaaactgaacttaactgtaactgaatgcatggaatacctaattatatgatgaaatcatgctgggccgtgcattttactttcaaaattcatcagctgtttgtgagcatgagtaaacacttgtttgcagtagttcagtgaatttgttatctctcatttcttcacaattacgttatgatttctgtgtatttgcttgttgtaacaaaataacctcacatattgagacttgaagatgtttatagattcgctgacacttaaattttgttcaataagcttatggtatgttaaatgaatcactgctgtcataggttgggacctcaaaattgctcgtttgcgtcgactgcaaatggcgttggactacttaaaatatgatgacatcaacgagtaagttgctagcaatcttttgtgcttaatctgagaaccgtagtcccccacagcaaagtggctttccttaaacaaaaatattagagaagaattatgtgtggtttgtatggttgggttgacaacttcggtttttgtcttatggtttctatggaaggatgtgactactttagaaaagaaagattgcttgttaaaaatttgtgtaagagtgtaaatatgtttaatgccatcaatgtgatttgtcttgtatcatgaattgattttgattaacatctcctgtgtgggtaggtctttgaagatgcttggtaatgtgaagctggcagaggaaggcatgctgagggtgctcttttctgctgtgtatctattgtcgcgcaaggatagaaacgataatgagatttctgctgtatctaggtgaggatcttctgagtaattagggcataaggatagtttgtttttcaggtctcaacttcaatgaggtggatcaataatgaaacagaagtagtgttctccctgctttgtagatatgtccttacacattagcatggtttttagatttataactatgctgtatacatacatctttatgactgtaactcaaatttaaattattcatacatgttacactttgacttagattgaaggcatgttcagattcatgcaaaagtttctccaggccccacagctttaggattttgtatattgattcattgacatgcaatatttcttagaatccagttttagcaacatcattatcttgtacggtttagtaataccattagctttagtgaccgggctgttttctcgctgacatattcatacttattgctacatggtgaatataggctccttggattggctacaatgtttgcgactgagatgattcgcagatatgggttacttgaatatcggaaagatgtttacatgtttgacagcaaacctaggacacagatactttcacttccagcagtttcacttaatatcgatgtaatggaaaattcaaggaggctgtcagagatgggttatctattggaaatcaccaggaatattcaatcccgtattaccagaaagtttaagaagctaggaaaggtagtatattatattaatacaaatgttagttttatattttttttgtttttgccctagatttgacttatgatatgtgtgttgtacagggaaataatgagaagtcactgaacctggtagacccaaattctttgcaggatgattctcagcttgaaattgttccagatccagcatctgcagagtcaagacaacttgacacttctttattcgataccaatgaggagcttgctttgacgcctatgggtatgatgacagctggtcaaatcattgacgaaagaagttatgcatctggccttgtaccccaagggatagttgaagaaaagaaagttcttcctctggaaaatcccaaggagatgatggctcgttggaaggctaacaatttggatttaaaaactgtggttaaggatgccttgctctctggtcgactccctttagctgttcttcaattgcatcttcaacattctaaagacgtggttgaagatggagagcatcatgatacatttactgaagttcgtgatatcggaagagctattgcttatgacctatttttgaaggtaagcctgcatatactggcttagacagagtgatgtacatgtatgatgtctagcccttgactttcttgatgtgtagggtgaacctggggttgccattgccactctgcaaaggctcggagaggatgtagaagcatgtctcaatcagttggtatttggcacagtgagaagatctcttcgatatcaaattgctgaagaaatgagaaaacttggtttcttaagaccatatgaagacaatgtactggagaggatatctcttatcgaggtataacatttcctaatcattacttgtcgtaagggtatcatggttctgtatgatgctaactttatttaacttcttcgttgcttgaccctgtgacaaaaaagaggctttatcctagcagccacttttgggaaacatatcttgctcgtcgaaaggaactccttaaagctgcactaccttttgactccagtgaaattagcttgcaccttggggggtcgtctttgtttcagcatctcaagattgagtgtggtgaggttgatggtgttgttctaggttcttggactaaaatcaatgagagtgcatctgagcatgcacctgatgaaaccgatgcagttgctggctactgggctgcagcagctgtgtggtcaaatgcttgggatcagagaacatttgatcat

SEQ ID NO: 183590 - DNA, 148 bp, Arabidopsis thaliana landsberg
ggaatttccctgaatctgatcttaaatcctcctcagaaacccagaaacgcgaagatgggagacaatggagaatcaataaaatggccaaagatcaaactcaagtcgaatctcaatcgtctcttatcttaagaatcatgatctctttacc

SEQ ID NO: 183591 - DNA, 103 bp, Arabidopsis thaliana landsberg
ggtctctgctttaggttctcatactatggagatgatgtcaagaaatggttggaggatagtaacctggcttcttactccaattttgtatcaacccaatcggtga

SEQ ID NO: 183592 - DNA, 624 bp, Arabidopsis thaliana landsberg
atggacaattcagaaaatgttccctcttacgatcaaaacatcaatttcactcctaatttgacgagagatcaagaacatgtgatcatggtctctgctttgcaacaagtaatatccaacgtcggaggtgacacgaactcgaatgcatgggaagctgatcttccacctttgaacgctggcccttgtcctctttgtagtgtcaccggctgctacggttgcgtcttcccacgacacgaggcgataattaagaaggagaagaagcacaaaggagtgaggaaaaaaccatcaggtaagttctattctaatacaagctttgagtttttctagtactagctagttttagttcatgtattttcatatataagccacgagcccatgaggtaaactatgttccaatacgttagcatgcagttgatgtactttcataaaccatcaggtaaatgggcggcggagatatgggatccgagtttgaaagtaaggagatggcttggaacgtttccaacagcggagatggcggctaaggcttacaacgatgcggcggctgagtttgtcggaagaagaccagcaagacgtggcacaaagaacggagaggaagcatctaccaagaagacgacggtgaaaaattaa

SEQ ID NO: 183593 - DNA, 62 bp, Arabidopsis thaliana landsberg
aggggttcctcgagagatcatcaatggcggatacacaaacgattcgactcgaagtcatctga

SEQ ID NO: 183594 - DNA, 303 bp, Arabidopsis thaliana landsberg
atgaaagtgaccacaattgataggtacgtgaagtaccatgtgaaagagttcgagaagactttcaacgtcaaattccctgcttgttccatcgctgcgaaacgacacattgatcagagcacaacgatcttggatgttcaaggcgtggtatgtgttcaattaagctatacaaatgtattcccctcatagattctctgtaaggacgattcaatctctgtgtgtttgcaggggcttagtaacttcaacaaagctgcaaaagatcttcttcagagtattcagaaaatcgacaacgataactaccctgag

SEQ ID NO: 183595 - DNA, 705 bp, Arabidopsis thaliana landsberg
ttgaagagggtgtgaatggaagcagcatctgtcatgaaaggaatctgagcatagactccagcaagagcgcaccgtatgcattcgagaagcagacatatgtaggtgaatccgatggccatccaataatacattccgaaccgtcctttgaaatgaatcagcgggaagaaattgctagtgcaccatatgacctgaagagctgtttcaagaagcatacccatcatcatgtgaaacctcaagtaatgaggcagctctttgttcttcaccacccacatataacccaagtagcagtagaccatgaagaaccatgtcggccatctgtttattgctcccgggatgaaatatatcatgtccccaatagcgtcgtgcttttcgagaaacggttggacatagaaaccaacatcagatatttggagggatatcaaataaggaacacaagctaacgtcctccaccaccattcaggtctctctgcgattttaggcagtttgattttaaagaagtcatctttagccactcttgcaggctctatcggtctccggtgtcttctcaaaccaggagctaatggtggcaagccattagcaaagagctggttggatgatgttgctgctgctgcaaagtccacagatgcagttgctgcagaatcacaaagagcacatgatttagctgtcaagcctcaaagccatggttacaggacaagcaaagaataa

SEQ ID NO: 183596 - DNA, 889 bp, Arabidopsis thaliana landsberg
atggatgccaccacccccaaatactccaaggctaggtacgatgaaatcatcaaggaggtgtcttcatacctgaagaaggtcggatacaaccctgacaaaatcccatttgtgccaatctctggattcgagggagacaacatgattgagaggtcaaccaaccttgactggtacaagggaccaactcttcttgaggctcttgaccagatcaacgagcccaagaggccatcagacaagccccttcgtcttccacttcaggatgtctacaagattggtggtattggaacggtgccagtgggacgtgttgagactggtatgatcaatttctggtatggttgtgacctttgctcccacaggattgaccactgaggtcaagtctgttgagatgcaccacgagtctcttcttgaggcacttccaggtgacaacgttgggttcaatgttaagaatgttgctgtcaaggatcttaagagagggtacgtcgcatccaactccaaggatgaccctgccaagggtgctgctaacttcacctcccaggtcatcatcatgaaccaccctggtcagattggtaacggttacgccccagtcctggattgccacacctctcacattgcagtcaagttctctgagatcttgaccaagattgacaggcgttctggtaaggagattgagaaggagcctaaattcttgaagaatggtgatgctggtatggtgaagatgactccaaccaagcccatggttgtggagaccttctctgagtacccaccacttggacgtttcgctgtgagggacatgaggcagactgttgcagtcggtgttatcaagagtgttgacaagaaggacccaactggagccaaggttaccaaggctgcagtcaagaagggtgccaagtga

SEQ ID NO: 183597 - DNA, 192 bp, Arabidopsis thaliana landsberg
atgagtgatgctggctgtccgattctgccgtcgcttgaggagttcgtcattcacggtgtgcgttacgtttatccgcccgaacggggtgagctgacgcgcggaatgccgacgggatatgccgcaccgccattggataagctcattgtgcaaccgaatgatccgccgccggtgtggccttatgccgaaggcacg

SEQ ID NO: 183598 - DNA, 120 bp, Arabidopsis thaliana landsberg
ccgtacatcacggtcagaaccaattttgtagtgggcgaacaaagctgcttgcatattgattcagtgactcaagctgaggaacacaatcttaaagacatgctgatggagtatgttaagtag

SEQ ID NO: 183599 - DNA, 382 bp, Arabidopsis thaliana landsberg
  unsure (1)..(382): unsure at all n locations
accgcaaagggtctgggcgaactcggcatcaccgtcgtcatcggcgcacgcgacctcgctaagggcgaagccgccgcgaagcaactgcaagcgcaaggcttcagcgcgcatgccgtcgtctatgacgcggaccgcccggaaacggcagtgagcgtgcatgactacttggnnnnnnnnnnnnnnnnnnnnnnnnnnnnnnnnnnnnnnnnnnnnnnnnncagggaagaactcatgaccaacaacagcagtaccgtcacacaggatgtactgaagcagaccttccagaccaatctcttcgccgtcatcgcgctcacacagaccctgctgcctctgatcaagaaagccccggcaggccgcatcgtcaacctgtccagcatcctcg

SEQ ID NO: 183600 - DNA, 116 bp, Arabidopsis thaliana landsberg
atgatgtggaaagatgtgaaaataatgcttcaatagtattttattatttttacacttttggacgtttctatgcagagagagttcgatcaacgatagctttttacggacatcaatag

SEQ ID NO: 183601 - DNA, 1351 bp, Arabidopsis thaliana landsberg
atgtctattaaagcatttgctttgattcaactactatccgtcacgattttatacaaccatgttcatgcaacaagtccgatcaaaaccatcgtagttgtggtgatggaaaatagatctttcgatcacatgcttggatggatgaagaaactaaacccggagatcaacggtgtggacgggtcggagtcaaacccggtctcggtgtcggacccttcctctagaaaaataaaattcgggtcaggttcgcattacgtagatccggaccctggtcattcgtttcaagcgataagagagcaagtattcgggtcaaatgatacatcaatggatcctccaccgatgaacgggtttgttcaacaagcatattccgaggaccctagtggtaacatgtcggcaagtgttatgaatggatttgaacctgataaggttcctgtctacaagtctcttgtctccgagttcgctgttttcgataggtaataataatatactttcactgtctttttggaattagtattacgtcatataatcttgttgtcgtttcctttgtcgtcttgttggctcagttttttttttttttttgggtgcaaatgctcatcttacaacaacactaaattagtatgttacgtaatatttttcgttaaaatatattactaaaactattgatttaaatataaaactattgatttaaatatgttccacttcagttatattctcctttacactttttttcccgtcgatatttctccattttttaatatcttatattttttcctctctatatggaagatttatcgatatctattattttgttaaatggtttatggaagtattattattattacgtatataatttttttttggtttttgttaagtactaataatatagtcttactggcgctctctttgtggtagtgtgtactggagtttgaccgttcgctcatgttttttttttgaagaacgaacgttggttcatgtattttttttattgggggggcgaactaccgttagtacatattaaattcattagtacactaatttgatattaaaatgaaataaatctgatattttttatacataaaaaacagatggtttgcatcggttccatcatcgacacagccaaacagaatgtttgtacactcagggacgtcagcgggagccaccagcaacaaccctatctcccttgcaaagggttatcctcaaagaaccattttcgacaatcttgacgacgaagaattctctttcggtatatactaccagaatattccggcagtattgttttatcaaagcctaaggaaactcaaatacgtttttaagttccatagctatgggaactcttttaaggatcatgcaaagcaag

SEQ ID NO: 183602 - DNA, 1371 bp, Arabidopsis thaliana landsberg
atgcctcctcggtctgtcccacaagccaagatgcaaaggtatttcgaaatcatgttcttcttcttcttcttctctggtttgaactctctctttcgttacttttctaaaaatcggtgcttttttctaatttcttagcattctctgatttagtctctctgtttcctgtgtgtttctctagctttactcttttcgtttagttttttcaagatgatatagtattccagtttctcttcactcatttttgcaatcatgttcgttttcttctttttctccgtctcctgtttgcttctctggtttgaactctctatttcgttgcttttccaaaaatcggtgcttttttctaatttcttagcatcctcggatttagtctctctgtttactgtgtgtttttctagctttactcttttcgtttaggtttttcaagatgatatagtattccagtttctcttcactcattcttgcaatcatgttcgttttctacttctttttctacatgttcatgtttgtttctgatacagctttattcttcctcttatttcgttagttcttccaaaaacctgcttttttctatattcttagcatcctctgatttagtagtcttctccgtttgttttcaggatccagaacgtctaccttgcactacatgttctcttaatcaacgccattgtcatttccttggtgttcacggcaatagctgccggtagggatgacaacgaaacaatttccgagtccaactccaactcaacaaccgctgctcctcctgcttcacagaaacatgcccgaccggatatccgtttattcctcttcgggatacttttcgtagtatatctcatggtgaaatcctaccaactttctcttgatgacatctggtttcctttcaagaagttcttagatgaaatttcattgtggattggagttgtgtcccttgttgttctcctgctccttaccactacagtgtttacaatctacattgcagtcccttcagtcatattggcgatagtgggaaggttcatttttgggagaccctgctttctagaattcggctacatcaccttcctacagatatcaaaatggatttgttatctctggcttctaatcgttttgggatgtgcaaagcttagaaggaatttgtttacagggacttcagaggaatccagaatgttactaacagatagggttactaaataggggaatgcaaaggattcttccctcgtgaagtggaacaagaggattgccgctgcgagagctcgcgcaaccgctgaatctgacagagtggccaaagagaaagccgatattgaagccgatgaggacgctgccgagacagccgaagtcgagctcggcttgatggtggctccggtcaatgcccaataa

SEQ ID NO: 183603 - DNA, 824 bp, Arabidopsis thaliana landsberg
aaatctgtgacaaatagccgacaaaaaaaaaaatctgttgggtttgatttggaccggaatatagacattgcggcctatcaagaaataaaacttgggctaatcaaacaacgaaagcctgcctatagtagatacgagataatgttgatgctccctcatcggaagtttgaggatgggcactcgtgtgtagcatagtataaataaagaagatggtcgaggattgcaaattacttacctggacggggtttacgggtgatcatgaagatccgtggcctaggctagtggcttcctgcacttgaggtgcgctaagccaaaggtcaccccaagtgggagatcctgcgtcattatttgttgccttgggggcctgcgttcgcgcggccccttccatttccaatagttcaatcttttgatcgtcgttttgactgagttaattagagctagatcttagtcaatggctcatgttacatttattttcacagatccagaagaaaaaaaaattctgtctaattaccagctaggctggttattggatagtgttagcgatccaagacactgatggaggcaaatcattgtaatgggctcatagttgctgttaatggatctggtgcttctcaaatatttcatttggttgcagtctaacacaagtttgcgttagagtgttagtggcaaaagctgaaagtttcaagcccttatggtgcaagattgatttatgccacagatcaaatgttgtggaagcggtgcgcattgcatcctttgtggatcaaaccattctctttgttcgaagaagtgtaaagaatgtgtcaagaattttggcagcagagacgtga

SEQ ID NO: 183604 - DNA, 422 bp, Arabidopsis thaliana landsberg
atgatggctcacttgtcggaggtgcaactgcgattggcggcggaagtcgaaggcggattggtgggggtcactgcgagtcaagcgattagcgtcagatccgccggatctgagttggctaggtaaggagtaaggcggctagggttctgtttgagcctgctaccctaaccgctgccgcacttggtttttgtctgaccggattgaggcagtgacgtcgcggaggaggcttgccctggtttcgacgctggaggtgagggttcgatctagggttctagttgcttggtggaggactggattaagcggatcggttgtctatggttgcgagctttcccgggagaggagtttctggtcggttccatcgttggcttcgagtttgtggcgggaatcgataactccggtcacgtcgctcgagtcgggctggagtg

SEQ ID NO: 183605 - DNA, 909 bp, Arabidopsis thaliana landsberg
atgttggagaaagcagaaggtttttacgcaatcaacaaccagtttcagacgaatgggccaaaagggttctctgagctcaagattctagcgaacggagacatgttcgtgaggatggatttgcctggagttcctgatgaaggcggcatgagtgtttatcataaccggtcggaggaatctgtagttgtttacgccaaagcacccaaggttcacacacacgactccaccgaacgtcgttacctaacgagcactggaattggctgcagctgctgtgcgatcttaagcatgaccactcacatgtccgacggtgtttttagacttaccctctccaagactcgcatcgatccaaatcgctcttcttgcatcggtcagtatcacccatctttctctaatatatcatatgctcgtcgtttatagatcatttttctgatatgaaaagtttatgcttttgtcaacagttcttggttgctcaggtttccgtgaaggtatttccatttttaatccatctaccatttccagaaactttcaatatctaaaagtttggctttttcctacacgaactttcgaaaattgtttactcatctttaaatgtttgtcttttctgtgtgtttgtggtcggtagatctccgtggcaccgatccaaatggtattctcctgtacaactctcttgtcctagtaattatatttagtactgagattgggtgtttaaaatgagagtatttgtacttgcgttcccacaatcgactatggcctatgagtcgaagcagctcccaaacggcaaactattcgtgcgtgcagacatgcctggtgttcccaaagaaaacttcactgtctctgtcacgaatgggcgagtcaaggtgactggtgaagctcctgctctgagccatgactcaagtggccgtttctactctg

SEQ ID NO: 183606 - DNA, 1332 bp, Arabidopsis thaliana landsberg
aatccggctttgcctactggccctcgtggattgatcacaatctctgacgccgagctttatcagattggtcgtgttcgctctcaaggtctgttttttttattgataaatacagaattttggtgtacctgttttatgaaaattcagatcaaatttcaaaatcctgcctgtatgtttgccaattcagatttgaagataaaaattcaatcttttgcaactgtttagttcttcatgaagttgtgtgtttgtagaatttctgttggtttctgtgttttcgatcattcagaagtttcggataacaatgtgagtgatgatgtgattgtagatttgctaactggtggactcttgccttcgagtttgaagcgggaaagaagtccatgtgttcgatctctctcatggtctgagataggaatgtctccaaaccacgggtactttatttcttgtaacatgttcagttttgttttgtttctctatttcctaaattggtgattcaaataactctgctcaggtgcttactggctgtttgcacagcggaaggaagggttaagctataccgacctccatattctgatttctgtgctgagtgggttgaggtaggtcgtaaattctctttcgccttttataactaacttatgcatttaaagttgctttctcctctctttcgcagattgttgatatatctaaaatgctttatgagaatctatcaagcatgaactttggagagtccaaaaatccttctacttcattatctaaggtaacttgtatctctaaagtgttttcagtggaagtttgataaccatgaaggatgacttactactcccgcaaactatatgtatgtgtttcctataagggatatgtagatagtttgtacttcgtactcttcacttttagataaagacgcatctaaacaaatcgtttatatctttagttatcctttattaatggacaaatgttgttgtggaaggtattgcgttttgatggaattgttgatgtttgtctgcataatatttttatccaaactatattattgaaatgatttgtgctcttttataacaggatcaagtggtagaacatgaccatgaagaggatgaaaggatttcaagtctgaaggcacgcaagcgaagaaaaacaagtgcaaataacatgtaaagagcatttttttcactcttcaatttcgtcagatgcataccagtggtttgagaaattgttttccatgttctttttcctgttttgatcacttgactaacttactttcttcattttagcaacttgcatgaaaaaaattatacagatcgagcatcatgttccaagcaagacagtcaagcagagcataat

SEQ ID NO: 183607 - DNA, 317 bp, Arabidopsis thaliana landsberg
atgagtcaatacagccaaaaccaatcttcaggtttgtattcttttcttcgtactaatttagcatcagaccatatgtttagtcaatattctcatggttataatcatatttgcagtttcatagtagtaagtacttttttaaatggtaataagactaatgtgaaatatgaataacttataggagcttatcctacgccgccagtgtctaccggcccttacgtggcaccgccaccgctaggttacccaacgaacgacacaagtcatgccacggtggcaacggtggagacaaagtccaagggtgatggattcttaaaaggctg

SEQ ID NO: 183608 - DNA, 49 bp, Arabidopsis thaliana landsberg
atggtcctggaaatatgggtatccgacccttatggcactaaccggaaag

SEQ ID NO: 183609 - DNA, 181 bp, Arabidopsis thaliana landsberg
cgtttgggcgaatcattcgattgtgactttatccaatataatttggcgatttggcgatagcatggataagaaaatgacattgaccaacgagatcatttgcaatcgcgaagaaaagtcgggtgttttaactaaaccggcaccaatgtttgttttgataaccggaaatctaaaccgatcttga

SEQ ID NO: 183610 - DNA, 306 bp, Arabidopsis thaliana landsberg
atggaaacatcggtggctatcaaggaatcctgccagtccgtcggttatcaaggaaatcctgccgactccggcggtaaagaaattctcctggttctggcggttatcaaggaattggtaatgtaaactccggtggttatcaagtgaatcaaaacagttataaaaactccggtggttactatcaaggaaatcaagcgactaatgggaattctggtggttacagtccttatcaaggaactcaaggtggctatagtttccccaaccatggggttatggagtaaacgccaatcaaagcggtgcctacaatga

SEQ ID NO: 183611 - DNA, 338 bp, Arabidopsis thaliana landsberg
tgtacaaaaaacatcatcctccttctcttttcgatgaagtatggagattggaaaagatagggaaagatggagcatttcacagacgactgaatttgtcaaatataaacactgtcaaggatttcttaacacatttccatttaaactcttcaaaactccgacaagtaagattcgtcttccttactctgtgcctatgtgactaaggcttctgtggtgggcgtgaatcttttgtgtcaccagtaataatggtttgtgattgattctcacctggtgagaaatacacagttttaacttgtctacatgtaatgatgattgatgttccttgcaggttcttggtacgg

SEQ ID NO: 183612 - DNA, 126 bp, Arabidopsis thaliana landsberg
gactatcaagaagttttcaaacttcttaagaaagatcttgaacctttaaagcaaatcccaaccgactatagaaccatagtcctcttccttgttgatgaagctcttcccgtgccggcgaaaatctag

SEQ ID NO: 183613 - DNA, 687 bp, Arabidopsis thaliana landsberg
agagatttgttgggttgtttggaaaaggaggatgtcgatgcccttatcagctctgtcacaaagaatgttggattcagccagggcaagcctgtagcggcatttaccatcaacaaatggtcttgttcattggaagtcctttgaagctgaaagacccaatgtctttgatcgcctcgttcaaatcaccggttcccctataaaggtactaaaatgggatgctgtctcgtctacgtcagtacaaatctggtttttatcagatttgaatgattagtgattcttatttttaggatgaagataccgacgcgaatttggcatattggttatccaatacgtcaacattattattcatgctccaacaaagtgtgaaatctggtggaaccggggccactccacttcgacagtcaccttccttagtccgatggatgaccaaggtatatatactcttctctcttttttttttctttttaatcttgtattgatgagtttctgctccaaaagctaaacaatccttaccttatattttaacagggtttccgttctccagcggctgaagctattcgaccagttgatgccaaggatccagctttgcatttcaagcagcaacttgaagcatatgttgaaaagattttaggaatcatttgggataacctgaaaaaggagttgaacactgtccttgctctttgcatccag

SEQ ID NO: 183614 - DNA, 489 bp, Arabidopsis thaliana landsberg
actccctccgaggaatctagtctcaaccaactttacatcgattacaagctttccccagaagaatcctctcaccgagcttcgttaatggcagtagataatcttggagcgttacttgcgccttgtctggtgagtttctcgagggcgcatgtcatatttttcttctggaccgttttctctcttattgagatattatcaaagttggattttcaaatcctgcactaagcggttcaaatttaatgtgttttctctacggcttgatcgggaaaggactcctttacccttgagttggctttgcaagaatccactccaaattcagcgaatagcttctttcgatgagaaccttatgtccctaactctttctcttgtatcggcaagaatcgagtttatggaaccttcttcaacgtcccaatgtctattgataagaacagttccccatggtcccgaattggtcgcgaatgtggcttcggcttcccttggactcgcatgtga

SEQ ID NO: 183615 - DNA, 99 bp, Arabidopsis thaliana landsberg
atgatgttggatggagaacatgcgttaagaaggagtaattacgacttgaagaagatgaccagtccaaaatttgatcaaagactccttgagctgtggaaa

SEQ ID NO: 183616 - DNA, 604 bp, Arabidopsis thaliana landsberg
gcaacacatgcataaaccccgttgcgaggattacgccggcggcgaaggctttcgtcacgaagaagaaagtcgtctccggtttaagcgacgggaagaacttgcctagtaacggaaacataacgccgataactccggcggccagaacggaaggaattgcggcgatcttgtattttcttgctccggctttgtttgcttcgtcgtcttcgtgtgaacactcgcatttagactcgccggcggatacggcgatgaagaggaaggagatgaagaagaagaagaagagtaagagcttgacgttttgtgtgattctcatcttatcgattagggtttgaatttgaatctcttctcgatgataatgataaatgatgacgacgcgaagaatggaagaataaaggacaaaatacggggggagattgggagtgatcgatgtatttatctcaaagtgtgtgttacacagttatatagttatattttaacaggtgatgttctaagagaagacttatttctttgattttttgttaaattatatactttaatatgacattcaatatttattttaatttgcttttttttctctgtagaaactcaaacaagtttgactccataa

SEQ ID NO: 183617 - DNA, 341 bp, Arabidopsis thaliana landsberg
tcgtacaggcgccttcccccgacgagataggcggccatcggatcgccgatcagcagcccccgctggtccagttcgacgacctcttcgggcatcaatccggagtcgacccgtaccgggacccgcaccgctcgcagcatcgccgcacccagctgacccggcccgacctgcagccgagccccttcgggaaccagccgggccgcgtgttcgcagatcgccaggtgcgcgggccccggctgcgtgaaggtgacctcgcgcggggcgtcgtcggtctcaccgaggaccgtgatctcgtcggtcggctgcggtccggcggagtcggcgtgcggggcggttctgcttga

SEQ ID NO: 183618 - DNA, 93 bp, Arabidopsis thaliana landsberg
atggcggccaaagcgaagccgaagccgaacgtccagacgtcgaacgaacagattatcgccggcttcaatgagttgcgggccgagcagcgccag

SEQ ID NO: 183619 - DNA, 59 bp, Arabidopsis thaliana landsberg
atgagcaagtacgacaatcgctggcagaccgtggaagtgaaggtggaggccggcatcgg

SEQ ID NO: 183620 - DNA, 886 bp, Arabidopsis thaliana landsberg
atgaaggagaagtctgctgttgaaagagagcttaatggaatggttgaactaaaaaaagataacgccttgctgaaggtaattttcctcttttatattgaacacatgttaaacagcttgttgttttaggatttgggactagggacgtttaagggttctgttctacatcattaatttttctttaagttagatatttacctaggttttctctttggcaaagactttgctgaaagtctatagaattttgaaacacctgataatctgatattgcatgtagaaatacaggacttctttccggaagtgtactaatagcatctcagctttcttcgtcataaagacactttgagtttcttcccctaggtgaactgcaatgatactttagttaatctactggttgttcatgcttgtatgctcttcctttgttctcagtttgtgcttaaagagtggtggctgcagtttgaagtatagacacctcttatttctggctatacagaaattcccatcgactattttaacttgatctaggttcggaagaatgcgaagttcgatatatattgattgtgtttatgaaagggtagtaaaagattctgagcaatggtctcaaaagtgactacatcttcaatcagcttgtcttattcttttctttgttcactgctctctgcttttcaatgtagcatcatattggtgattttttaataatgttttccctctgtgtttagagacccaaatcttgtcgtcttggttgttcatgtgtatctgctaacaccttttattcacagaattcgatgaactccttggaaaagaagaatcgggttcttgagaaggagcttctcaatgctaaaaccaattgcaataatacactacagaagttgaaggaagctgaaaaaag

SEQ ID NO: 183621 - DNA, 46 bp, Arabidopsis thaliana landsberg
atggctattgcacgaactggagtttatgttgatgattaccttgagt

SEQ ID NO: 183622 - DNA, 92 bp, Arabidopsis thaliana landsberg
atgatgtcaagcctttatattgagcgtatagcgaatggaggagagccttcaaatgtcatttccgggaaacctattactggatttttcttgag

SEQ ID NO: 183623 - DNA, 193 bp, Arabidopsis thaliana landsberg
cgattgcggtatcgccaacgtcaacatcggcaccagcggcgccgagatcggcggtgcgttcggtggcgagaaggagactggcggtggccgtgagtccggttcggatgcctggaaaggttacatgcgtcgccagaccaacaccgtgaactactcgcgcgaactgccgttggcgcagggtatcgtgttcgactga

SEQ ID NO: 183624 - DNA, 290 bp, Arabidopsis thaliana landsberg
atgattgtcctaatgaaagagagtttgataagtattgggcagaagtaagtgatatctttgcaatcgctacggtatttgatccaaggttgaagcttacacttgcagattattgttttgcaaaactagatatcagtattcgtgagaaaagaatgaaacatttgcgtgctcaactacgtaaactttttgaagtttatgagaacaagtccaatgcggtatcacctacaactgagtctcgtgaagatgttacacatgatgatgaaactgcaaaagggaattttagcaattacgat

SEQ ID NO: 183625 - DNA, 196 bp, Arabidopsis thaliana landsberg
atgtcatttggcttgaccaatgctcctgcctacttcatgtacctgataaactcggtctttatgccagagctagaccgatttatcgtagttttcatcaacaacatgctggtctactctgagtgcgacaagaagcatgaagagcatctgagaatcgtgttaactagacttagggagcacaaatcatatgccaagttta

SEQ ID NO: 183626 - DNA, 115 bp, Arabidopsis thaliana landsberg
agaaatggtcgcattttttcccggtcggggctacagttttctgtcacagtcggacgccagttacttttgggcgtatagcgcgttcaggaccagcgttttctcattggcaagatga

SEQ ID NO: 183627 - DNA, 362 bp, Arabidopsis thaliana landsberg
atgacttcccacgtacacattgacggaggggacacactttcccacacggacggtctcgcacgagagggtttttccctcatcttgtgggaggtactgcagggagcaggttacactacacctccccagtacacggtgcagctgttcgaggaacaccgggtacctcgctgtaggtgaggatgactctggagcctcatcccctacagctagggtggcgttcactggactcagaatctttcggtttccgagccgatgacactacagaggccacagccatgcgcgtactgacgactttctgtggaattaccccctggagatgtcgaccaccccatcggcttgttctcgctgagaaggcagatgcctga

SEQ ID NO: 183628 - DNA, 147 bp, Arabidopsis thaliana landsberg
atccccaccggcacgatcggcatcaacggctacgcccctacagtgggctcaccgtccgacggcttcaaggccagcggcatcggccgcgagctgggcaccgaagcgctgcaaggctattaccagctcaagtcgacgtaccttatgtaa

SEQ ID NO: 183629 - DNA, 701 bp, Arabidopsis thaliana landsberg
ctcaaagcaagccattcaaaaagcaactaataatacgcggcaaatgaagtatcaaagagcgacacacaagtttccacgtcgaaatactcaagcagcgaaagcacagccttttagcactggaggcacttctatacaaggatgctcacagaaagctattgccttctcgcaagggcaaatgcgtgatttccaaaatgttgcagctaggctcacaaaagagctgaaatcgatgagacaaatcacaaagagatgtctgcaagctgaaagcaacacctccaacatgtctgactgtaacttagatgaggtacttttgtctattatcagcaattgaaatttggtttgtcaatttctaaatgttggctttctttctcttttcaggtgaaaactgtgattggaaatgcagaaaaaactgaagagagttgcaagaaatggctttcgatcattgaacgtgactgtaatcggttttgcaaactcatggtatgtttaacactcttaacattcacaaacacgactaagagatatttgtcttccttcaatctctaactcttcttcattcccttccttcacagggtatggtcagagaagattctccagctactgagaacattgttcataagaaaaagaaggttagatttgcagatgatgcaggaggagatctatgccatgtcaaggtttttgagattgatttggaatctgaatcataa

SEQ ID NO: 183630 - DNA, 1461 bp, Arabidopsis thaliana landsberg
gtaaggaacacaaagtcgtcctcatcaaggatatattcaaatggttgaagacagataagctgaagcctaaagaagagaggatggaaccttggagaaggctttgtctcgctgttatagttattgttgaggggatcttgatctgtagttcccaacctgtaaaagtttctaaacaagtcgttgaaatggtgaaggacttggaggcttttgaggcgtatccctggggacgagagtccttccttctcacaaagttagatccaaggtcagcaatctcccaggactaatcacgaagttcaatcagtctaacaattcaacacatggattccctcttgtcttccaactttttgtctttaacgttatccctgaattggaaagataccttccaaaccccgatgatacgcagactatcagtgagaggtctctcaccagtttgcctccgttgaagacttaccacaactccaacataatggagacagagctaattcctggggtaatctgtggacctaattttattagattcttattagtctctcactagtttgcctttgatgatttgtttagttgataaattgtttcggcttcaatgtagttgagtatttctccgttgttgcccattgatgatccaccatacccaaatatcaacgactactggatcgatgaagttgaagacccgacgcttgactatatggaaagggtcattggtagccgatacaagttccaacaatctgactggagaggtggttgtcgaacctggccaaagatcgtcgttgatgagaaccatcctaaagaagacaatgctcgaaaggcaaagaaggtgcctccacacagaccatcggatatccctgattctttccaggctggtccatctggtccccaaaagggccctctgctaaaggtaaagggaaggtgcatgaagagttcagtactccaccaccgaggactgatggacatgatattctccatggtctgatcatggaacaggttaattctaaatttcgtgaattgaaggatgaactgaaggttgaattatttggggaccttactggtatgtttatcttagagaattctttgttaaaggacgaactattagacgagataataagcaatttgcgccatggtgacaagtttccaagtcccaaatctggtggaaagtctccaaagtccactagtggtgatggaattgtcactccaccccctaaggctgcgtcccaaaaggacatagcagatgagggacaaattggtgaccccgcgaagaacctcgaccccaagattatccctgagagacaaagtaatatgccctcgccaatcgctgattcgtcaagcaagaaccctgccctaagtggacagactcatgctcaactcttgaatgcattgcagcagcaagcctggtctaattatgggggattgtctgaagttattaagaacatcaaccaatctcatgcatcttcctctggtatcatataa

SEQ ID NO: 183631 - DNA, 54 bp, Arabidopsis thaliana landsberg
gtttccgagtcctacccaatttcaccatgtacactcaagattcgaggtagtcag

SEQ ID NO: 183632 - DNA, 155 bp, Arabidopsis thaliana landsberg
aatgggttaaatgtaatttttatagcggctatgtgcagggacgttcatttacaaatactggatggatagtcagagacaatagtggtcaagttattcgatttggttgtgcaaaacttcaggcagcaaattcggcgatacacgcggaggcactgtga

SEQ ID NO: 183633 - DNA, 408 bp, Arabidopsis thaliana landsberg
ccgccttccgcgccatcaaggcgggcgtcgatatcgaaaccccggacggcgccgcctatccgcacctgatcgacctgatcaaggccggtcgcgtctcggaagacgagatcaatgcgccggtgcgccgcattctggagcttaagttccagtcgggcctgttcgagaacccgtatgtcgacgccaagctggccgacaagttgaccgcgacgccggacgcggtggcgctggcgcgcgaggcggcgaccaagaccgtcgtgctgttgaaaaacaatggcatactgcccttccagccgaaaaagctgggcaagctgctggtgctgggtacgcacgccaaggatacaccgatcggcggctattccgacgtgccgcgccatgtcgtttcgatcctcgacggcgttatggccgagg

SEQ ID NO: 183634 - DNA, 146 bp, Arabidopsis thaliana landsberg
atgcagaatcaattcgctgcgtcaaacaaccctcatggtcacccaacccttcgtcgaatcaattcagctgccacctcgctggtgtcttctgaacttagttgtggacatgtttatggcatagattggatgttgtggacttattttct

SEQ ID NO: 183635 - DNA, 70 bp, Arabidopsis thaliana landsberg
atgggcaaagaagagtgtatggatgctctgttcaagcatgctaatattaagcctatcatcacttccacag

SEQ ID NO: 183636 - DNA, 230 bp, Arabidopsis thaliana landsberg
atgaaagtgcacataggtgagctcgcgaaatgcaaaggatacgaacttattaatatatagtggtaaaagctaacgccttaagcctaataatattaagatttacgtttttgcccttttaatagatttaactggtcacgcgagagaattaggcttgtttactatggactcagctattcactgggttcttacatgtgtaaggtgctatgtggtggacggtggtggaagagacg

SEQ ID NO: 183637 - DNA, 79 bp, Arabidopsis thaliana landsberg
tgaagccctaccgaagcaagaatacgaagacatgagatgtagcacaagtttaatcacaaaagaagatattgccggatga

SEQ ID NO: 183638 - DNA, 596 bp, Arabidopsis thaliana landsberg
cttctgctttaaatgctctgaagagtgaatggaccactcctcctgatggttgggaaggctctgatccttgtggaaccaattgggttggaattacatgtcaaaatgaccgcgtcgtttcaatgtaaggctctgtaaattgttgctgcttcttccaataatgctctgcagacttttaatgttgtgttgcttattgtagatcactaggtaaccttgacttggaaggaaagcttcctgccgatatatcgttcttgtccgagttgcggatcttgtatgtctttctttttctttctatttttcctttcacataaaaatggtttttggttgttttcatcttattatccaatctttgtagggatttgtcatacaatcctaaattgtccggaccgcttccaccaaacatcggtaaccttgggaagttaaggaacttgtaaggaaacacactatcattaaatctctagtacacaacttatgtatcactttgtcttatctcttattttatctaactctttttactctccaggatccttgtgggatgtagtttcagtggtcaaatccctgagtccattggaactctaaaagaacttatatatctgtaa

SEQ ID NO: 183639 - DNA, 366 bp, Arabidopsis thaliana landsberg
ttcacgagcatcatcgtcaacgaattcatgctgatagcagaccatgctgtcagccaagactcccctgaacaggatgtatcctcagggaagcggctaaagaagccaagtgtcgccgggacctcaagtcacggtcagcccccagtgcatgactctcgttcgtgcagtacataccccgcccctagggccggttgtacattcgctggtctccagccccgcctgtcgccaatcgtgacatggttcaaccccgccttgagcgcgggagtcattcaatgaaacgcatgttattcaacgcgacgcagtcagaagagctgcgcgtcgccatcgtcgacgggcagaaactgatcgatctcgatatcgagtctgccg

SEQ ID NO: 183640 - DNA, 515 bp, Arabidopsis thaliana landsberg
  unsure (1)..(515): unsure at all n locations
atgacgggtacgttccttgtggccaatcatcccgcaattattctctttgattctggtgcttcacatacattcattagcaagaaatttgtggagcaacattgcattccataccatgaatcaagggaagggtttaaagtacattcacctgggnnnnnnnnnnnnnnnnnnnnnnnggcttaccaagtgcccgtaacattagctgaacgggactttcctactaatatgattgttctggaaggccaagacatagatgtaatcttgggcatgaattggttggcccaacataaagcaattctcgaccttgatccgagaaccatcagggttgagttatgaccaagaggaaattcttttgtctatccccattccagctaaaactactggcagaatatatgaagccatcataccggagatcaaggatattccggtagtatgtgagttcccagatgtctttccagaagatttgcctggattgccacctaaaagggatgtagagtttgtaattaagttgaagcccg

SEQ ID NO: 183641 - DNA, 171 bp, Arabidopsis thaliana landsberg
ttgtattattgtctcataataaaaactaaaaacaaaaaatctccatttgaagaaggaaaagaagagggtgagataaagacacacgaaccttccgagaacgcagctgactacacagaacacattcccaagcacgaacgaggaaaaagagagagagagagaaagagagagtaa

SEQ ID NO: 183642 - DNA, 288 bp, Arabidopsis thaliana landsberg
ccctaaaccccacgtagctcggtgtgtcagtccactcgcccgcccggtcggcgccgcacccatctttcggtgagcgcccgcttccgtcttgcttcaggaggcattcctctctgtatccctctctcagtctttctctcttccgtgttactttctgttccctattgggcattggcattatgttttaggttctgtttggtgcgactcgagttcgctctccgttgcatcggtggtttggtgatgatccaggattccatggatggtttgaccagtgggatcgccgatcagtga

SEQ ID NO: 183643 - DNA, 2124 bp, Arabidopsis thaliana landsberg
ctaagaggctttctagaacatgtgaggtcaaggtttgtcgaagcttcttccaagagcgagttattggatgagagaattgccaatgtcaaaagacaaaatggcgttgatgaggaggttaaagataaagttctcgccggcacgaggagaactacacaaagtagtgctttagcaacggttcaggcaatggtgatggtgtcgcagtgagggtttaagggcaattgaccaaagttcagcaagtaaacaagctcacaacttacggtacttgtgaagctattataagggttcacacatagagactgtaaagccgtaacataacaggtggatcctctctcacatggagtaagccatggagattaagcattccacgcaaagtttgtaaccagctatacacatagaaataaagcacagccttgggcttcccatacttagatgtataatccttggagttgagaagttgtacaagagagagctcggtaaacaaagggtaaggggatttggggttgaggaaaaagcggtaaccatcactccttggagtcgaggtcataatgccactaatcctcaaccttttcaaacggccttgctaatgaaagctattagaataagtcatactcaagctttggaaaccaatgacaatacttctaggtggttctaatggccaggttctaagatcaaggttgtaccatcctagcaatgatgcatgatatgaatccaaatggcgtccactgaccaatgaatccatgaatcgacacaagcaattactaagagagaacaacagaagtttttggtcgtagctgggcttttgacaaaacgtaattggacagcacgacctgaagttgggccttgagagaaaacgaaatgggcctaagcccaaatggcgacaaaaacggcccaaacgggggaccttgacacatattaggtcaatgccgtcgttcttcgatggttgcgatttccggtgggggtgggaaaatgaggacgtcgaggacgagccaaccttgagagatctgaaccgaccaaaccagtctgttgcagcttcgaaaacagaggaaacgttggaaaggcctggctcgtcgagaaacaaaatcctcagggaaattgagaacataggttgaataggtaagagggctgccgagatccgccttccaattctattaccggagagttgaaagtcgagtaaaggattaaagggagggtttatggatgattgaagaattcgccaaagacaaagtaacaagaagatcttgaataagcagctgaaagtagaagaacagaggtcccgacgccggccaacaaaagctttgacggcgtcggaagagatgggcaagaggaagtcttcgattattgggtcagggaggtcgagagagcattcaaagtaattgacttcaaatatatttttttacaggacgaagattaaaaatgcctatgcatacataagactaactaattcatcctacttatcaattaagaaaaaaagaatatgataactaaaattatgggaatattaggcaatggggcacttttttgagtttcaattatgtaatgtagcacttggaagggagtagacattttttaagttttttttaccataaacccctcagatttcaactaaccatagttactttcctttggtttacaattaaaatattaattttcttccttctcttctccttcttccttcttccttcttcctctctcccaaatgacgtgacatttctctcaaatctattttccttctttcttcttcctctctctgaaatctcaattacatgtctcaaatttttgagcaaagtttcaacttgtttgattcaaatagaaattaaattttatagattttataaaccaatttgtttgattcaacttgattagtcaaaattgttaagatccggtgatacaatcaaatattttcaattttttttttacttttctttgtttaatttgacctaattttgatgaataaggtaaagactttaatttgtttttgtgatagttgatggagaggtgaaatgtgagaggtggaagagggatgatgatgatggtggtaataatggttatggttttgatgaatcaaagaagacatggtgtttgaataggttaatgagtcggaggaagaagatgatagcagagtga

SEQ ID NO: 183644 - DNA, 387 bp, Arabidopsis thaliana landsberg
gccgtagaagaatctcttaagagtgtgaacctatttcgtggtggagttgctgataaacctgctgggaaatatagtggaggcatgaaaaggagactaagcgtagcaatttcacttattgggagtcctaaggtacaccattttctcttactactaatatcttggtattcagagagccttttaacaaatccaattttatatttggtttatgtgtttttaaaaggtggtttatatggatgagccaagcacaggacttgatccggcttcaagaaggagcttatggacagccatcaaacgtgcaaaaaaccacactgcgataatcctcacgactcactcaatggaagaagcagagtttctatgtgaccgattaggcatttttgtagacggaag

SEQ ID NO: 183645 - DNA, 275 bp, Arabidopsis thaliana landsberg
tgatggcaaaagtagacaatttgcttatattggctttcgtactgaacaagaagctcaagatgctatcacatatgttaacaagtgtttcattgatacttatcgaatatctgttgaggttattaatcttcacttaattactcagtttcacttatgtagtactagtttcaaatctaaatcagattctccttggtatataggttgcggaccctcctccgagggaagaagggaaggttaatgaaaatagtgaacattctcatgaacaagatctcggctag

SEQ ID NO: 183646 - DNA, 487 bp, Arabidopsis thaliana landsberg
atcttccacagacatagaacagtatcttccttcatcaccgttagatctccgattcccgctgctaatggaagtgcgacgcgtggctcttgagcttagaggagagttttggttggtgatgacggaggcgcgtgggataggactcgtcaatcctaagcttctgtcgccggatcctttacatggtgtcaccgttatagtcaccggagatggtgactgagaagctgctgatttcaccatctttggttcacaattagcagtgaaccacaaaaatcacgagagaaaaaaatcaaagatttagaaggaaaagagtagttctcaaacttgaaaatcagaaactcagaagaagagagattttgaatctaaggaagaagaagaagaagaagctgaagcagctagtacgaagcagaagagcattataattttcgaaattcagagagagagagatatagagattataaaggagaaaggtattgctataaacggtcgatag

SEQ ID NO: 183647 - DNA, 170 bp, Arabidopsis thaliana landsberg
atcgttccaaacgaatccctgaaggaattcttgaagatgttcctgttaaagttggtaactccataatccctgctgatttcgtggtcctggactatgagaaggaatccaaggatcctcttattcttgaaagagcattcctagctacagctggtgctaggtttgatgtgtag

SEQ ID NO: 183648 - DNA, 1031 bp, Arabidopsis thaliana landsberg
cacctgctttcctcttccatggataagactgttcgtctatgggacttatctagcaagacatgtttgaaagtcttctcacatagtgactacggtgagtggatataccatcctattccccaccagtgatcatgatttacttttcttcttagtctttatgaaactaagcatatattgttagaagaatattaagtcattttaggtgtcaactctgttctggaaagattcatatgtcaatataatgtggtatgaatcaagcttcttccacttgtaaataaatccctgaaacacaagaatttctatgttggttatgtaacataaaattttctctcatctagttttctgtttcctcgatacagtgacttgcatccagtttaatcccgtggatgacaattacttcatcagcggatcattggatgcaaaagttcggatatggagtattcctgatcatcaagttgttgattggaatgatcttcatgagatggtcacagctgcttgctacacaccggatggacaggtatgccattaaaagtttttcttacattgaagtgactttgggtaaaactaaatcacgcagtaccttaataaagctctcttggtttgtaaagggtgcattggttggttcatacaaaggaacatgctgcttatacaacacacatggtacataagctgagaacttactcatctgaaacttgagttgtttctccatctcgtcttttgaacttattatcttttttgtttattcagataacaaactgcagcagagacgcgaaatcaatctgaagaacaggaaaaagaaaacccatcacaagaaaatcactggttttcaggtaaagctaaaacaacttacaccgttctgttctcatcttttcatttatactacaattttgttttggatgctgtactggtttatctgactattctcgtgaaactttcacagtttgtggcaggaagttcatcggaagttctcgtcacatctgcagattcacgtacgcgtgttgttgatggtgttgaccttgttcacaagtttaaag

SEQ ID NO: 183649 - DNA, 210 bp, Arabidopsis thaliana landsberg
atgcaaaagcgtaatgaaaaagcccagtatagcccattaactattgtaatttcgcctcgattaaattgtcccagaatagttagtgagaagaatcccagagtttcttccatctctcgctctttcgattttggagatatttacaggtacgcttgcttttcccttcacaacatcttcttcttcctgctcatagattcaaattccgaaaatcag

SEQ ID NO: 183650 - DNA, 281 bp, Arabidopsis thaliana landsberg
tcacaattttggatcgattcgatcgttcctggtgtccttgtgttgatcgagccattggtgattggaagtggaagaaagtggagctacgctcgtgtatttcttgcgccctgttactgtatttcagcacatgtgcggtgttgttttgatctgattgttgtccaccgtggcctggtgcttgggctcactgctgcccggtgttcctcttctcgggctggtgctgtggatgtctccctcggctccggcaacgactctagtatctctgtcaacctcccaccgtgcag

SEQ ID NO: 183651 - DNA, 642 bp, Arabidopsis thaliana landsberg
ggactgtagcgtttctcagaagtatctcactggaagctgttggactcggtgttcacttggcagccggggctcatgatattttattgagagcagaatatatatttgcaagttcaccatcattgccacaaccccaaggcagaacgaagacgaatgtcagacataatcagcctagaaatgctaagcaaggcatgcttaaggtgagtgtaaaggcaatacatgtcctgcatttctgctcctggatcagatattttacattgctgaggttttataggcatgtgagagcatcggtgatggaataggaaagacagcttctgcattagtccgcacacctttgaagaagtatcaacgtggagacggagctggatcagcatttgcaactgttgttcagggagttccaacagctgctatagcacctgcttcagcttgtgctagagctgtacatagtgctcttgttggcatcagaaataggtcggttcatattaaatattttggaaatacggctggaaatatctgttatttgcaaagtattaaagactcatgtagattatttctcctttcagtcttgatcctgaacataaaaaggaatccatggaaaaatacttaggccccgacaaacaaaggaagcaggaccaacaccgataa

SEQ ID NO: 183652 - DNA, 378 bp, Arabidopsis thaliana landsberg
aaacgcacagctattaacatttcaaacgcaacaaattgcatcataaatcagtgcctaagcgaacacagttttgaagacgtaatcaagttcttgctgctaaatcagaaaactcacggatacaaaatcgggaagtgagttcactgcgtcgtctctctcagccgtgtaaagaggctcgacgcggaggtgaccaccatgaccggagaatccgacccggaagccgagctcattgcctgcttcgactttgttcatagtgccttttctctatatcgttatcttcttcgcattccctttcctcgccgtctcttgttccgaactattctgactttatcagcgatcggtctgagagggtccggtgaaaggaaggaacacaacaattag

SEQ ID NO: 183653 - DNA, 182 bp, Arabidopsis thaliana landsberg
atggagaagagtaaaaaccaaaaatcactccatcagaattcacagccaatcctgttgttagagaaccattaccaatttcgatcgtcatcttcgtctccttcactcctagaaaacgttggaaccctaatcttcttagaaatttcaatcgaatctgaagaactagattactggattaaagcgag

SEQ ID NO: 183654 - DNA, 138 bp, Arabidopsis thaliana landsberg
atgccacaacactcacactttgcatcttccacttcggatatcgctgataaggataacaaagttgttgcggttgcggttggagatggttcttttgttagagtgttgtctattgaaatttggtgtgaaatatccgagatg

SEQ ID NO: 183655 - DNA, 151 bp, Arabidopsis thaliana landsberg
atggagattgctccatctacaagtagattcaagctctacgatcaattcgagcttctggagtttcctgacaagtacgtcgtcaaacccatcgaatcgcctgaggaaggcttctccgtcaatcggcgcgatggcaatatcaaacctcttgatg

SEQ ID NO: 183656 - DNA, 673 bp, Arabidopsis thaliana landsberg
ttcttgtgtttcttatgatgatggtaagaaccggtacattcgagaaatgggtcctgtaaaaagtttcgacttcgagaatttgcttgataaaacgaacattcgtcagcagcaaaagcagcagcttgtgttaatattcgatgattgcgatactatgtcaacagattgttggaatacgctatcaaaaatagtggaccgagcacctcgtcgtgtggttttcgttcttgtatgttcgagtcttgatgttttgcctcacattatcgtttcgaggtgccagaaattctttttccctaagctcaaagacgcagatatcatcgagtctttgcaacttattgcatcaaaggaagagattgatatcgataaagatgcgttgaagcttgttgcttcgagatcagacggttccttgaaagacgcggagatgcctttagaacagctgagtttgcttggaacaagaatctctgttcctttagttcaagaaatggtaaagatcaaaaacatttctatattttcaattggcattgttctcaatttctcattatgttcttgttgtcattttcaggttggattaatctctgatgagaaattagttgatcttcttgatctagccttatccgcggatactgtaaacaccgtaaagaacctaagaataataatggaatctggcctcgaaccataa

SEQ ID NO: 183657 - DNA, 1147 bp, Arabidopsis thaliana landsberg
ggttcagaatttagtaccagccaataagataagcgaaaccgaggaagaaagtgatgattccacacttgggtctataaatcgccatggaagcatatccgatcgtcatcggaacaaggaagtgaaggttggaggagaagccaaaggagaggtaagagaggaaagcacctgaagcagcggcatacaagtgtttaccgagtctactcgggacgattcgacaagcgaatgaaacagggatcgtggcaacgaaacagaggaggaatcggagtacggctaccgaaactccgattgaaccagccattgaactcatatccatggtgtcgaaaacccgatttttttaactcggaatgagtcacaacgaccgagttgctccgggaagctttcttctgatctcgccgaagctatagatcggtcgtgtcgtgtcgtgtggttgttggtgtcgtgtcgtgtggttgttggctttctttgttaacgaaaggtatcatgtaataaaccggtcggtacagtattttaaaaccaactgaaattgcaaaaccaacggtttaaattaaataccataatttcctctttttttttctggtcttacgatctctttacttctcgtgagttctctcgtttcttcgccgttcgttgtcctctttagccgtcgttacttgattctacagattttctctgttcaagtaagtttatggttttggtactcttactctgttttaggtttttgtttctcgattgtgccatgcttaatttttgatttctgtatgtaactctgtttatgttgggaaatttgcatcttaaaggtgtgatctttattgattaggttcacgtgtcgacatgaaaggagctggtaagtttgaaggcagctcgagtaagatagtttttgaggatagtgaagaagatgaagatctctcgtgttcatctgtgtcttcttcagatgaggttagtagctttagaatagttatggaactcaagacattattattattgtttgttgaagcatctgtttttgaatgtggaattaggaagaagaaacagaaaaagagttaacctttgaggagattcataaattacgagctgatgggtctaaagctgttccatggaaaccaaatcaagtgaagaaaacaggtcgtgctcgtgctaacaaaaacag

SEQ ID NO: 183658 - DNA, 199 bp, Arabidopsis thaliana landsberg
gttgactggctcgacaacaacaccggaagcaagggcgtcgccgatcgtgtccagaccgtccaaatgcaggacggcaacgacagccgtttttgcgaggcaggtgattgcgaagacgatattctggtcaaggctttgaaaaaggagcttgccaacatcaagacaaacgcaacgatcgtcctgcacatgatcggcagccatg

SEQ ID NO: 183659 - DNA, 72 bp, Arabidopsis thaliana landsberg
gattttgaggaatgtgggtttgtctggtccaattccttcttacatctggaatttgacagacctaaagattct

SEQ ID NO: 183660 - DNA, 72 bp, Arabidopsis thaliana landsberg
atcttgtgcttaaagataaagtctttgtatatgatcttgctcgacaacggattggatgggcaagctatgatt

SEQ ID NO: 183661 - DNA, 375 bp, Arabidopsis thaliana landsberg
atcaacagccacaggcgcatctgctccaccgatggccacccacggcggtgctcccctccgctcacggcggagaccacgccggtgagcaatccaacccgataacaacccccactctccctgccgaagcatgcaacgggtgcagaaggacaacgcgagcatgggggaagcttttatacctaagtttatgtcgagtcgcgccctggccacggagagttcggctgcggccgccaccaatgttccggcttgcaatctaggcggcgcagatgacgattcccccacggcgagaccgcggataccggcagtgtgcagaggcgaagtgccaagaacgatctggacagctctatgacggtggtcgcgtgtttagccggtggcgag

SEQ ID NO: 183662 - DNA, 170 bp, Arabidopsis thaliana landsberg
atccgttccgttccaaaaattcggagtttcgggttcaggatatttatgatgtgataatgagtcaaataaaacctatttatggcgatagtcgcattgaaacagtgggacttgcatttattatcagactacgagttacattattaagtacacactcacaagcattcggttaa

SEQ ID NO: 183663 - DNA, 343 bp, Arabidopsis thaliana landsberg
atggacggcggcgcgggtgccggtcggaggagcgtcccctcctcctccggattcaggaggagggtcccgcccgccgagaacgggcacggccatgacgccccgccgccctccaggcggtcctccgcctccctctcccgcggccactccacgccgctgactggcgagaggaccgtgaaaaggctgaggttgtccaaggcactgacgataccggatcacacgaccgtgcacgaggcttgtcggaggatggcatcacgcacggtagatgccgcgttactgaccgactgcgatgctttgctctgtgggatccttaccgacaaggacataaccacaagagtgattgctc

SEQ ID NO: 183664 - DNA, 922 bp, Arabidopsis thaliana landsberg
atgaaacttttgaaagctgatgatgagacagagattttgatgggtttaagagacttctggtgggtataaggccggaacaagggattttggtgcccatcgaagataaattgagctccatttgtgtgtgatttagggtttatggcaattactcgaaaacagagcatatagagaagaaagagagcagtatgagtgtaaggtcggttcacggtttggtttggtttggttttgttctgctattaattttatcggttttacagaaatttaaattactggtttggttttcgttttgttcttgatctgaattaagttatatttgtttgcaatatttttttgtgtcagctgaattttattaggaaccaaagaaagtatacatgttgaaattatatatgccggcagacggaagaggaaagttttacccaaacaaatacagggaaactaacgtacattagccttaatatacaaacagaaaccaatgtcgaaaaagagtcaaccatataggaaaagattgaaacctaagcgctaaaattgaacaaaaggaacgatagactctcgccaagtttctctatagaacttgtgaacgtcggaagcactaataagaccggagacctcacaagcaatagcaaaaccgacaaagaggaaagcaagtaaccatccatactagagacacaaatacaaccactatcatacctcacaagcccatacgaagaaagcaacaaaacactaggaagaaggcaaaaaccttgaaaatcaactagagataagtcaaataagatcaacaactctttacacgcagacactcgtcgaaacagcttcagctagatacagacataaaactgacgacgtcctcaaaagagaagagttagagaacgattccattgtttcgccaagaactagtgtcgtgccaagacttatcggggtttaa

SEQ ID NO: 183665 - DNA, 427 bp, Arabidopsis thaliana landsberg
  unsure (1)..(427): unsure at all n locations
agactttacccgcacccaacgacttcagagttttctgaagatgcatgtacaccccaacacagaatcgagcttcatcaacattctcgtaagatacagatccacctctatgagactcccgcccatggctgatattgaagaaaaggtaaggcctaagaacaggatctttatagtaaatctcatcaggagcgctggatatactttcactgtctttgaggcgtccttggtagaagnnnnnnnnnnnnnnnnnnnnnnnnnnaggatgcattctgtattgaacagtcaataacaaagtcggacagcctgctagctgaaacctttcaaagagacttctactatataaaagagttccagcagccttgctaatcactgtcgcaggaagctgctgaggatcaccgacaagtacacatcgcgcagcaccaagagcaag

SEQ ID NO: 183666 - DNA, 364 bp, Arabidopsis thaliana landsberg
atgcaggaagatagttcagatgggtccttaatgattatctatttagttgtatgcaatgataagaataacatcagattcatacaaagaagtgcgtgaataggagaaaatgagctagacagaatgattataaggtatgcgtaggtatgtactggtctgtagactgcacacacttttatagtgcaagtttgtgctgtgtcgctgtccttcagcaaacacaccgtttcaacctaaccaaaaaccatattaatcggttatcacgtgattaaccaacggttttgttattgtagctgaatcacgtgagtacttcttgtctccatccgttccaaacgaaccgtaccggttattttcagccgcaagtgcctga

SEQ ID NO: 183667 - DNA, 127 bp, Arabidopsis thaliana landsberg
acagtattcttgggtctcctttgtcatcattttcaaatggtggaaacatgttctggttcgaacaggttattggcattaccatctcggtgcaagccttttttcatctgatagtatcattgatccatta

SEQ ID NO: 183668 - DNA, 1344 bp, Arabidopsis thaliana landsberg
ctcatttatcggattaagcttccgggaccagctatactaggagagggaaagccggaaaatcagaaccatgctatcatatttacccgtggagaagggttgcagacgatagacatgaatcaggtgcgatgcgtagttttcttttgtctaacatgtgtcgctaatgaatcacatataatatgcttaaaattgttcaaagaataatcaccgcaggagactcttaacctctaaatatttgaccttaggacaactacatggaggaagctttcaaatgaagaacttgctgcaagagtttcttgaaagcatggaggcgtaagatgtcctacgattcttggtcttagagagcatattttcactggaaggtactacagaatgatcctatttctggcttctagatttttagtttctgtgtgcatactgatctcctatgtttgtggtttcttgtgaagtgtgtcttctcttgcatggtttatgtcaaatcaagagaacagttttgtaacgattgggcaaagagtgctagctagtcccttgaagtaagtttcttccctgttctgaaatcttgtcagggtattgtagttgtcaaaattgatgtgctctttctgttgctgctccagagtacgattccattacggacatccagatatttttgatcgtctgtttcaccttaccagaggtggtatctgcaaagcttctaaagtcatcaatcttagtgaagacatatttgcaggcactagcttgatctcatattctttggtggtacacatatgatctacttcattttttacagtttttctcatacctttttactggtttcaggttttaattctactctgcgtgaaggaaatgtgactcatcatgaatatatacaagttggtaaagggagagatgtgggcctcaaccagatctcaatgtttgaggcaaaaatcgccaatggaaatggcgagcaaactttgagtcgcgacctttataggctaggacaccgatttgatttcttccggatgctgtcttgttatttcaccacaattgggttctacttcagtaccatggtaggttgagattctccctttttatctctcaatcactagatatatacatggcaggtttgtttttctttctcaagactgaagccattatctgtgtgttttgacagttaaccgtgctaacggtgtatgtgtttctttatggacggttatatctagtacttagtgggcttgaagaaggattgagtagccaacgagctttccgtaacaataagcctcttgaggcagctcttgcttctcaatcatttgtgcagattggttttttaatggctttgcctatgatgatggagattggacttgagagggg

SEQ ID NO: 183669 - DNA, 1312 bp, Arabidopsis thaliana landsberg
atggttgctattatggcgtcggatggtgtcagcttgtgtgagacctctttttaagaaaaatattaacaaaaactttgaaaaaaaatcttttttgtctttcataaatttaccattatcagtaagtctattaaaatagcaaaagatataaaatcttcaaataaattttaaataaggatattggtaaaaactctctcaagtattggctggtctattttaaacctcaacagaaaatccctcagataatttcttttcataaaaatacccctcaactaagttattaataaaataatatgtcaagttaattcataaacaaaaaatattcattcattctataataccttcaaaatcccaatactgaaaaaactaagcctggacgtttaatccgaatccgataaaccgaaccgcatccgaactgggaaaatcggattaaaaaccgagccgaatccgctcaattaaccgttcggttattgatttctatatccacggttatcggattttatccgatccgaaccgaaataatatggctatccgaaaccaaccgaagaacttcttctatacactactctttagccttcgaagtctggatccacttcccttatgatgattatcaaacaatatgattcgatccacttccctaatcttcttgattttcctagcaatacgggatccacttcctctagattataaccataaaaccctaagctctttcaatatggaattcttaagctctctttcgtcacaatcgcctccatcagaagcatcaagcaatcgatctcgggtatgtgtttgaacttcaattcttcttcttcattagctatcgtctctgttctttgattcttcttcttcattagaaaaaaatttgaaactcatttaaattgatttagtcatataactaatgataaattctttgtttggattttaaaaatttgtgtatgttggagttaaattcttagtcgattctaatcctcttgttgtgtcaatggatgtttgttgagtagtaagagtatatttttgattgtgagagtatagttttgagtagtgaacgtatatttagatggattctcattattcttatgttaaaacttctcattattcttatgtttagatggattcatcaccatttccaagcaacagtgatgtggggaatgagaaagtgactgaacctgaaagtgatgctgctaacaaaaggaaggatgttcaggaagatggtggagctacttcaaaaccacctaagacaaagaaaccaagtcaaaggtcgtttgtctgggaccattacacgagatttgaagataatcctaagagatgcaagtga

SEQ ID NO: 183670 - DNA, 143 bp, Arabidopsis thaliana landsberg
ctatggaagaaaagaatgaacggattgcggctttagagaaagaaatggaagaacagaaagcagcaatggaagaacagaaagaggagaacatgagcgggatgcatagtacaagaagagagacgagtagttggcaacgttcatga

SEQ ID NO: 183671 - DNA, 292 bp, Arabidopsis thaliana landsberg
cttcacatctaccttccatggccgaaagtacagcctcggcatcggcggcatcagctacggtctgaccttcggcgcttcggaaaccaatttctacggcactgtcaccaacatccgccgtccgcgtgacatcgaaggcgtgtacggccaggccggcgccggtgctgccgtcggccgcggcgcccagggcgtggtgctgaccaaccagaacggcgccgtattgacgctgtccggccgtcaggcgggtctgatcgtcagcgccgatctcagcggtttggcgctgtcgctgcgatag

SEQ ID NO: 183672 - DNA, 2179 bp, Arabidopsis thaliana landsberg
atgagcttctctaggaacgattatacgaggtatctgtctcagcagcaacagagtccacacacgagtgtaagtgaagggaacacctcagctgttaatggtactcgtcgttcctctgcacaacagatgccaaccaatctgaactctaatcatccggatggttctgctcctcaaccgcaaaatcattcgcctcaaccttcagacaatcattcgaatcctctaactgccaggctcaacgacatgacactggaagagttgcttgaaagtcctgggcgtgcatctttgcctagattagatcctaaccgtcctccgggaactttctggtaagtataagtcacttgttttgcattctaagttaatttacataatgataagtcacttgtctctgtctgatggaatcttgttttgtaggtttgacgatgacacatcagtagcagccactgtccggagcatttttgaaagagatttcaaagagcctcacgctaattggacacagacaccagcaccagtgatcaaacgctggtttgagacatttgctgtaagtcttttcaagttgtgttttattttgtaaagctgttggaattgtttatttctgatgtgtcttgttttttttgtagcaagtgtataactgggacgctgcaataaatgagagagtgcggaatgagtttgaagcaaagctgaaggataggatgtctgatcaagtctgtcggtggaagggaaagtggagggaaaagggagatgaggccaaaccaaagtggattgatccagatgtgtgggcaggtcttgttaagttttggaaggatcctaagtcggaattaaagagtatcaacagtagaaatacaagataccatgatccggatggcctcgggatacataaacatcgctctggccagacttcttacaaagcccgtgctcgcaaacgtgtaagtacctacgcacctttactttatttacattgttgaacaaacaactaaccatatttttttttctgctccaacatgtgactcactgcccgaacttggttgtagtgtgagatgactggagagacttgtccagattttcttgtgctcttagatgagacacatagaaaatctgatgggactttcattgatagaaagtctgaggaggtttacaaagaagtttcttcgaggattcaagaggaggagtctcagctgtgttcaggggacactacggagagcacagcttctggggggttatctattaaggccaagaacaagatttatgctcaggtaaaatttttgttttgtcattgtgttttgggttacttgcattatgttttggatggcttgcaacatttcattgtgttcagtcatttgtctttcacttcaatatagttttggctggcttggattatgtcattgtctgttcatgatccttgtctttgtcattgtcagatggcttgagtagatagttcttatcattgttttttttagtgtaagtctgttgtggcttgcattatgatatattgaatatgaaacggttatgattatgtcattgtgtttgtgattttgtcttccttagtattttctattgtggcttgcaataaatcatagtgaatatgaaactgttatgtcattgtctgttcatgtccttgtctttgtcattgtcgcatggcttgggtagctagttcatgccattgtctttttcagtgtttgttgtggcttgcattatgatatactgaatatgaaacgattatgattatgtcattttgttcgtgattttgttttccttagtatttggcaattgtggcttgcattatatcatagtgaatgtgaacctgttatgatttgttgtgtttttggttttgagtttgttacaggttgctccaaaaaagaaaggcagggtttatggggctggttcattgcagatagaagcctcctcagctcatgctggtccagtgctgcctggggaagacccggttgttctctctcgaaagctggctgtcgctgaagctactattgcaacccaagctgagaagatcactagctttgacgtctacttcgattatcttgccgataaggatccagagttcgttgccctctttcgagccagaacctctacaaggactgagccgaccagctccaatccgataccggaggagcccaataccgcagctgctccatctgctgggatcagagatgaggcagtcggagccacatga

SEQ ID NO: 183673 - DNA, 72 bp, Arabidopsis thaliana landsberg
ttgcttccaacaccgaaacgtcggaatagttcaaatctgatcggaattatcaaaaacagaaactacgattag

SEQ ID NO: 183674 - DNA, 309 bp, Arabidopsis thaliana landsberg
atgccccatttcccgggcgagacccccgccgacggacgctggttcgaactcgcctttagtccgctgcacgacgccgaaggacgggtcgtcggcgcctaccagttcgcccatgacgtcaccgtccgcgtgcgcgagcaggagcggctggccgaggccgaggcccagctccgccaggtccagaagatggaggccatgggtcagctcacgggcggggtggcgcacgacttcaacaacctgctcacacccatcatcggcgccctcgacctgctgcggcggtcgggcgccggcggcgagcgggagcagcggctg

SEQ ID NO: 183675 - DNA, 91 bp, Arabidopsis thaliana landsberg
atcaaatccacgttatctagcgctgttattaaatctgcgtttcagtttcttctccattcgaattttcgatttgcaaaatcgctgttttatg

SEQ ID NO: 183676 - DNA, 310 bp, Arabidopsis thaliana landsberg
atcaagcagaaagttgagacgaatgagttagatgagctaactgatgatttacagtgcttagctcagggtccatctgaaaaagttgtaaagtatacagcttataatgtcaatggtttcaaattcaggacaacaaaaagagaattagatctaaaaacacaatatagtggtgtgtatgtggctgctgagactacgagctatgctagttcttgtgatactaacccaagaacgggaactgtagcttactatgggaatctgatcgaagttatggacttaaacaactatgaagttttcaaagttgtattattcaagt

SEQ ID NO: 183677 - DNA, 617 bp, Arabidopsis thaliana landsberg
atgcagaaaacagaaaatgaaacagaaacagtaaaacactcgaccaacacagctctttgcagagcactgggtgaggtcgagtgacaggtcgagtaacagacagaaaataaaacacagatactcgactgcacagtctgttgccagacaactgggtggtcgagtatgaggtcgagtaaccagaaaaaattgcaaaaattaagcgacagataacaagatgcagtaaacaacagtagagcaaacaaataatttaatcagataaagaattcccgaggatggggtaattgagtagtttcgtttcctcagtttacaggtgattgacatgctcaataaattaaccctagacaacaagttcattaaccaaatctaagtgccaccgcaacagagactatcaagctaacctagtcccagactcaatcaccattgacgagagctaacctaacaggcattacgaatcaacaagttaaagccaaaacgctccctgcaaccaataccttggtacaggtcacgaatctctggaattagtggttcagacatttcatcgaacaccttttgggcgcggaaatgtctgggctcaaattccagttgatcagaaagcaataggcattaagaacaactaa

SEQ ID NO: 183678 - DNA, 237 bp, Arabidopsis thaliana landsberg
cattacgagaagcaaaagaaaaatgcgagaatgttttcttacacttctcttcttattgcgtacgtcataaatgccggccactctattggtatagatgcaatgttcgccggatcagagctgtccgtgatgaaagcagcttcagtctcaagttcagcaattaagcatcgatatcttatcgttcacactaatgcttttaatttgatatgtaaacgagagagcctccagcaaagattataa

SEQ ID NO: 183679 - DNA, 176 bp, Arabidopsis thaliana landsberg
gatttttctgcttcatacttaaccctgaagaaccagcatcagacatgtttgctttaaaacccgtagataaatcaaaaccagaaaaacctaagaagagatcatcattaaactccttggagaagtccgaatttgttttgatgaagaagaagccttcatcgcatcagctagtagtatag

SEQ ID NO: 183680 - DNA, 673 bp, Arabidopsis thaliana landsberg
atgtctccgaaacatctagagtcatcacgaagctctattgaatcatgcacttcacagcttctctcatggcgaccatttcaccgctccaaaaccctagactcatctgaccaaccaccgcagaccaatgggtttcactcctttactcccaaacgcccttgcttctccgatcgatccacttctttcaccatcgaagctatgagccgtctctcactcgcagacgacgacaatggagggaagacattatcagcttccaattacagcaatagaggaagtttcaggttagtagcgaggaagcggcggcggcgtaattcgagatcggtgtctggtcggagtagtgatcggagtgggactcggagatgttgctccattggtgctcatgggacttgttcggatttgcctttcgctgttggtacagattcaagtggagagttttttggtgaagcgaattgggcttctgatgtgagtgaggcggcgaggaattcacggagagagcggcgagattctggtggagagaaggaagcttctggtggatttggatttgctaatggagttgatccaatggggaatgaatctgggtatgggagtgagcctggttacagaggtgatgctgagtttggctatggtgatgaatttgatgatgaagaagaagatgtcaagccattgttttggggag

SEQ ID NO: 183681 - DNA, 1509 bp, Arabidopsis thaliana landsberg
gacatgccagccagagaataagatgctagttaagcaagccctggatattctaatgccagctttacctaaaaggcttccacttggagattcaagaatgccgatttggattagatacaccaaaaaaattttggtggaggagggtcactcaattccaaatttgatccacatcttccaactcattgtccggcactcagatcttttttacagctgtagagcacagtttgttcctcagatggtgaattctctaagtcgtctaggtttgccatataacactacagcagaaaataggcggcttgcaattgaacttgctggattagttgtcagctgggagagacaaagacagaatgaaagtaaaatggttactgatggcgacgcaaccagtgaggtcagtgatgggttacatccttcatccggtgtggatcctaagctctcaaccgctggatcttccatatctgaagacccaagtaaacgagttaaaattgaacctggtctcccatcattgtgtgttatgtcacctggtggtgcatcgtcaatccccaatgtagaaactcctggatctgctacccagcctgatgaggaattcaagccaaatgctgcaatggaagaactaatcatcaactttcttataagagtaaggctttacacctcccaccttctaccttggggcatgttaatacttgctggttttgatctattgggcgggggagttacaaaattacagaggcccgtcctctctgagtaatttgcattctaaagaaatgatgtttggcggtagcagtcttaaagcagtatagtattctgtatgaaaatctataatgagattatgcggattgtaggttttcttttggatctggttaagttctacaccttattgaccacctctagtttcgaattatgttggttgatcgtgatattattctctttatgactgtcgttttaagtttcctttctctttcttgaacaggtagctgtggtaattgagcctaaggacagggaagccaacactatgtacaaacaagctttagattttctttcacaagctttggaagtttggccaaatgcgaacgtcaagtttaactatttagaaaagctgcttagcagcatgccaccgtctcaatcagatccgtccaccgcacttgctcagggcttggatgtcatgaacaaggttctggagaagcagccacatcttttcattaagaacaacatcagccagatctcacaggtataattgctccagatttaatctaatatatgaaaatatttctattctttgctgactgttctgttcttcaccagttccttgagctatctttcaaacacaagatgttggacgctggtaaatcgctatgctctttgttgaagatggtcttcattgccttcccacaggatggagctagtacgcctcctgagataaagctattatatcagaaagtcaatgagctgatacagaaacatgtgcatgttgttactgctttacaagcttctggagatgataactctttcggctca

SEQ ID NO: 183682 - DNA, 498 bp, Arabidopsis thaliana landsberg
atgagccaccctaaggtcgtctactcctacactgaaatgtctagtgtcgtcaacccatctggatggcaagagaacagagtgcgtgcgcatgacaagtaagtgtatcaatttcacattatatgattatgtgataagaaaccaacactaatatataagcataatttagtcatttccaattgagttaaacagtcataatttctcacatagagatattgcaatagtttcagtttgccccaaaaagaaaagatattgcaatagtttttacaagtttaaaatgtgatttgtgacagtgcgaaccaaccattaataagtaatattttttatataatgaatgataggacggtgttctatggagaatacatgtgcacgggaccaggatcacacaaagcgaagagagtggcacacacacaagacattgacaacaaagaagctagccaattccttaccctcggctacatcaagggctccaaatggcttctacctcctcccgcttactaa

SEQ ID NO: 183683 - DNA, 523 bp, Arabidopsis thaliana landsberg
atgggtcgtgtaaggttagtcactcctagttcgagtgaaagtgaagacgagagggtcacgatcatccgtgaagcggatatgaaccgtgaagaagttgcagccgaggaaaacaaatttgaagacgaaaactgtgaacaagagcctccggaaaaccttaacgaaccggaagaagaaaagatttctgaggtatatacaaatttatgaaactttcgtgtgaatattgatgtagtgtttaggtacaactagaaaacaatgagtacaagttaatagtataggtctgtgtaattggtgcatggatatacgtgattaatcatacattgggttgcattagaaaattgaattctgaaaaaagttgataatgttgttctgagataactagtataactagtacaacgaaatattaattgtatggttgtgtatgaattttcagaaagttgatgatgaggaaccaatgcagtctcaggggatggaagaaaaccctgaagaagaggaaaaagaaggggaagaagaagaagaatctgag

SEQ ID NO: 183684 - DNA, 444 bp, Arabidopsis thaliana landsberg
gtatgttggtgatgagtacggtatggtgtctgttctaaactacagcgctgacgaagggaaattactgcagcttccttattatgttccaactgatgctttatctggtatgtagggttccctccttcaatgtgatgaccaaatgtgtttagaagcacgactgactttagaaaaaatttgttttcagctcttaggcattattttatttcttagtggtctatctaccttcaccaaataatttgcaaagtaattcttggcagggaaccatatccacttcatacttcagattaaatgcaaacatgaagacctccagcgttgcatttaagttattcttttaaaacttattttctcccatttccctctttgtgcagaagcagcggggctttcatctcctattgattatccggttgttggacttctttcccagccttgttcaaagggaactag

SEQ ID NO: 183685 - DNA, 131 bp, Arabidopsis thaliana landsberg
accaacaacacaaaaccgatttcgatatctcctgtaacaagaagattgagaagcaagacgaagagaaaccactcgaaagagaaaggaagaagaaacagtcacctctctcttgtatgatgaaaccgatttga

SEQ ID NO: 183686 - DNA, 1641 bp, Arabidopsis thaliana landsberg
actaaaagatgaagaagatggaatcaatcataagtggttttggtgccacaatccagagattcgtctccagttcgccaactgcatcaaactgaatcaagaagcaagagacctcatcatgcacacatcgacttctagatacgcgatgttacctggttcaaaaattcctgcatgcttcaatcaccgagctactactgaaggtttattgccaatcaggttgaatgagtcacctcttcctacatccttgagatttaaggcttgtatcaggctggttatgcgtacaaataaaactcgtgagtcttcgactttggtatggattaacatcgtggacaaacaaaatgatctcaaggttgagtgtacaccaagcgtccatgtagtagatatatatttaacagagcatatatacacatttgaagttgaagtagaggaggtgacttccatggagcttgtctttgacttcgatggagcttgtctttgagtttcgatggagcttgtctttgaatcttggaggtcccttcatattcatgagcatgatgaaagcttctagatggcatcgatggaggaggtattgaaattctctgccattttcatcttgtgttgaacttgtgtatgattatcaatgtgtaattaatgttggcttatgattaattgaaattagttgcagataaggagaacaaatacaaacaaagatagagacgaggagaagtcatgagtagaatctgaaaatccatggttatgtttttgaaaagagaacatagagagtcagcttcatgtctgaaaccagagtaggaagcatgttgtcctaactaaaaccagagtacgtttctttctctgattttgtttttttaaaatattaatatttgagcagattcaaattgactaatatgctgtgataattgattgcactaaaaaaatgtaagtcttgttgttgcagtcacataacaagcagcagaatcgtatctgaactaaaaccatgcaaccaaagtacataaaagcatacttagcacccaagagaagcatctggatgcacaagcaggcgttcttggtgacctcagcgttctcgtgtgggatttgcgtaacctaacaaaggcatgcatggagagattaattagaattgttattgctgatttcctcaaaaacaaaaaaaatgttaactgcttcagtcccactatctacatgctataccactgaacatagacttgaagtcatttggtggattttagatttggtgggacttatgatgaattttaaggaggttcgggtgactaatttgggttttcattgaaaaagaggtcaattctattggtgatttggtaaaattcaatcacaaattctatagtgctttctggagtgttgagtctgataacctgcaaaatttcgtacataaatctagaaattcaataaaattgtgaattagccactcgagtctttttcaaaataaaattttgcctaacttgttctcaaatttgatattttctagatttgtttggatttagaagcaagaagctagggtttgggaaatatatgccagctgtggaaattgcagatccacatggagagcgacttgtttttcactgggaagagttttgtggcatcgtgaaaaggttgttcccaattgttctacagatcccaaagtctaattga

SEQ ID NO: 183687 - DNA, 157 bp, Arabidopsis thaliana landsberg
ccgtgaccaggccggactcctcgccgccgacgagcatccccgctgcgcgcgtggaccgaccgactccggccatctccgacggcgacccgcacacagttgtgatccccgagacctcccctacgtcctcgaccacttcaccgaagcaatctcgccgccg

SEQ ID NO: 183688 - DNA, 188 bp, Arabidopsis thaliana landsberg
gctgccgccggcgtgggcgacgatcatcatcgactggacgatgcgcgacacgcgcttggtatgtgagaggagctggcccaacagatagatgagctaaccaatgccttactggtgcgggcgcaaaatgtgcgccacacaggctatgccaatgatcggattgggactctgacgggccacacgggcggaca

SEQ ID NO: 183689 - DNA, 1877 bp, Arabidopsis thaliana landsberg
atgcagtcagatgttccgatgctacttgcacctctgacgcagagtgatgagtcacttctttcatctgtacgtgccggtcaccttaccattactagcttaaatttcattcgacatatctgcattgcttttatgctgtctatttatgtctgcatgactgttgctttaccttcaggtcataccacttgctatcacacactttggggattctgtgttggtggcttcgtgtgccttccttcttgagctttgtggtttatctgctagcatgcttcggatagacgttgcatccttgagaagaatatcatccttctataaatcaaatggtaatgcggatatggcacatcagaaatcgctgaagcgctcaatgtttcatagtgtatctagtgaagatgatctaatggggtcactagctagggcccttgctaacgaatacgcttatcctgatatttcaagtgtccctaagcaaaaacagaatccaagtatttctggtagtcaacccggtcttccgctaatgcttgttcttcatcatttggaacaagctagtcttccagagattggagtaggtagaaaaacaagtggatactggctgttaacaggtgatggtgatgggtctgaactgcggtctcaacagacatctgctagcttgcattggagtttagttactcttttttgtcagatgcataagattcctctgagcaccaaatatcttgccatgctagcaagagacaatgattgggtatgcttcatgataattcttcttaccttttcgtttcttacccttgagctattacttgtcctaatatacgtaaatatcaggttggatttttatctgaggcgcagcttggaggatacccatttgatacagtgctcaatgtggtacgtctctcactccttactggtttcagaaatcacaaacagcaacttaatgtgctatgttacaattatatgacacattttcatctatcaggcatcgaaggagtttggtgatcaacgtttaaaagctcacatactgactgttttgagatatgccaactcaaaaaagaaagccaccacatcgttctcagatgacccaagcagaggactttcatgttccccctcagagggtggagcttatgtctctgctgaactctttcgtgttttggcatactctgagaagctaaagaatcctggggaataccttttgtcaaaagctaaggaattctcgtggtctattttggctctcatagcatcatgctttccggatgtttctcctttatcatgcctaacaatttggttggaaattaccgcagccaggtgtgacaaaatttaatgaaattcaattgggttgggtgtaatagtagtaatttactatcttaatgcaagtctatataacattgggcgttttaaactctttttcttgcatgttttctggaataaaaagatgcataacttttttcttagctctaacaaagatcatgcttttcagggaaacgtcgtctatcaaggtgaacgatataacgactaaaatagctgaaaatataggagcagctgttgtatctacaaattccttgccgacggatgctagaggtgtccagtttcattacaataggaggaatcccaaacggagacgacttactgcacatacatctgtggatttattggcttcagccaatagtttaaacatctctgctggtaaaacattttgttctcatagaacagaagctgcagaagatgaaaaagcggaagatagcagtgttattgatgattcgtctgatgagcatgcgtctctatcaaaaatggtcgcagtgctttgtgaacaacgcttgtttcttcctctgctaaaagcttttgacttgttcctcccgtcctgctctctactgccatttttccgtgctcttcag

SEQ ID NO: 183690 - DNA, 1261 bp, Arabidopsis thaliana landsberg
atggcgattgttaaggcgatttcgctacggttacttcttcgtcatcttctctcgaagattctgacagttttttacgccggagtggggcggttcctcttctcccatgatcaggcggttgttcataataggatagtgggagttccccacgattctgttgttacttcacgatggattcgaatctatttaaagaagagacttgcagatttcttctccattccctcacatttaacccctccaatcaattatctctttcgattctatcctctccgtgtaatcatggctgataatgttcgtcgtgcccttcagaacatcaatctcggtatcgacgaaactcccgttgctctccctcaggctattgttcaaagggcggtggatgataaccgcttttgcctcctgggtagacccctcatgccgcgaaatcagaatctccgtcagatcctcactacggttccacgaacttggggtttggttggtttcgtccgtggcagaatcattcaaaatcgacgattccaatttatctttccatctgaagaatctcttgacactgttctgagacgcggtccatggtcttttgcggatcgtatgctggtggtggaacgctggacaccggatatggacctcttgtgccaatttcatactttctggatccaagtgcgagaaattcccctacagtttctgaatctcgaagtcattgataacatagcagggtcccttggtgagcgaaaagcggtcgacttcgatccttttacaaccaccagagtcgaatttgttcggatccaaatcaaatgggatgtgaatcaccccctgcgatttcaacgcaactaccagttctcccttggcgtgaacacagtgctaagcttctattatgaacgtcttcgtggcttctgtgatgtttgtggacgaatgactcatgatgctggaagttgtgtcctccaaaatggagctctccatgattctgatggcgatgatgacaatgccgatggtgaccaagagtttcatggaaatcctggagtacacattcaggagattggtgatgatggtcaaccaattcaagatggtgatgaagtgggtgaagaaattgttccaggtcccgttggtgctgatgtcaatgaagcaaaagaggaggtctccgatattgacccgacccataatgcattagaggacatctcctccgacaatgaccgtaacatgttccatggggaatggacatgtgatgaggatcttctttataacccagttccttcttttgctaatgcgacag

SEQ ID NO: 183691 - DNA, 79 bp, Arabidopsis thaliana landsberg
actcccttctccagtggtgctttttcctgcacttcttaccattggggctatgactgctggaaatcatcaccagacacag

SEQ ID NO: 183692 - DNA, 84 bp, Arabidopsis thaliana landsberg
gtcaaattgcacttaagtcctcagattggagagaagaacaatattagtctaacccttatcgccgccaaatcctcagattcgtaa

SEQ ID NO: 183693 - DNA, 181 bp, Arabidopsis thaliana landsberg
gctccgttgtcagaatccgaccaagacttctgcagcgggaagaatctaaatcgagagagtgatgtcgaatctcttcaaaaacgtgagtttatctgcattaatctatttgtgctctcgaattgactcttttgactcgcattaatcgactaggggttcccgttaaatcgatgttgattcgaca

SEQ ID NO: 183694 - DNA, 116 bp, Arabidopsis thaliana landsberg
catccaaagtacctgaaaacaaccaaatatgtaatgcacatgcaatccgaatgcaaaatcgtcctgagtatgcaaaacacactaaaacgactcctaatgagatgaaatgtggatga

SEQ ID NO: 183695 - DNA, 222 bp, Arabidopsis thaliana landsberg
atgaggagttttttcggtagaggagggaaggattcaccggctgattctgcttctccgtcaccgagatcatacccttcgacgtctccggcgtcttcgtctgctgtgacgggaccaccgagaccctattcgttagtgtattgtgatgagaacgggaagtttcgtatggaccctgaagctgttgctactttgcaactctttaaggagccaattggtgttgtttcg

SEQ ID NO: 183696 - DNA, 46 bp, Arabidopsis thaliana landsberg
atgctcggcgccgtattccgcgcccgtggttatggttttgaaatcg

SEQ ID NO: 183697 - DNA, 161 bp, Arabidopsis thaliana landsberg
atgcgccatcatcttctttctactgctgaaactctttacaaagaaaacatcaaagcatgtagagtttggctgttcagtggaactctaacccatgcagatataatgatccctttaacatcacattcgtgcttacaagaacaaccagaaaaaattgtcgtttg

SEQ ID NO: 183698 - DNA, 949 bp, Arabidopsis thaliana landsberg
aagagagtaatctctggaaagaatcaatgggaattatagaagaaggatcaatctcaggtaccttgccaagcaaggaggcgtttgtagtacacttccctggttacccatcttctatttctcgagctattgaaacacttggaggtatccaaggaattacacaagtaaaatctctcaattttggttttaaagtctcttccttttactgagattgtcttcatatgctagttcatagagtggttttaaagcctatatgttgttacagtcttggtatatgcatccaccagcttttgttaaatttgttgcacgatttattcagttttgagtcttttatttttatatggtaggcaagggaatcaatttcaaataagcttgagctacggtttcggcctgaagatccttatgcacatcctgcattgggagaacaacgtccttgtagtggttttttgttaagaatttctaagcaggatatcaagaaacctgaaagtcagtctgttcttgacactagtagtgatgtatgtttagaggaagctagtccagttctatgtgcagatatcgtagctcgtttgtctgaatcgtttcactttgatggtaaaaacttacctctccttttgcttggttcttatgcctctaaaagtgtttcaagatttttccctcttattcgctgtctaggcatggctgactatcagcatgttattcctattcacgcggacattgcgcagcagaaaaagagaaagtggatggatgtggatccccttacaggtacaagatcaacttcagatattgattttctctttttttccaatttattccagatttcttgtggtgtgctcacctaaactagatcggatatatatgcaggaaaaagtgatttgatgggcctggctgatgaagatgtaatgatgttattgccacagttctttgcacccaaagatataccggacaatgtggc

SEQ ID NO: 183699 - DNA, 1047 bp, Arabidopsis thaliana landsberg
gcaaacagaattttggtgaaaaagattgaagatgatcagtttctggaccttgtgactgtgaatactgatgttcgatctgtttgcaaggaaacttacaggtgaattcataagtgacttcttcattttaccttgtaacctacccttttcttcagcatctgaagtctctttttttatctgcagcatctacaaagctgctctcaaatcgaaaggatcaattaatgattacaaccagattgctcaggtttgtgttatactcttgtctccaagttgtatcaaaggttttgaatacaaaacttccatctgaagcttatatgattgttaacacgctgcctctcctaatttcattattttagcagttacggattgttgtaaagccaaaaccatctgtaggggtcgggcctttgtgcagtccacaacaggtgaaatcccaatgaaaaggaaatgggtatattttgttccgattcgttcttgtgtgtcacttagctttctcgctctgtcgtcaatgcagatatgctatcacgttctggggcttgttcatgagatctggccccctattccacgaacagtatgtatcagatcttgtgttattcaggttatatcttatctacattgggactgaacatatgtcttacaggtaaaagattacattgcaaccccgaagcccaatggataccagagcctccatactactgtgattccattcttgtatgagagtatgtttcgactggaggttcaggtatttgagataaaaatcttttatcacagttcttagaaaaacgccgatgattagtacaattgaattcggttttagtattttaaaggttcaagcatggggaatatttaaaaggctgatttgattggttattaagactacatttttctctgcagatcagaaccgaggagatggacttgattgctgaaaggggcattgctgtttactacaatggcaagtctctatctactggattagttggaaacgcggttcctttaggtagaaattcaagggggaagacgggttgcctcaacaatgcagattttgcactcagg

SEQ ID NO: 183700 - DNA, 296 bp, Arabidopsis thaliana landsberg
atgaggccgaggcggagaggccccttgctgctggtcagcagtgtccggagacgcggatggcgctcgccaaacgtccgccgcatggcatgaacgatcatcgcataaacgaccagtgccgacgctatgccaaaaaggacaagcaccgtcgccaccagccagctcggcaggatgctcagtatgtcgaagacgcgaagataggccctgcgaagagtatcaatcatggcgggttccggatggggttcgaggtcaacgcctcaatccggaagcggttcatgccttgcatcaaccgctgttga

SEQ ID NO: 183701 - DNA, 78 bp, Arabidopsis thaliana landsberg
atgctgaatgcgacaacattacgaatgagcgctttaaggtgcagttatacatcgccgtgcatcttatgttttgatttt

SEQ ID NO: 183702 - DNA, 482 bp, Arabidopsis thaliana landsberg
  unsure (1)..(482): unsure at all n locations
atgcgctgcccactccagcatctgtacgtcgaagtcggtcagcggatggcgcatgtccatgatttgcacgaccgcacgcaaattggcgcggccttgcaggtagtcgcnnnnnnnnnnnnnnnnnnnnnnnnnnnnnnnnnnnnnnnnnnnnnnnnnnnnnnnnnnnnnnnnnnnnnnnnnnnnnncgctggcgacgttgaacatgttgatcagctgcgtgcggcccggcgtcttgctgacacgcgccagctgattttgtccgcacagcgcgttcatggcgctggattagccggcgttggagcggccggcgaacgtgatttccggcagaccgtcggccggcagctgcgtgatcttcgcgcacgacatcaggaactcggcaccgacgaacgggttgggcacgccgcggtcgccttgtgcggaatggttgctcatgctggacgggtgcatcgacgttcacggctggaaaatgaaacgagcataac

SEQ ID NO: 183703 - DNA, 277 bp, Arabidopsis thaliana landsberg
atgaaacattatgttcttgttcacggcggttgccacggcgcatggtgctggtacaaggtcaaaccggtgctggaagcttcaggccaccgtgtaaccgttgttgatcttacggcttctggtgtgaacatgagcaaagtggaagagattcagactttggcggattacgctaagccgttgcttgaagttctcgagtcgtttggttcagaggataaggttatcctcgttgcacatagcctcggagggatatcagttggtcttgcagctgacatgtttccta

SEQ ID NO: 183704 - DNA, 504 bp, Arabidopsis thaliana landsberg
cgtctgtgttgactcagcatcatcataacttgttgccgatgatggctattccaacaggacaactgtaccatcaacaacaacaacagatctttgaggctcagcagttagcagcggttgcgagagagcaacagaatgagatgtttagagcttatggaggaggaggaggaagtagtagtccacaccatcaaaaccaagctcaagctgagattttgaggtttaataatggttttgactctgtaccggccggttcagttacggttactgggtttaatcagttaagttctggtggtacagcggtaaccggaatgtctcttggaggtaactttgttgatagtccttcgacgaataataattaccatacggatcagcaattacaccatcatcatcaaccgcaacaacatcatgaggctcaactattcataccttcacaatcttctcagccgctaccgctccaaacgcaggagacgcaaacgcagacgcagccgaattcagcgagcgaggagg

SEQ ID NO: 183705 - DNA, 384 bp, Arabidopsis thaliana landsberg
atggcgagtgtgtacataccggttcagaattcagaagaagaagttagggttgttcttgatcagctccctcgtgacgcttctgatatacttgatattcttaaagccgaacaagctcctctcgatctctggctcatcatcgcggttcgttcttttccactctaattaggttctatctggaatcgagttttgttgagtttttcttagttaatggctgatgggttttgattaacacttcaaaagttagttgcttttgtggctgatttgcttaaagattgtttttttttccaattctgattttggtttcatctatggtgaagagggagtacttcaaacaaggaaaaattgaacagtttcgacaaatattggaggaagggtcaagttctg

SEQ ID NO: 183706 - DNA, 681 bp, Arabidopsis thaliana landsberg
tgattatacaaatcctgttcgatacacaagttaacaactctgctgataatcgttgtggttgtgaatgcatcgaaagaaatagagctggaaaatgccaaaaagagctttgtggtttagaacattctaaaccggatcaagccttcttttgttctatccctactcctccactatggcctcctttgttacaaatcccgcgtcctgagagtcgcgatgttagaggtcttcgtgatgattcttgtagacgtacaggatcttgtcctgttactatactctttactggaaataaccgttcccttggaactagtatgtctcttttccttcttttttatgtttctgttcttgtgtacatacactggaacttatcttcatgttttctttagctgtatctgagaatctgttcactagttctgtgtcggcgaacgcctctgagattttgcgtactttagccaacaatgttttggtaagtttttttggtgtgtttctgtttgtttccattatgtagtgtgtttcttagctttcttgacctcatgtttcagggtacaacagttgaagcagatttcaccaattatcttgatccagcgattgcctcaaatctttccatctacaatatccaacctcggtgcattcttaacgctacgttcccgttctcattcgaccaacgtcctctcaagtttgagaaag

SEQ ID NO: 183707 - DNA, 96 bp, Arabidopsis thaliana landsberg
atgagaagggtaaaggcaataagaaacaaaagcaccacaaaggatgaggttacaaactcgcgagccaaagaagaggatacggccaagagaaagaag

SEQ ID NO: 183708 - DNA, 74 bp, Arabidopsis thaliana landsberg
attttagggatgccaattttcaatactacgttttaagttcctataccgtaatttatggttttattcgcatataa

SEQ ID NO: 183709 - DNA, 102 bp, Arabidopsis thaliana landsberg
atggggtcagactggcttgacacaccatctgctatttatactgccgtggttatgttttggaaccatcggcacacgaatgtgcttataacgggatttgacccg

SEQ ID NO: 183710 - DNA, 48 bp, Arabidopsis thaliana landsberg
atattcgattcctttttcggtcgggtccggaggattcatgtggtctaa

SEQ ID NO: 183711 - DNA, 1203 bp, Arabidopsis thaliana landsberg
agaatccggtcttcgaaaataacaaagttgcgggccttccacaggaaccacaaaatccaagggtacagaggggtgcttcctaaacctaaaggaggtaaactgagacaagtgcgccccttttccaggatcttcttgacgtagactactgaacctgctcttggtttgggaagaagtgtcgccaagtcccagaccttgactgcaatgggacatctaaaaaagatatgcagagcatcctcgatctccccacatcgtttacaccctgtttccaccactatacctcttgctgaaagtgctgtcccaattgggagcgccttttttgtagctttcgagaggaacattctgatcataggtgacgtatacaccttccagttgttagttttccaattaaatctctcctccaagcaggggacaagattagactttgccattgccatagccagactttgtagaataaactcccgcttttgcagggagccaccaaagtcggtatggtctttttgtagaactcaatatcaagctgagtatatcttcctcatgatgaagtaattccctacgaatatcttcacagtcccattggtgagaaacagggaagatcaagtctttgaccaataaagtagcagagtctttatttggcggatcaaaggggattttgggcttgaggtagagagccagagggagtaccacacacatatgtcttctccggatcccaccgtccatcccaacccttttcttaagatttctctgcccgctagaatccctctccatccatggaatgcattagacaagggggtgacctccataaaaggtgaagagtggcagtatttgccaagtagaacttgagccaagagggattctagattcttcaaaagtttccagccaatttttgccaatagagaatcgttgaaagtagccacctccctaaaacctaatcctccctctgattttaacgcagtgagcttctccaatgctacccaactcatttttcgtttatccggtgtatcatcctaccaaaaacgggtcaacgccgattacatccttttacatagagagagggggagcttgaagcatgtcatagcatacgagggcatagctaaaactgctttgagcaggacttgtttgccagctcttgacaggaaccttgtagaccaagacagagttcgttgtcggattctatccaccagacccgtgaagatgtcaaattaa

SEQ ID NO: 183712 - DNA, 752 bp, Arabidopsis thaliana landsberg
atgatagatccaatgggatggacttcgtggaatagcagcaccacaggacgtttgtccacactatactatggagagtacaaaaacaaaggccccggagcaaacacaagccagagagttcgctggaaggggttcaagataataaccgatccgatagaagcgaacaagtttactgttggaaagttgataaataaagacccgtggctgaacgccaccggaattccgtacaacgagggtctttgattagatcgttttaccattagtatttaaagcattaaagaaaatagaatctgtcaatccattaacaaaatatattaaatggtgaaaaatatattaaaatatattaactggtacttatcaattctcgatcaatttcgtgatccattattattagtgagaaggcatctttcattgagattacaactcggattggagaagagaagaatcaaatcagagttgtgatcggacatgaagaagaggaagctgcaaagacaagcttaccaaacgacatcctcaagaaggttcagcgattgggccaaattgagaatctaacaaagatcaagcccaacaagcagaaggcccaagcgcagacccaaaacaactcacagctccaacggtcatctccacgtgcaaaagaagacaaagccaaaaataaaacaggattggatcaagtgactaaaaccaggagctgtgcgggcaaagatggagtagttttaaaaaaccgttttgagtgtgtaagatcaatagaaacctga

SEQ ID NO: 183713 - DNA, 167 bp, Arabidopsis thaliana landsberg
gtcgccggagattcgtcggcaacaagttgatgtggctaatccgggcgattgttcctgttcgatatttgggatcttacaagagacctcaaaagccgccatggatgagaaatccagtggtattctactcagacttttcggagaagaaagggaaagttgctcctttgcag

SEQ ID NO: 183714 - DNA, 609 bp, Arabidopsis thaliana landsberg
tcgaaacaagctgatgttggggtaagtaggaatcttgaaggagaatttgataaggtctccattgtgcctgattttgatttcgttgagactgtttctcctctcaaccgccgtttacgctctaggaagccacaatccccaaatgtgccaaagcaaaaaaaggagaaaacattaaatgagctaatccagaaaccgccagggagaagaggaagaaagccttcgcagcagcctaaaaaggtgcctcctactgtgccaaagattacaataaagaaaccaaaaccatctattgaagctaaggaaaaagctgaggaagattcggatgtcacggataaggttatatccgagtataatgaaatgcttcctgaatctgatgaagatgaggaggaaaccgagaggctaaagagtgtaaaagaaattcggctcaaaactgttaagctggccccggatgggagctcattgattaaccccgaagctatgcccactcacacttttccagttattggagacaataggctgagctgcatgagaaagggttgtctgccttcacgagcaatctatgatcctctggcaccgttgatccggccaaactgtagaagcttaaggcttatttga

SEQ ID NO: 183715 - DNA, 90 bp, Arabidopsis thaliana landsberg
ttcaagcttgaacgcaaaagaggagaagaggccgtggattttaagagcaaaggaactttcaattcaagctggcaacaagcagacctctga

SEQ ID NO: 183716 - DNA, 1059 bp, Arabidopsis thaliana landsberg
aagaaactcaaaggctcagccgtgaaatagaggatggagttgctaagttaaaatttgcagaggaaaaatgtgttgtgcttgagagatcaaatcaaaatcttcactctgaactggatggtctactagagaaactggggaatcaaagtcatgagctcacggagaaacagaaagagttgggaagattgtggacttgtgtacaagaagaaaacttgcgttttatggaagctgagactgcctttcaaaccctacaacagttacactctcagtctcaggaggaactaagcactttggcattggaactgcaaaacaggtctcaaatcctgaaagatatggaagcccgtaacaatggtttacaggaggaagttcaggaagccaaagaccagagcaaaagcctcaatgagctcaatctctcctcggctgcatcaattaaaagtttgcagaaggaggtctcaaaattacgagagacaatacagaaacttgaggcagaagttgaactaagagtggaccaaagaaatgctttgcagcaagaaatatactgtcttaaagaggaattaagtcagatagggaagaaacaccagtccatggtagaacaggtggaattggttggtttacatccagaaagctttgggtcttctgtcaaggagttacaggaggagaactcaaagctaaaggaaatccgggaaagagaaagtattgaaaagacggccctgattgagaagttagaaatgatggaaaagcttgttcagaaaaaccttcttctggagaactccatatcagatttgaatgctgagctggaaacaatcagaggaaagctgaaaacattggaggaagcttctatgtcacttgctgaagagaaatcaggccttcattctgagaaggacatgttgatttcccgtctgcagagtgctacagaaaacagcaagaaactctctgaggaaaacatggtactggagaattctctttttaatgccaatgtagaacttgaagaactcaagtcgaaattgaaaagcctagaagaatcatgccacctcctgaatgatgacaagaccactttaacta

SEQ ID NO: 183717 - DNA, 684 bp, Arabidopsis thaliana landsberg
gagagtaagatactcaagttcttgggattcatgtggaatccactttcatgggtcatggaagctgcagccctcatggccattggtcttgcacatggaggagtacgtcttttgttccctctcattagtcgtttctttccacaatatgtaaatacgtaaaattgtgaaaggtatagcttaacatagaattttaaaacaattttgagagtctgaagaaactaatttgtctcaactcttcagggaaagccagcggattatcacgatttcgtgggtattgtggtcttacttttgataaactcgacaatcagttttgtagaagaaaacaatgctggaaatgcagctgctgctctcatggctcagttagcccctaaagcgaaggtttaaatttattccttttagttgcgctcatttaaatttgatggtagtagcttatttacaaatcaattgttttaggccgtccgcgatggcaaatggaatgagatagatgcagctgagttggttccaggagatatagttagtatcaaacttggagatatcattcctgctgatgctcgtcttcttgaaggagaccctttaaagattgaccaggcaagttctacttctaatattggtttatcattgctctgtatcttatctctcccttcactaatcttggttatttatcttttcctcagtcagcacttacag

SEQ ID NO: 183718 - DNA, 416 bp, Arabidopsis thaliana landsberg
atggaggagcgcgaagagttcctcgctgatgtccgccatcggctggaacaggcacaggctgtccagaagaagtattatgaccagggacaccgcgccgtcacgtatcaggtgggcgaatgggtgctgctcctctccgacaccgctcccctgcctccctcgccactgactccaccggcaagctgaagccccggttctatgggccctaccgtgtgctggaactcatcaacgaggtcgctgtccgcctcgagcttccagcccgcgctcgcatccacgacgtgtttcatgtgggcgtcctcaaaaagtatcacggcacaccaccgcaggttacaccgccactacccccacttcaccatggggcagtcaccttggagccagctagggccatccgaacccggctcaaccgcggtgtacgccag

SEQ ID NO: 183719 - DNA, 4119 bp, Arabidopsis thaliana landsberg
ctctcttaggcttcaccggcgatctcatcgtcgacgagcgtgagcaacggaaaaccctaggcctcgctttcaactccgattcacctctttctgatgaatgtacattcaaactcgctcctgacatctccttcatcgaacccagcgaaaggtttagtctctgctcgcgctgatctggtaaatttggccgctgattttgatttctagtgactctgatgcgcttccttgcagggacttgatcgaaaggttgatcaagttagggttctactatcgagaactcgaccggtttgcgaagaagtctcgcaatttgagctggattaggtctgtgaccagtgtgcatccgttggaacgggctgatgaattgtcgaagcagagtagagagaagaagcctagcgtgtaccgtagagccattgctaatggaattggggagattctttcggtctatagatctgcggttcttcacattgaacagaagctattggcggagactacgcctattctggctacggttacagaggggctcaataaggtacatgttctagtacaataccaacacatttatcacttgatgattgagattagcatttgccaaatgaatttgtgtttattgatagtccaatgccattttctgtctagtttttcgttcttttcccgcccctgtatgaggtaattcttgagattgagcgtgatgatattcgtggagggcagcttcttaatgtattgaataaaagatgtcattgtggtgtgcctgaattgaggacttgtctccaaaggtattcactagctttgttcctcagtggctttattttcagtaaactgagatcatttagtccagcgtcaccacttgtcaaagtttttgtatcctgcttgttcccttatccacgtgcaggcttctttggaatggacatcaggtcatgtataatcagcttgcagcttggatggtctatggcattcttcaggatcctcatggagaatttttcatcaagaggtaaattgtaaatctacatcgttttgtcaattttatcttgatatttgctgagtgccatctcgtttttcttaatgtcgtcattagtggtcctcattatgtatttattctgcttaggtatctgctgtatacttgcattgatacattatggcctgccgtcgtctgcagatgcactttgatttctgtttatcttctccaaagaatgttcaactcatttctggtttgcttgtaggcaggacgatggtgatttagatcatcgctcatctcaggaagaagtatctgaaaagttggctcgtacctcagttcatgagacatctttaactgattggcactctggatttcacatttctttggtattctccatgccacttacacttttgatttaggtactgttactatattattgatttttctgtgcttatattgcaggatatgttacctgattatattcctatgcgccttggtgaatcaattctttttgcggggaaagccataagggttttgcgaaatcccagtcctgctttccagttccagaaggacaagagttttcagcaaacaatgcgtggctcccagagaattcgaggatttatgcatagtgatttccctgaaacagaaactgagttagatgcagatcttacagggggagagttgcttccacaatctgaggcagataagattgaagctatgctcaaagatttaaaggtactttctcactggacagtatatctttggtaaaaagtataacaatctaaataactgagttgattttcggttatgcagcacgcgatcctactgctcatgcatagagatcatgcgtagagatagtatatgcctttctcctaggatcacattagagctcagattgtacacttagatttatacgtttgtgtgcaggaatcatctgagtttcacaagagatcatttgagtgcactgttgattctgttcgagcaatagcagccagtcatctttggcaggttttcacttgacaacattttaaacttcaatcttctggatttatttttttgggtcacattaccttcctttcttcagcttgtcgttgtgcgtgctgatctcaatggtcatcttaaagctctgaaagattatttcctcttagaaaaaggagatttctttcaggtaaaccacataatctatctgttgatgctcttaaatgaaaattaagggtgattaatgtcgctcccacttgttcatgtcctcctcttcttgcactagcctcagttaaagacctgtggacatttaatttctcatctcatagactttctgatttcagtgctttctggaggagagtcgtcagttgatgcgtttgccacctcgccagtcaactggagaatctgatcttatggtaccgtttcagttggtatgtggttacaacttaaacaatttcatgataaaagttctgttcaggtcaaattgtttttgtaatgttctttcttttggaacacacaggctgcaacaaaaaccattgcggaggaagataagtatttctctagggtatccctacggttagtaacacatcaaattcttcttaacgactttgtattaatggatttagtgtcgagcctttgagctaagtgggacgcacatattaataactatttctcccaactgttccttaatttggctatttaactgctattctcaccaggatgccttcatttggagtcacagtcagatcttctcaagctgacatggtgagatctaaagtatctctcaccgggaaggcaaatcttacatcagacacctctgtggatggctgggacgctattgctctggagtattctgttgattggcccatgcaactgtttttcactcaagaagtgctttctaagtaataatccttaggcactgcttatatccttcttttcttctaatttttctcactttcaaagtttttgcatcgattatactatgaaatttttagtcggctgtctgctggaacttgaaatatgtgatgctttctctgagagctataaacttgtgttaggtatctcaaggtgttccaatatttgatacggctaaagagaactcagatggaattggagaaatcatgggcttctgtaatgcatcaagatcatatagaatctgctcaacatcgaaaagatggtttaaacggatcaacatctcaacaaagacgacaaggaatacgacccatgtggcgtgttagagagcacatggcgtttttaataaggaatcttcagtcttacattcaggtaaagacgacgtttcctaagaatttcaaagttggttataagccagtttgtaaaacaaaaaacttctcatgttttgattctctctttgtcttaaggttgacgtgatagaatctcaatggaaggtgttgcaaactcacatccacgattctcaagatttcactgaactcgttggcttccatcaagagtaagtatatccaatgctcgttgttctctttcaagagtcttcatgctacttacttggcctggcatttattcttctgtgtttggttctcgtttcgatttttattattttgtgaagcaagtctgaacctaaatctttttcagtaatttttccctctacttacctactgtactatacaaatgcaggtacctctccgctcttatctctcaatctttcctcgacattggttccgtctcaaggatacttgatagcatcatgaaactatgtctccagttctgctggaacattgagaatcaagaaagcaacccaaacacttcagaacttgaaaacatagctgaggtgcgttatcttttcactgtaatactcatacaaaggtaacaatggtctctcataattttttatcttgcggtttaaggaattcaacaagaagtcaaattccttgtacaccatactgagaagcagcaaactcgccgggagccagcgagccccgttcttgagacgttttcttttacgtctaaacttcaattccttttacgaggtaaggatttcaatcagaagatttaagtttttctcaatgggagcttctcactgtctctctttcctggtagcaggcaactgcaaggggcgtgttaaacgttgtccgacaacgcccagcgcttccattgtaaaatgccagacagtcctggtggaagaatctcgttccgaagctttttcagacatgagctga

SEQ ID NO: 183720 - DNA, 61 bp, Arabidopsis thaliana landsberg
taatgttccagtcgtcgatccttatgaagctcgagccaatggttgtagcaaagataagtag

SEQ ID NO: 183721 - DNA, 459 bp, Arabidopsis thaliana landsberg
atggcacagcaggcggccgccaaccaggccgcgctcgatgcggcgcagcggacgatcgtccagcaggcgcaggacctcgacaagacctcggccgagctcgatcgcgcgcttgccgacattgatgcgagctcgggcggtgccgacgcggccgaactcgggctcgacgccgcccggatgcaggcgctcggcaaggtcagataggagcacatgatgcgatttattctcgccgcggcggcgctgctcgcgctcaccggctgtgcgacgacgcagccgtcttcgaccgtgccgatcgacctgccggcgttgccgtccggaattgccgcgccctgcgccggacccgtgaccctgccgaccaccaataccggccgacaggatgtcgagcgctattgggcgaccgaccggaccaacctcgccaaatgcgacgccagccaccaggccgcggtggcgagctatgaggcg

SEQ ID NO: 183722 - DNA, 1000 bp, Arabidopsis thaliana landsberg
aatcgtttccattaaacccttaaaagtttcagaatcgaactcgtctattctccgccggtgtgccgtcgccgatatgcttcgtcgtgtcttttacaagcgtgcacggtcagttggtgtctctgtctgattttatgttgtatatatcatagattcgttagaactatcgaccaaatacacattcaattttgtaattatctgcagccaaaatcgattttcgactagaagtaatttatgtaataatcttacctgtgtttcgattttcattggcagtgatgatttatcttactgtcatcgtctgttgcacattccgtataacgaaccagagcctgactcaaaggcaatttctgaaatcgttggtatagtttcaaagaaagaagaagctgtagtagttacggaaccaactcatcattggcgtaagaattgggaagatttgagaaagaataggttaacagctagtaatttcgcgcgtgctatcggattttcgcctgacggtagacgaaatctttggttagagaaaatcggggcagcgaaaccgtttgctggaaaccgagctacgttttgggacattgagaatgaggtcgaagcactcgagaggtacaacgagttaacgggaaatgaaatcctcatacctgagtttgttgattataagaatggtgaaagccctgaagaaaactggttaggagcttctcctgatggagtgatcaatgtagttaaggacggtgttacttcgtgtggtgtgttagaagggaaatgcccgtttgataaccgggataactcgaaagtttatccgtggaagaaggttccttataattgtgttccacaacttcagggtttaatggagattgtggatacagattggttggatttgtattgttggactcgcaatggaagcagtctctttagagtttggcgtgataccgcgttttgggaggatatgaaaccggcactgtttgatttttggcagaatcatggttttacctgcaagagagatatacaataa

SEQ ID NO: 183723 - DNA, 502 bp, Arabidopsis thaliana landsberg
atggcgatggttagatcaggtacacgcttctattatatcatctctcgctcttttttacatttagaaaaaaaaaacgaagattcttttttttttttttaatcgtatattcgaagattcttcacgttattgccagtgattgccgttgtgaacaaggtagatatttctggaattacggtgaacataacaaccgtaacacggattcttcgtaaccgtcgttattctcggtggagacggaggtagcggtggttttgatagagacggagatctaggacttgatgaagtagaggaagttgtggaagatgatgacgtggtggtggatgatggtaacgctaacggaggaggagattttttagatccggcggcggattttggtggatttaagaagactctgattttcatcggagatgaagaggaaacgagatcgtactcttcgattagattcgctagatcttcatcggaagtaattgagacgagcgcgttgagatcttccgtcggaagctga

SEQ ID NO: 183724 - DNA, 2094 bp, Arabidopsis thaliana landsberg
aaaaacaacacacacttatctcgcttatatcttcatcttcttctctgcttttcctctatggttatctacgtcactacatcaccaacaacatcactccaatttggacccaccggaaatcaaatgaaaccctaccggcgaaaccaagtattaaattcactcacgcttttcccgtgaagtcatcttccaaagaatcttcaaaagtttttctatttttagaatccccagaaactctttcaaaatcctttgaaaccggtaagaattagattatctctgttttctgagttaattgtttttgaaatcagagacctttaagtattcggattccattagagactaaacccattccaaagttttcgtttttacgttctgggtcgtgttagattcttgtttatgtggttcctgaactaagcaatgattgtttctatgaattcttcagcattgttgatgacttgatcaaagagagtgtaagcaatgtctgtgagtgataaagaggattcatcagcagattcatataatggacagcttttgaaggacattaaggaggtaagtaaagctctttacttgaacaatggacctcaaagaccggtgctttcgttgtctcctcctgttcgatctcaatctgtttcgagaactacagagattgggttagtattgtcaaataagaagaagaaatcgttggtaccatggaattggaagaagcctttgaatgcaatagctcattttgggcagcgtaggtttgatgtttgttttctactccatgttcattccattgaagggttgcctttgaatttggatggtactaagttagttgtgcagtggaagaggaaagatgaagtgatgactactcaaccttccaaggttttgcaaggaactgctgagtttgaagagaccttaacgcatagatgttcggtatacggtagtaaacatgggcctcatcgttctgcaaagtatcaagtgaagctttttttgatctatgtctctcctgttgatgctccatggcttgtattaggtaagcattggattgatcttacaaggatattgccgttgtctctggaggaaatggaaggtacaagaagcacgagaaagtggaacacgagcttcaaattatctggcctggcggagtctgcagtgttgaatcttagttttgattactcagttgtcaccagttcagtctgtgactcgacaagtaaaaatgtgatgctgaggcgggttggtagtgttccaagtatggaccatagatctccaccgcttgatgatggaaaggttgtcaatgaagtctcgccgagtctgagtttgaatcttttccagtcaatagattttctctatgagaaacttggcgaacaaaacccacaaagatcaacaggaactgaggtagaactaggtttggagactgacaaacaagcagctgattctgatgacagtggaaaaggagtagagacgtttcagcaagaaagatccgggctggaagaaagcactgatccaaatacagagtcctcgagaattgaaattattgatgtccatgagatacttaaagatgaagatgaattcttttttgaagaatctcattttattgatcagttatcagtggccacactaaaaagtgaaccaagtaatttgttgccaaaatattcagttgatggaacacccaagtcaacttttagtagccaggtaatttctgagtcatctgagagtaaatctccatcggctatggatgatagtacagagaaagaaaactttttggaagttaaatctagttacaaagccgccaaaatattaacgaagtcactaagcttggatgacattactgagtctgtagctaatgattttctaaacatgcttgaacttgaggagtgttcttatgtttatacctcagatggtgaacctacatctcctcgtgaatctctgcttcgagagtttgagaaagaggctttcgcttctggaaactttctcttagatttagatgaagaagcagaatatgtttctgatattgatgagaagtcgaatgatttctcgttctctgcaagttctttgggtgttcgggaaaacaagcgtgagggaaaatctcagcagataatagacagaagaaaggccaag

SEQ ID NO: 183725 - DNA, 397 bp, Arabidopsis thaliana landsberg
atggaagccactaatgtgcttcatctgcttatcatctctctgttttcgacgattcttttggcacaagcaactgatatcctcatagcaaaccagactctaaaagatggagacaccattgtttcgcaaggtgggagcttcgaggttggttttttctctccaggaggatcaagaaatcgttatctcggaatttggtacaagaaaatctctctccagaccgttgtttgggttgctaacagagactctcctctctacgatctctcaggaaccctaaaagtatctgaaaatgggagcttatgcctcttcaatgaccggaatcacatcatctggtcatcatcatcctcaccatcttcccagaaagccagcctaagaaacccaattgttcagattcttgatacag

SEQ ID NO: 183726 - DNA, 534 bp, Arabidopsis thaliana landsberg
gacaagctcgcagcgaagctcaacgtggcgttcgccaccatcaaccgttgggagctgggcaagtccagaccgcaaaaggcccagcaggaggccatcctgcagcttgtcgaggaggcgggtcttgtgccgaacgatatcggcgacacgccgccaccgcccagtgaagtcaaacccgagcgtcgtcgccgcggcgtggcgcacagccaggtgctgggcaccaagccgatggagcagatgctgtgggacgccgcgtgccagatccgcggcgagaaggacgcacccaagttcaaggattacctgctgccgctgctgttcatcaagcgcctctccgacgtgttcgatgacgaagtgcagcgacttgccgaaacctacggcgaacgcgacaccgcgctggcggtgctggatgccgaccccagcttggtgcgcttctacctgccgccacaaacccgctggccggtgatcagcggccgggagacttatccttggccggccgacgaagcccccaagacgctgggcgaacagctcaccaccacc

SEQ ID NO: 183727 - DNA, 1225 bp, Arabidopsis thaliana landsberg
atggctcaagtaggtggcaaagatccagggggtcgcatccttttctacatgggatagctccgagcacgaatctgtccaaagagctgcagcagaagaatgggagaaggagagagcatgttgcttcaaccttccttccttgatttgtgttgaagagcgtcctggtagagatgcaaggtgaggtagattggttaacaggttatgggctggaataacaaggggggaaaggatgggaaaaagcttcaaaaggggaaaaataaagaaggaaactatggtaacgaaaagaagagaagttggggtcccgacgccggtgaacagaggcttcaccggcgccggaaagagtagtcgatgagagggcttcgataatcggacctgagagaaaaatagtttttactttagttagttttgtggtacagagtctctgaattggaattgacgcttagatatacaatggtatccatatatatatacccaattaccaatggtataataccatcataaattcattatcacatcacttttattttagtgaatgaagatgtaaatatgctattatgaaaaaaatttgatggaaaacaaaatcattgatataattgttttcactggtacttaggaagactccctaatagtaaagcaaagttagacgatattgttttcgtctttggacacgaaatattttgaaaaccttccgacataaattagacggtgaaggccttttaaaagttttgtcgttaaaaatatgatttgacaaatcgacttagttagtgggtttctggagatgtgtactatcatggaaaagaacgagaaagattttttttttaaaaagttgatgtgattgggcccaattagaaaagttttcggtccatacaaaagcctagtaaggttgtattaactagattattattaaaaatatttttggttgattagtattattattaattggccgattgactgaaaaataatctgatatggttttgccatcttttttgaaataatcgttaaatcattttataaaactatccacatgtaaaacaatgcatgaatatatacagttgttaatcgtctaatattgttagtttattttgataattgaattgtactattcttgcagctgtttgaatggttagatgttgaatcttacctggtacacaaatcattactggttagagcacagaaatcatatatggaccggcacaacattgaaataagaaccatcttgtctaatcag

SEQ ID NO: 183728 - DNA, 57 bp, Arabidopsis thaliana landsberg
actagcctcatcgatgtaagattaatgaaagattacccgttacaagtcggtaactag

SEQ ID NO: 183729 - DNA, 89 bp, Arabidopsis thaliana landsberg
cgattaagagatgtggacgagatgaagacctggtgaggaacaactcggtgaagtatgactgtcgacacgcaacgaaaccttgccactga

SEQ ID NO: 183730 - DNA, 152 bp, Arabidopsis thaliana landsberg
atggtggcgaatacgcgtgaaactgaggcgcatgtatccgaaacgctgacggctcgcctggtcacacagatcaaacggttattccgcgcccatggcttacgttatgtggacgtggccgatttgatgggcgtcagcgaaaagtccatcaaacg

SEQ ID NO: 183731 - DNA, 368 bp, Arabidopsis thaliana landsberg
  unsure (1)..(368): unsure at all n locations
tgatgaagccacgacgatcggtaccgccaagcgccaactgtgtgacgtgagcgggcgatacatcctagcgccggaaccaacctaatgcaatgcaaagtggtagaagcagctctccgtccactaccggaatccgaggctttgccgagtgttgcattctttgccgagtgccttttgtcgacactcggcaaagaaggctttgccgagtaccgcactcggtannnnnnnnnnnnnnnnnnnnnnnnnnnnnnnnnngtgctaaacactcggcacaggtaggcactcggcaaagacaagtttccgagtgtaacgcactcggcaaacggggctctcggcaaaggccgtcagcggccgtcccagagctgacggcc

SEQ ID NO: 183732 - DNA, 50 bp, Arabidopsis thaliana landsberg
tttcatcatttccccgagattttgcacgtcatcataatttgacggtttga

SEQ ID NO: 183733 - DNA, 510 bp, Arabidopsis thaliana landsberg
atgatactggtaaggatgacattttctgcagttaccaacagttttattaccaagtttgcgtcaatatgatttgcttcgctgaaaattgtattaaactatatgctggtatttcggtagctttctaagtcaatatcctcagaagaggggcacaaactgggtctcattgatgccttggtgccacctggagatgtgttcaccacacccagaaagtgggctctagacattgcaaaaggacgtaaaccctttctgcagtcactgcacagaaccgacaaaattggttctttatctgaagctcgtgctatattgaagaattcaagacagctagccaagaagattgccccaaatatgcctcagcaccatgcttgcattgaggtgattgaagaaggaatcatccatggaggatacagtggggttctcaaggtatctttaggatttcgacgtttaccgtatttcttccatagctttgacatagatcatttactgctcgttggtgctcattcgactttttaa

SEQ ID NO: 183734 - DNA, 127 bp, Arabidopsis thaliana landsberg
gactgttaataccaaccaactctctgcttggcttgacttagagctttctaatcatatctcatatgtttgcatcacaccggactggattgacaacctaaaatactacaacgacatgatagtgttttag

SEQ ID NO: 183735 - DNA, 517 bp, Arabidopsis thaliana landsberg
atgcgcaccgatggcagcctggacggcaacggcaaggtgcgccgcagcgcagctggcgtactcagcggcaacgccagcatcacctccgcgcacggcagcgtcacgtataccgtccaccccacccgtgttctgttgactttctggcgccctcgccgtgaacgccacgctggcgccgggttcgcagcagatccaggcgcaggagaagctggatgaaaatgaccgtctggacggccaaataaacgcaggtgtctaaacagcaggccctggccggccagatcgccatccacctcaaccggctcggtttcgtcgaactgctcacggatgccgtcgccgacgtgaaaggcaagctcgatggcagcttccggcttggcggcacactggcgcaaccaaggttcggcgccgatggcattctacacggcttcgccgcggaagtctcaggctttggcctcaagctggacaatgcccacctcttcctgcactacgagtatgggaaccagtctccagcatccaggggagc

SEQ ID NO: 183736 - DNA, 1366 bp, Arabidopsis thaliana landsberg
agcatttaaccaatgttgggtggttgttggtgttataaccaatgttgggtggttgttggtgcagaatgatatgatgaaattttttagggaagacttgcaaaaacggttgttgagtcccgacttcaagaaacaagtagatgggctggaaatcctacagaaggtagcagctatcttatgttagaatgcggatatcttgtgttggaatcttattcatctgctagatctttgtaattttctttaaagtattcttctttccttctcaccacaggcacttccatctgtttcgaaggaaattatagaagtattagatgtacttctcaggtggtttgtgttgcaattctgtaaatccaacacaacctgtctgctaaaggtaatttgtaatgaatcttctgctattgtagttcatgtttgacactgtttttcttgcaagaacaatgaaatttatttgctctgggtaagaataggtgcttgagtttcttccagaacttttcaacacattgagggatgaggaatactgcatgacggaagcagaagctgcaatatttctgccttgtttagcggagaaggttaggcatctgatattaatccaatttcctatggtgttggcctctttctaatcgttcccgtttatctttctgttttagaaaaagattggtgcttcagtgtctttatatttaactccttgtccttggtgcagttggggcataacattgaaaaagtaagagaaaaaatgcgggagctgatgaagcagatcattcaggcatattctgtaggaaagacgtatccctatattttggaaggtttacgttccaaaaacaaccggacgaggatagagtgtactgatctcataggatatctactcgagacttgtggaactgaggtagtagcaagacttgacaaatgatctgatagtcctgtactcctgttctgtttgaattctaatatgcctttctaagcagataggtggactacttaaatacttaaatatcgttgcaagcttgacagcagaaagagatggtgaactcaggaaagctgctttgaacaccatggctactggttatcagattcttggtaggacatgaaattcatgagctattgcgaagttatagtggaattttctcaaaacatgctccatgtctcgcagtgattagtgcacaattttggcttctcaacgtttcataaaaacctggaatctaactatgattttgaaacgaatgtcgcacttggttatccattcccttgagagaactatttgcactcgtttcttattgtttggcttgttattgcaggtgctgacatctggaaatatgttgggaagcttacagatgctcaaaagagtatgattgatgatagatttaagtggaaa

SEQ ID NO: 183737 - DNA, 721 bp, Arabidopsis thaliana landsberg
aagattgacggctttcttgccgttcttagtattgctgggggaaacatctctccaaaatcacagaagcttccattctcagtaactagtgctggtgatgattgcctcttgttatactacgcctccatagatctcgctggaggatctaaattgaacaaattctggggccaaaaagtgaaaacaagtcaaatgaactctgatgcccagagttcgaagagccaactgcggatccccatgaagggtcggattcaactggtatctcctttctctttattttttttgttctatttattctgcgtttagatcaaggtatggctaaaagctcatttgccggttgcagtagatatcattcgtcataaccgcaattttctcgtgtaaatgattttaaaagactaattagtgggttaacagctgcattctgcaattctccctggattccaaatagccaagtgcgtatgaagtatgagttagacatttctttgaatgttgaatcgtcacctaaacatttgtaattgtaatccatgtcaagtgtcagtgctaaatatgtctaataggctaagttaaactgtttgtcaatgttgctgatagatagtgtcaaaaagcttctgaatcttcactcatgacataaactgttctattgcaggttcttagtaaccctgagaaaacacctcttcacaccttcctctgtaactatgacttgactgatatgccagctggaacaaag

SEQ ID NO: 183738 - DNA, 117 bp, Arabidopsis thaliana landsberg
atggattggctgctgatcgacgacagcgacaccctgaacggctacatggcggcagcaaacgtttaccctccaaagggggttcgcgggcagaaccggagaatcaggcgagcggcggcg

SEQ ID NO: 183739 - DNA, 480 bp, Arabidopsis thaliana landsberg
atgccgcgcccgtcccggtgtcggcgacggcgcgggcaaggcgtcggcgcgcaccgtgtggtgtttgtggttgcgaccgggctcggccggtgtggttgtcctcgtcatcacgcccccgtgagttgtgcagtgccccggggggtgagagcagcctccatactgcgtgatacggcccgcggggtaaagctgtcctaatcatcggccaccccgggtgaactgatcccacggtgcgggattgatagcggggatcacaccgacgccccggcggcggcgaggatgataaaggccatggcagtgttcgactttcccaatccggtcaacgagaaggccgcccgcgtggttgccgccggagtggtcatcctgtgtgcggcgacactgctgctgcgctcgcccgtgctgctcaccgttcccgccctcggcttccttgcccgggtcgccaccagaaaaacgctgtccccactcgggcagctcgcgacccgg

SEQ ID NO: 183740 - DNA, 360 bp, Arabidopsis thaliana landsberg
taccaagccactggaagaggcttcgtcgtgaagcatatcaaattttctgaaaactaccgtctttattccagaagtcattttgtcaaagcgtaatctcctcttctttagttcttatgtatatacatttctgatgtatacctgtttagccatagtaaaggattgaaaattcattgatatgctacttctttttcgtttctctagaatggaagttattcttttattggttgtgtaccttgcgtatggcaatgatgaagctggtgcggtttcctacatcctgctgacagttagcagctggtttttggctgtttcttggctgtttgctccgtacctattcaaccctgccggatttgagtggcagaa

SEQ ID NO: 183741 - DNA, 239 bp, Arabidopsis thaliana landsberg
ccgtcgccgaacgcacctgcgaagcggtgtgcgactacctgcgcggaaacgcggcggtcggcgcctgcctggccgatcaactgctgctgccgctggcgctggccggcggcggcacgttcacgaccgcccgcatcaccgatcacctccagagcaacgcgcggctgatcgaaaagttaatgccggtcgaaatcgactggcacgaaagcgaggggtgctggccagtggacgtcaggcgatga

SEQ ID NO: 183742 - DNA, 19 bp, Arabidopsis thaliana landsberg
atggccaaccgtaccaaaa

SEQ ID NO: 183743 - DNA, 439 bp, Arabidopsis thaliana landsberg
atgaggaggaaacgagaggctaaagagtgtaaaagaaattcggctcaaactgttaagctggccccggatgggagctcattgattaaccccgaagctatgcccactcacatttttccagttattggagacaacgggctgagctgcatgagaaagggttgtctgccttcacgagcaatctatgatcctctggcaccggttgatccagccaaactgcagaagcttaaggcttatttgacaagtcccgaatggtatgaccctttataccttaataagttgttaaatacgacatgcttacagtatttgtgcatattaactttctttactatatgttagcaaaaaatcgttggaaagtgggatagacgaggtggatttctactctgttatcatggccaaaagaaagaactggccagaccccaaatatgaatggctaggtgatgat

SEQ ID NO: 183744 - DNA, 737 bp, Arabidopsis thaliana landsberg
ggttggtcacattgcagagagatgctataagaagcatggatttcctccaggttttactcctaagggtaaagttggtgataaaacacagaaaccaaaacctgttgctgctaatgttgctttggctactacagaatctgatgatactcattctggtctaaagagtttggtgggcaatctgagcaaagaacaacttcaacagttcattgctatgtttagctctcaacttcagcctcaacctcacagtaattctgcagtagctagctcatctcaagctgataacattggtatttctttctctccttccacctatagttttattgggattttgactgttgctcaacatactctttcctgtaaaacatgggtgatagattcaggagctacacatcatgtttcacatgataaagatctgttgttgactttgaatacatctgttttgagctcagtgaatttaccagctggtcccactgtgaagattagtggagttggtactttgagactcaatgatgatattcttctcaagaatgttttattcatacctgaatttcgtcttaatctgatgagtataagttcattgacagatgatattggctcaagagtgatatttgatcaacatgcttgtgaaattcaggatcttatcaggggtcggatgcttagtcacggtgggagagtggctcatctctatgtcatggatgtagaagatacaaatgtttcagtgaatgcgggtgtggatatca

SEQ ID NO: 183745 - DNA, 254 bp, Arabidopsis thaliana landsberg
atggatgatgaatcagtcacattatttgtgcttggatcttcggtaaagtatttatttaggtatcgatcattcaatggtgttgtggatcgggacctccgggtgaaaccctgtcggaactcactaaaaatcgcctctcgttatgacctttgaacttagagagatcaaacccgagttcatgtaggagaacctgactatccatattgcccatggacacggcacgatatgaacggaggattcgagcttgagaacttaag

SEQ ID NO: 183746 - DNA, 1902 bp, Arabidopsis thaliana landsberg
  unsure (1)..(1902): unsure at all n locations
atggtcttaaaggagtgtccgatttgcaagtcgacgatagagaagactgatgggtgtaaccatctgcagtgccggtgtggaaagcacatttgttggacctgcttagacgtcttcactcaggcagaaccttgttatgcccatttaaggacaattcatggtggaatcggattagtcgagttaggtgtcccagagcaccctgttgcccagcctgttcacaggctttgaaaccggactggacccatgtatctatatcctgtaacatctggtttgcttaatgtgtacatatatgtgaacatagtgtagttcggtatagtaccttctttaaccaattgaatgaaccgatcatattctaatccggatgccaaataaactaaagattgttgtaaatgaaagacttgggacttgactcgctacatcactgattacgcgtaaatgtctacagagagtttactaagttgaaagaaaactacttcctaacatacagagacatcgccattaatggccttaacttaagagtcaaaaaaacatttgatgggcctacccttaattaaaagcccaattcgatattcgaatcgaacccaccggcctaactaaactgttcagtgtccccaaatctttttgcaacttctttcttcttcatattcttctcaccgtgaaggcgtggtcaccgccgatgttattatctacggcgatgttttctgatcatcactgctttactcttactgcgaggttggttattttcaaatcttcttctctccgttctttctttcgaagtcagaaactttgccgccattttcagtaaaagggttgattctacattccctagaatcatctaataactagggttttcattaggttacgtattggttaaaattagttgaaatcatgtttcttatttctcttttcgaactaaatttggtaatcagatctctagagtgtatgatttgtcataacatctaatcgaaattagaatccgtatatgtttcattcagagaataaatcctgacttgttaatttgatatagaatgtcagattctgatgaagctaaaacgtcggaggaagaatctcaacttgctgagcaagaaacagagactcaagaaggtgaaatgactaaaaacttaaagaaaagagatcttgatgcagtagaagatgaagattcgaataacgaaagctccagattagagaaactagagaagaagataaaaaaagaancagcgaggaagcttgaacctgactttgtgctaacaggggaagaggatgatgatgcattgcccttagcctgttccatttgccaaaacccattcttggatcctgttgtcaccaactgcaaccattacttctgcgacaagtgtgctctaaaggtaatcttttccttacaacaagtttcgtaatttctgaaaacacactcaaaacagattttccttgttattttttttcataatgcagcatcacactgagaacgatacttgttttgtgtgtaacgagccaactctagggcttttcgacacagccgtggagatcaaggaaagaatagaggaagaacgtgagaaagccagaggtttgttaaaaacgcaaaactctctgttttgacaccaaaaacctactcttacaaaactcgctcggtgatgtctctttgtagccatggtaaaggaagtgacagcaatgttagaaaaggcatcgacaatggcggatgacgccaagggcgtagcgcaaaaggttgtaaaaatggtggaggagattgaaacaatggtggaaaaagtggcggctatggccacaaaggcgggagaaacggcgacaatggcggcagatatggtgaaagaagctgaggagacgatggaaacagctaaagctaatatgtccaaagcctttgtggtaatgaagtcggtgaattggaacgtgtaa

SEQ ID NO: 183747 - DNA, 102 bp, Arabidopsis thaliana landsberg
aatccaactctcaaccaacgacgaaccgacaaaaggattacaattagagcagttgttgtccctaattgtttgcatgtcacattcaatgtggttccaatgtag

SEQ ID NO: 183748 - DNA, 111 bp, Arabidopsis thaliana landsberg
gaagacgtcgtcaccgaatcgtcgccggacttttcgattcacgttgctgcggattttcgctgacggtggtcgcgggcatggcccgctcctacaaaagccgctgttgtaaag

SEQ ID NO: 183749 - DNA, 141 bp, Arabidopsis thaliana landsberg
gtgactcgaaatctcgctgatagtcgtagcaatacaaacaaacatggtatagataaaaatcaacatcacaccaaacatgagaacaaattgaataataatgatctacgcgaagctacgagatcgtggatcgagaactactaa

SEQ ID NO: 183750 - DNA, 112 bp, Arabidopsis thaliana landsberg
atgactgtaccaggagacagactaattattagctggtttattacatttgacaacaagtctctcacgcgtcagagacaacgtgtcaacgtggcgttaaataatcggatacagt

SEQ ID NO: 183751 - DNA, 55 bp, Arabidopsis thaliana landsberg
gttggccacatatggtttagcggaattgcaaatggagggagatggaaattgccag

SEQ ID NO: 183752 - DNA, 617 bp, Arabidopsis thaliana landsberg
atgatagtgatgatagaatcttttagagattacttgagtaatttcttagaagaagcttgtgagtcggtgtcttccaaacatgtgaggagtatgggaacccaaaaaataaatgtagtagagtctcagcgggctcattacagagaacaagtgatgggtttactgcattgttccaagctaacattcgctcccatatagataatctattcttcacatcaagccatattagaaaagaaaaccttgggattgaatcagagaaccacactcctttataccaattaacgtacatgacgaatttgttgccatgtgttcgatgaagagaaccacggcttaaatttggtgcttaagcttctcttctaagatcaatcgaggtgaaaattggtaagataagagataagggccttactcttgcatctctggttagcaaccactaacgtaacaattgcatcagataagattcccaaatctatgaaccccctccctccaaggctctcgttgaaacgaccaagcgggctccaagcatcataccaaaaggtgtgcaaaccacttctatgaaccccctccctccacatccaagagcctttatttgtggtcgccttgaccgaccaaaacgaagctga

SEQ ID NO: 183753 - DNA, 499 bp, Arabidopsis thaliana landsberg
tggtaaacgatcgattatttgtgtggcagcggtggcacgtgaaaaaatattccgaaggcaaacaacgtttgtccagtatcatacatcagcacctctggccaagaatagaattcttatatgggtggtaagattcttagctctcttctctagaaaatatggaaaacaattacaaatattgaataatgggtggtatgtttttcacctccttgcagacatgtttcttccggcaattcggacgttctgttgatcgttctgactatcttactctccgcaaaggattcattgtggtgggtgatactctatgccgtatgatcattagctttttccactctcattttcaactatttatgaatgacaataatgatacaactacttatagttggtactgtttccgtttcttctttaatgagcagaatcaccacctcacattaaagtacgattttcacagctacatgattcgttctatggaagaagagttccaaaggatcgttggtgtgag

SEQ ID NO: 183754 - DNA, 873 bp, Arabidopsis thaliana landsberg
atgattcctttccccaaaatcactcgatcaagtatccattgcccccgcctgaatcaagaagaacacaagaatctaatgaatatgattttacatgacggacatagtcaagaggtaaggttacctctcaattgggttaccctagctggaaactttttccagaacctcatttcatgttttagaagttgaccactgccttcgttttaagcttgatgatggtgggtcaaaatggtttgaaattttctgctttctttgatccctctacgccattgccatgagacggcaaattctggatcttctcacccagtaatccgccgcaaatctgcctgccccgtcacctgatgattctgcttgatttgctgttttcgtttcatctattttgtttatttcatatgaaacctccgagttcattcccgagtcaactcattaacccaaatcatactgaaaataattctagcccggttttgttttggtactctctttgagattttggttttatattaggaccgatttgggttttgaattccggttcaatttggtgtacgaattataaccaaaataaatcagcggtaagtaaattcaaaacaaccggctgatctgattctgcataaaaaaaaatacaggtttttatgaatcatgattacttgcgagagagtcgtcttctcatctgcaattctcgtcttcttcatgttcactggagttgggtaacttgatcgggtctctcctcaatccaaatcttaattcatcctccagagtggttatccatcagagaccacttgtttgtcttctgccgtttcaagaaccctaagacaaacaattggacgagttcggcttcgaatcccatcggcaaattcccagaagagtagcttttatgtg

SEQ ID NO: 183755 - DNA, 569 bp, Arabidopsis thaliana landsberg
atgacgcataacgtacgtaggtatgattatcggagagactgagaaacataacagatcaaacaatgtgattatccgagaaccaatctaaacgaagaagaacagtagcaggaatcaaattatgagattcaacaccaaattataaaaataaccaggcgtttcgtcgattttaagcaaggagacgccactcgagactaactttcagggacaacgagcagcacgaaactaagtttaggagaaagtgcatcttagcattgatcgaacatttcttactcaaatctacgcataaacgtcacctctaacacagaaatgttcatcgattatgatcaaccgatcgtcaatcgtcgaaccttagcaaaccgaagctaaaacaacgcctgacagtgagattctactcaatcgacgagcaacgagggtaaattcttaccgattgaatcgctttgcagttgtatatgtagtaggtgctaacgataaacgttcaacggcaacaagacgacgacaccggagagaaaatcgccgacggaactcgaaggggggagattttgaaattagctgggctccgaatgatttga

SEQ ID NO: 183756 - DNA, 30 bp, Arabidopsis thaliana landsberg
gctgttcaagaaatgattaaacagagaaag

SEQ ID NO: 183757 - DNA, 170 bp, Arabidopsis thaliana landsberg
atgcttgctgtggcttctattgccataacccaggcccacgaattcagggaaaccatcggtgatgttacaacaacgcctacggcgaatgccggttacacaaggtttaccaagtacagtactttacgtatatctggaacagtcgacctgcgcaacaccaatacctctacagg

SEQ ID NO: 183758 - DNA, 357 bp, Arabidopsis thaliana landsberg
atgcgaacatgtgacggtgacggagtgacggctaaggaatttaaggataatactaacttctctgacctcaaagctcgcgttactctacgtttcgagttttgtgcgttcgtcaccgtcagattccgttaatgtccgttatatatcttctttttaaaattattataatcagcaaaaaatcatgatatttgttttaaatattattattagtatagattttatgaaaatttaagagccgcaacttgcgaaagtttgttattactctctctgtttggaatcgaagacttcaggtctgattccgacaataaagaaagaaaagaaactaaacttcactctgaagcacttctttgccgttcttga

SEQ ID NO: 183759 - DNA, 1631 bp, Arabidopsis thaliana landsberg
atgattctcagttttcggctatttgcatgggagtgccacgtggcatgtggagaagttgccagtgaacgagttattctctctacctcaacgtcactaaaaccgaatgcgaaaaggaaaaaaaatagcaaaagcaaaaaactaaaacagaggattctcagagatcacgagagcaagaaaacgatgaggaagatgaagcacttgtcctccattgcaaacgatgtcgttcagagatgctcacagtatttcttttctccttgtctatatacttatttgcagatctatgttttgattaatagaaattatagtgtactggatcataatcaaaatcatggaagtcaaacaattttatgggatttcttttccttgatggtaaagccaaaagaatagcaaaccggttacacccggtttagcatcgttttaatctatgaattttgtgatgattgatgttgtagggaactagagacaaccattgatgatttagtgaaagaatttgaatgtcaatggaagccaggaagcacgggaggtacttactcgaagaagtttgtggaattttgcaactcaaaggtgacgagtcgggtttgtgaaaacatacttgagagaataaaagatggttcctttacacgtctcacgttcgatatgatgcttgcgtggcaacaacctgacgcagatgataatgagtcttataaggtatatacctaactgtaacttgatatgatcacttaaagtttcttggttctcaagtcatgtttttacttgtgttcaaaggaagcagtaggtaaagagagtgaagacaagaggattcaagcaactttatccccagagcaagatgacatctcgcttttttattcagacatgatgccgcttctcgtaagcaatgtttgtttttcgaactgtgacatcggattaacttttataaatagtagtttatagtacctctcaacttttatatatcatgtgaaggttgatcatgaaccaagtgtgggtgaagatgcttttgtctatttaggctcaatcattcctcttcccgtggatatcatcaacggaagatacacatttgagactctaactgctccgaccggtcaccaacttcacttcccagcttatgatatgtttgtcaaagaaatacacaagtaattattcttatacatagcatagttggtttctaggctcaatacatatgatgtcttcttttctttctaattgatttaatttcgtattatttaccatgtatcaatcaaggtgtatgaagcatttgcaaaagcaatcgacgcctaaagggatcgaattagcggatgatgaaattatattgcacgttgaaggaacaatggcttcacagagagtgattcgccacattaaagaaacaagctgggcaggtttagtttcattattgtttccttatgttatgtatgtctcaagtttgatgaaaaaaaaatgtcttgaattttgtaggtaggcttactttgacaatctatgcactatacttcgaagccgcgggaattataaactatgaagatgctataaagatagatctttctaaggacaatgaaaagtctacaaagcctatgtccactggtccattgggtgctcctctttttgacaaggccattgtctacgagtctccagatttgtaa

SEQ ID NO: 183760 - DNA, 2670 bp, Arabidopsis thaliana landsberg
atggacaaaaaggtacttgtttatctacaccaggaagaaaaacaataccagttttccggtccacaacttttgcatcaccatgcatccgcagccacgtgtgttcttatgaatattaaaatctactaattatttcgtttctacgacaaacgaaagatactgctttgttgcgtagagaaacaaacaaaatctcttgaaaataccagatattcttaattagtacgttttaaactcaacaatacccataagaaaatccagttagctcatggttttatgttttccaatagatatatgtgtatataattaaacgctttgcatcgtttgtgatttgtatgttggaaataataatgttttttttttgctaatcaaggtttgattaaggaaaaggagtttggactttggacctttctactacaaatacatgtggccctttttggccaacaccaaaagttccaaaaaagaggccaaaaaataagcaacaacttttgattctctcgtaacttcccccacaaaatcagcagagcgagagcgagagcgatcggttatggcggcgatggagcatcgcggcctcagtggaggagactacaatgtcgaccttttaccaattgaccaagacgattcgccaccatcttgatggcgtctcagcctggacacattccgtctcccttcttcttcaccgttatcatcaggacgtcacaacggccgtactcgcttgtctcgttatctccgtactccgagtaagtttctattcctcgtccttgtcttaaatctccgttcctctgtttcgtgtgcctgtgtattatcgatgtactgttacgtgtttacatgattcacgccagggaatgtcactctaatctgcgattactcttcttccattgagaatttaaccctacgcgaactttttccgcaattaagtatatatatatgtacggtgttcccaatatgtaaccctatgaaaattgtagaatgatcttatcgaatcttctgtctaaaagcatttgtattgatccaattctctgtttacaacttgaagcatatatgagattccattgtgaatctgggaatattcttttggttttgcaagaaacataatcatttctttatttctagtgtgatagggacacagaatcatattcttcggagttttcacgcattgtagtttgctgggaggatgataaaaaccattaaggatcgattgttaaacacgtttgaaactttgaatcattagtaataatcaggtaccaaaacttaacatgggttttactcttttctgttgtgaaaaatcagaaaaggaacgcaaagtctcagagtactacaaacagcaagagaagcttctggagggtttcaatgagatggagacaattaacgaaactggttttgtatctggagctccaactgaggtaccactcttgctctcttcatttaggcttcttctgagatctttcgtccattttcttcatatataggagcatcttgttgatttcaacaggaagaactgaagaagcttgcaaagagcgagaggcttgcagttcacatctcaaacgcagcaaaccttgtgctttttgtagcaaaagtttatgcttctgtggagagtaggtctatggctgtcattgcttccactttggactctctcttagatctcttgtctggatttattctatggtttactgctaatgccatgagaacacctaacaattttcgctatccaattggaaaacgacgaatgcaacctgtggtatagtctctgtaattctctctctggttcgcttaacactcacgaaactaaaagccatattgcttaaaatttggcagggaattattgtgtttgcatctgtgatggcaactcttggactacaagtgatactagagtcaaccaggctacttgtttccaaggtacaacaccgaggaccacattccatcttttctcgtaaactcctaacaccagttatatgatgtaatctaatctagtttgatatttctcattgtatagaatggttctcatatgagtagcaccgaggaaaaatggatgattggaataatggcttctgctacagtcgtcaagtttctgctcatgctttactgcagaagtttccagaacgaaattgtcagggcctatgcacaagatcacctctttgatgttatcaccaattcagtcggtttagcaacagctgttttagctgtaaaattctactggtggattgatcccctctggggctatactagtaagtaaatcatcaccaaccttatccattcttgaaatgtcttttgtgacttaattatgatacataagagatagattgagaaaacgtatattctttgtggtttcagattgctctgtatacaatcagcacatgggcaagaacagttctagagaatgtccattcactgataggacgctcagcaccaccagatttcttggcgaaactaacgttcttgatatggaaccatcacgagaagataaaacacattgacacagtgagagcctacacgtttgggtcacactactttgtggaagttgacattgtgttgccagaggacatgaggctgcatgaagctcacaacataggagaaactcttcaggagaagctggagcaactctctgaggttgagagagcttttgtccatattgactttgagtttactcatcgtccagaacacaaatgcaaggtttga

SEQ ID NO: 183761 - DNA, 323 bp, Arabidopsis thaliana landsberg
atgggccgcgtaagagccaatgcctaattttaagaattttcttaaacaaattattatgaaaaaggaccaagaatgctggatgctcctacatacatataaagttttgataaaattaaaataattaacgtctatatccagaatgaagtcaatgagcattatatatccaaaactgatctttccacaactatacaatatggatgtgttttttttttcttttggttgcattctgatatgttccttcttcttgtctgcagcgattacttgttattttgggttattcgtggaaatacaattcaaccatttgttttgaacgtgtaagataa

SEQ ID NO: 183762 - DNA, 143 bp, Arabidopsis thaliana landsberg
atacagacataaaagctgacgtgttgacattttattttgatggaaaacgtataaatgcacgacacgtgctcctactggaccacttgataagttacgtaacttatcaagcttaccgaaacgaacacgtgataacagagaactaa

SEQ ID NO: 183763 - DNA, 167 bp, Arabidopsis thaliana landsberg
atgagattctgtgacagttggctcaacgacatccgctgcctcaacattatggtggtggtgatcatcagcgtcacccagcagcagccacttatcaagagttcctcagtacctagccgtcgttgttcattcaggcagaggatccgctggatgctgatgtatggcttagg

SEQ ID NO: 183764 - DNA, 258 bp, Arabidopsis thaliana landsberg
atggcaagaaatgattggataaacagttacctggaagctattcttgatgttggaactagcaagaaaaagaggtttgagagcaactccaagatcgtccagaagcttggagatatcaacagtaaggatcatcaggagaaggtgtttggagatatgaatgggaaggatcatcaagagaaggtgtttagtcccatcaaatactttgtggaagaggttgtcaacagtttcgatgagtctgacctgtataaaacatggattaag

SEQ ID NO: 183765 - DNA, 192 bp, Arabidopsis thaliana landsberg
atgggacaaatacgagtaaaatcgggaataaaacccaaatttaagcagccgaaatacttatggaaatactggaaatcttcactaatggtgtcagtaatcacacgagctaaggagaataacaaagaggaaccaagactagtttctcgtggagatctgaggatcgcggagacgaaacacatatctaaacaaaac

SEQ ID NO: 183766 - DNA, 2541 bp, Arabidopsis thaliana landsberg
ttgtgaaaccagagaagttggatacccctgaagttattgatctggaatcagagaagagttttactcatgtgaagacagaaccggttgaggaaataaaggtggaagctgtgaagttgagttctcaagtggaagaaatgaaatttagccgtgagcagaaatctgtgtatgtgaagaaggaaccagttgaagcaagaaaggtgaaagtggaagacggagattttccggtggagaaagattggtatttggttgggaggtcacttgtcactgctacttctacgagtaaaggaaggaaattagaagataatgagattgtgaatttcacattttcttctgttgcaaaatggaaagtcccaaacattgttcgtttctctaccaaaagatgtggagaggtaagttgtttttcatacttaacgatttgtgtttctgtttcttaagattctgacatctttcatgttgtgagatactgaaaatttgtgtagttttaaggaactaaactcttccagtcatacttttgttttggtttattaaattgactgcatttttttggctttatggtcttatagattggtagacttccgatggagtggtcaaattgggctgtgagccttttaagatctggtaaggtcaagatgttaggcagatgtgtagcggcgccaccgtttcttacaatgatgcaagaaattatgctatatgtcaggtaaatattgtttcgtttatgttagtttgactgatagttttgtttgaaacttacatatggcttttggattgcagtttttacattcacagctcgatattcactgatgttagcaaatcaacttggcggattggttcttccccaaaccttgagtccactcttcatcctcttctccagcttttcaaacacttgacaatcaaaccttatcaaaaggcatgtaccacatacccatgttacaataccttaatgggattagaatcatgtttcctatccattacttgtttgtttctcatttatatatcttcaaacaggcggagtttactcctgaggaacttaactcccgtaaacgttcactgaatttggaggtatgtgttccacttcagtccctccttgaaactcatttaatgtatggaggattattatgcctgtgcgaatcttaagttctttgttcttttggtggaaaactaagttatgcatttcattggtcaggatgactatgatgaaagagcagcattgttggccatagcaaaaagaagaaaaggttgtcaacagtctctggagcagaacaaagatgaagaagaggctcctgagtcatatatgaatcgggttgtcggcgctgcagattcatacaaccttgaggtatgaaaatattcaccggaaattttttcttgtcctctttaaaaaaaaagcttattgtaatgtcatcttctcttgtcaatcgtttaggaaatggaagctccaagtacactcacgtgtaacctgagaccgtaccagaaacaagctctctactggatgtcggaatctgagaaaggaattgatgttgaaaaggcagctgaaactctacatccttgctgggaggcttatcgaatctgtgacgagtatgtactatctcagatgtttaaaacaagatgcaaaatgtatatgttatctgatattttattgttgatttgcatgcattttattcaggagggcaccttcaatttatttgaacatcttcagtggtgaagcaacaatccagtttccaacagcaacacagatggcaagaggcggagtatgtttcttgatcacgctgaatcttcattctaacacttgtattcctctctagtggcaaatattctctgcttgtggaacttataaaaatttgaactttttgtttgcagatattggcagatgccatgggacttggaaaaactgtgatgacaattgcactaatactagcacggccaggccgaggtaacccggaaaatgaagatggcttggcggcagatgttattgcagataaacgcaataggaaggagattcatatggcactaacgactgtgaaggcaaaaggaggcactcttattatttgtcccatggcattgttaagccaatggaaggtgattgtcttgacagttgtgtcttcttaaatcttttttagctttttacaaaagtctcatggattttcactttattccaggacgagcttgagactcattcaaagcctgacactgtgtctgtgttagtttactatggaggggataggacacatgacgcgaaagcaatagcgagtcatgatgtggttttgacaacttatggtgttttaacctcagcttacaagcaggttagaataatattatgtgttaattttctgttccaaaacatgtttttctatgtttagttgaacttaaaattctgagattcatgacatgcaggatatggcaaacagtattttccacaggattgattggtataggattgttcttgatgaagctcacacgatcaaatcatggaaaactcaagctgctaaagctacatttgagttatcttcacattgcagatggtgtctgactgggactcccttacaa

SEQ ID NO: 183767 - DNA, 310 bp, Arabidopsis thaliana landsberg
tacggcgtccagggatccttcgcatgccattttcttttcccctccagtacggtggctagggctccttcctattgccgccgccgtcgcaatcgtacggtaaataggcgtaatgattctatttctttacacatatatataattcatccacgtaagtttatcattatgtatttacagttcatatcaacatttggtatgagtcaaagccgattactttcatcgcgagttttggatgaatcatcatcggacgatgacgatgaggtcataattgccgcgtctcaaatcgtacaaagtgcctcacaaagaaagccgg

SEQ ID NO: 183768 - DNA, 405 bp, Arabidopsis thaliana landsberg
atgcttgctgaacttatacaggtgtcctccctcattatatgggacgaggcgccaatgacccatcgttggtgctttgaggctttagataagacaatgcgtgatattctttcagaacatactccttcaaatgcgctcctcccgtttggtggcaagcctgtagttcttggtggcgatttccgacaaacactacctgttgttagaaaaggatgtcgctcttccatagttaacgcctctattacaaactctaatctctggcgccacgttgtcctccttaggctgcgcaccaacatgcgcctttttgatccctctttgcaagtacatgcgcgaaacgagctcgacatgtttgccaaatgggtactatcttttggtgatggtacttgcctgctgaaagaagagcgagcgagc

SEQ ID NO: 183769 - DNA, 339 bp, Arabidopsis thaliana landsberg
atgcatatagaaagatgtgagagagaagaagaggaaccttcgagacaagcaggagtgcattggcaggtgatttgaagttctccatctgaaaatatcttaagcctcgcaacggcgtctccgtaacggtggctggtgcagccacacatcacctcgacgtaatcgtctcccacatggactccacttatttcttgtagctcctctttgctgaacaactccttcgacccacattctctctccatctccgatcgggaccaagtaaaccacgacgaagggctccttctccttcctatgaagtattattatataggatcagagccctaaacaccaagggacaagaag

SEQ ID NO: 183770 - DNA, 481 bp, Arabidopsis thaliana landsberg
atggcccttggaagaatgagagaagcaatagcagattgtacgatggcttcttcaatagactccaacttccttaaagttcaagtcagagctgcaaagtaaatatcgaccttccttaaaacttcttatattttctattgagccgtgccaaaaagtcttattagtgacttttagttttgatacgagagcttgaactgagaaatgaatgtatgttatcttttctcatttatgctctaagctggagttgtcctggataccttgctagttcatgctctttctcagctagcaataagtaataatatcttaccattttatgatgtcttattgactgattttggccccttgtcttgctagttgttacctttcacttggggagattgaagatgcatccaggtatttcaaaaaatgcttgcaatcaggaagtgacatctgtgtggaccgtaaaattattgtcgaggcttctgaaggtctacaaaaggcgcag

SEQ ID NO: 183771 - DNA, 1152 bp, Arabidopsis thaliana landsberg
atgtcgccgtcctgctgctccggcaaatactccgtcgctctcttcttcttcattctctccgccgttccaatagcttatattatctcttcagagaaagctgttccttccacgcacgtcatctcttaccacagctccggcttcctccgcgagtgcgccaaatgggacgacgttggtcggagattcctcgtttcctacatggacggcggcggcggtatcggcgagcttgttcctactaaagattccgacgacgttcttaaggaagtcactttggtcaaagacgttgacctcgccggtaactcttccaacggatttgtcatcgaccgccaccgaaaccgtctcctcctcgctgtcggcgatttgcttggaaatcgttatagtgctttagtggcctatgatttgtccacgtggcgtcgtctcttcctcacagtgcttagcagccatagtaagctctctgtagtttctctgcttatgtctctctaatcatttgttggttaagcaaacaaatgatttaagcaatgtaggtaaagagataacatacgcagacgatgtagctgttgatacacaaggaaatgcttatgtatctgatgcaaaaggaggtaaaatatgggttgttgatgtcaatggaaagctagtgtacaccattagaagccctctcttcactacacctggttggtataataactttgtctctcttcacggcattgtttatcacccggaggggttccttatcgtcatccacactttctccggtttcttatacaaaatcgatgtaaccaatggggatgttagtagtaaagtcactgttattgacgtttctggtgggtctttgaggtttggtgatgggcttgagttcttgtctccaaccaagattgttgttgcaggtaatggtagttattctttagtaaagttttgatttttaaagttctaccaatgactgtagactatttgtgagtgttttcaggtagcccgtcttcgaaactggtagagagttcagacgggtggcggacggcttctgtgacgggttggttcagcagcggtatggttcatcggttagtctcgtcggctactgttaaagaaggaagagtttatcttaatcacattgttgggtttgggtctaagaagagacacatacttgtggaagctgtgttttag

SEQ ID NO: 183772 - DNA, 169 bp, Arabidopsis thaliana landsberg
tcaaaactattttgtggtagacaaacttccatctattatcttggttttaattcggaccacaattgtactatcaagtctctatccggaaaaaataataattgttcaccctcgtgactacggcattctatttgcacaaggacagagagtcatgactaagtctttcttttaa

SEQ ID NO: 183773 - DNA, 57 bp, Arabidopsis thaliana landsberg
atggacacagaatttagaacacaccaatgcacaagtactcgtaaaatctctattcta

SEQ ID NO: 183774 - DNA, 239 bp, Arabidopsis thaliana landsberg
ggaaaaaacgcggaaaactttacgagttgaaattgggctactatgttgcagctttcagcccaatgattaaacattacgggcccataaaaggcccaattttatcgaccccgttcgtgtcccccaagtctgaaccctgggtttttgcccaaatcgcctcctctcgagaatttctccgtctctctctctctctccaatggcgtggctcaacaccatcttcaattcttcttcttcgacattga

SEQ ID NO: 183775 - DNA, 135 bp, Arabidopsis thaliana landsberg
atggatgtgggcagtgaagtccaagttcgtgttagtggtggtcttcttgctatattagaaagcgaacgaattgtagaaaccctggaacaaaacgaatctgggagtgcatcaatcgcaattgattcagtcatggaa

SEQ ID NO: 183776 - DNA, 149 bp, Arabidopsis thaliana landsberg
atggcggccagaaaatgttccaccgatcgcgtgctgctggtgcgcggcaggccggggcgggccatggcacgcgggacatcgcgctcaagatcgagttcgcgctgcacggtcgagtacacgtggccattgtcgtgatggaattgcgccag

SEQ ID NO: 183777 - DNA, 384 bp, Arabidopsis thaliana landsberg
gagcagccctgcctttcagcgaaggatttgaaggaaccaccttcgcaccaacaggatggagcattgtgaaccccgatgccaacggcacctggacacgtactaccgcagccagcggatttgggaccagtacggcctgtgcgcggttcgataacctgacccctacgaccagcattgccgggcaaagcgattacctggtaactcctgccctgagctttgcttcagcatcaggtaccctgcaaatgacctttgatgtggcgtatgcacgttacagcgccacttactacgattcattgaacgtttatatcaccaccgactgtggcgcaacatggacgcgtttgtacaacaacggaggatcggcactggctactgcccctgacaataccg

SEQ ID NO: 183778 - DNA, 251 bp, Arabidopsis thaliana landsberg
ggttgtttggcaatttcagctccaaacccataaacccttttccttctccggttattaccttgccggccctttactaccggccgggaagaagagctttggcggtgaaaacgtttgacttcacaccgttcttgaaagatcttcgccggagtaatcatcggaaagctttgccggcgggaggatccgagattgacccgagatatggcgttgaaaaacgactcgtcccatctggtccaaaccccttgcaccactga

SEQ ID NO: 183779 - DNA, 2183 bp, Arabidopsis thaliana landsberg
atggctgccactgttcctgcaactactcgttctgatcaaacatgggattttagttggtatgttctgtaaattctctttctttgcttctctgattagggaaaatttcgattcttctctctaatgattcagctcttagtttcaattgttcgtaacgtgtttgttctgaatctgatattagaacatacggattcgataatagaaatcttgggtctgacacatttcaaggaatagactcaaaagtttcgatctttacctacataaaccagctatacgaacctagttagtttcaatgcttagctcaattaggttaaaataaacttctaaacatcctttgtagtgcttgggttagtgttgcacaacggtattgagaatgacactgttatagactttaataaatttggtatgttttcaataatgggagttgttagagattgatgtaacagagcttttggcaatgtgcagtaatttggatgtgaattttgaatcagaagaacatgctttgattgcttatacatcattggctgttgataaagaggtttgaaatttctcaattcacttccaacatatgaatacaatctaatttccaacaagcttttcactgatgttagagtttcttctgttgtgaacattaatgcagttgcagcctgataaggtgagaagagttatgtcagtatcaaacaacaagctttctgtgtgagtttcttcaagtccttcttcgtcgttgaatcacttatcgatttgaaactggctttagttagacatctcttgtccatagaaccttttagcttacttcttacactagttttgatcttttctcactggataattttacaggcactttgaagcaatagaggcaaggctgcttcgcgcttcgttctctgcatttgtagacgttcttacactggccacaagaacaattcaagaatttggtcaaaagtaaaacaccaatatgaagagaaaaaagcttgattctttctcattactcttcaagaactcaaaattacattgtgtttcttcttcgagctcaaatcatcttggggttttcacagatttattcaaacaatgtactcccaagattattattgggagtattattatgtagtgtgaactcgatttgagaagtgaaaaaaagatggttacatttaaagcttttgatttgactacgttttctttgtttcatttactaagtaaattatcacttagtggagactctcattatctcttaatcatcttcaacatcaaatgtatctatcatcgtaacatataacacgtgcatcatctaatgcgataatacacaaaaactctattcatttaatatcgattgtgaatttttagcaatatgatcttatcaactttcatgcattgactttgactagaggaagtagaaaaaaataatcgtcatcatcattaaagaagcaactaacctacacacaattcagcccccgtgatcatatatacttaattaaagtcacacggtaattaattaagattaacatttaatgatttctaatacgctttgggactcgtaactcccattacattgcaatccctatgaacattcatctttgtttttacagagactatatatgagttcgtcaaaacattcctctgtttttaactattctgctctgtttctatcactgtttcttcaacaaatggatcagaactctcttcatcatctcgattctccaaaaatcgaaaacgagtatgaaccagattcgttatacgacatgttagataagtaagttggaaaccctttgatactttttcttgctaaacaagttatctctcttttctttactgttttttctcattcgtttttggtctacaggttgcctccgcttgattctctcctagatatggaagatttgaaaccaaatgcagggttgcactttcagttccattacaatagctttgaagatttcttcgaaaacattgaagtggataacacaattccatctgatattcacttgttgacacaagagccctacttctcaagtgactcctcttcctcttcaccattggctatccaaaacgacggtctcatttccaacgtgaaagttgaaaaggtaacagttaagaagaagaggaaccttaagaaaaagaggcaagacaaattggagatgtctgagatcaaacaatttttcgataggccgatcatgaaagcggctaaagaaactgac

SEQ ID NO: 183780 - DNA, 366 bp, Arabidopsis thaliana landsberg
atgggcaactacgtttcatgcgctctatacaaaacgtcatcgtcacctttgacaaaagtgattctccctgacggtggagtgcgtgacatccacgtgccgacgaaagcagccgagctcatgatggagatgccaagctatttcctcgtggacaccaagtccgagaaagtaggccgtaaatttatcccactcgccgtcgacgacgatcttgatcttggagtctgtcatgtgtacgtcgcattcccgatgacacgtgccacttctgcagccaacgcttccgacatggctaggctctacctcaccggaaagaaacgcacgaaaagctgcgataataggagagtgtctccggaaaatgaagataatgatgac

SEQ ID NO: 183781 - DNA, 419 bp, Arabidopsis thaliana landsberg
tgctggacgcggtgagcacctaccgcattgtggtgcataccattcccgaggtaaccaaagaaagcatcatacttaatccgggcgttcacaataccattgagatcgatgccccacagggtatactggacctgagggtcaaaaacaacaataaatatgtgacccgtacgcctgccattgttcgcaaaaaagggcaaatgcaaaccctgcatgtacagaacattggcgagaccgaaaaatttctcgtgggcgattacgatctggaaatactcaccttgccgcgaacctatatcaacaaggtggagatcaggcaaagcaccatcaacaaaattgaaattcccgccccgggtgtattgaagctgaacattgccggccagggatacgggagtatttttgtgatccaggacggaaaacagaaattt

SEQ ID NO: 183782 - DNA, 1051 bp, Arabidopsis thaliana landsberg
atggcggctacagaggcagcaaaacaagtggtttggcttcaagagttacttgaagagattgttggaaaaacgtgtaagcaagtgttgatattaattgacaacaagtcggctatagcactcacgaaaaacccggttttccatggacgaagcaaacacattcacaagaggtatcactttattcgtgagtgcgttgcgaatgaacaagttgaggtggagcacgtccccggaaccgaacagagagccgacattctaacaaaggcactcgggagaatcaagttcaaagagatgagagatcttgtgggagttcaagatatgacaaagtgtagcttcaagcttaagggggaaaatgttggagtaagcttgaagcttacttgacgaagaagcaatcaagcaaaaaggaaattagaattagactttgtgtttaggaagttgcctaaatacttatgtgtgttttcctaataggattaggaaattgtctagttcttttcttatataaaggagttgcaagagtgttgcaaaacttatgagttgagagattaagattgtgtgtttttaggttttgagttattttcctaaagcaataaaagagagtcttttattctaatcttgttcttattcttgagtttgatatatagtttgaatcaatataagttacagttaaactaagacaagtgagatatattacctagagaccagtacggcattggcgctggccgtcctattaacgaagtgtattgatcaacgacattaagaggcgacggtccagcgaagaaatagaaatcaaaaacacctccaattaccttgtacgtcaaggaatcgcctctgtaaaacacatccataccatgactgttaagaagcagaacagagtgtgcataggctttacctctaacgtttctcaaatccatgtaaaccggatgcgacccgtaaagatcagtgttgagattaaacgccgacacgtcttcagtgaagagagtgtatggctcattaggaaccagtttgattccattggcttgagagttttcaccaaatccgtatacagacgcgtctttag

SEQ ID NO: 183783 - DNA, 182 bp, Arabidopsis thaliana landsberg
ggaatccacagcatcgcgtagccgacgccgcaccactggccgagcagcatggtgcgcacgtgcccagcagcttgctcccatctcagccgccgatcgccggcgtggcgtacatcagtgccgccgcgaccccagaccacgttggccttgctgtcgatgaacccgagcttcttatcatgtcgtga

SEQ ID NO: 183784 - DNA, 990 bp, Arabidopsis thaliana landsberg
atgcaggaggacgagtggccctataaggcgagccaaaggtgggtggactccggaagaggttagtattgagtattgactagtgattgcttttgaccaatatcaattttggatcagtagttcgaaattcaagatgtgagttgttttacttaatgcaggatgagacattgagacaagcagttgacacgtttaaaggcaagagctggaagaacataggtaagtctcttcttctttttagattctagttctcatattaacaagagtaatgtcagtgctacaacatagtccatagatttgtggttcgaatattaaagttggagcctacttgcttacagtaactattagttccatactcttgtctctgtagttttatgagttactcttgtatgttaacttgatcatctgaggctgagcatctagtagaaagactttcttttacgtttgtttccgttttgttcggtgaagcatttagtattgtttgaattggtgtattcatttttgcagcgaaatctttccctgatagaactgaagttcaatgcctgcatcggtggcagaaagttctaaatccagaccttattaagggaccttggacacatgaggttgattctgtttctgattttatttattgtttggctttcatttttttatgtgaaatacgaaggcttaaagtttgttgttttgcaggaggatgagaaaatcgttgaactggttgaaaaatacgggcctgcgaaatggtctattatcgcacagtctttaccaggtcgaattgggaagcaatgtcgagagaggtagttaattcatatgagccaagcatttttcttatagttatattggaagctttaatgtcttttgatatgtatgcaggtggcataaccatttgaatcctgatattaacaaggatgcttggaccacagaggaagaagtagctctcatgaatgctcatcgaagccacggaaacaaatgggctgaaattgctaaggtcttacccggcag

SEQ ID NO: 183785 - DNA, 217 bp, Arabidopsis thaliana landsberg
agcaggacttgtaaacttactggatggaaacctccttggagaagaaattcaagagccgcatgacagaagaaaccgaatcttcctgcatcatctgcacaaccgtaaacacatcctcgctgaaacaatctgcaacagtcaagcaacgacaacaacttcttcatgccctcaagagatgatgaatgaaatgtggaaagagcttaaagagcaatatgcataa

SEQ ID NO: 183786 - DNA, 130 bp, Arabidopsis thaliana landsberg
gccaagtttttctagaatgggatcagaaagagattatcagtggtttaagaagagaatcgaagaagcttacgagttcgtgtatgcagaggatagggaaaggaagaagaagaaagaagcaagctgcgtctaa

SEQ ID NO: 183787 - DNA, 805 bp, Arabidopsis thaliana landsberg
atgaaaggttcagtcaatttacatgtcacgactgagttatacgttccaggaaagacgaaaggttcgatagaattacattacggttgagttatatgcttaagggagaacgaaacgttcaatcaatttacatgtcacggctgagttatatgttccagggaagacgaaaggttcggtaaaattacattacagatgagttatatgtttaagggaagacatctataaatttacatgtcacggctgagttatatgttcaagggcaaacgaaagatgagtgtaaattatatgttacggctgagttatatgctttagggaagacgaaaggttcggtaaattacatgtcacaactgagttatcattcagggaagacgaaaggttgtgtaaattatatgttacggctgagttacatcacgttacggctgagttacattactttacggctgatttataatacagatcggaaaacaacatttttctggggaagacaatatgaaatttattggccaaataacaacaatcaaattaagaaacgtaagaatatgtttgagggatacataggaggaagacgaaaccatatgaatcaaaacattgatagaagtagaaatatctctaaatagatcgattgagaggaaaactaaacgagagacatataaaaatcaaagtaaaagagtagttattcttgattcaactcaaacctgtaacaaatcatataaaattctatagatctctttgatttgggttttgatttttgatgacttgaaattcgacaccatcgaaagagtttcggccgaagaaacgagataagtag

SEQ ID NO: 183788 - DNA, 6 bp, Arabidopsis thaliana landsberg
atgccg

SEQ ID NO: 183789 - DNA, 180 bp, Arabidopsis thaliana landsberg
atggatgtaggcaactacgaattctcccgtataatgatcgacacgggaagctcagttgacgtagtctttgccgacgccttcttaagaatggggcacctcgatttccagctgcttaccggatttgccggagatccgaccttttctctaggaaccatacagctcccagccgtcgcacgagga

SEQ ID NO: 183790 - DNA, 220 bp, Arabidopsis thaliana landsberg
atgtgcaaatacgaaagcaaggagtcaaagttaatttgcttggaatgcgattattctatatgcttccgttgtgctacttttccgtacaaggcaaggtataaacatgatagtcatttcctcacaatttgtgatgggaaagaggaaagtgaggaaccagattggtgtgaggtttgcgaaggcaaaatagaagaagtaaaagagacagggtataactggaaag

SEQ ID NO: 183791 - DNA, 174 bp, Arabidopsis thaliana landsberg
agaagagaaggagatatcgctaacccaccgaggaatgaaattgagaaagatgagacagcaagtgatgggaggcatagggatctgcaagataacatagaaaaagaaaagattccgatgtataatagaggacttcaagatttcgtttttagcgaagaacagaggaaattcatttaa

SEQ ID NO: 183792 - DNA, 310 bp, Arabidopsis thaliana landsberg
gtgcggatcacatgaccacactctttatgcccttgactataggagtcaatgctgtgtttataagctgcaatgtggtgggagcatatttgcttcgcctgcaattgatgaggtgcagactttaactactctatccaagtggttaggcatagttgcttgtccacagcttaacaatgtcatctgtggtcaaagattttgttggttattgcagttctcttcacatcacctgatttatctttgatgcttcacccagggtcatagttcactttacgtggcctctaccagtggtcgcgtgatagctgtatcaataaag

SEQ ID NO: 183793 - DNA, 156 bp, Arabidopsis thaliana landsberg
agaaaattaccaaatgaacctgatgattctctccttgatgaatgttggaaactgaaaagcgtcataggcttcatgaactcaaaagtctctccaatgatcggaaaacccatcgaccctggaggtagtttttcattaggtttcggattcttcgactga

SEQ ID NO: 183794 - DNA, 375 bp, Arabidopsis thaliana landsberg
aaatcgtatttattaattaatgagaaacacgatcatcaaagatataaacaaataccagcttcgagagacgaagacgatggagaggaggaggaactagcggaagcaagaatccgaggaatcgatcgccggagactgaagttaacggcgggaagaggagtaacggagaatccggcggcgagcgtcttccatcgtcccttctgcgaagttcaaagctcgcatccattagataaaaaacaaacaatgcacaaatacatgcgagtgaaagaagtaagcgaagagagaaagaatttgatcagacgaggagagtacttggatcgaagcagagagagttgcacaaggcggagattgcaacgagagtggcattttttttgctga

SEQ ID NO: 183795 - DNA, 269 bp, Arabidopsis thaliana landsberg
atgcaagcctatgcgcaggccaaggcgcgcctgctgggcatggcccgcgtggccatcgtgaatcgagccgatccgctcaccacggccatggtgcccgcattgcagggcctggcggtgcgcagcttcggcggcgacctgcccgagctggtaggcgacatgggtctggaactgggccagggcgtggcctggctggccagctgcgaagctaacgatttcgacgaacccggtcgccgcgccgacgcgccgcaagaaggacgcgcccgagcccg

SEQ ID NO: 183796 - DNA, 282 bp, Arabidopsis thaliana landsberg
gtggtggcatgtagttttgtatacggagcaagggcaaagactcataataacaataacaagaccatcagacaagaaaaggaaccaaatgaagaggacaacaatagtgaaatggagaccacaccgggtagtgcagctgaaccagcagcatctgcgggtcagcagacgccacagaacttctcttctcagggaataagggggtggcccggttcaggctcaggctctggcagatcacttgacattaggagaaacccactcactgattttgatttgactcgtggatga

SEQ ID NO: 183797 - DNA, 673 bp, Arabidopsis thaliana landsberg
atgttcgctcagaaaagattgacattgaaagataagaagctttatgctcgggaggaaaggttggataataaagatgatcagctgaattccgcagaacaaaagttggctaaatgtgttaaggaatatgagctgaatgcaaagaaattgtccagcttttgtcaacaaaacaacccggatcaacaagttgacttggtgcgagacgctagtgtatgtgactagaaaactttgcagttactcttacgtgggcatctgaagaaatgtgatcagcttcacctcgatgttctgcgtgctctaaaagcatcttctgacccggcaaagcttgtgttaaacacaatacaacgtcttcacgaaaagatggcagtaacaaagcttgatccagatagtgtaagaaggggtagtatttgcttgctggaatgtttaatggatatgtcaccagagcccaagactgaagtacaagtagaagctatcaaatcagtcactgaatggaagaacacaacattggttaaggcagagaatccagtggaggttttgggttttctccactttctatctgcattcagtttggcctacacttttgatgccgacaaagtccaaaatctgtttgatgccgcctttcttcgccaatacgctccgagtctgtgtgaggctctaggagtatcatctctagcacctg

SEQ ID NO: 183798 - DNA, 753 bp, Arabidopsis thaliana landsberg
atgcagacaacctgggcagggttggtgtgtaaagcaagggtgagtacacatcaacatactcagcaaaatgtcccgtttggctgcagtggactagctttatgtggagttaagtcaagcagttgcttttagttggtcaggttattatttactagtagaaatctaggttttagcattaacccaagttattaacctgatgtatcctttccaaacggaaagaataccacttaccagtaccataagcataatcataaccatcatcctcgtcaccacctgtaaaccatacatctctgatcaagtatctctaatcaatggagctcccttggctgctcataaccgcgagcatggctgatatatcagtttcataacactttgcagaggttgtgcactttacccacaagtcgtgattcccattctgcccggagagagctactccccattaaccactacctaggtggcctagcagggcatcactacgtagcctttacagagattccctgggactgtagccacccgttaggttacctaaatgcaccgcactcctccccaaggggcgaacccaaacttggcagagcgagccgcatacaccgagccccattgacggcacgacggctaagtgaactacacccgggtcctctaattattcagctaagggcatcccattccaccctcatggttgcactgttttcccgggcggtcatccatagaacaggcccttacggagaggcactcgagaaaccgctcgagcccccttga

SEQ ID NO: 183799 - DNA, 55 bp, Arabidopsis thaliana landsberg
gaatcaaatgagtacgaacaaagtgggcaaagctttgaagcaacaaaacatatga

SEQ ID NO: 183800 - DNA, 966 bp, Arabidopsis thaliana landsberg
aagagcagtattgatctcttcgaaacaaaacaagatgccaaactacaaacgatcaaaattagtgtaaaggctctttatcattcaaagtctcatctcatgataatcttagattacgtagagcaaacgtaagcatttattcgtgtataccttcttaaggtaattcatactttacatgtatatttacacagttgttgatttatttgtctttggtcaattagaaagtccactccaaactactcgctcgattgcctgaagcgtgtttatttctcaattagtaagtcgcattgacctaaatccacctgtgcgtctccatattgttaggggaaaagaagtgtttgtgagtggcattgaatccattatttttctaatctctataaatgccagtttgtacattaaccatttatatgtgagaaatatcttacatctgaagtgaagtctgatcataatacattgaatggtatacaagggatatgtggccaactcattgtcaataagtaaaattatttatgacacttttgtcattctcttcctgagctatattatcatcatctcaaagggtcatataagagctagggatcatgcatggatcaataactcacgatatattggaagtttatgaaacttaacactattagctcgtgtggagcgtgtgtttaatcaattcttaactagtagctagatttgacgtagatcgacccgtaaaccagatccagatagcaaggagaaaagaaatgtttagaaactttaagaagcaagttctaacatgtggactagaaagaagacgaaaaagaatggataccattgtaaccaacccattatatatgtccataatctctataaaaggaactcaacacaagattacacaaaagcaagaaaataacaaacatcacaaaagatgaaaacattccgaaaaatgttgatctctctcttgctcgttgcaataacaacaacatccggtgttgttag

SEQ ID NO: 183801 - DNA, 175 bp, Arabidopsis thaliana landsberg
tgcagacaaggaagaacttcatgagtcggatcagttcttagtaaaccctttaggttttgcatcagagttagctagaaactggtcagatccgcctagtcatattgtattgtttgcatcagaagaaccaaaactcagagatttcatgatccgacattcctttaaagaggcaagttag

SEQ ID NO: 183802 - DNA, 150 bp, Arabidopsis thaliana landsberg
atgggaagaggagaacagacgaaggcagagagcctgagaaaagtccgacgaggtcaagcaccgaggggagaaacaaggagaatggattcgggcagtcgaaatcgtttgcatttggtgaacaaggaagcagcagcaacaacactggaggaa

SEQ ID NO: 183803 - DNA, 1806 bp, Arabidopsis thaliana landsberg
gtgatgtagtgcaacaagtagatgctcgatatcctgctttacttttcaagcagcagcttacagcatacattgagactatatatgggatgtttcaagagaatgtgaagagagaactcgcacctgtgctttcgtcctgcattcaggtagaactatttatggtttccttcagatcatgatctgtgctagataaggtcatctcacttattagttctcaactaatggatcagggactgaaagattcatcacatgagttctctgcagagactttatcagctgagtcatctgaacagaattcaccagaaaagccatctgaagagaatccaccggaaaagctgtctgaagataattcatcaggaaagctgtctgaagattatttagcagcaaagccttctgaagataattcaccagcaaagccatctgaagagaactcacaggcaaagctatccgaagtgaatccacaggcaaagccatccgcagagaattcactggcaaaaccatctgaggagaattcacccacggaaacttggcaagacgtcattggtcttttgaatcagcttctcggcacattgaagaaaaactacgtaagaacttttctgtattcgaggatgaaagattgtgtttgattctgtttactcctagatttccactctgacaaacttcttctttcaggttcctctgtttcttgctcagattattttctgccaaacattccaagacatcaacgttcaactctttaacaggtaaaatatttacattcccccatcaacctttaacgaatataaatgacctaacccaccatcagccaataaacttaaagctgtaatctaactaatgcagccttctgcaacgtgaatgctgcacattcatcatgggcaagaaggtgaatgtctggctaaatgaactagagtcttggtgcagccaggcaactgaagatgtaagttcagttgttttaaatgattctagtaaccagacagtttcaatcgcttgatttcacttgtcgattaagttctcctgaatgcagtttgtaggatcttcttgggatgaactcaaaaacacaagacaagccttagtgctattggtcagtttcttatgaaccaaataacatcaacttaattaacatcacaacactcttgcttctttctcgttcctgaatgtttcatcgtaatcctcttccaggttacagaacagaagtccacaattacatatgatgatctaacgactaacctctgccccgtaactactctctgcttctctgatctgaaaaaagtctttaaatattataaaacatgcctggaaaaagggtaggatttgtcggattcctcatctaatgatcttaagatcggtctttaatctctcaggctcttagtactcagcaattgtatagaatatgtaccctctgcaaaattgatgatcacgaggatcaaaatgtatctccagacgtatgtttgctctcaacatttctcagataaaccaaattacatatttccaatctctacatcggcttcatatatctatgggtgcaggtgatttccaacttgaaacttctagttacagatgaagacgaagacagtcgttccttcttgttagacaataattccaggtattgaagatttcagaatacgcctaaatttctctaaattgttcaaacatcatcaccataacctcttgaatattgtcttggtgaaactcagcatcccctttgcagctgatgaaatctcgaactctatgcaagaaaaagactttaccaatgtaaaaccagctgtggaactcgctgataaccctaacttccactttctgaaggaatga

SEQ ID NO: 183804 - DNA, 1201 bp, Arabidopsis thaliana landsberg
ctggaggcgccccctgcaccaccgcgggacgcccggctgttggaggagctactggagtaggtcctggaggagatcccgatgatgacgacggctcagaccacaacacagagtcctctgagccgcaggaggcgacgagatgggtcgcccgacccatcacccgtgacgccgctcgcggtggtcacttccacgacgcactcgacaccttgttgtgctgggctttcgaccaacacacctggtcaatcgagtatcgttgtggagtctaccagcatagtcgcgggaggtaccggatcgctgggaggctactgcctagttcgccgtccggaggatgacctccggggtgcggaggccgtttcggagcactattccatctccgagagggacactgcagaggcggctatgcaggatgcagcacgacgtgactctctcagtactgttctttgttcggtggcatggccgacggtcttaaccttcggtactacccccgccgccctactggcagcacagagagtgtggttgtctcacctgttggtgagggtaaccctaggttgagcagcacagtcaacctagtcgcagtgcttaacactgagctggaccactctctggacgagctaagcagggctcgaacggagattgcggagttgcgtgctgagctggcagagcgccatcaccaggagggtggttctccgcacctgttgggactcagcacccataccgctcgccgccacgtggtcaccacacttatggttcccctgcctgtaagaccaggatagatctggatccttagatcgttagcgtcggagtttgtaataattcttaagtcagatgtctcagtcttagatagttagtttagtttgcttatcggttgcttccatttagcttagtttgcttatcagttgcttacatgcttgttatgatgaacttgtgctggatttgaatcttcgtaatgactgttgccaacatgtgggtttctcctgcagtttggcctagcttccattgttaatgaagtcagttatttagttgggaagccatttacttctactttcctttctatctaagaagctgtgttgaatcatgatgaggatcagtgaagctctttgttcactcagtgtcatgaagaattctgtattctcttttcttatgctgaagggttgtaagatcaatgctgatgtatgaatgtcttccacagatgtctgacaactag

SEQ ID NO: 183805 - DNA, 388 bp, Arabidopsis thaliana landsberg
aacaccaacaagaatatgctttgttttcgaaacagaatattgagaacatagaaaatgtgaaaccggaaaagatgcaagatgaaagtgcaagaagtaagaacagagaacacaagagcaggtttgataacctagttcactcccaaaagggtagctacgtctcggccgagactgtgctcggaatccactaaatcagagatagtgtttacaaggagaaatacaaatgatcactcgatacccttcactagtactcaagttcactctgtatcactctccttctaatccagttttccacgagcgtatgaaacacattgaaaacgactgtcatttcattcacattgagctcgtttcaggaaacattgcaaccgctcatgtgggcactaccgagtag

SEQ ID NO: 183806 - DNA, 166 bp, Arabidopsis thaliana landsberg
gattaagaccaagaatggatggtctgataagagcttcaacgagctgctggagacattgccaaacatgttgcctcaaaataatgttcttcacacatcattgtatgatgtgaagaaatttttaaagacctttgatatgggatatgagaagatccatgcgtgtaaatga

SEQ ID NO: 183807 - DNA, 43 bp, Arabidopsis thaliana landsberg
atggaggtatcattcagctttccgattgtggtcgctgttgcag

SEQ ID NO: 183808 - DNA, 1515 bp, Arabidopsis thaliana landsberg
gagagctcgtggcatggatgttgctggaccgattcctgatgatctctggactcttgtttacatctctaatctgtatgactcttcacttaaccaaggatttgcacttggaacacactcactcactcactcgattttccttctttttttttgcaggaacctaaatcagaatttcttgactggtcctctgtctcctggcattggaggatctcactcgaatgcagtggatgtatggcattgaacccctttaatcttcttatccccagacaagcttatatcttatgtgactttgtgagcaaatttttatttcttaggacttttggggccaatgcattgtccggaccagttcccaaagaaattggactgcttactgatttaagatcattgtaaggacttcgagacattttcaactgtctggttatttttcgcagatagattctaatgacttttcccttatttttgagctcagagcgattgatatgaataatttctccggttctctaccacctgagattggaaattgcacgaggctagtgaaaatgtaagtgtttgcaatgctttgctcatcatactcaatgtaactttgctctaaaactgtggtgacatttagtattgcttgcatcaacacttgaacagactaaatgtccatacactgaagtacttctgagatgcatcaagtttattgtttctcatattttatgacaggtacattggaagttcaggacttagtggtgaaattccttcatcgtttgctaattttgtgaacttggaagaagcgtaagagttatatctattataatctcgtgggttgttattgtatctggctattcatttagaaacacgaagcatacttctaattgttcataagttttggattgacttttttttttttcattttgtttcagttggatcaatgatatccgacttacaggtcagataccagactttataggagattggaccaaacttactaccttgtaagaagttttcatattgcagcgcttcaaaactttctttctttctttcttttacgctttcgcttatcaacgtatagagtaacggttaacaatcaacacttgatataccacactatatattgaaacatgctttaccgcaggagaattctgggcactagtttgagtggtccaattccatctacatttgcgaacttaatctcattgacagaattgtaagtgctggatatatgttcttttatccttcacttttctacttgttctttgtctcgatactgactgaaatccacaatgcaggagattaggtgaaataagtaatatcagttcttctcttcaattcatccgagaaatgaaatctataagtgtcctgtaaggaatcctgttcagcttttgcttaatcttgatgaacttctgaactcctttagctgttccctttcctctgtttttttgacattttttaaataccatgcagagtattaaggaacaataatctcacaggcacaataccttccaatattggagattacttggggctacgacaact

SEQ ID NO: 183809 - DNA, 101 bp, Arabidopsis thaliana landsberg
gtggcaaattaagcgatggggtaaataaagaaggtgttcaattctacaagaatcttatagatgaacttatcaagaatgggcagcatcgatcatatgcttaa

SEQ ID NO: 183810 - DNA, 201 bp, Arabidopsis thaliana landsberg
accgctttcacgtcaaagaaagactacggaaagggagagagagaagcacaatgggcacaagcgcaacgtacacttcacggattgcagccagctcaaacctcagatatgttcaatgacaagagcacttacagagagctttcagagatagctgatcaagccaagagacgagctgaagttgcaaggcaacgctcaagtaactga

SEQ ID NO: 183811 - DNA, 130 bp, Arabidopsis thaliana landsberg
atggaatgcagccgagctcgctggcaacattcctatgacgactcttcattcctattcgatggggtcgacctagccctaacggaccgattcttcggcgctcttgcgacatttcttttggcactggagcgtg

SEQ ID NO: 183812 - DNA, 89 bp, Arabidopsis thaliana landsberg
aaagaaatgttgtgtcatcctcagagaactccttaaaattccaagacgctcgagctcatgtcaagttattcttctctgattctcgttga

SEQ ID NO: 183813 - DNA, 1718 bp, Arabidopsis thaliana landsberg
tctcgggttattaatgcggagaaaagtgttgtctcaaacactgaatctgcaggctgtaagaatacaatgaatgaggggggtcatagtagtatagctgcagagtcgcccaaatatactaaatctgttggaagcattgagaactttcagacatcttgctcagctgtgtgtagaacgcttcaccaccattgcatgcaaatcatgtggaatgcagtcttttcaccatactcccgcaactcattcatcatgttgaaaaagaaacaaaattggttttcggtcttctgatatctcgactgttaattactgcaaaggttcccatacaaagtattcagacaaacctgaatcatttgagagtgtgagcttataaaaagtttctatgactttaatagattaagtgtcatttttttctaattagctttgctcatcaatgaaatgaattgtcatttttaatgttttgcagtttacttgtagggtggattcctcttcctctaaaactgcttactctgatgaactcgacttagctaccaatggagccagagttcgtggattgtcatcagatacttatggaacggaaagtgtcatagcaagcatctcagaacatgttgaaaatgaactctttctgtctcttaaaactcacctaactgattatactagtattctcattaaagatggagcgaataatactactagtagtgcacgagatggcaaaatgcatgaggtaaggagacaaaatctccttgtttggcaatttttataagttttctaagggaaaagctatcctttctcgttctgccatctttgccatatgctagcaagtgggggctgaattcaaattgtttcaaattgctgcaggaaaacccgccatctcttcagggttccttccgtgagcagtataatttggaagggtctagtaaaaagaagaatggcttaaatgtggttcctgctaagttgcggttttccaatgatttcagtgattctcagagactgttgcaagagggagaatcctccgagcaaatcacatctgaagatattattgctaatatttttagtacagcattggagacattagatattcctgttaatgatgaacttgatgctctggccattcatgagccaccaccacctggatgtgaaagcaatattaatatgccatctctgcgctataagtatcagcctgttaggtccaaggaatccattccagagattaaagcatatgtttcaatggcattatgtagacagaagttgcacaatgatgttatgagagattggaaatcactgttcttaaagtgttatctcaacgaattccttgcttcactgaaaggaagccatcaagtttctcgtaaagaaacattggcactgaagaagcgcaaaactgttactcggaacaaaaagctggtacagtctaatatatcaaatcagacagcagaaaagctaaggaaaccatgtgtcggagcgtctgaaaaagttctggttaaacgatctaagaaactgtcagattctcactccatgaaagaagtccttaaagtcgatacacccagtatagatttgtcagttcggaaaccaagtcaacagaagatgaggaatactgaccggcgggatcattgtatgtaatttcagcctctttattctgaattagagaaacttgactcttacctcatattgtttttttttattattatgcaggtatcataaaggaagcgacgaagctccataaagaaaag

SEQ ID NO: 183814 - DNA, 105 bp, Arabidopsis thaliana landsberg
agaaatgatctgaatccttcagcgaagaacaggtttatcggagaggaaattcgtcggcgattttggggtttctcagagagaaaattcgtcggcgattttgagtga

SEQ ID NO: 183815 - DNA, 185 bp, Arabidopsis thaliana landsberg
gtgacccggtcctcgtgtgcgctatgcttgcataccgtggtcgtatccgtcctcgtcagctagctagcttcgcggccccgcgacttgagagatttcagttcgaacggcttggcggcctgggaaagcttaattcacatgggaaattctccgaggaaaaagaaaagggaatcattcaagatctataa

SEQ ID NO: 183816 - DNA, 794 bp, Arabidopsis thaliana landsberg
aacaaaaagaggtccaaaggttgataggtcgcatcgcaactttgaatcgtttcatcgcccgatcaacggacaggtgccttcctttctataaacttctgcgtggaaacacggattttcatttggacaataaatgcgaaaccgctttccaagaactcaaatcctacctcatgagtggggcgatcttagccaaacctgaagttggagaaatcctatatctctctgtctcggtgtcaagttcggcggtgagtggggtactggtacgagacgatcgtggaaatgagaaacctatcttcgacacaagtaaggccctgaatgacgtcgagaccagatatccgactttggaaaagctagcattggcggtaataacggccgctcgaaaactccgagcttactttcagtcgcactccatagtggttttcaccgatcatccactttggacggtactccacagtctaaaccaatccggacaaattgcaaaatgggcgatcgaattaagcgagtatgatgtggagtatcgttcccggccaagtctcatatcacaagtcctggcggatttcatgaccgagctatctccagatgtgattaacaaggcccatgacgagaactggatactttacgcagatggctcctcgtcgttacaaggttccggtctcgggattctgctccaatctccgaccggggaaatccttgaacaatcgcttagacttcaattcaaaccatccaacaacgaagcagagtacgaagcacttctcactggacttcgccttgtaaaggtatcggggccagacatatga

SEQ ID NO: 183817 - DNA, 21 bp, Arabidopsis thaliana landsberg
atggctgttgaagtaattgac

SEQ ID NO: 183818 - DNA, 432 bp, Arabidopsis thaliana landsberg
atggcaaagaagttaggcaagcaagaagactttgaatattacaagaagcgtgcgggctactataaaaactatttcgacagcagcatccgttttgtacgcccgcgtatgagcgacggcagctttaaaacgccttacgacccgtttaactccatccacgaaaaaggcgacttcaccgaaggcaacggctggcaatacacctggctggtgccgcaggacgtagagggcctgatccggcttatgggcggcgacgaagcctttacccgcaagctcgacagcctcttcaccgccgaaggtaatatgggcgcggaggcttccagcgatatctccggccttataggcatgtacgcgcacggcaatgagcccagtcatcacgttacctatatgtatccttttgccggctaccaatggaaacccgccgacaaagtacgccag

SEQ ID NO: 183819 - DNA, 344 bp, Arabidopsis thaliana landsberg
tagagggcatatcattccgcaatggtgactttgctggtgaagccttagaagaagatgatggcatagaggatttcactatagaagttttattcgaaggagtggttccatttgggctagtcacaggtgatctcataggtgataccttggtggtaggaactgccttgcttctctgggaattggatttagattgattcgaattagaagccactgtattattcctcttgaacgctaaaggcttgtcatcatcactgtctccagacccattatccatcacaggttttgaaactgtttcagtgcccattcccgaaagaacaacgttgatgaaggctcagaccaacttctga

SEQ ID NO: 183820 - DNA, 274 bp, Arabidopsis thaliana landsberg
agctttgttcactgattcggctttgctcatcatgtatggatcaaactcaaacgtaaagttggcatttgaaacgatacctccttcttcttcctcttctctttcttcgccttcttcgtcttcgacaatgggagaatcaagaaacgcggctacttcctttcgggataaaagagcggtcttgacacgagattctaaagaaggctggaagaggcggactagccttggtttaagattcgtgaagaagaagtttagggagagaatgaagagtgagagatag

SEQ ID NO: 183821 - DNA, 184 bp, Arabidopsis thaliana landsberg
atttatggttcgatctcgtgaccgagacgcagatacagtaattgaaagtgaagttctgaatacggcgtcgtttgaggagtttgactctcaagtaattgaaagtgaagttctgaatacggcgtcgtttgaggagtttgactctcaacgatcccgcccaagacagcttaacgaactcttaaattaa

SEQ ID NO: 183822 - DNA, 994 bp, Arabidopsis thaliana landsberg
atggcttatgaagagtataagaagctgacaaggtacgagaaggagctgctgatccttcttctctattggccgagaagattctttggtcgtacaacgatcttccatatattcttggatatcacgcaatagggttcaccgtaacattctgcgctttgagcctatcatcacaagatcgagtgatctgcaccgatctttattcattcaacgtctcgtcaccgtcggatagaatcaaggccttggttccttgttaccgtctcgcttcccttttacctttgcatgcagatcggtgcactacgaggccttcatgctacaatgacttcgagagaatagatcgtggagattatgtgaccgagttaacgcctcatacggtgacaaggtattactcaagcaaaagaaaatggctgggtgttaaaggaatctacgattttctcgaccaaagagttccacacgcggagatttggatatggcaagcgagaaggatctctcgttgagttttaagccacgtggaatcagagtcaaacctcgaaacattgaccagctcatcgactcgctgatgtgtgtgactaaagcgctccttgcacttcacgacctttctttcatgcatcgtgacatgggatgggataatgtaatgagaagcacggcgacgaccacaacaacaactgacacggattggtttgtttgtgggtttgacgctgcggtcgaggccccacagcttaacccgcaccgccccgcggacaaagtggtagacaataaggagagggaggatgaacgtgggagatacgcgccggagatggagagaggcttgcatgcggtgaaagtagatgtttggggagtgggttatatgataaagacgtgtggattgagtaatgtaccaaagatgttgagagaccttcaggggaagtgtttggaaccaaaccaagagaaccgaccgactgcagctgattgcttccaccaccttctccaggttcaatcagccagtacatcgtcgtattag

SEQ ID NO: 183823 - DNA, 547 bp, Arabidopsis thaliana landsberg
aaatgcacagagggcttggttaaaaccctgagagatattgcaaacagtccatattcacctgagtatgacgtcgctggaattacggatccattccttcacatcagattgctcaaactgttgcgtgttttgggccaaggggatgcagatgccagtgactgtatgaatgatatacttgctcaggtttgttcgtacttagtctgtcgagcttttttttcaagcctttttctcttttcaaacaatggtaaaaaatgaagcctttttctcatctttataggttttgtttcaaagatcatttgtgaaatttgctttgaaaacgcttttgatctacatcagtcaggatcgtaattgcagataatcatttttgattcctaagttgatttttaatgtattaggtggcatcaaaaaccgagtcaaacaaaaatgcagggaatgctatcctatacgaatgcgttcaaacgataatgagcatcgaagaaaatggtggcctacgagtccttgcaatcaatatcttaggaaaattcttgtccaaccgagataataacatcag

SEQ ID NO: 183824 - DNA, 891 bp, Arabidopsis thaliana landsberg
tctcaactccaagaagtaccctgctcttgtcccgaccaccatcgaccaccacctcttcttcaccgtcggccttgggctaaacgcatgccctacttgcaaggccggaaacggaagccgtgtcgtggctagcatcaacaatgtaaccttcattatgcctaaaaccgctttgctcccggctcattacttcaacacaagtggagttttcacgacagactttcccaagaatccaccacacgttttcaactacagcggaggatcagtcacgaacatggccacagaaaccggcacaaggctctacaagctaccgtataacgccactgttcagcttgtccttcaagataccggcgtcatagcgccagagaaccatccagtacatcttcacggttttaacttttttgaagtcggtcgtggattaggtaacttcaactccacgaaagacccaaaaaacttcaatttggtagatccggttgagaggaacacaatcggagttccatccggtggatgggtcgtcatcagattcagagcagataatcccggtacgcacactaatttttggttaagaaaaagttaatcaaaagatttagtgggttaattaattatcgccatgtagatttaggtcatagatcaatatctctttggttattactttatgactagacttgcaatctccatgctatcaaaaaagacaaataaaatcttgtggtagtaagtcaaatactattataataaaactgatggattaatatgttgtaaaatgtaggggtttggttcatgcattgtcacttggaggtacacacgacgtggggattaaagatggctttcttggtggagaacggcaaaggacccaatcagtcgattttgccgccgcctaaggatcttcccaagtgctaa

SEQ ID NO: 183825 - DNA, 313 bp, Arabidopsis thaliana landsberg
atggcaatgcaggtcgacacgcatgggcataccacaacggggtacactattgaatatacactcttccagtggcgattcacggcgtgcgagcgcaacggcacaagacgggtgactatttgagttcttccgcaagttggtattatgccgccacaactgggctctggctgccgtaatgaagcagttcatcgatttcatccccctcatcctgtttttcatcgtctacaagctggccccgcgcacggtcgaactagacggacactccttaagcctgtgcggaatatacagcgccaccgcggtgctgatcggcgcctag

SEQ ID NO: 183826 - DNA, 54 bp, Arabidopsis thaliana landsberg
tctgtgtgaaaaggaaattgcacgcataatcattgccgaagaagaggaaggaat

SEQ ID NO: 183827 - DNA, 95 bp, Arabidopsis thaliana landsberg
ctaacgtgactggtgtgaagcttacccgtgggaccgttcatagtcctcgtggccggttcagaagatttcgtctctacaacttaccaaaattctaa

SEQ ID NO: 183828 - DNA, 1000 bp, Arabidopsis thaliana landsberg
gctggtgttagtggaggtggtagtttacctatgcatgttgacaagttttttgaggttagaccgccaatattgtttcttgaaattaaaaataaatgtttttttttgcattcaaacaaagtagtctgtccatatgtaaacaggttagttctttatgcaggccatcggtgtgaatgtacaaaatgggtatggtttgacagaaacctcaccggttgtctctgcgcgaaggcttaggtgtaacgtaagtttaaactcacacctcaataacctctccttttgtgacctctgcacagaaaaactgtttagatcctttttgtaccatttattgtggggagcgaactgtttagatcttattcatcaattttcctaactttttttatgaaggttcttggctcagttgggcatcctattaaagatacagagttcaaaattgtagatcatgagactggtactgttcttccacctggttcaaagggcattgtcaaagtcagaggcccaccggtgatgaaaggttactacaaggtgatacacactttctgctcttagtttgattacattttgacgacaaagttgtgaaaggatgacacagctgtttttagctatcaaattttctgtccatgagtgggtttgtttgtgaatactgcccttatatataactagattatgtgaactcttttccttcttggtctcatcattaaagcatctcttggaatctacatttcttgcaatctatttcccttttgatacatatgtagactccttgaataatctctgtgttttcgatgaatgcttttagtttggtgattagatcagattaactcatctttctgttgattatctcagaatccactggccaccaagcaggttatagatgacgatggatggttcaatactggagatatgggttggattactcctcagcactcaacaggacggagtcgtagctgtggaggtgtcatcgttcttgaagggcgtgccaaggacactatcgtgctttccacag

SEQ ID NO: 183829 - DNA, 168 bp, Arabidopsis thaliana landsberg
gaaaaactaaacaccacaaggtttatgaatggagaagaagaaaaagaaagaacacaccaacaattgtctgcgcaatttattgaaacgacaagcattttaggaaccaatagtgaaaataaccgaacaactgtcaataactgcatacaagtttttttatggaaaacatga

SEQ ID NO: 183830 - DNA, 292 bp, Arabidopsis thaliana landsberg
attttgcctcggagggcaatgattacaagggcaaccaagggcacgtaggcccacaacaaacgacacgtaggccgcacaactgggcacgtaggcccaaggcaggcgggcacgtaggcccatgcacacaggatgcagctaagggcaccaaggccagtctggaaaccgagttgtccacgtgtcaaagtctaacgtcgccagtgtcaaggaagctagctgtccaagacggcaaacagggcgtgcagaacggagctgcacccacccagctaccccaggacattgcgaacagccacag

SEQ ID NO: 183831 - DNA, 572 bp, Arabidopsis thaliana landsberg
ctttatttttcactataaatccaaatcaccatcaccacaccgagaaaccaaaacaaaaacgacctgttactacactcaaaatatggcaccaaataaagctcaacagtctccccaaccattcacctttcagatttttgatgatgtcttagtaagactaattcattactaggaatcccgaaatttcaaaaaagacaacatattgatggatcttgaattactgctaatcgactcccaggtatatctaatatgctgaatttacatacccaacacgaatttaaactaatcattcgtcctacagtcaaacacaatgcaagtattcatttcggcaaaccgtctattccgttaccaagagagtcttaaacgcaaccccatatacaagctcaaaaaatttctgatcaccccctggaaaataatatacaaagtgtccgaccacaaacatggcatcttcttcaacgacaaaacgttgatggtactcgtgcctacggcaaaccatcaaattgatgaacaaaagattagatttcgtggtttcgaagaatttgcttcaattgtgtacacaaatattgacctctttg

SEQ ID NO: 183832 - DNA, 747 bp, Arabidopsis thaliana landsberg
  unsure (1)..(747): unsure at all n locations
atgtctggcttgctcggaaaatcatctccggccaaacgggttgatggcaacaatgatcttcctatgtattatgtaaacccgatgtccgtggagcctcaaggacgtccaagcgacacgactagagtctctgtcacattcgccgagcatcttatgaacgtggaggatgcaaggaatgatgaaagtgcaagtagccgggctctgggaattgcctcacctatcaattctgctgcatcctctttcaattcatgggcctctgctcctgcttcttctatatcttcttccccgtttgttctttcattcactgacttgacctacagcgtgaagatccagaagaagtttaatcccctcgcttgctgcagaaggtcaggaaatgattcctcggtgaacactaagatactattgaatggtatttcaggtgaagcccgcgaaggggagatgatggcggttcttggagcaagtnnnnnnnnnnnnnnnnnactgatcgatgcattagccaaccggatcgcaaaagatagcctcaggggatccattaccttaaacggagaagttcttgaatcaagcatgcagaaagtcatatcggcttacgtgatgcaagacgaccttctcttcccgatgcttaccgtggaggaaactctaatgttctctgcagagttcaggctccctcgttcactctccaagaagaagaagaaagcaagggttcaagctctgattgaccaattaggcctaaagagcgctgcaataccgtga

SEQ ID NO: 183833 - DNA, 166 bp, Arabidopsis thaliana landsberg
atcgggtttcggtttatacccaaatcgaaaccgaaaccgaaaccgatgcgatgtaatttcattacccatttggtttatagtctctaaccgaaacctgaaccaaaccccctttttcggatcgggtcgagtcgggttttcaggttttggagaatatgtcgaggcctag

SEQ ID NO: 183834 - DNA, 295 bp, Arabidopsis thaliana landsberg
atggcgtccgggcgcaaatttgtggacgggtacgggtacgggtacagttacgagatgcagggcaaggcagtatcgaggagtacgcggggtgcggttgtggggactcacggcggtcatgcgcaggacgttgctcatgatgaggttccagctctgctcggcggacttgcagaagctctttccgtccacggcaatgcagatgtacgcgttcttggtcaggaacttgatgaacttttcgaagcaccacatgcagcagttcaaacagcacagaagaaacttcaccaggccgttatcgttg

SEQ ID NO: 183835 - DNA, 237 bp, Arabidopsis thaliana landsberg
atgtttcgttttccggtaagtcttggaggaggtccacgtgagaatctgaagccatcagatgagcagcatcaacgtgcggtggtggatgaggttgactttttccgatcagcggagaagagagatagggtttcacgtgaagaacaaaacattatcgccgatgagactcatagggttcatgtcaaaagggagaattcacgtgttgatgatcatgacgatcgttctactgatcacatcaat

SEQ ID NO: 183836 - DNA, 670 bp, Arabidopsis thaliana landsberg
atgctaatttcttccccggatgatgtaggtaagtgttgctgtattttctctgttcaaagctgtaaggcttgtgatgcctgttgtgacacctgctgatggtgatgatgatgagatgattgccactgaagagcttccactatcaactgtgttccctttccgtttagagagaagtgaaaaatcagtggaaaagctcttgtcatctcaagctttaagacttgctatacataaagctattaaagtgataccagaaggccaagcaagtggttgtatcaagagcttgactgcagatgtatcaaaaaccatgaaatggataaaacaagtttgttgctcaacaggtgctacagaacaagatggacaggtggcagcattcttggctggatctttgtctgatatttattcactaattctcgactcaataactattacaacagggaatagtaaccttgttggccagtccatgaaagatctgttggatctcatcagtccttgcttaacccacctggtttcttcagactccgattgcatcgaaaatttcctttctgctctcaccggaaaagatttggagattgtgatggctgaaaagaagatagagacctacagaaagtctgtgcgcttgtttgttatattcgtcttgcgtatttacatgtcttccagaagcttatataggcag

SEQ ID NO: 183837 - DNA, 462 bp, Arabidopsis thaliana landsberg
  unsure (1)..(462): unsure at all n locations
gcggtcaataacgcgctgaccgagtcgggcgcgcgggcggtcacgaagatgtcgctgaccccaaaggaatatttccggcggaacgtcttcgcctgcttctggtnnnnnnnnnnnnnnnnnnnnnnnnnnnnnnnnngtgtcggcgtcgacaatgtgatgttcgagagcgacttcccgcaccccacctgcctgtttccaaagccgctcgaccaggcgcgcagcggaatggcggatctgaccatggaagagcgccgcaagatcctcagcggcaacgccgcccgggtctacaacatcccgatcccttagccgcacccagcccctgcctattcaggcatcgccgtgatcaggccgaccgtgccgccgccatcgacggcgagcacctgaccggtgatgaatccggcttctgcggaggcgaggaaggcggtagcgtaaacgatgtccatcggtgttccgaggcgcgac

SEQ ID NO: 183838 - DNA, 411 bp, Arabidopsis thaliana landsberg
acggttaatgttcaaatggagtcgtttacagaggtaaaagcaagagattgtgttgtgttaaaattgtttgatctttaaagacataaaatagttatagttgatctcgaatgtcttgtcatgtttcagccatctaaagctcaaatggctaagtatagagaaatggaacaaaagatggaagcaaagtatatagaaatggaaaataagttggacaatcttgtgaaggtaagaaaccaagtaattgttgttaatacatcaaaagtttgcttctttgattgattttgaagggaggcgattatgtttgatttataatgtcttcttcttatgtttcagttgtctatgactcaaatctccgagttgaaagtaactagagagaagtgttgcaatgatttctggaaatcaagaagtacatag

SEQ ID NO: 183839 - DNA, 117 bp, Arabidopsis thaliana landsberg
agtttggtggatgattattttatgaataacgggttacccattgatgcaccgggttccggctatgtggaaaatggattttctacccaggatctttatgataaccgcacagggtggacg

SEQ ID NO: 183840 - DNA, 618 bp, Arabidopsis thaliana landsberg
atgactcataatcatcatcatcaagctgttgacaatctgctaaatgttttctcaagagcttctcatgatcttactgttgttcattccaagctcgacaaggagtttcagcagatgtatcctgctaatgtaagcaaaattcgattcaatactttgaatccaagatctatgtaatctaatggattcaaattaaccatctttaggcgaatccgatgaagctgattcagcgaatcaagaagttgcaggaagatgtgactcttcttaaacaccaatgccttgacctattgtctgctaaacaggttcgtatctcgaagataagcttcggtttagctcgatgaacgatgcatgtatgtaatttgaatcaaaggatgagttttaatctatcgcaaagaagaaaggttaaatttttcgtgttgagagttttttgcttaggctttgcaagatctgattcgactgtgactgttatagaaacgatttgtgtgtttttgttataatcaggatttgattgataaggcacagactacacttgttggaaactgtaaccttattcagaaaatgaatgcatcattaggagaatcaacgaatggcgataccgatgatgcattggctgattttaatcag

SEQ ID NO: 183841 - DNA, 50 bp, Arabidopsis thaliana landsberg
atgacagtggtccccataccatatccttttgtggtggacagacctccaca

SEQ ID NO: 183842 - DNA, 65 bp, Arabidopsis thaliana landsberg
atgcgtgtcctcccgcggggttctggtggggcccggttcttttgtgctggtctgctcgcgtccgg

SEQ ID NO: 183843 - DNA, 67 bp, Arabidopsis thaliana landsberg
atggctcttgctgatggactcatcaagaacctgctaatgttttcaaaacattaccaggttaacctca

SEQ ID NO: 183844 - DNA, 123 bp, Arabidopsis thaliana landsberg
gatactatgttggttaagtacgatgggcagtatctttcggaaatagatcatctgggaatcatggaccaaactgggttcggaggggagatcttcatcaattggaacattgttcccgcgctatag

SEQ ID NO: 183845 - DNA, 54 bp, Arabidopsis thaliana landsberg
gtttctctcgatggaatcattcatgaccgaagaagatttgtagcaataattact

SEQ ID NO: 183846 - DNA, 198 bp, Arabidopsis thaliana landsberg
acggccatgtttgatcatcatccgatgtccgccgcccatcaccatacccattcttcttcctcctccacttcacccggcgacaacattgcctttggcggttggactcctgtcaacaataacaacgtcaccatgcaaaacttcacgtgggacgcgatgcaccactcgcactcgcattcgtacggcgtggagaattcatga

SEQ ID NO: 183847 - DNA, 190 bp, Arabidopsis thaliana landsberg
caaacggaaatctatcaattcgattaacagtgaacacgaaatcggacacccgatcagaaaaaaacgaatcgagcatcagaaaagatcgaagaacaacgtaattagcggtatacaaaagaagcagcacatgaaccatagaagagaaaaagagagagagaaaatggtgaaacctggacaagagttccattga

SEQ ID NO: 183848 - DNA, 227 bp, Arabidopsis thaliana landsberg
aaacaagaacacgaagtcaagaaaacccaaaatgtggagaaaagagaggtcgtagctttatgtccagagagagagactctcaattcaagaagcagagagatattgaaaaagtagacgttggaagatttgaaataaagctggtgaaagtgaatgacctttgggggaagataaaggacaaaagtgtaatttacatgtcttggagggtgatgtcccacatttacatgtaa

SEQ ID NO: 183849 - DNA, 186 bp, Arabidopsis thaliana landsberg
agtctttttaaagtcttttcaagtattctatggattgggacaagaatggagataagaagacattttgcagcaaaagctgaagaaaacaagccaaaggacgaattcactttcagatcaagtcgagagtgtcgatcggcagccttttggtatcgaccgacaccagttgtggcccagaaaagtctatga

SEQ ID NO: 183850 - DNA, 1898 bp, Arabidopsis thaliana landsberg
atggttcagagcaacaagttccacggcctccctatggaggatccactcgatcacctggacgagtttgataggctctgcagcctaacaaagatcaatggagttagtgaggatggcttcaagctcagattgtttccattctctcttggagacaaagcccatcagtgggaaaagtcgcttcctcaaggctctatcacctcctggaattactgcaagaaagccttcttggctaagtttttctcaaactccaggactgcgagactaaggaatgatatctccggtttcatacagacaaataatgagactttctgcgaacgatgagagcgattcaaaggttaccagacacaatgtcctcatcatggtttctccaaagcttcacttctcagcaccctctacagaggtgtcgttccaagatcaggatgcttcttgataccgcttctagcgttgcaaacccgcaggaccaagtctacccttcacagcagcagaatcaacccaagccctttgttccgtacaaccaaggtcaagggtatgttcctaagcagcaatattagggcaactatcagcagcaagttccaccacctaggttcacacagcagcaacaacaaccagcttcaacaactccagattcagacttgaagaacatgttacagcagattctccaagggcaagcaacaggagcaatgggtttatccaaaagggtggcagaaattcacaacaaggttgactgcagttacaatgatatcaatatcaaggttgaagcactgacatctaagatcagatacatagaaggccaaactgggtcgaccgcagcaccattgtctagggatagcttgattgcgcttgttaaccattcgaataggctaggatagcactctactcgattaccccatccttaggaatttctcgtctatcttatttctctgttttatcgttttcgcttatcgttctcattgcctgtttcttagtttttacaatcactggaccatcttactcgaccacacccaatgtctggcaacagactgtgtagtcgagtaagattgtcttgttttctgtctgttactcgaccagtatactcgaccacacccagtgtctggcaacagactgtgcagtcgagtatagctgtttcatatcctgtctgttactctacatgttactcgaccacatcctacttctagcatcagcctgttgtggtcgagtgattttagtaattctgttattgcttctgttttctgcatgttcgcttaggactgttagaaaccccaaaactgttattgcttggcttgacttagtgacttctgatcacatttcatctgtttgtatcacacccatttggattgacacctaaaatactacaacgacatgattggtgttttaggataattgaccataaaaacctattatcatagtgtgtccttgttagaggatacaaagacaaagacacatagaaacttctgctacaccatcaaaggtttgagaatcaagacgaagcttagttggtgtcttggagtcaaatatgactagatgtcatttgtatgattgagtataagaactagaatcgcaagcgttcccaaaagctaacgtaattgttccttgttgcaaatctcaccgcggtttcctccaacgcaactcatgacagggaagttattcccgaggtgacagtaccgattgctttggggtctaccaaggcccgagaggccgatctgcctgcttttgcgcctgcacccgaggcggttattccgctaccaacgagcgataaggttgagggcaagcgtattcgaaataatgactcagcgtccaagaagaagaagaacaagaagaagaaaccctcgagcgacgaggaggagaaggagctcctgatctttgaagattgggtggcctcagcaaacattctcgggggctga

SEQ ID NO: 183851 - DNA, 414 bp, Arabidopsis thaliana landsberg
atgcagattggtaaaaggatcgagagactaaagaaagggaaggctaaggattcacaatccaaagtcaaggtagaaaatttggctagagaaactactgacttctcataatctagtctgctactgatattcacaatgtgtatgtgatattctatgacacaggaggaagctgaaaaatctgctttggaaagaattcatgaagctcttctggaaggaaaacctgcacggtcagttgcattgtccgatctcgagatggaagttgtaaagcatctctgcttgcttacaatgaaacctatgatctacgtggcaaatgttgctgaaactgatcttgctgagccagagaagaatgcttacgttgaagaagtgaagggtctttcttctgatttgcagtccggacatgtagttgtttcagcacag

SEQ ID NO: 183852 - DNA, 405 bp, Arabidopsis thaliana landsberg
aaaaggaagaagagaaacgatttgagaattggacaagtgaatctctcgacatatcaatttcgcagaaaatgaggtaaaatattgattagggttgatctcgaatagaggaaattgtgttatgcaagtatctagagtagggtttatgtcgaacttttcgtttagggctggagattgtatggaacaatttagtctttcagggttaaattttatatgcatgccatgtgtttgattaaatgcctaaacgagtttctgtttttgtttaactttgtagttctgatattgatgatggtgtgaatgataaatcaagtgaagatgcttctcataacgttgaagatgagacagctattcattatgattatgagtttgatgaagaaaatctagttgaatgttatatcactggatctg

SEQ ID NO: 183853 - DNA, 1441 bp, Arabidopsis thaliana landsberg
atgaatcttgtcgttgaggacagtgagatagatgaagacaacagtctttggggaaaacctaatagaaaaggtagcagtgttttccgaaaacctaagataaaggaagagactacaacaacctatgaagctgagctaacttacttgaagaaccgagtccaatatctagaaaacgaagtaaggattttgcatgatctcatcaataatttcattggcaaaagtagtatataaaagttaggatattagtttaagtgttggattgagacttgtgttatgtatgaattgatttttgatttatgaaatggtgtatactttttggatgtttattattatatatgtatttgatattttgaaaactaatcaggtttcaccaaatgcaaatagattaaaacaaccgcataaaataagagtcatgacactgaatattatagcattataaacattataaatcatagcctatatatatcgctattataagtcaataaatgaaagcgttttactaatgctatggtggaatattctatcataacatacggaaaaaatgctatcgtatatggagggtctaccataacaggggcataacacagcgtttatgaaaacgctattaatgatattttatagcgtttctctcgtgataagaatgtggatatttgttgtagtgtatcacactgttagctattttcgcagctcctctattacaacttgaaggctccaacaagatgaaccaatgaggcttattttttgtgtaacttaaaagctcagctatatgaccttctatagctggccaatcttttggtttagcaatagcttgaatgatgtctactgaagaagctccaaacgtaactttctctaaatgatgcttatacatgctatctcaagcccactcccaactctttaattttgcatcaaataaagaaagcacctgagaataagatcttctgctatgtagcaacacatggccattaggatcacgaactatctatgatgcaccagtgatatgtctataatttgcatgatttaggcaatcattcttcaccactttatcattgtttcatccacatttcgtctcattaggagtcgttttagtgtgttttacatacttaggacaattttttgcgttaggattgcatgtgcattgcatatttggttgttttcaggtactttggatgcttttggagttcaaacagaggagaaacagaacgagaagtcagaatgcccaatgacgccttcagcaaaagtactctatcgcagcctcggggccctgccaggcatatcactctatcgcaaccccggagaagctagcagctcagtttcactcaagcgcgaagcccgaaggaatcaccccatcagaaccactcgatcaccactcgatcaccagaagtcctatctgctcgttctgcactcaaccaaacaagctgagaacgaagaagagaagagaagttga

SEQ ID NO: 183854 - DNA, 193 bp, Arabidopsis thaliana landsberg
atggatcattcatcaaatagatttggcaataatggagtggaatcgattttaccgaattacaagcttggtaaaactcttggaattgggtcttttgggaaggtgaaaatagcagagcatgttgtcacagggcataaggttgctatcaaaatccttaatcgtcgtaagatcaagaacatggagatggaagagaaag

SEQ ID NO: 183855 - DNA, 6256 bp, Arabidopsis thaliana landsberg
atggggtttgatcccgagaaccaatcgatctcttccgttggacaggtttcgcttttctcattatcgtcttcttttccccattcttctttcggtttaggtttccgatcgcaaattgtactgatttttgttggttcttctcccggtcggctttgaagactttggattgcaatgtatatcttagggtttggcttgattttagatatcctttttatgaagtgattgtggattttgatgtctctgtaatgtgtggagcttgtgaaaattgggatttcaattttaagaccttagcttctgggttttggaataacgattctatcctaaatctctctaatttggtatcaaatcactttctgatgcaaaattcctgaaacgatatattatgtaggttgttggtgattcttcttcaggtgggattactgctgaaaaggaacctttgttaaaggaaaaccacagcccagagaactactctgttcttgcagccattcctccgtgagtctctgacgttttcccttgtttattaatcatcaatttgtggtcccagatcgttttgtttatttgctatttattgtttgttactactatttctgctgaaagcaagtgggaatcttttggatatgcacatgatactgatttttctaaaagcatgctaagaacgtaagaacgtaacaagtcatttattgcaggtttctctttccagctcttggagcgttgctttttggttatgaaattggtgcaacatcttgtgctatcatgtctcttaaggtaatggtttaaccttgtctaaaactgtgcttctatactcaagtttgatttttttagctttctcatgtctttagcagttaaatgacgctacttcatagttcatgcctgcatttgcactgccattgcgtttccttggatttctcctgcatagttattatgcatgtacatttgttcgattgtctaagccttttaaattctgaatgactaatctgcttttgcctcctgtgcagtcgcctactctaagtggaatttcatggtacgacttgtcttcagtggatgtcggtataattgtgagtctacctttcttggatcttctacatgttggttattgcactattttttgttcttattttctccctaaattgggaagctgtgatctttcttgtggaaggacaaagaaatttgcttacgacaattttcatatttttgtgcagaccagtggctcactgtatggtgccttaattggctccattgttgcatttagtgttgccgacattataggttggtttttctcaactgtcttcatctgagtatgtagcagcagtctccttcatctgaaagaaattgaattgttggactaaattttcaaggaaggagaaaggagctgattttggctgcattcttgtatcttgttggagccattgtgactgtagtagcacctgtcttttccatactgataattggacgagttacgtatggcatggggattggactggtaagataaatcacacatctttattgtttgcctgctaaaatgtgcatcatgcatttgactaagtagttaatcatagtcaacctttccacgaatagctactaggtagaaatatgcttcacgctattactgaacatgtgtaatccaatgcatccatatactaccagtctatcactcatagaccaacctggcagtgtttgcattcatctgtatacatatattggcttacttcttcgatttattgattggtggaattcgggacagaatttacccctatatcgagacagtctgagatatataattcatcctattcttattctcctgtctcactctgttttacgaagttgagagccattgtttataaatattgtttactgttcaaatcaagatgtttgttctactgtgagtgaatccatgcagctagggagtacaattttaagcattcttttaaactggaaagttaatatgtttccttgcatttagaccatgcacgcggctccaatgtacattgcagagactgctccaagtcaaatacgtggacggatgatatcactaaaggaattctccactgtccttgggatggttgtaagttctcgaagctctgaggattttggaaatttattgccccgtttgaagttacagttttgattccctccattttgaaacctttctgtctaccaagttaaactgacacatataattttgtgaaggggggttatggaattggtagcctttggattacggttatttctggttggcgttacatgtacgcaacaattctccctttaccagttattatgggaattggaatgtgttggctaccagcatctccgagatggcttttactgcgcgctctccagggacaaggaaatggggagaatcttcaacaggctgcgattagatctcttcgtcgccttagggggtctgtcatagctgactcagcagctgaacaagtaaacgaaatcttggctgaactttcccttgtgggtgaagacaaagaagctacatttggtgaattatttcgaggcaaatgcttgaaagctctcactatagctggaggattagtcttgtttcaacaggttggtgcagtcaattcatcaaacattccttaagaaaatgaacaataactaactatatttttattttcgaatgacagataactgggcaaccaagtgtactatattatgcaccatcaatactacaggtttttcttttcatctctacttaagttgaatttttggcactaggaggaaactcgtgatagaaaatcttaacttctttttaccattaaaattacatgttagactgccggcttttctgctgcagctgatgcaactcggatctcaattctgctcggcgtattgaaggtattcctattcttccatctggtttgacatgtcagatccttttagcaaaaaattatgaaaggattgatacgcgttgtagtacaactggaagtataaatgatattttcctttcgaagacttgatgtgatccttttactgttgcagttggttatgacaggagtttctgtgatagttattgacagagttggaaggagacctttacttctttgtggtgttagcggaatggtattcttatgtcttctcttattgattgtttgttccaataagtttcgattacatgaatcggaagctaaaagatccaaaaatgtactcgtgtgtaacaggtgatctcattgttcctcctgcgatcctactacatgttttataaaactgtaccagctgttgctgtagctgcattgctactgtatgtaggctgttaccaggttaaattttcttacagatttttctgatcaaagttccattccgtacaatgtcatctgcgggtttgtattttcagtaaaatttttgatatgatcttaagaggctttccatcaatcttgcagctgtcctttggccctattggttggctgatgatatcagagatatttcccttaaaattaagaggtagaggaatcagtctagcagtgcttgtgaattttggcgcaaacgcacttgtgacattcgctttctcaccgctaaaggtaaagaaacttcttctctttaaatatattccttacatagaactaaactataactttgaaagaacaatgtttaacgagagattccccacttagctcgcatacatcttgctagttccttcttatcttctggttttccgggagagattattgaacttttgaggtcttaactcacttggtattgtttgcaggagctgttaggagctggaatactgttctgtgcatttggagtgatatgtgtcgtgtctctcttcttcatatactacattgtgccagagacaaagggtctcactcttgaagaaattgaagccaaatgtctctaaaaggttactcatcttagctccactttctctgctgcttcattgcttgaggatctaaatcgcaaacgcaccagccgcatgtgtagtcactagtcagccatttaccgcggaattttcactgtttggatatcttttaaagaatggttgtatctagcggcaaaatttggtgcgttggaaaagttttaaaattcgaaagtttgcttaatttgtatcttaaaacacgcattcaaaattttgtgattgtatgaaaataatgtgagattcaaaattttatgaaacaatattgtaacgtcgtcggtgattattattacacgaaacatattatgacgtcataacaagaaacataaataaggtcataaggaaatcattgtttatattgttagccgtttgtggctatcatcgtacgattcacaaaagcctataaatacaatcacgtcctcaacgtaggaggaacacaaaaatcatcttttgtggcaaaggaacctaaaccggagagaaaaatggcaacctcaagcaacgcgacggtggccaataagcaggtcatactgcgagattacgtcaccggtttccccaaggaatcagacctcatcttcaccgattccaccatcgatttaaagattccggagggatccaagacggttctggtgaagaatctctacttgtcttgcgatccttacatgcgcattcgcatggggaagcccgatcccggcactgctgcgctcgctccacattacattccccgcgaggtacaaaaacgacgttcatcgttttaggcatgttctggattgttacgtttcgagcttgtttgttacccaggtttttggaaacattttcactattaaaacagagatggatttggaaacgttgttttcaaatatagaaacattgcaatgcttcgtttgaatactgtgtgatctaagaaaatgtacctttatgattagaagtgattttttcttacttacagtctctggtgctaaaggttttgatgtgttgtttgcagccaatttatgggttttcagtgtcaaaagtgatagattctgggcatccagattacaaaaagggagacttactttggggattagttggatggggggagtacagtcttatcactccagatttttcacattacaagatccaacacaccgatgttcccttatcctactacactggacttctcggtatgttaatctatgccttgctccttgttttgtaagtggaaaatgtggaatcacttggtaattttagacagagatcatgaagttgaatgtcataaccatgtataatagttttgaatgatgaaaccggtgtgtgggaaatggaattagttatgtcgagttttaaacttcaatgtagaagactagagtttcgaacgtttggtttgttgatatgttcaatatattctctcctgattggttttctctgttcttgacaggtatgcctggtatgactgcctatgctgggttttatgaagtttgttctccaaagaaaggagagacagtttatgtgtcagctgcatctggtgcggttggtcagcttgtgggacaatttgctaagatgatgggctgttatgttgttggaagcgctggaagtaaagaaaaggtgagaatttgaccatcatttccatattttgattccttatgtttcttggttctccttcaagagaaagattaattagcccttttacttctttttgggggatctgttaggttgatctcctgaagaccaagtttgggtttgatgatgcatttaactacaaggaagaatctgaccttagtgctgccctcaaaaggttcggttacgggttttttcaaagtgtttggtgtctacaactgttaggatcgatttgcagaataaagcggcaattcacaactaaatggaagcatgaatctaagtggaaaccacttaagaactggagaaaaccccaatgaaactccgcaattagaactcttttcgaagaaaaaacgagtttatcttcattgattgatatctaatcaattgtgctcttactaatctaagagagattctcttctttttcccaggtgttttcccaagggcatcgacatgtactttgagaacgtaggaggcaaaatgctagatgcagtgctcttaaacatgaacccacacgggcgtatcgctgtctgtggaatgatctcacagtacaatcttgaaaatcaagaaggtgtacacaacctatccaatatcatctacaaacgaatacgcattcaaggctttgtagtggctgatttctacgacaaatacccaaagttcttggagttggtgcttccgcgcattaaagaagggaagataacgtacgtggaagatgtagctgatgggcttgagaaagctcccgaagctcttgtgggactcttccatggtaagaatgttgggaaacaagttgttgttgttgctcgtgagtga

SEQ ID NO: 183856 - DNA, 236 bp, Arabidopsis thaliana landsberg
ggccaacgcgacgcgctgtggtgcgggcggcgggtggccgagctggccggcccggtgctcggtgacccgttcgccaccgacgtcgcgctgcgccggtgggaggccgagcgcgaccgggagtgcctgcacgcctaccacttcgccaacatcgacaccgacatcaagccggcgtgcccggtgctcgccgagatcgtccggcggaccagccgcgaccaggagccctggctcggcgacct

SEQ ID NO: 183857 - DNA, 503 bp, Arabidopsis thaliana landsberg
atgtgcatcttgcggtacgtgccggtgattgccggcgagcaatcgaacaccaccgcggtgttgtggtacaggccggcggcgcgacgctcgaacagcgacgcgatcaccaccagctgcagttcggcggcgagcttgccgaggcgttccgtggttggcccggggatcgtttcggcacgctcgaattcgcgcacgtcttcgtgctggcaaaaatacgggccgttgtggatttcctgcaacagcaccagttgcgcgccagccttggcggctgcgcgcaggccggcttcgatcgcgtcgagattggcagcgacgctgccgtgatcgatttcctgcagcagcgcgactttgagggttttgtgcgtcatggttgcagtttagccgtgcgcatacacatcgtcattccggagcgggccgcgggcccgaatccggaatcggctggtagcccgggcccgcacccggataccgatttcgggttcccttgccggacaagccggaacggcccctga

SEQ ID NO: 183858 - DNA, 168 bp, Arabidopsis thaliana landsberg
tgttttgatgattttggtgtcattttcgagagagtagaaaagaaaaattcttatcgaattgacaactataaagagactcacttaagccaggtttacaagcattttatttctcttcaaggtgaagacgatgttgtggaagtgttggaaactatgatgcaatggctttga

SEQ ID NO: 183859 - DNA, 60 bp, Arabidopsis thaliana landsberg
atggtgccaattctcgtcctcgttcggaaggtgcgaaatgagattcctgttagcattcgg

SEQ ID NO: 183860 - DNA, 409 bp, Arabidopsis thaliana landsberg
atgaagcaagaggagaaatatatgtgggctgttgttgatggtgtcaaagagaaggtaaatcttcccataacgttgtcattttccccaaaagggagttcctcactcaacttctgtttatctttcagattggtaatttcagagtggaaccgcctggccttttcagaggccgtggagaacatcccaaggttagtcatgtctcccagagactaatttttgtaaacaacataccttgacgttgcgggtttgggtggattcagttgaggcatggtctattctgtaatctcttttaaaaccatctactgtccgtctttcagatgggaaaactaaagaagcgtatccgtccatgcgagatcaccttaaatatcgggaaaggtactcctattccagaatgtccaattgctggtgaaag

SEQ ID NO: 183861 - DNA, 772 bp, Arabidopsis thaliana landsberg
atggtcctcccgcttctgaagctaggaaccctagctcttcgaactatctgcaaacccatcgctaaccagcttaagaaagaagctggtgttaatcccaaattccgtcaattcatcatcaacattgcacaggtatacaaaaaagactccttttaacactcaaatttcccatctttcggtttgattacaatctttgtgtatgatcatcgatcgaaaggagtaatctcgtgtctgttgtatctgattgtataagtttctgatttacgaagaataatcaagggtttatgaaagatttgaaattgatataacttttatggttcttggacaggcgaatcacatatttactacaaagctacatagacgtgcttctggtcgtataactgatgcagttattcgccctttgaacgaagagagagctgttcaagcacgctgcagatcttcttggggaactctttgccttcacggtaccttatatctcatgtcttctatagattttgatagcttaagcactcgaaaggagatttttttatagccattgatgttctagttctgatccaaaaaaggcatcaaccaccactgctacccccccccggataattttatatgcatcaacagatcgtattatttcatcaattcaattggttcttaaatagataaacatgccttcatcttcttttccttctttaaggttgcaggagctgctcttgtctatgaagtgcagagaaatgccagaggagaagcgaaaaaagaagagaaacgacaacaagaactagcg

SEQ ID NO: 183862 - DNA, 242 bp, Arabidopsis thaliana landsberg
aggaagctcactttggaagcagactatcggcttggaagctacggcgatctcggaagctaactcgccggtgaaattagagctcaaatcgtcggcgaaatcggagctcaagtcgccggcggcgaagtcggagaaaatcacgtcggaagtcggagaaaatcccgattttggtaacggccgtttttctttttttttactaaatgatttactctttattttgaaattctccttcagttattcattaa

SEQ ID NO: 183863 - DNA, 243 bp, Arabidopsis thaliana landsberg
cttaatgtgtcattacaccagaaagctttgattgagatcgatgaagaaggtactgaagctgcggctgctactactgttgtagtagtaaccggcagctgtttgtgggagccgaagaagaagatagattttgtggcagatcatccatttctctttttgattagagaagacaaaaccggaactcttttgttcgctggtcaaatcttcgatccttctgaactttcttctgcgttggaccgggcttaa

SEQ ID NO: 183864 - DNA, 676 bp, Arabidopsis thaliana landsberg
atgtttttccggcgaaattcacagcctttccggcgagctacaccatgctcagtcacactcgaccctcaggtaaactctttcacactaaagatcttcttcctatctagttgctatcactggttctatctaaactttgtctaacattttcgaaaaaacagtctatttccccacaataactatgacatcatgccagatagagcccgaactatgactacaatccagttgtccccgaaaagatacttttcgatctatatctccccaaaatcgatagttttcatctatttccccatatatttgggtttaatcggtttgctgaccaaacccaataaaaattcactcaacccgataccaaaccactttatatgtcaaacctctttaaaaattaaaaaaaaaaaaaaaaaaaagaaataacaaaattgttgtcgtcttgtcttctccattcttccccataaaattccagattatgcttatttgaaaaaatagtttatctctctctttgattgttacgatgggtgttagatttattttgaatccacatacaaatttgtcgtaactaattaagagatattcaacaaagcattttaaacgcattctaattgctaataacgttaacatcgacattgacctgaaaactggaatcgttgctaagaatatggctaagaaagagaagatcgag

SEQ ID NO: 183865 - DNA, 193 bp, Arabidopsis thaliana landsberg
atatgatatcaaaggactctcaagagaccaagagcggaagctccgatcgtcgaaattatctgcgtggaggaaattagggttcaggagtgaaatcgccgagaaacgaataggcggcgtggaatcaaatgtggagcaagaagatgtaggagaaatggaacctgaaaacgacgagctcgatctgaaaagcgactag

SEQ ID NO: 183866 - DNA, 353 bp, Arabidopsis thaliana landsberg
atgttgtggaacaaaaaaaagtactatgcgaaaaatgaccaatatgtcgacaacttatctccggtgattatcgagagctcgccgcagcaattgatatcgcaatctaccgacattcattacggagagaggcctaaccttaacagtaagtctatttataacattttcatagagtaaaatgctgagttctaactctgtttattctattgtgtgaaagcagagctcctagttggtttaaagggttcgagcgttggagttcttgtgtgtggtccaaggaagatgagagaagaggttgcaaagatttgttcctttggttcggctgcgaatcttcaatttgaatctattagtttcaactg

SEQ ID NO: 183867 - DNA, 78 bp, Arabidopsis thaliana landsberg
atgcagctaatccgtgctcagttattcgacttcggcgatactgcagagatcaaccgtagtgtggattttcatccatca

SEQ ID NO: 183868 - DNA, 135 bp, Arabidopsis thaliana landsberg
aggccagtgactcagacgttaggagtccgctacctaccaatggaccagaagtctctccgagtcgtgcattcaatatcgttcttggagatgtgtctcaacaagcagtgcaccaatgcattcggctttgggtcttag

SEQ ID NO: 183869 - DNA, 118 bp, Arabidopsis thaliana landsberg
atgcatcctaagacgctgtcagacaagctggtgaaagctaacgcatataaagttcaacaatatgtgagtgtacgtactcagactctcataaaaagagatagaaacgagacacaagatg

SEQ ID NO: 183870 - DNA, 718 bp, Arabidopsis thaliana landsberg
atgggagctcactctgtttttctcatccttttttccgtcattgccattgccattgtagtacatggccaaggccaagcaggttcgtgagtctcattctcgcttattttcctctgttagagtctgttttgatttgaaaatgagcaatcttcagaccaaagatttttgaagttttgatatatgtggttgcattttggccaaaaccgtgttctgattattggtttgacatgataagtgaggtccaagtctgtttctatgattgaatgctttaggttctaaaatttaaacctgcattggaattttgatgaaaattttctcaacgttgtagaattaatcaaaacccttaccttcttctggtccaggtttcatcagcatagattgtgggtcaccccctaatattaactatgtagacactgatactggtatcagttacacctgggatgcacctttcatcaacgctggagtaaatctgaacgtctctgaagaatacggttacccgaaaaacccggttttgcctttcccgcttgctgatgtaagatcttttcctcaaggaaacaggaactgttacaccttaaccccctccgatggaaaagggaatctttatctcatcagagcttcgtttatgtatggaaactacgatggtaaaaatgctttacctgagtttgatctctacgtaaacgtgaatttctggacctcggtgaaactcaaaaaatgcttctga

SEQ ID NO: 183871 - DNA, 69 bp, Arabidopsis thaliana landsberg
aaccaaaccctaaaccggaagtccaaaaaccctgtggagcagcaagtcaacacgccccacattggctaa

SEQ ID NO: 183872 - DNA, 129 bp, Arabidopsis thaliana landsberg
caattgcgacttgccagacgagtttcccaaacgagttacgaccgaccaattgcgacttgccagagaacggcagcatccttttcagatgatacgactccaagccgttcgattttgaattcaaacggctga

SEQ ID NO: 183873 - DNA, 279 bp, Arabidopsis thaliana landsberg
ataaccgaggtcaaagattttgcgggtcaagaaatcgaagtaaagcggttagttgaagcggattcaaaggaagcattggagaggggaaacaaaggctcctcttcctcctcagcagcgccttcagcggttgatgcggttcttgagcagataaaaaagaaacaaaagctgagtgttttggacaagacgaagaaagattggggagagtataaggaagaacacaaaggtgttgaagacgagctagataagtacaagaaaagctcggatcagtatcccgacaaa

SEQ ID NO: 183874 - DNA, 285 bp, Arabidopsis thaliana landsberg
aagtttgtggtgaagttcaatgtgggtaatgtggcggcacatgcagagaatggaaacaacaatgatgtagaaaacagtgaggatgatatcattaagagagttcaaaccagccagcggtgttctctaaaagtcaatggctcaggccctgaaccaggttgcaggttcatgtatgacagaactgaggacaggtttagtgcactcgagtatcggatcgtaaggcatgcagatgcatttgctgcctcgggattatatgaggaacaggtggatccggctgttgcttcacag

SEQ ID NO: 183875 - DNA, 561 bp, Arabidopsis thaliana landsberg
atggaatctcatctcgctgccgcagaagatgttgaatctgattatctcgaaaactttggcattgtcacaggacaagttatgacagctgtcaaagacgcatgtagagccgccgtgctccagacaaatccacgtatcggggaagcaatgtacttttgcgaactgaacactgcacctgagtatttgggtccaatgctcgctgttctaagctgaagacgagctccaatactcaaggaagaaatgcatgaagggtcgtttttattcacagtccacgcgtatgttccagtttcagaaagcttcgggtttgcggacgagctgagaaaaggaacgtctggtggcgcgagtgctctgatggttctgagccattgggaaatgctcgatgaagaccccttctttgttcccaaaaccgtaaaagagatcgaggagtttggtgacggagcaagcgtgctttcaaacaccgtgaggaaactcatcaacgccgtacgacttaggaaaggattacacgttgaggagaaagtggttcaatacgccactaaacaaagaaccttggctcgtaaagtttga

SEQ ID NO: 183876 - DNA, 82 bp, Arabidopsis thaliana landsberg
atgacgccgaaaggacatggtgaagaaagccgagtgaagatgaagcgatacatgacaatgatggattctatgacaaataaag

SEQ ID NO: 183877 - DNA, 1118 bp, Arabidopsis thaliana landsberg
agtctacatcctctcatacaatatccctggagaaactttcttttgagaatttgaagtcttacctggacaagaatcctgattgttcaaggtgcgtggttctacttaagtgtgattatactttctcatgttggtcatagaaacaatcttttgtggccaaagccatctagaaggttttggttcactacacaaattcagttgtgacttttctctcctggtctagattgcgagcatcaatggaaggatttcttgatgcatatgatcccagcacatctgctactccagccggtgtttttgtcaatcgtgttgaggtaacagtgcaatcttcaagctgtacttgcaccaatgggataattgaaatattgagacatttctgaaatttatcataatgccaagtgaccgcaatattgagattattttattgtggtccctactgacccttcagacatttgcttgctttaatttcacaaagctgctttcggatttcaatgccattttacttttaagataatttcttgaatgttgtgcaggaaagtgagtttgaatgtgttccaacatgcctcatggataacgtgctctcttttctgaatgtaagcaaataaacatatttaagattgtttttccttttttgtttctgtctctttgccttatcttcaagtcttgcaggatgtaagggaagatctccgtgcctccatggcaaaggatgtagttaccataaaaaatgaaggcttcaagattgatgaagagcccaagcgtcggttgatcatgtccacgacagatgaagaaaggctttctgagccatcttcgttggatttccagaggaagatcactctttccaaacatgagaagcaagatgctagttcaacttctgtgctccgaaacggggaaacttacaagcggctctttggtatgcaaatattatatagctattattttgtaaacatgattatgtaccgacacaagtaagttttcagaaatggaaaaagaagatgagctcgtgactcagctcttacgatctagaagcatggaggtcgaaaggttgaaatctggtcgacagagtttgatccttgtggctgcattggttgatcgtattcctaatcttgctggattagcccggacat

SEQ ID NO: 183878 - DNA, 171 bp, Arabidopsis thaliana landsberg
ccctcatcttccgatgacaaggtgcccacgatgcgttactgctctttcggtgcggggtctggaaccttacgccgacaatggaatgttcagctacccttatggacctgttatacgttacgagccgcacgttcacgcggggctttcggtcgcgcggctctccctgtcatcacg

SEQ ID NO: 183879 - DNA, 273 bp, Arabidopsis thaliana landsberg
atggatatggatttgccgttaattatagttatagacgctacgctactaaactatcttgttgacttggacatttccctagtagccatctggagcaaggtaataacagacttgtggataatgcggtagatgaaaaaagacggtggtactgacgtcatcatcgttggagccgaagttggcggctcgcctctcgcctatgcacttcataaggttcgtaatcggtctaagtatcgaatctcagcgaatctgcaactctcttctaaaacatctagttaa

SEQ ID NO: 183880 - DNA, 92 bp, Arabidopsis thaliana landsberg
gtagagagatcggtcgtcgccgtccgttgccgccgtccgttgcgcgtgtcaccgtcaaggcgttaatcaatatcgaaaaccgttgcatttag

SEQ ID NO: 183881 - DNA, 121 bp, Arabidopsis thaliana landsberg
tcttgcataacggtggcactagactttgtggctcctgaaagcgtcgacgaatgccttcaggtaacacaggagtctccggagactgcctccagaccacagttctggcgaggatacactggag

SEQ ID NO: 183882 - DNA, 81 bp, Arabidopsis thaliana landsberg
atgatgtcgaatttttcagttcgattttttggtaaagatatatatttcggttcgatcaagatcgggttctacccgcaccag

SEQ ID NO: 183883 - DNA, 551 bp, Arabidopsis thaliana landsberg
ataagaagaagaagaaaggggtaaaagccgcttttggtttaccttggtcagcaaggtacaaggtcgcgttaggtatcgcagatgccatcgcttatttgcataatggaacagagcaatgtgttgttcacagagatatcaaaccttccaatattcttctttcctcaaagaaaataccaaaggtaaagattcgcgaaacaaatgtactaaattattatcggtaagcgaaccactaatttgttttgacctattctttttcagttgtgtgattttgggttagctacttggaccgctgcaccttcggttcctttcctctgcaagaccgtgaaaggcacattcgggtatcgatcaaaacttgccatgagttcttttcttctcctttatagccaattcttgattatctaatcctctatcaaaactttcttgcagttatctggctcctgagtatttccaacacggcaagatatctgacaagaccgatgtttacgcatttggagtcgtgttgcttgagctaataactggtcggaagccaattgaagcaagaagaccatctg

SEQ ID NO: 183884 - DNA, 988 bp, Arabidopsis thaliana landsberg
atggtctgcgagggcggcacaacccacgccggccaagaggacacccgtttaggaccgggcgcccatcggtgtctgcggtgcttctgcagcaaaatctcggtcgaggttgcgaccctcgatgttctgtcagcgctcaagccgcctttccaaagagatctgggcgtcctctcccgtacgcctgcggttgagctctacccagaggtcgtcagtctgcgcaccccttacggagggtgagcgcagagacgtcgtcgcctcgcgttggcgccgggttgaccgaggcctcgacctggtcgaagtagaatgtgccatgtcgagcagccgatcgacgtcgtcacgccactgcttcatggcccccggtgaagccgtggagctacaggggtggcgtacaactctctagccacagacagcgctgtaggcgtgccctcgacggagtccgagatgcttgcgctgccgtgcggcatgcacagcagcagtgcctggcactgggcgattgggaacctgcggtgtggaggaagtagcttctccctccaccgcaaaatccaccaaagtctcggcgcggtgctcaatgatctgcaccatcatgcttggacaaggaaaacaagcaaaaaccaaatgcctaggcccctacctggcgcgccaaatgtcggagagcaaatctccgacctggtggcggagtgcacccaccctaaatcctaagatgaggaggggcctaagcgttttgcttgttagttggaaaagtgggaagaacacaagaacacacaaggatttagagtggttcgggccaccggagcgtaacaccctactccactgtgtgatgtatagagcttgtatgaacttgtgagcctgagctgggtctaagtgtgtctgagtctgtaacgttgcgtgcctccccctttatagctaaaggggggcaacgtacaaaggatgctgagccccgacatgcgggccagggacataacagatgtaatacttggagcaactaatgctg

SEQ ID NO: 183885 - DNA, 68 bp, Arabidopsis thaliana landsberg
atgctacacttcatggcctttgtgatcgaggacattgaaagctactatttacatgatcagaaaatctg

SEQ ID NO: 183886 - DNA, 1146 bp, Arabidopsis thaliana landsberg
atgcaagaaattctagtccatcagcttgctcaagaagcagcagaggctgagggagaaggtgcgatggcatctgtagcaaatcctcgaaggcctggcaagtgagtctgatattttttgaaaagtatgtagacttgatttgttgtcttatctgttattcaaaatatctttcacttttttactaggggtttgactaagctatattttgcattgatttaatgtcctgaaaagcaatggaattttattaaagtccccataatcatttgtgacatgtcctatatttattctgttgaatccaggaaatctactacagcgtcagcgtcgtcaaagggtcttgctcaacagaaattaaaagtccaagggaaaggctacaaggacaaatgctacgagcaaattcggaaggcggttgaagatcgattcaacaggcttttgacggtgggactttctttttgaaaatttcatttgatggcatagctaaaagtaatgtgtttctctgtgtggtcatcctaacactgaactattgaacagcttgtctttgaagatctaaaagcagctttggaagaagctagaatggtttgtgcgactgtttcccttgctttcatacacttttcttcattttttcttttctgcagtttatgaaattatattcaactatctaatatatttttgtttctcagtagatcacctttagttgactgaattagttttttttttggttcttaataaatatggttgatgaactagtagtatgttactgttctgatacaaaagttccaaattggcctgaccgtcttatattactgttcctgttccataatgattgatgtcaacctcgttttcttctgttatctttcacaaatatatatttatcaactgggttttcactttctttttatggtgttccacaactagattggagaggaacttggagatatttatgactatgtggctccttgttttcctccaaggtttgttcctatctcgttttcctcaagtggacaatgaaagattacagcttaaaatttattctgttccccaagtgaaaaagggttccttagcaatcttctttgctggcagatacgagatatttcagcttatggtgaacctgtataccgagagattcatacaaatgctcagattgctcagtga

SEQ ID NO: 183887 - DNA, 502 bp, Arabidopsis thaliana landsberg
atgctcaccatccgccgccacaggggcagcttcgagaacctgtcggtggccatcgtcggcgacatcctgcactcgcgcgtggcgcgttccgacatgctggcgctcaaagcgctgggttgcccggacatccgcgtgatcggcccgaaaaccctgattccgatcggaatcgagcagtacggcgtgaaggtgtacaccgacctcgccgaaggcctcaaggacgtcgacgtggtgatcatgctgcgcctgcagcgcgagcgcatggccggtggcctgctgcccagcgaaggcgagttctaccgcctgttcggcctgaccaccgcgcgcctggccggtgccaagcccgacgccatcgtcatgcacccgggcccgatcaaccgtggcgtggaaatcgagtcggcggtggccgacggcaagcactcggtgattctcaaccaggtcacctacggcatcgccgtgcgcatggccgtgctgtccatggccatgagcgggcagaacgcgccac

SEQ ID NO: 183888 - DNA, 407 bp, Arabidopsis thaliana landsberg
atgccgacccccgcgaccgacacgccgagcgccggccggcccgggtcgctcgccaccacgcccggctcgggcgtcgccgtgatcgtcttggtctcgccattgcggacgacggtgaacgtgagcggagcgctgccagcgtcgctgctcacgtatgctaggaaggcatcggcatcgacggacgagaacggctccgcatccggcacgccgacgacctgcgtgaccgcgtcccccggcatgagcccggaacgggccgcaggcgtgcccggcagcacgttggccaccatgaggcgcacatcggaggcccgggagactttctcaagcgcaagcgcgcgcggtgtacccataacgagcgtcgccgtgatgaggacgtacgcaagcacgaggttaatggcgacgccggcaccagc

SEQ ID NO: 183889 - DNA, 126 bp, Arabidopsis thaliana landsberg
atgtcctcatcgatcatcccgatcctcgaaaagtctgacatggattccgaacatcggaggttaaaggacataactgcacaagaaaagagcgatataatagtgaggaatgaagaaaaacctagagag

SEQ ID NO: 183890 - DNA, 349 bp, Arabidopsis thaliana landsberg
atttttgttctcatgcaaaagaaagtcaacggacggaaacaccagcaaagccttggtgtcgccattagtttcagccgttcggcacgcatgaacatgattcgtccgtcaacgcttttaaattttgattgtgatataattctattattgtcgacacaagcaattacaaagtaaagtatgtttcgatgaatgccgataagagtttgaatattctatgaaatttcaatcatgcatgactatatatgactcgaatattcatgttctttatagatttcaaagattgattagatcaatctttgattatggaacccttgattaccaaaggaagaagaagaagaagcataagcttatg

SEQ ID NO: 183891 - DNA, 794 bp, Arabidopsis thaliana landsberg
atggggaatttgttcgtgaagaaaccacagatcacggaggttgatcgagcgattctctctctcaaaacccaaagacgcaagcttggtcaatatcagcagaaggttttttattctctcttcttatatcttaattttcttttgttacaatttcttttggaacccagatcatatagttttgattcatccaaaatcctaattggagattggatttgattcgtttcacaatatgtgtcttatgattgttagtagtgtgatggaaaagaaagactcaagcttttgagttctttggctcatctctttgttaaccgatcttctcattttttttgctaatttagcttgagaaagtaattgaagcggaaaagcaagctgcaagagacttaatccgtgaaaagcgaaaggacagggctttgttagcattgaagaaaaaacggacacaagaagagttgttgaagcaagtagatcagtggctcatcaatgtcgaacaacaagtaaattggcttgaccttcttcttatcatctccttgtttccatcacataaccttagtgctatataaacagtacttttcttttcttttatagctgattttatgttttgaaagaaacataaacgaatatattttgaacctgtctttatgactcagttggcagatatcgaacttacaagcaagcaaaaagcagtctttgagagcttaaagcaaggtaacaatgcaattaaggcgattcagagcgaggtcaaccttgatgatgttcaaaaactgatggatgacactgccgaggccaaggcttatcaggat

SEQ ID NO: 183892 - DNA, 469 bp, Arabidopsis thaliana landsberg
atggagaatagatttttacaattaactttatcaaatcctgagggtttcgtcaccggaatccagtataatggtatcgacaatgtgctcgcctactacaccaacaaagaatatgatagagggtaagtatgtatatctttatgtatctaactgctctgttctgagggtttaaactctaagtctctaattgatctgatttctgtagttactgggacgtagtgtggaacttccctgggaaaaaggctaaaaagaccaaaggcacactagaccggtatatggttgttgtgtctatgtttagttataccaatcaatatgacctaaatgtgaagtgagacttacttggattactttacaggattgaagcaacaaagatggaagtgattacacagaacgatgaaaaaatagagctatcgttttcaaggacatggaatacatcttcaactacggctgttccagtgaatatagacaagag

SEQ ID NO: 183893 - DNA, 237 bp, Arabidopsis thaliana landsberg
atgagagcaaaaaacgacccttggtttgcggagtttttcgtgcgcgtaggcggtggaactgaggaaacaaatagtgacggcgacattcgtcttcttgatgatgtgtgtgtgccttacagtgggagtgacaacgatcttgacaacctaatagacttcgctttcccaaatctcaacgaaaatatgtctgattccacctacatcacttcaagggcgatactgtcaacatggaacgactag

SEQ ID NO: 183894 - DNA, 470 bp, Arabidopsis thaliana landsberg
atggaatccataggaaacgctgagacatatctgccatgcttgatagattcatcgcagttgcagataacattatacatctcttcccactcgctttctctaaccataagctcttcggttttcgaaaataatcagagatatttagtatcatcagcacaaggtagaacttcaacgttaattcaatgactctaacataccaattgcaatttcccataacttctacattgctaatttgtagatcgtataaacataaataggttaagctttttttaccattttgccatcttcgattagaagaggatcgctgcagagagagaaatagagttccttcttcgatgagaacgctcgcaacggaggaatcagagattcgtaatccgccggaagaaacttctcccatacgatatctgatttcaccgccgattcgaagatcttcgaaaccgcagcagcgacgcaagcgtcttcaggacttgtga

SEQ ID NO: 183895 - DNA, 210 bp, Arabidopsis thaliana landsberg
gtatcggattttgagtctttatgttatttctcgagtctttttagtgtcttttcaagtattctatgcaatgggacaacaatggagatgaggagacattttggagcaaaaactaagaaaaaggaagctaaggaagattttcagttccagattaagaggagtgtcgatcgacacactactagtctcgatcgacacactactagtctcgattga

SEQ ID NO: 183896 - DNA, 268 bp, Arabidopsis thaliana landsberg
atggtccatattcgctcgatcatcaagcgcacagatgttattgtcggtcatagtgtgcaccatggtacttcgcacgtgcttgatttcacttttctcatcgcttggtgcagatattcagtggctcggcctgcgtgcaggaaccgattttggccacagcatcgacgtcgcgaaaatatttgcgatcaagaatccgccgggtcacaagtttgagtatcgcacgttcagcctgcgtcacgtcacacagcagctgtgcggcgaagacattcaa

SEQ ID NO: 183897 - DNA, 245 bp, Arabidopsis thaliana landsberg
tcacattggcgaccaaaaaatctctgaaatcacgtctccaagatggagaaaagcttctcggccactttcttctctccttttctccggagcttgcagagatcgctgcaagagctggatttgacttcattgtcgtctaccttgagcacggtgccggcgggattcgtgaagcgcttcactgcattcgagcaatcgaagccgctggttgctccactgtcctccgtgtacccgacattagtcaggcttga

SEQ ID NO: 183898 - DNA, 632 bp, Arabidopsis thaliana landsberg
atacagatgagtttttgcctatccagacagtgtgcgactttgcaactcttgttgggacatatgcccggggattttccatcatcatcgagccttatgacgagagaatgccccatattccagatcctatattgcaggtaaatatggtgttgacctactttcttttgagtattgtcactgggattttaagggattatgactcacacgtaaatgctaccgtttgaataattgagaattgtatctgaaacatatatccttttgtatcttagttgagctgtcatgatgcgtctctggcgatcaaaccggtgtttgatcgtttccagtcagtcgtgattacatcaggcacattgagcccaattgatctttacccccgtcttcttaatttcactcctgttgttagtcgaagctttaagatgtcaatgacacgagactgcatctgccctatggttctaactcggggaaggtatgtggtatataaaaagaatcctgaacacttaacttattttttaattttatatgtcttgacattattggttgttttctttttcagtgatcagcttcctgttagcaccaaatttgacatgagaagtgatcctggtgttgtgaggaattacggaaagcttttggtagagatg

SEQ ID NO: 183899 - DNA, 143 bp, Arabidopsis thaliana landsberg
atctctcctctttttccatcgacgtcatcgataccggcgagagagatcaccgggatttcgtcgctaaacacattgtaagcgactttagggcgttcgtcttcgtctcggacgaatttagagttgagcttagactctccggctag

SEQ ID NO: 183900 - DNA, 667 bp, Arabidopsis thaliana landsberg
atggttcggatgtttagatctaatcatccagaaatttatgcggtggtgatagtggaggtacaaattacaagtttgtcgcggaacgcaacttttctctatctttcggaatatggtgtatgaacatattttgatcgtaagcttcatgtaattgctaattctttattgattattctccaaagcagctagtgtctgaggcaataaaaattttcgtaaatgacttttaaatacatatataatctctcagatactaaatataatatattcttaatatgaactaccctcacaagcatggatgtcgggaacaacaacatttcgacgcacctgaatcaaattccattttcattcgaacaaaaactggagaggtttgatcccagtcaccaaccgactcatccttgtaggctagatcccaaacactacttttctcaaccttccatttctgaccactcaaaccggttcaaaacgccctacgacgaccaacggttcaattcggcaagaattagcttttacaagaagcttacgatctaaatctgctctagcaccatactccgagagaaagagaaaggttgcgttccgcgacacgctttgtacgttcgtcatcaccaccgcaccaacgtttgtacaattggatctaaccatccgaaccattgtatttcgtgtaattttttga

SEQ ID NO: 183901 - DNA, 534 bp, Arabidopsis thaliana landsberg
gtattatgtcggttcacacatattcccagatgttttactcaatgatattgctggacctgatggagatgctttggccttaagcttaaaactggctgtggatgtcttggtgagtgagacatgcatctcaaagctatatctttcatgtgaaaatatcatggactagccggacttaacgagggaggaaaatggtgattgtggggaaaatgtgaattcacgaagtgaatgtaggattaaagacgggtagaaagaaattttggagaaagaaaatattgagcagataatcaactcgtttttttgtgtgtatcaggtagtttcctgcccctgtgcactgggccttgcaacaccaactgccatattaattggcacctctcttggtatgttatccagcgtattatttctcttccgcataaaaatctgcaaacgtagctgagaagagtaacctaatttgcgtgcaaagttttccaattattaggaagattcgaaactgacactgaagctaccattgttcctgttctgtgcttccctgctgactag

SEQ ID NO: 183902 - DNA, 126 bp, Arabidopsis thaliana landsberg
ctctcggaaaatcttggaccaaatccatattccatgacttcgattgttaaccctctcagttttcacaaacatactatcaatatcattgcaacggaaaaggtacaagtaaaacattcaatccgatag

SEQ ID NO: 183903 - DNA, 202 bp, Arabidopsis thaliana landsberg
caaaagcaatgtggtgataacccctaattctccagaagctacaaagttgaaatcttggtatgatgctgaagggaaaaagacatctatgtctgctattggttatggaatgagttcttctgccaacaacggatcaagatccatgtattctgacagagtttttctttctcacatcacaagcaatccctctttaggagaggagaag

SEQ ID NO: 183904 - DNA, 992 bp, Arabidopsis thaliana landsberg
atgcgtaccgtgaaaggtgatagttgtgtttcttccaatactttttccagttccggagcagagctaatggcacggtgcattttggattacatggctttgatgaccatgttcatgcgctcgatttccaggttgcgtgtttggtcgacgttatcggaaggtcggttcagcaaactttggctgctcggtaggatgcggttgttcggtaggctatcatgaggttgcctgccaacagattctacgataactgatgccgatgtatgtcgtcggttttgagaacgttccgcacatggagtttggggagatggcaatagttcgtgatcatcgcgaggctgagagtcaagtcttcggtgtcgtaggcgctcgatatgattttgggaagcaatttgcgttgcgacaaggacattgatttgtttggtcgttcgtgtgtcctgaccgtcgagtcaatccaagattgtttgcacgaggtcatccagatggaaacccttgttcgcaggtgcagtgtcgccgccaagcgcggtgtctcccactgccgctgctactgttgcagggcgtggtttggcacgtgcgggattcaagccagtttgagcgagtgctgggttctctggttgcagttgcattgcgtcaagtgctggctgttgttggctggcgtcggacccgtttttgcttgatgtgtctatcatgtcctcttcagttttgtggatcgctggggacatttacgttactcgttctcgttcggtgaaaagaaaagtttcgaacttgccctacgatgggcgccaattgtttgtatcgaggttgtaactacgaataagtaaggtaaatttctatcgatcgaatagctacacgtaatttctatcgatcggcaacgtaacacgactcgaattgagaataaaacgaaccgtgaactgaaacgaaccgagaacaaaaacgaaccgagaacaaaaacgaaccgaaggacaatgcgttttagttcgaatattgctttgattctctag

SEQ ID NO: 183905 - DNA, 82 bp, Arabidopsis thaliana landsberg
atgaggccaaacttgccatgtgataccgtttggaaagctcaaagagatccttccaaccaaagaagcaggacaatgggtcaag

SEQ ID NO: 183906 - DNA, 395 bp, Arabidopsis thaliana landsberg
atgcgtgagcgacccgtactagcgtatgctcgattgcggcggacatctgctcgacccacgatggcgtgtgcccgaccgcggtggacatatgctcaacccatgccggcgtgtgcggttattgtgcggccaacaatcggacacctcgtcgacctgcttaacgacagcgagcaggtacataagttgctacgacaatatgtgggcgagaaacgaccatgtctcgcctgcgggtaacatgtcgacaagggaaatgactcatgtcagggtgtcaacttcacgatgctcccagtctggttgttaatcaacggacgctgcttggtgttgacaatcgtgactcagtgatacatgttgtcggaagagacatgattagtggaggacctaacggcgaagcagcttag

SEQ ID NO: 183907 - DNA, 134 bp, Arabidopsis thaliana landsberg
gagccactcgatcaacaacccgagcaaagaatcgagcatccagcgaatccaagttcagcacaacccgttccttggagttacacaaaggagagtatggacgatttcgtctcctcctacttcacctgatcactgag

SEQ ID NO: 183908 - DNA, 52 bp, Arabidopsis thaliana landsberg
atgttggatgatgacgaagctaatcatccaattgcacctgctcctgcaagtg

SEQ ID NO: 183909 - DNA, 1172 bp, Arabidopsis thaliana landsberg
atggactgtccgccatggtccaatttgttgcttgaagcccagaaaggtgacttttctaacgaggtgtcgtttttaaatttagaaacgggacgcagttgaatagcgaaaatagtaaacgagacatagttctgtttgtaatcagagtgcaaaccgatggcagccacaacaatttccgccggcgattaggaaacaaatgagcagcgttgccgtcgcaatgaaggtcgccgtaatcggcagcggaagtgggtttcctcaatttcattcttagatttctttttcgggtttcattcatgaaaataagttttcaattattcaaatcggagcagtttctggagccgtgtgtgcatcgactctggcaaggaatggcgtctccgtcactatcttcgactcgggtcgtggacctggtggacgcatgtctcaaagaaggttccttttgattaagaatgttccttttcacttataaagtgtttaactttgaatgatgatgtctcgtttaagcagagagattggagaagatgggaaggagttgatgttcgaccatggagctccatttttctgtgtgagcaactctgatgccatggctcttgttcatgagtgggaatccagaggttttgtttctgaatggaaacaagtttttgggagttttgattgtgcctccaacaagtttcttggcatccaacaggttttgaaacatcagtctttgtacttatattaaaactttagtagattatgaagtgtgatttacttgtttcaatgtatgcgcttgtaagatgcttgatactaggattgattgattccaagtaatcaatttctgattttaatgtgtgtaggaaggggatgcaaagaagtatgtgggtgttccgggcatgaactctatatctaaggccttgtgtaatgagtctggtactttttctaatctttctagtcgagagcttgaactcaaatctctgaaacatcagtctctgttatcaactccgtgatcaacattgtaggtgttaagagtatgtttggaactggtattgccaagatggaatggttggaagaagagataccatggttgttgacagattcaaaaggagaaaatttgggtcgtttcgatggagtggttgcatcagataaaaacattgtttctccaaggtttactcaagtaactggactcccaccgcctctgg

SEQ ID NO: 183910 - DNA, 107 bp, Arabidopsis thaliana landsberg
atgccaacaagtaaaaaatatcatcaattccttggacaagaaatacttcagattctaagaaaatattgtatggttcctggtcttagccctgaaaaccgtgtagaaag

SEQ ID NO: 183911 - DNA, 429 bp, Arabidopsis thaliana landsberg
atgaaacacttgactgggagcatctgcgttggctcgacgcatgttccaatcatcgtattcataagaggatcaataagaagtgttaatctaatgtcagggagcagcgatgaggtcatgtattcaggtgctgattgcttctctaccattgctaacaaactcattacacttggaaacagatggggctttgtacatgttggaacctatgataaaggattcatgcaggcttcgagtgatacctggaagaagttcagaagcacaacagggttggagaaactgattgactcggatctcactagctccttctgttttctcagtgctgtttctgttggagctgtctcttcattaactgctgggatatggatgttgttaatacacaaggactatgccctggaagtgactctctatgctttcataattggatattttgtg

SEQ ID NO: 183912 - DNA, 165 bp, Arabidopsis thaliana landsberg
accaaaggaaaagtgtgcgagaagccacacataccgaagcgcgagaaggaaccgaaaacggaaaaacggccaaggaaaaccccaaaacaagaacccaccgaggcaacaggaaaggagcaaatcacaagccaaaagacggacaaagaagagaaaacaccatcctag

SEQ ID NO: 183913 - DNA, 1216 bp, Arabidopsis thaliana landsberg
  unsure (1)..(1216): unsure at all n locations
atcatgagatctttcattttgaccctgtcactgaattctcagatgcacctttcaaaccttctgggatcagtcatcccaatgactcttggccgtctaaagatcctgagagatttgacaagaagtcaggacctggttcatcatcaaaggacacattttgggagaaagatcagcctgatttttcagtggaggacagtcttcctggaattcctgaattagaagattggagtttcccagttaaagacaaattcatgagccagaacagaggatgtaaatttccggtgatgagagattttaacttgcatgacaataggaactcggagaatttcatcgcagactacaaaggtgaagtaattgacagagctgataagtatctcgaggaagacttcccgccttctcctggttataataggtttgctcgaatagtttctgatgttaatgaagaggaacttccaagaaaatcaaaatcttcaaggaagttatctttctttggatctctccagcctaacttcccaaaggcggctgacatcgactcgagttctgaaagatacgccactgagaaagattcaaaatatgataacaacacttctttgcgtggctatgctgataactatccagcaaaacgccaaaggacccttttggaggaggtcttaacacgaagatctgcagttccaacaacagagcttccatttagagaagaaatatcacattttggtggatctccactatcaaacgcaatccgttcttcaaatcaagtacaaagttctccttggacggttgatttccttaacagagttcgagaaagaagcagagcaaggaaacaacaacaatctcttccttcttatgcttctccacctagtttggagactccagggaacataaagaaagctaataccaagagaaagagtccatccatactcgagtttttcaagtataaaggaggcaacaaacttcaagaagagaagaggcnnnnnnnnnnnnnnnnnnnnnnnnnnnnaccaaaaaacgagagattttactcgcctcttaagtcatgcacaccaattgataagcgagcaaaacaggtattcattatatatgatccctatagaagtgagatttgttcataccgttgatttctttaacatcttttttttttcattccagtctctatcttacacagcgaatggaactggccaaacaaaacttgtatggaagtaaagaaacaaacacggcgtag

SEQ ID NO: 183914 - DNA, 679 bp, Arabidopsis thaliana landsberg
ctttctcttagtcggaaagcattccaaactcggaacatacattgtcgtgtttatttgggaagaaatccacgctaaaatatttcagtacatttctaccagattacccggatcaatcaatcaggtatataaaaaataaataaaaaaagcgtagttacttacaacatcaaacagcttgcacagtgaagaaaagtaatcaatcagcagtatatccaatgaatctatacatcttaaaattcagaacgagaaaatagaatgggtcaggtccattgggctttagaggcctaaatatttgaagaaagagtaaacccaaaaatagagaatcgaaaaaagctaaccccccaatttaatattagtttgactaaattttgatgcagttatttgttttctaattaaattcaacattcgaaactcatgttctgcctcatagtaacacttgcccagtggcagagcaggttcagaaaaagaaaaaaagaatccccttttttttctcaaagtcgaacccaaaacccaaaattcgaaattctctctactcttctcgttaaagtgtgttcctttttctccgttcgtcatgcattcgtcgttggagccggagaaaatggaggaagattcacaacaaggaagcaatttgcttaagaggaaattctctgaaatcgatggagatcaaaatctttctcctatg

SEQ ID NO: 183915 - DNA, 446 bp, Arabidopsis thaliana landsberg
atgaatgcatacaagtacataagcaaagaattacagaagaaaaataaggagacaagtaagcacacgtaagggactgacgaagtaaatgactaaccaaggaatggagtaagaaaatgaggaagcaagcaaataagtaacaaagaatcatgtatgtaatgtatgttatgtatgtgtgcatgtatatcaatgcgttcgttaagtgattgtgaacaacccatatagaattctctgaaatttgctgctgcaaaaagaaaactgaaagagcatcaaatccaagaaaaaatcaaaagaaccagcataagaaagagattgaagagaacatacttgaaaaaatactaaaccaaaagattagaacactgaaccggaggcacagcgatgcacaaaaccagtttatctccgattgccactttaccagtcactaccaccgctcctcacagcggcctccg

SEQ ID NO: 183916 - DNA, 285 bp, Arabidopsis thaliana landsberg
ttgttgacggtgggttgggtcgttattatttttactagtatacatgttgcatcaaacattcgagcaagaaaagtcttcgagttcccttatcttcagacgtccatgaagccagaagatgctggtggggatgctattctctcaaagttcaatatcatgatctatagctacaaagatgctgcatacccctttaggatggtacctcccattgtttacgctcacctcgccattctccgagtaaacgccggagacctcactagcagtgatacatggcgtttatatatgtag

SEQ ID NO: 183917 - DNA, 183 bp, Arabidopsis thaliana landsberg
atgggtgctaacgtttctactccagagcagagatttcaggtaacccacttccgttcaaggaagtcatggacacctcaacctgagatttatcctttcaaagtcaacagtccttgtattgtggagatcaagaacatgaatcagtggaaatctaggctcaacgctcttaaagacaccaacaagctg

SEQ ID NO: 183918 - DNA, 622 bp, Arabidopsis thaliana landsberg
atggattctgatgctagtgccaaggagaatacacaagatctttctgactacaagggaatgatagaaactggtggtgaaggcagtgttagagatgagctacaagaaccaggtttgatggtgaagcagagagaagttaaaggagttgaagcaagttatgcagttaaatgtgctaatactacagtgaagagaaagatggatcaacataaagaggcaatgttgggaaagaaacgaaataggcagactaggtttcttaatttggaagatgttaagcaagcaggtactgttaatacatctacacctaggagacagaactttgcacaggctgtccctacacgctccagtgcagttaatccacctgctgagcatggaggagaaagccaaagccaaagccatcaaaatctaaaatcagttgattttccttctactggcggtatacattcagaatctgctgaacagaagaccgaaagtaatggggaatcatattcaggtttacttggtaaacctaggaggctcaacagggatgaagaaccttctgctgaagggatgggaacatctgtatcaaggcaggcttcttggaagcagccggctaatataccccagcccaagagcggtcattcatcta

SEQ ID NO: 183919 - DNA, 400 bp, Arabidopsis thaliana landsberg
gatttttgagtatttcttgatgcatgagcaacaacaagttctaggaaagccaagcatatccaagctcttggacaattatttagccgagattgcaaacgatccatatcttcccatcacaaagtttcaggttctagcagaaatgttgccggaaaatgcttggaaatgtcatgatggtctctatagagcaattgatatgtttctcaaggtaataaactcttttcttgttatttcatcacaaaactacaactaatgataaaattccctgttgcagactcatccttcattgtcagatcacgatagaagaagattatgcaaaacaatgaactgtgagaaactatcacttgatgcatgcctacacgctgcacaaaatgatcggttgcctctaagaactatcgtccag

SEQ ID NO: 183920 - DNA, 1138 bp, Arabidopsis thaliana landsberg
atgatgattgctgcatctgctaattccttgaatcaggtcattgaaatgttgagaagttcataaatttcgaatccttgttgtgtttatgtagttgatcttgcttgcttatgtttatgtagttgaaaagtttaaaaatttctaatccttggtagttgatctcgcttgtttgttttttcattttctagatttttgagataagcaatgattctaagatgaaaagaacgatgctaaggccattgccttcaggacgtattagtgttccacacgctgttgcatgggctactattgctggtgcttctggtgcttgtttgttggccagcaaggtgaatgtttgtttttttatatgtgatttctttgttttatgaatgggtgattgagagattatggatctaaacttttgcttccacgacaaggttattgcagactaatatgttggctgctggacttgcatctgccaatcttgtactttatgcgtttgtttatactccgttgaagcaacttcaccctatcaatacatgggttggcgctgttgttggtgctatcccacccttgcttgggtaaatttttgttccttttcttctttattttagcagattctgttttgttggatactgcttttaattcaaaatgtagtcatggttcaccaattctatgcttatctattttgtgtgttgtcaggtgggcggcagcgtctggtcagatttcatacaattcgatgattcttccagctgctctttacttttggcagatacctcattttatggcccttgcacatctctgccgcaatgattatgcagctggagggtaagaccatatggtgtcatatgagattagaatgtctccttccatgtagtgttgatcttgaactagttcaatttcgtggaatgatcagagtgtcctagatagtgtcacagcagtcgacattttagtggctagataatgagttctttccgttagagataaacattcgcgaacattgtttccagcttccgcgacccaacttctgattttgtttcttggtaccttgttttcagttacaagatgttgtcactctttgatccgtcagggaagagaatagcagcagtggctctaaggaactgcttttacatgatccctctcggtttcatcgcctatgact

SEQ ID NO: 183921 - DNA, 85 bp, Arabidopsis thaliana landsberg
atgatcaccgtgtttcacgcacttctgtttggtgttgagaattctgtatgtggagtatgtcatcggaaggtggattggacttggg

SEQ ID NO: 183922 - DNA, 373 bp, Arabidopsis thaliana landsberg
atgacgctgcatctccgcagtgcccgctgtcgacgcgcccgctgttgcgcgcgggcttgcctgaggtttccgcgccagggcggcggcgtatatgcggcctatatggcgcgcgccgcccgcaagtctcgaattcctacgtcgcgccgcgttgcaatgtcgccgccgcaagtgcggtgttttcgggagtcggccgatggacaacctcttgtttctcgggctgggtcttgccgggctcgttctgctgctgatctacgcgcgcgttcgcgcacgccgctaggagccgacgatgctcgactacgtgctcggcggcgccgtcgccgccttcctgttcgcctgtctcgtctacgtgctcgcacgtcccgagaagttctag

SEQ ID NO: 183923 - DNA, 168 bp, Arabidopsis thaliana landsberg
atagagaaaattcataaaattggttatgcagctgcagggaccgtattactacaaatgactctgaagacattaattggtaacgccaagtcaggcttaagtgtcaagaagcaagtatcaggaagtgttgcgtatactgctctgcaacagtctactgatagccatctataa

SEQ ID NO: 183924 - DNA, 822 bp, Arabidopsis thaliana landsberg
atggttgggatatggggtccttctggaattggcaagactactattgcaagagcgttatttgctcgactctctcgtcacttccaatgtagtgtgtatattgacagagcctttgtatctaagagtatggcaagttatagtagagccaacccggacgactacaacatgaagttgcatttgcaagaaacgtttctgtctacaattttagggaaacagaatataaagatagatcatttaggtgccttgggagagaggctaaaacaccagaaagttcttttatttattgatgatttagatcaacaagtggtgcttaacgccttggcgggtcaaattcaatggtttggaagtgggagtagaatcattgtggttacaaatgataagcatcttctaatatcccatgggattgaaaacatataccaggtttgtctcccatctaaagaactcgcccttgagatgttatgtcgatatgcttttaggcaaaacactccacctgatggcttcaagaagctggcagttgaagttgtgaggcatgcaggtattcttcctttgggtcttaacgttctaggttcgtatttgcgggggaggaacaaaaggtattggatggatatgctaccgaggcttcgaaaaggtctagatgggaaaatacagaaggctctaagagttggctatgatgggttggataacaaaaaagatgaagctatatttcgtcatatcgcatgtcttttcaattttgagaaagtcaatgacattaggctgctgctagcggatagtgacttgaattttaatattggtcttgaaaacttagtggataagtccctcgttaat

SEQ ID NO: 183925 - DNA, 276 bp, Arabidopsis thaliana landsberg
tgtccactcgaatgcttttttgctacttatcgacgcgtgtggatagcctttgagagtcgattcattcaccgccaccatcactcgagtaggctcgctctccattattgtttcactcgactactctctcgagctctattggttcctaaaagaggaaggcggggaagcaggaatgaactgaataacaactatgtcaggcacaagcagagaggaaagggtattgtgcgcggacggcgcacattagagcacgatatcgtaataaattttgctgccgactaa

SEQ ID NO: 183926 - DNA, 851 bp, Arabidopsis thaliana landsberg
atgtggtcaacttgggaccgactgacggccgtcttaacctccggacccgcgggtttcgaggaagaggacgaccccgacttcagttgggatttctccggactctgtgaccctagtgccatgcgagacttcatgtccgcatgtgatcactgcctctcctgctactctgacgatggccacaaccttgacgacgagggttacgacccaactggcgagtgtttccacatcgatcagggggatcacgacgaagacaaccaccttggcatgccaggaaacgacgacgcccctgtgcctgcgtctcgcgttgagatcccgcggagctagatgtggctcgggatcctgcggggggtcagggcacacagctcgagcaactccgcgagatgtaggccaagcttgacgaagaaacagggcgacttgtgcagctccgacaaaacatcgagcaatagtgggcaggtcgagcactcgctggaggagcctgtcatcgggcccgggacatccagcgccgcatcgtcaacaatgccagggcagcgctgcccccggccgtcagcgggtctggccaggacctagctgtagcggcgatgctacttcgaaccatgccagagccatccaccaccgagggacggcgtatccagggcaaactcaaggatctcttggaaggcgccacagttcgacgagccaagagctccgcctcccggaggcgagctgacccctcaaagcatcacgcgacgtcctcccgacacatgcgggaggcctcggtccatcccgagcgcacgcgggacgaggcacctgctgcctgggaccgcctcggcaacgagcatcgccaccacgatcatcgagcctgcctcgacgagaag

SEQ ID NO: 183927 - DNA, 484 bp, Arabidopsis thaliana landsberg
aattgttaaatttctctttagtgacgaatctttaaagactcctttacttgccgttatccccttcgacgacaagctctcttcgataaaacattatgtttctggcgaaagctcctccgatttggcaacaatgtctgagaactccttcactatcgtcaaagagtctgatttggtccctaatcctcgtttggtcgaggcaaagggctattccaccctatcacctaacgtgggggcgtcaatgcctatcgatacctctggcctgagccacgctgtaccttcgtccataccctctgagcctaccacaatatctaagaattcctctgctgcggtggatacaactctcctgaaaaatcctgctaacactggatcaagctttcccactaattttggtgccactgccactcctcttccggttaacaatcctcctcacacttctgctacccttccatgggcgaagaaatttaaggactcgttgctaaaaccttaa

SEQ ID NO: 183928 - DNA, 370 bp, Arabidopsis thaliana landsberg
atgttgggatcagggttggttgctaaagagaatggcgatgagattgaattttttgtgcaatccgtggtgaaacacaatgaagttgtagctggaagtactcaatacatgccaaccaaaactgagaaggatcaaaccgtgtctaagatggcaaccttaacaaagaaggtaaggattgctgatttgattggagtagttgaggtctgcatttctcttaaagctgcattttcaaggctagtctgtttattaaaagacatggaggttcttgagagacaagaagtagagactagggaatttgctaccctagattggagacaatataaactgatcaaggagtttgatgtggtcatcatggacaagaaaaaggttgcag

SEQ ID NO: 183929 - DNA, 192 bp, Arabidopsis thaliana landsberg
atggctaaacgggagttaagtggaggagatagcagcagcgaagatgaagatcccaagtggagagctgcaatcaattcgatagccaccaccaccgtttacggcgcctccgccacgaaacccgcagctactcagtcacataacaatggagattttcgtctcaaacctaaaaaactaacacatgggcaaatcaag

SEQ ID NO: 183930 - DNA, 1765 bp, Arabidopsis thaliana landsberg
atgcattacttaaagtcaagaaacatcttgaggtaagttattcccttggtctacatattttccattgactatagttaccaacgaaaaagtttaaaattagagatttgttattgtccaggagcaagtacttccacgtacacatcatgaatcgaaagacaaggtgtttacttggattatccttggtgacattctcagaataggaaattttcacctttttctacattgttttcacactatttggctttgttgttgacttgaaggtttcagcaagcgcttctgatggggattgcaaatcctttcaggtgcatgacataaaacataaagataccaagagaaagcgaacaacaaggataaaatgtaaactgttttgcctaatttcattgttgatcctagaaatgcttcgcatccttactctatattgtttcatcttcagcttcagtaagtgccgacgtcaagccaatacctgtgaatgattctaacagtaaagctaaccgtaaaaggtcctaatctgctttatgttttatccatgttttctgtgaaagattttggcagtcatgtaaacctgaattgttattgtttcttttgtagaagagtttctggagtaatagatactactggtattcccgaagagatctgtcagactgaagatgacattgaaaagggggttgtctctcgaggggtaaaccaagatattgacaatgtcgtcaacaagaagtttgttcctgatgcagcaaacccggtaaaagagagtgtgcatcgcaagaggttcttattcagtccaagaagtacattttacatcaatgtctacacgaaagcagtgggaatataagtatatctgatttgtactttttatcttttcttggtcttggttgtttcgttgtaggcaatgtacacgacggcaatctaccagatttgatgttcaagaaactaaacaaacggaaaagttgcttgagatagatgatgccaaagaaagtaaagaaaccgcaaggttattagtgttttttttccctctttccactttaattactgactgcaaactctgaattgacaatagcgtattgtgatgatactttctccgtttcgagcagcttctctttgagaagacggtctgctcggttaaggcacgaagaagctgaaccatgtaaaagcttacatgagggagacgaagtcagggagacaatcaagaggagaaggtttgtaagaggcctgaattacttcatatttacaagtagtatccttttaacagatgttactaaaaatgcgttagaggtcacaaatttcctgtataactgtgcagagtctcttcaagactgtctgcaaggtttgatatacaagaaccgcatgtgactgaaacctcgaatgctgatgatgcaaggtttgttgaatcaaaaatttaaaatttttcttaatcccgtcgactgataacacagaaattgagtttagctaatgccacttgtggtttccctcctggataatatcttcagaagcatagtaatcgaagaatctgctggatcaagatcggaatctgtagaaccatccgaaagcaggcatgaaacaaaagagataacccggaaacgcaggtttgttagtgacagggaatttcctgcatttccgctgatgaaaatcaacttttagttatgtaatgtgactgttatctctgtggtgtacttgccagtttctcaacgagaagacaatcaacaaagggtaaatctcaaaccgatgaagccattaaagaaatagcgacagacccatctttggtcaacac

SEQ ID NO: 183931 - DNA, 274 bp, Arabidopsis thaliana landsberg
atggcggaggacaaaaacaacggacgtgtgaatgacgaaagtgagtactcgtcggaggacgaaggaacagaggattataagaaaggaggataccatacagtaagagtcggtgatacttttaagaatggagcttatgtgattcagagtaaacttggttggggacatttctccactgtttggcttgcttgggatacgcaagaatcggtatgtgacttataccctcttcgttttttaggttagagaaccaattgaggttctaaaaatgattgcttta

SEQ ID NO: 183932 - DNA, 132 bp, Arabidopsis thaliana landsberg
gctcgttttcttctagcaaaactgaatccttgtgatggagatgctcatttttccggccaaagtaatgttttcacggatgatgttagcttgtctgtatttcttgatcatcttagacgactcattgttcattga

SEQ ID NO: 183933 - DNA, 132 bp, Arabidopsis thaliana landsberg
atgctcaaacgggtgggcgaacaaaatccatctccatgtgactatggaagagaacttattaatgagtccaaaaaattttcttacaaacttcatgattcattcacactagacaaattaattgttcgtaagaag

SEQ ID NO: 183934 - DNA, 61 bp, Arabidopsis thaliana landsberg
atattatgttccccgagaaagaaacgcagagtctgagaagaaagagaacgaaaccgaatga

SEQ ID NO: 183935 - DNA, 1427 bp, Arabidopsis thaliana landsberg
atgagggagctctcggagcttaacagagacaaagacggtgatatagaagtgtgggtcaaacactattcatccaagcaccagatacttctcgtaggcgaaggagatttctccttctcttgcagcttagccacttgcttcggctctgcttccaatatctatgcttcctctctcgattcatacggtaacacttggtttacttacattgtaagagttattaaggttttgatttcgttatcacttccatttctgtgatcacttactaagtttttgaacttccggtgaatgatttgattattcaagatttgcactgttttactctctgtttatagattataaacctgttaacaaaggttgcagctttaagctcgatttcctcagttgttgcatgtcttttatggtaattaaaccagatgatgtggttagaaaatacaagaatgcaagatcaaatcttgaaacattgaagagacttggagctttccttttacatggagttgatgctaccacactgcattttcatcctgatcttcgctatagaagattcgatcgtgtcatcttcaacttcccgcacaccggtttccacaggaaagagtctgatccctgtcaaatacagtaagttcaacattttgaaattacaaacactttcttctcgcagttgaatgtgtagaccagctgctgcaactttgaggaatttgtttaaagattttttacatgttgtctgtaggaaaaataggggattggtgtttggattcttccatggtgcaagccatatgctaagagctgatggagaagttcatgtctctcacaaaaacaaagcacctttttgttattggaatctagaggagcttgctagcagatgctttcttgtgttgattcagcttgaggcgttcgagaagagaaactaccctggttatgagaataagagaggagatgggtctagatgtgaccaacctttccttttgggagagtgcagtactttcaagttcagattctctcgtgtcgccaaggaactttatgcagagaaggtgaaggaagtagaatcaaagtgtccccgagagttatcaactcgggcgatgaataagaaacatgcccgttttgaagacagctcgatacatcttgaactgccaagatgcactaaacggttcaaaagagtttctcttgaaatgcataatggagaattacaacgaatggtgatacggacgaggtttcctcatcactacactaaagaatcatcagaaacacgccgcctactttgtcaagactatgcagtacaagctagccaagaaccgttccctgaacgctctctccgattcagaggagtttctcatggaattcataacgggagagtacgaaaaatgttaatagggaacagcactggagaatcaagaaaactaagaatgaggaggcagaggaaccttaaaatcaggtaa

SEQ ID NO: 183936 - DNA, 449 bp, Arabidopsis thaliana landsberg
atggctgtattcagagtcttgcttgcttctcttctcatatcgcttcttgtcctcgacttcgtccatgccgatatggtggtacaattttaacaaccaaatatattttcttatttgattttattttttcacaacttttgtctacgttctaatagattttttcaaaatattcatgcagacgtcgaatgacgcccctaaaatcggtaattacatgatatctctatcatatatatacacgtacgttgaaattctatatacgtgtgtttattaaagttttggttggaaattgtatgtatttgtagattgcaacagcaggtgccaagagcggtgcagtctttcgagtaggccaaatctttgtcacagagcgtgcgggacttgctgcgctaggtgcaactgcgtgccaccgggcacatccggaaactacgacaaatgtccgtgctatggtagcctaa

SEQ ID NO: 183937 - DNA, 45 bp, Arabidopsis thaliana landsberg
atggggaaccaagaatggaaccgggccccacatctgggcttgctg

SEQ ID NO: 183938 - DNA, 79 bp, Arabidopsis thaliana landsberg
gcgttttcaactccatgatgttttcaacttgaacaatgataacagagctgaggacactccaactctcattgatcgaaaa

SEQ ID NO: 183939 - DNA, 142 bp, Arabidopsis thaliana landsberg
atggagagctctgcgcggactgttgttcttaaagaggggaaagaggataagacggaagaaccgaaggagggatctaacgaggagcacaaggaggagcacaagggggagcgaccacaccgactgtgtcgcgagtcagaaccgg

SEQ ID NO: 183940 - DNA, 91 bp, Arabidopsis thaliana landsberg
gtggatccagtcccatagatttgagaaaagaaagctggtttcggaatttcgtcgaacatgtggtaggctacgtcatgtcaaaccaaattaa

SEQ ID NO: 183941 - DNA, 2335 bp, Arabidopsis thaliana landsberg
agaactggatcgtctccggcgaaggaggcgacggttttatctccgtgtctgaggctgttgatctagaatcggtggctgttcacgagattggacatcttctagggttaggccattcctcggtagaaggttcgatcatgtatccaaccatcaggacgggtaggcgtaaagttgatttaacgaccgatgacgtggaaggagtccaatatttgtacggtgcgaatcctaacttcaatggttctagatctccaccaccgttcactcaacaacgagacactggcgattctggtgctcctggtagaagcgacggttctagatcggttttgactaatctacttcagtattatttttggattctatttggattatttttgtatttagtgtagatgattggattagttcattaatttatcacagattattaagacacggtttggattatttttcctagattggttcttcattcatgcatagtttctctttttgaacataatagtatacttttttttttgttactaattaattttgagatgaaatttatgagttcaaagtataaagttcaaactaactttttaagagtaaagttcaaattattttatttaaactcaaattcaataacaattttaaatggaaatcactattgatggggaccattataactagaaataatgattacaatttgaccctggtaaagggaatttaacataactttggaagcatcgggtttgatctctcaactcaaaacacacataactttataataagccaaaactgattataagggaaatataataattacaaaaaggtaagttaggaacacaaagatatgttaattaattacaaacacatcatcacactatcacagtaacgacacatgggtcaatcagttcccccaccctacactaccctaaactttaattttcttttaattatcttttacctttctatataattctccattaaactccccagatcttccctacctcgggatacgaaaactcatcttataaagcaaagcatatccacgattattcccgacaacaacaaaacaaacaaaacataaaactctctctagcttggtcaagaacaatggggttgcttccgtgttcttgtcctctgccttgcaatgaaacaatatcagaatctgaaacgaaatcgacgcatcaccaatcagaaatctcaacgtcatcatcgcttttgtctcagccaagtctcccattggttccttcgctgtcttttcagcatcagagctccagcgtcgatcaccattgcttagccacgctcaaagataaatcctcgtacgtatcttctctcgctgtctcagataaattactctacactggctcttccaacagtgagatacgtgtatggcctcgtgaacctccgttctcaccggaatattccactcggcgatgaccgtaacgtacttgccaacggaaaccgaggggttaaatcgttggtgattcttggcgacaagctaataagtgctcatcaagatcacaagattcgtgtatggaagatcatcgacgagagcaatcgcagaggtcagaagtacaagtgcgtagctactcttccgacgatgaccgaccgcttcaagactctctttagtagcaaaagctacgtggaagtccgacggcacaagaagtgcacgtgggttcaccatgtggacgccgtgtcatcactagccttgtcgcaagatggctctctgctttactctgcttcgtgggaccgcagtttcaagatatggagagcatctgattgcaaatgcttggactctatcgaaaaggctcgcgatgatgctattaacgccatcgtagtgtccaaatacggttttgtgtacacgggttcgccagataagaagatcaaagtgtggaacaagaagcacaagaatcactctctggtcgctacactgactaaacatctctcggcagtgaacgcgttggctattagtgaagacgggaaggttctttactccggtgcgtgtgatagatcgattcttgtgtgggagagattgagtaatggagatgatgaggagttacatatgtctgtagtgggagctttcaggggacacaggaaggcgattatgtgttcagcagttgcgtctgatttggtgttgagtgggtcagcggataagagcttgagagtttggaggagaggattcatgcagaaagagggttattcttgtttggcggttctgcaagtacataccaagcctgttaagtctttggctgtttcagtttatgattccgattctgattctgattattcttgtatggtttatagtgggagtcttgatctttctcttaaagtttggaacttaagggtttcatctatctaa

SEQ ID NO: 183942 - DNA, 252 bp, Arabidopsis thaliana landsberg
tcaaacgtattggacgatcttcttgtatgactacagatttgaagcttggaattgttatcactttcttcagaacattagcagatttgttctatgttttgcacattgtgatcaaattcagaacagcttatgtttctcgtacttctagagtgtttggtcgtggacgaacttgtgaaagatcctaagttgattgctagaagatacttgagatcagatttcatcgttgatctcatcgcttgtttgcctcttcctcag

SEQ ID NO: 183943 - DNA, 155 bp, Arabidopsis thaliana landsberg
gcatgaagaagaagacaatgagaaaatccaaaagacctgcacaaataacatttgttgcttttaaggaaatagtagttgaagtaaaacaggctaaagagtatggactttacgaaagcataagatcaagacaaacactgaggaagctttttgcatga

SEQ ID NO: 183944 - DNA, 108 bp, Arabidopsis thaliana landsberg
atggagaacacattgatgagcgttcaaggagacttggccctggtgaccggcgccagccgtggcatcggtcgcgcgattgcgatgcgtcttgcgcaggacggcgccaag

SEQ ID NO: 183945 - DNA, 469 bp, Arabidopsis thaliana landsberg
ctgcagagcagcagattcaatatggcaactctgcaacacaaattcaaacatctcagcaagcagccaagtctccaagaacatcgattctcttctcgcgacgcttgtctcaaagactccttcaaaaggtttcatgaccacaacttcctcaagttacaacaacaaagagaaagtgtatggacttgctcaatgtagaggagatatcagcaataccgattgctgcacgtgtatccaagacgcggccaagaaaatccgtgaagtgtgtccgaaccaatccgactcaaggatcttgtacgatttctgcttcttacgttatagccaagagaatttcatagggaagcttgacacgggggctggtcttatatacttcaacgtcgctaacgtaaccgaaaccgaccccaaaaagttcgataatgagctcggggcactctttgacaaaattaggtctgaggctgttttacctaaacagtaa

SEQ ID NO: 183946 - DNA, 59 bp, Arabidopsis thaliana landsberg
cgaagataacggtggtggttccggcgacggcggcgatggtgattccggcgacggcggcg

SEQ ID NO: 183947 - DNA, 244 bp, Arabidopsis thaliana landsberg
atgtatagatccgcgagctggaaccgagtgccagaagactactcatccgcaccgcctaagggattgtggatgggctcggtgatcggtcccctcgacgagaacgaactaccttcctacaataatccaccagaggagatggttaagaaggagaagtcacgtgccaaattcgcagaaaacgccattcacatcataccatttgttctccttgcatgcgctctcgtactttggctcttctcaaatccag

SEQ ID NO: 183948 - DNA, 1013 bp, Arabidopsis thaliana landsberg
  unsure (1)..(1013): unsure at all n locations
atgagaatagttgtctatggttttcgacctggtaccaagcaggtgaaacttttgattttttttcatcttatgctaatttctgcatttctccttgaaacctatatgattctgttggcatacttttgcagagacatactgtagttgatacgctattgaggtgtaacaaaccagagagagtatgggatctttatgcttttacatgcggaccttcccaattcggtaacacaaacccaaaggaaagattgcttaatgaatattttcgccttctcggaaaaagttcacaacgagcgtcaatgaatatgattgaggacggttcattcactctatccaatgatctttggcgtataactaacttaaactcaaattatgacttgtgccagagttatccgtttgctttgatggttccaaaatccattaggtaggacgttgattccttgtacaggaatgaaaacataatttggtatctatcaaagattgagaattgaaaactgcacacaaagattctctttagctacttggcaaccactgtttcttttttggtttcaactttttgagaagtatagacatacaataacattacaaatgtttgttgtcagtgatgaagagctgctccagacttctactttccgggcaagatgtcgcttacctgtgatctcgtggtgtcatccaggtagatatgcagtggttgtggtacttctgtttgaactttgctggcatagttccacatttacatgttccttttttttatctcaattgcaggaagtggagctgtgattgctcgctcatcacaacctttagttggtctgatgatgaacatgaggaggtttntagaagttttaattttatgaccagacttgtgcatgataatttagttgcttatttggattctcaaagtgcttaaaatgatggattctgaagttttgatatatttcacccattttctacagtaactctgatgagaaacttgttgcttcattctgcactcaatttgctggtcataagggagcacgaag

SEQ ID NO: 183949 - DNA, 232 bp, Arabidopsis thaliana landsberg
atgggtacgtccgtgtctaagccggtttctgatgataagaaaaatggtacgtcagtgtctaagccggttaaaaacattgttctagtggggcgttctgtcaatggaatatgcaccactgggaacaatattctcggtcaaaacaagttcggctccgaaggtgctttcatgcactgtcagatgtatagtaccacgacaccagatggtcaaatgatcaatgtaattaaaactcctg

SEQ ID NO: 183950 - DNA, 719 bp, Arabidopsis thaliana landsberg
atggttcttgttcttctcccccgtctcagtctttctgatacttcgacgtacacccgtcctgagaatttttacgtcaactgtggatcggattctaatgtattttatggtggccagaccttcgtcggagataccaactcgagtactaactcagtttccttcaccaacaaaggaactgaagtcatcaacgaccaatcgtccgttgcgcctgaaatataccggacggttaggatatttagacacccttcttcttacaagttcaaacttgattctctgggtctgcactttgtgcgtctccatttctctgttgtgttttctcgggcagatcttttaactgctcggttcactgtctctgctacctctggttctaatcatcacttgaaaagtttctcgcctcagaatctcactaataccccacgagttgaagagtttctcctgatgatgaactcgctggagttcgaaattcgatttgtgcccgatcattcctctttagctctcatcaatgccatcgaagtgttctctgctcctgatgacctcgaaatcccatcaggttccgataagaatctgcatacgatttacagattaaacgtaggaggcgagaaaatcacaccggataatgataccttgggacgaacttggctgcctgacgatgatgactttctctaccgaaaagattcaacgaggaacattaattcaacacaaacgcctaactacgtgggagg

SEQ ID NO: 183951 - DNA, 89 bp, Arabidopsis thaliana landsberg
atgtcgtttggttcgaaacaggcaattgcttatgtcggaggagttctgtttctcgtgtttgctgctgtgacggtggctgagatcgttac

SEQ ID NO: 183952 - DNA, 126 bp, Arabidopsis thaliana landsberg
ttgtatgttgagcatgccatctcattttcgccgcagttctttctgattgatataagcgtttcaatctatcagttattgacaagtaccacatccgtttatatggcactcgcgtgcttccgccagtag

SEQ ID NO: 183953 - DNA, 320 bp, Arabidopsis thaliana landsberg
atggccacgcaacaagctgttgcgacgtatctgtttgaaaaccgaggcgtgagacccgctggccgctgcaagctgccctgtctgtctctggctgttccctttactggccccatcctcccgggccgcgagatcgagattcgacggcgcacgcgaatctttgcctgcccaccacctcttgtcctcttgttacttttccttgttccatttactttcagcgtgcgcgctctatctgcctagctgcctaccctcccgagatctccttgcttgttacgtgccttcctcccttctatcttggcgacgtatacgctcaccagcgtcag

SEQ ID NO: 183954 - DNA, 731 bp, Arabidopsis thaliana landsberg
atggccaatcctctcttacctcagcgtttgtttcttgaaggtgtcgaacccaacagtgaaagagttcaatcttatagtgagctacccttgattgacctaatccctaacagtttggatgctgaagacatagaatttcttcgaaattcccagtttggtaaactatttgaaattccggagggaccaggatattctgggaagctcatacatttcttgttgtctagacaacttgtggttaagaaagaaaatgaattctgggtggtatttgttggctcccctatccgcttctgagtttcagagtttcaaagaatgacaaggtcaaactgcaacaaacccccaaaggcgaaagcgaggaagagcaaacgcaaactccttcctggaaagtattggtactcgttatttgatcaagctgacgtgtctgttaagtgggtggttagtcgactgaagaagcgtttggtcccagaaaaagacattcgtctccgctacactattcttgctctcattgatggcgtgttgtgtccaacgtctggcaaacccaaatttattctattcacgcagatatgtcagagaatatagaaaactttatcaatcacccatggggcactacatctttccaattgactctgaagagcatcaaagccaggggaccaaataagttaaagcggaagtccgtgaccgtccaaggatttcctcatgacccaacttctattgttgcactatgtcccagttattag

SEQ ID NO: 183955 - DNA, 162 bp, Arabidopsis thaliana landsberg
atggccaatcggagcgtgccaaccagacgttagaaataatgcttcgagcctttgtcaaccaacaacagaacaattgggacacactccttccagctttggaatttgcttataataactcggtcaatccttccacaggattcacgcccttctacttagctggag

SEQ ID NO: 183956 - DNA, 571 bp, Arabidopsis thaliana landsberg
ttgcctccatgaggtattgaaggaaggcactgatgtgtgtttgatagaccagattgcatcagttcatcactgtcccaaaactattgtgcttggatttagcaagggtggagttgtgatgaaccagctcatgagtgagatcagttccttggataccaactttgcgaaaacttcaatggtagaagaatctaccagccagcatgaaaagattcagatcattccagcctccaaagaaagcttcctcaacagcatttctgaagttcattatatagatgtaggactgaactcttctggtgcctacattactgatcacaatgtcgtgcagagaatctcccaacgccttgcacgaggtgcagactcgctacgcattgtcattcatggaactcctaggcagtggtgtgatgagctgcgaggctggattcgcaaggaaaaagatgagttggttcgtttgctcaaagctgaaactgagaattccggtgggaaactacaggtctgtgaaaggttctatttttctgatagacttgctgatttgcaaatgcactttgagataattgatgctatggatgtctcctaa

SEQ ID NO: 183957 - DNA, 398 bp, Arabidopsis thaliana landsberg
atgtatgaagtggtggagagggccgctgtgtttggcttcagtgtctgcacactggaaacgctgcataattgtgtgaccatgatccgttttttccagagcctgctcgcagaaaacaatgcgtatgatgtatcgatgcaggtaggcaaacacaccagcctagtaaaagaactcttcagcgacaagaccaccgtaggactggcacgttatgagaatatacaggaactgctgaactccatcaaggagtggacagaaagcccgttcaacgaatatggagaagtaggtgataaggacctgggaagttacctgcaacagatgacgctgcttacagatgcggatgaagacaaagagaacagcgatgcctggaaactcatgaccatacatggcgtcgaaggactcga

SEQ ID NO: 183958 - DNA, 377 bp, Arabidopsis thaliana landsberg
atgcagttcgcaaagcatctggattcatcttcgtcgaagttaatatacattgttcagaaggaggaaagtttcaaaaaaataatggctatccttaagctcaagggtatctctgtatcatccagtagtgattcaaaactctcagaggtcaaaaagaggtaagagtttctcaacttgggtgtattattatgaaagaccatagctttcttcatacttacgatttgttctcttttttcgttttggcttttgtttcagccggaaacctgtggcgcacatgattgattttgaacagttggatactacagttatgagggactctgaaacagttctacttccagactttttcccatcaatcgaaatttacactcagattctgacaa

SEQ ID NO: 183959 - DNA, 536 bp, Arabidopsis thaliana landsberg
atgctattggagtcagcagagctgcaacagtttcagaaccattcgtctcaaatggctgctctagatttcatggtatctgtggccagcaacacttttattcctacgtatgatggaaacatggcaaaagtcgtggaaggtcatcgtaggtaaattatttgtggtgtcgaatgcattcaatttcatgacaactaaaaaggtggtgttaagaataaccaaacctgtgattctatataaccattattggtctatatctgatttgaatttgcagataccttggatataagaagacaatcctgcttgaccgtaagagactcgtggagctactagacttacatcacaacaagaccctcacgtgggatcagtttacagtagcagtcaaggaagcccatgagagacgagcaggagcacctactcatcgaagagtaatctctgacaaacctaaggaggaagattacttctacgcaaatcctcaagaatgtctttgtgaaggtacaaattgccacgacctgtttggccatagaaatttaacacattga

SEQ ID NO: 183960 - DNA, 873 bp, Arabidopsis thaliana landsberg
gtcgaaaatttcgatttggaaaattatcaaaccaaccagtgataatcgtgatgtcgggattaggaatggtacgttttctatatgtggaaagagtattatgtcttatcatcaaatacaaagttttttctcatatatgtgtactttaatttagggtttattaatataataataatgcataaaaacaggtgaatgcaggagtaacaacacaattactggtgagcctctttaggctgaaaggagttttgcattatggaatcgctggaaacgcagatgttaaccttgagattggcgacgtcactattcctcaatattgggcacactctggcctttggaattggcaggtataagtaacgtaggcttggttattgacttttaccaattgcaaccaattatgttaaggtttttatattaatatagatttctagaaatcaaaacaattatgatatttatatgagtatatgtttatataattgttaacgcttaaacttgtggccaggatcttaagatactatgaacaggtttagttttatcatatagtatcgtgagatctgtccaaatcgatgctttgcacatgttcaaaatatactatatatgataataacaatttaatgttagtggtacacctggttattgtcaaacataatattgatagtttcacacatatcattcaataatgacttttcaatattatcttaaatgtaaaggtatggagatggaattccccactaatctagctcttgaatccggcgtaattctatactcggacaagttggttatctccagttttccaaatatagtaaccgaaccgataacttgctcaatccagtttggtatcaaccggaagaaatcttaaaagaaaaccggaactcctga

SEQ ID NO: 183961 - DNA, 377 bp, Arabidopsis thaliana landsberg
agaaccgctacctgcgaggcttgatgtcgcagccattgtgccgcgacgggtatgtctatctcctcgacaaacaatacggcctcacctgttttgaactgaagaccgggcggaagctgtgggatgacagaaaccagatgacgccgcgcggccgcaatccgcatgcgtcgctggtctggctcggtgagacggatcgcgccatcatcctgaatgaagaaggggaactgatcctggcgcggttgacccccgaggggtatcacgagcaaagccggacgaaaatcacagagttcacgtgggctcatccggccttcgccgggcagcgggtgttcgcgaggacagacaaagagctggtctgcgtcgccctggatgaatcgccatga

SEQ ID NO: 183962 - DNA, 59 bp, Arabidopsis thaliana landsberg
cttatccaattcgcttgttctttatcatccgttcaaccatttataccgtatacgactag

SEQ ID NO: 183963 - DNA, 1368 bp, Arabidopsis thaliana landsberg
agtgcagtccacaagaagggcagtgaggtcaatctgacccttgggggaattgatctcaacaattcaggcaggttggcttattgtttgaatcattaaaatctttttatattttataatctggttcggtgttactaacgtcagataacttcgaacttttttttagtgtggttgttaaggcggacaagaagctgttgactgttctctttcccgatggtcgtgatggacgggcctttacacttaaggtttttctcaaaattttagttttctgttgttactctacttaatctggtttttatcaggtgcatccacctcatcctccatcttaatctacgctctgaacatttcttatgattttgtgactttattttttttgcaggctgacactatggaggatctacacgagtggaaagctgctctggaaaacgctctgacacaagcacctagtgcttcccatgttatgggtcaaaatggtattttcaggaatgatcatgcagatcctgctgttggtgttgatgaaaagagtatgtttgtcaccttttcaatggtttagtctttacatgtataacaatatatgtcttgagtggtgtgagaatgtcaaagtttcgtcttctctagaaaataagctacagaataatattatcatgttaacatatgttcccttcctctggagtataagctgaccagttagtgttgaatggctcataagaatatgggcattccttatatagtcggtgacatctcaagacttgattcgctttcaattcattagacaatgatgcattttttttatattcttacagaagatgagacaccaacaaaatcaactgtccttggaagaccagtattacttgctctagaagatgttgatggagctccatctttcttggaaaaggcccttagatttgttgaaaatcatggtattagtttcaggttttttcagcttcttttgctgctttgttttactcactctgagctgataaagacaacaaaatcttgcaggagtcaggatagaaggaatcttgagacaagctgctgatgttgatgatgttgaacaccgaattcgcgaatatgagaaaggtttgagttcttatgtttatgtatttattattcttttcttgatttcctggtttgtgcaaagtatttatacgtagtcacttggttcaggaaaaaatgagttcagtcccgaggaggatgctcatattattgctgattgccttaaggtacctggtactgttcactagaatgctgagttagcctttcactcttaaacctatctaactgtatccataaatgcgcagtattttctcagagagttgccttcctctccagtgcctgcatcttgttgcaacgcccgtctggaagcttgcc

SEQ ID NO: 183964 - DNA, 227 bp, Arabidopsis thaliana landsberg
ttccacactttatggatcaaagcaacaccaatatcatcgatggctcgatgtgtttccatgaaggcaatgttcaagaattcggaggatatgttcctggcatggaggattacatggtaaactcggacatctcaatggaatgtcacgtggcggatggttattcagcgtacgaggatgttacacaagatcccatgtggaatgtggatgacatttggcagtttagggagtaa

SEQ ID NO: 183965 - DNA, 491 bp, Arabidopsis thaliana landsberg
atggcagctctctcaatcttgctgtgttgcatcttctattctcccgtaagttgcttccagttcttgagaataaaattgatccttctttaccagaagtactattttattatctctacaagaagtttgtgttaccgatgaatatgccatgttaatcatctagtgttttcattttgtttctattttttctatacactaagttcctctgtgatggagatcgagtttaataaaccatatgctgccgtgtatattcatatgtgttgtttttctttgtatggatttcggatctccggtatagaatttcagggagaaaaatgatatgctttctaatatttgagaactgacgtgtacttgttttgtttgaatagagcttcattgttgcatggatcaagggaggtactcgagcaggtaatagtctttcagtaaagcgcattacaccctatggatgtaacctggaatcttttgctatcattcaatgtgcctcctttttctga

SEQ ID NO: 183966 - DNA, 397 bp, Arabidopsis thaliana landsberg
acgcaatctccctctatatatccatttctccaagcgaaagcaaaaaaacattaagccaagagccgcatatacgaaccaagaacacatcatcgttagttctaattatgaagaaggatacatgcaaggaaggatcatcaatctcgagaaactcatcggtgggatactatgatgaacggatgccagagggtgttccgttcgagtgggagatgcagccagggactcccattaatactcaaccacgggaggttgttcctccattaagtcctcctccagctatgctcagcctcggcctccccaagccatccatctccatcgaagagccaaagaactttgtgtttccaacgaagctgaagctgcggaattggaaacatcttcattgcaagagatatttttctag

SEQ ID NO: 183967 - DNA, 705 bp, Arabidopsis thaliana landsberg
caaagctattacttgcttagcatattgcgcagacggaaaccttttgatatctggatcagaagatggtgtggtttgtgtttgggatcccaaatcacttcgccatgttcgtactctcatccatgcaaaaggtatatttgctagcactttcttctgtttgagttttacttctacaaaatgaataagtcaatttaacaaccctttcttgcttttcaaacttttttcttacaggttctagaaaaggtcctgtgaacaatattcaaattgttagaaaaacgattgttgctaattccaacaaaacccaagtttcctggaaaagtcgtggggctttaatcccaccgcctttggaaaaatatggaagaccagtagaagatactatggatggtatcgttacggttgatccgccgccattttctgatgttcctgtttactcttctttcctcagtgctgaccttattgacgagcaagttaaagaacttcaggtttgtgtttcctcactgtctacagtaaacagttttggtaaaaatgactcaaaacataatattttctcggtttgtttgttgtttcagcaacaaggctctgcagcaacagagatggaaatggaaagactgaaacttgaatacaaaagatctttacagatgaatgaacaatggcagaagaactatgagaatttgcttcaagtggttatggaagaagaacaaatcggtg

SEQ ID NO: 183968 - DNA, 61 bp, Arabidopsis thaliana landsberg
atgaaagaggagagtaaaaatgtgcagatagatgcggaaacaacacacgacaaacttgtag

SEQ ID NO: 183969 - DNA, 288 bp, Arabidopsis thaliana landsberg
  unsure (1)..(288): unsure at all n locations
atggctgcttctagattgtgttccgcggcggcgatagctgctgccttcacttcaatgtcaatgtctcagaaccgtgcttacgccgattcttctcgattccggtttcctttcttttcttcttctccttctcctcctnnnnnnnnnnnnnnnnnnnnnnnntcttctacaaactctagtaagtctaaagcagagcctgatgagcctaaaggatcgggttttgatcctgaggctcttgagagagctgctaaagctcttagagatatcaatagctctccccattccaaacag

SEQ ID NO: 183970 - DNA, 340 bp, Arabidopsis thaliana landsberg
catggtctctttcccatgcaccttcccagcggttagatgagggcacaagtgatgaagatcagttctataaaagaacaaggtatatatatttatcatcccaaaaaaaatcggatttcttttctttatcgggttttggtcttttgaattttgcagcctaagggaaggagatgcttacaaatataacacattaccgcaacacaatctcatgcagtctcctacactctatccgcagcaaccacctgaccgttacaattacgctattccgagattctctctttccagtgtagaggaaaccagcaatggtaatggcaggtctaagcggatggatattaacgtctga

SEQ ID NO: 183971 - DNA, 115 bp, Arabidopsis thaliana landsberg
gtgctgctgtgagtttccaatttcgaagaagaaagacgagaaatttcaaaaggatgaaaagggaaggagagaaattcgaagaaggggaggtgaagaagaagaatcggaggaatga

SEQ ID NO: 183972 - DNA, 375 bp, Arabidopsis thaliana landsberg
gtcactgactttgctaaatacagagctttggccgattcaatcattgagttaattcctgatgagaaacgtaacgtttcttcgagtttcttgactaagttgttacgagcttcgatctttcttggttgtgatgaagtagccgggttaaagaacagagttggtgagcggttagatgaggcgaatttgggcgatgttttgctctatgatgttgagttgatgcagagcttatttgaggttatcttgaaatcccgagacccgagagaggatgatgtaaccgcaaaagcatcagttgcgaaacttgttgatggttatttagctgagaaatcgagagattccgataatttgcctcttcagaagttcctctcacttgcagaaatg

SEQ ID NO: 183973 - DNA, 1020 bp, Arabidopsis thaliana landsberg
cttcttggctgggcacttcttctgtcgatcaacagaaacagaaagtggcaagaaaaagaaaggtagtggatatgtgttgtttcataaggtagttttacctggatacgctaagttacttagtccctgatcttaattttctttagatttctgagctgatggatcataccagtcaggattgcattcaagagaatgctactgtgatgaaacatggtattggaaagggtttgatgactgtatggcgtgtaatgaatccaaacaggagggatgtatctccttgcgttgatttattggatgaaagagctacattacctcaaagctcagcacgtaatcccccacatcaaaagaaaaagcaaagacaattagcatcaatactggtattggttgcctactttatctttcataattatgattcattttctttctgttgcctttttctcttaaatctcttgctaactgcaattttcatttttcagaagcagaaactgttgcagaagaggtcgacagaaaagaagaggcgttctatacatagagaggtagcttgatctttatttggcacttgtgattcattatagtcacatgcaaacaaagacttgactctttgctgcaggcggaattaaacaaagatgaaactcagagagaatttaaagaaaactgtgagcttgccgcggacggggaggtatttaaagaaacctgccagacaatttcgacactagtggatgacgaggaattagagatgcgtgagcgacatgagcgaggaaatccgttgacatgttcatgccatcatcctagtagtggatctcatggttgttttctttgcaaaggtatgtaagtcagtcttacatgaaagagttttcgttcatgttcttctgttacatgtccagtgtcatgcggtcctctgacagttctttattgtttccagatttattgcccaagtttcccccaaactctgttcagatgaggatgccttttggtttgcatccatggaattcttctccagagtctgttaagaaactgtttaag

SEQ ID NO: 183974 - DNA, 353 bp, Arabidopsis thaliana landsberg
atggtggtcactgagcaagactcagaccacaacggctccacactaatggagaggctattagaatcactctacacctacgcagcattgtttgattgcttggaaacaaaagttccaagaacgtctcaagataggatcaaagtggagaagatgctcttcggggaggagatcaagaacatcatatcctgcgagggatttgagagaagagaaagacacgagaagcttgagaaatggagccagaggatcgatttggctggttttgggaatgttcctcttagctattatgcgatgttgcaggctaggagattgcttcaagggtgcggttttgatgggtatagaatcaaggaagagagcgg

SEQ ID NO: 183975 - DNA, 732 bp, Arabidopsis thaliana landsberg
gaacattgagcacgaggagttgtttcgtcgagctctttgtttcatgcataaaccaatctcacgtcgtgatctcaacagcctcaacgttgtatgtcaacaagctctccgccatagaatgaacggtaataatatccattgatacatacgaatattatgtgacaaataataataaacatcctccttattcttgcactaatgtaaacttatcttgtttttatatattatccgattttatataggagaaaccaatttaaatggttcgggacaaaatgtgaccgacgatccagatgattggctacggcttcgagaaaagcctaagctcaaatggacaaaacctcttcagcatagattcatgagcgctcttaaaagccttggtgtcgctagtaagtattaaagttctcttctcttactactacaacaattaaaggaacatactatcagttttttagtgtctacaaaagtattgatgctagttaaaattatctaataacaatatgcaataattatatgattaaacatcaattacgatagatgatatcgttattgcattgtttaacaccaaaaagtagaatattattgaagtctatagtgtagatcgattttgattttttttgtttgttgatattactcgatcgataaatctttggctgattcttgtagtgtttgtgttcatttcaaatataccttacttgcaaaagatacctgtctctattctttttaggttgtatgtaa

SEQ ID NO: 183976 - DNA, 477 bp, Arabidopsis thaliana landsberg
atggttttaatctctgaaacttccgacgacggctctactggcggcgatcatcaaatcaagaaacctaaaaaagaagaggatcgaaacaagaaattgaaagaaaaggttcaggtgtcgctaccaattccagaagaactcatcttacgttgcttcctactcgttcggagatgtcaccacccgtcgctttccctcgtctgcagatccttccatagtctcatgtcgaagctctacgatgatcgcttgcgtctcggctacaccgaaaacgttctttacgcctacgttggattccctcctgttgaaaaccctagctggtacattctccatcgtaaaccctatcgaaacttgcctaacacgatttcgttgaaattgtgcaaaatcgattccctccctcccatgccttggggatctactgtcgtcactatcggatcggatatctatgtcattggtggacgcgtcggcgagaaacttttagaagat

SEQ ID NO: 183977 - DNA, 98 bp, Arabidopsis thaliana landsberg
aaataggataaagttctgggccgaatttggaattcttcaaaacatcaataagttgcgtctagaaattgccgtcagattgttggtgtcgctcgacacca

SEQ ID NO: 183978 - DNA, 777 bp, Arabidopsis thaliana landsberg
atgctgggggagactgctggcgcggctgccgccttgagcccacctaatgtgttgtcggcaccggcaccagcttctgtcgaggctgttgccgttctgcccgtggagccacccgtcgccgctgatgctgagatggttgaggtgccgctgctcgaggtcggtgatcggaagcccgcctccttagccgagggggtacccgatgcgtcgactgcagggggtcccgacgccttggaggaggggggtgcagaaccgcggcccgtcttggggagcggcgacctcatccccgcgcggcgcgtcccaatgagcggcgccgcaggcgatccggttctggacccatggcgccccaaaacccctcttcgtccttgacgatgagcgggaggagcagccttgggatgagctccgtgagtatgccgaggcagcgatggggtcgcttcggtcgaccatggagatcttttccagggacgttcccaggatcctccaggtaaggatttcaagcataacctttcaatcgagtaaggcattcttttatgacgccccgcttcccttcctcaggatctaacggatctgagcaccttcaaagtcgtcgttcattcgccgcgatgccgacgtctggggttcgctgtggttcctgaggaccacgcttgccgaggctaccgagcgcctctcccaacgaagcgccgaggcggtggacttcggtttctctgtgacgagatgggggcagaggcagcggcggcgcggcagaggcgcagcggcggcagttggagcttggccaggtcattg

SEQ ID NO: 183979 - DNA, 300 bp, Arabidopsis thaliana landsberg
ggcgcgagaaggagaatcaccagatcgtgtgtacccgtcctatggtgggaccacctcgcactcggaatatttaaatcgtttctcgacaacgagctcagggaaggtgtttttcggaccttcggcattccgaagcctaaaagaatttttcacgggtcgagctcgttacgaaaaacgatctggcaccgtgaaggggctactgttgggggtctgcttcgtcgctgaaggtcctgtgagaagaagcaccttcggaaggccagaacaggaacaatgccgaagctaccaatcagggagcttcgtaac

SEQ ID NO: 183980 - DNA, 651 bp, Arabidopsis thaliana landsberg
gccgtatgttggtcagcacatagctgatgatctgcaaagaaggcttgatcttctgaaaccaaaattacctaatggtgagtgtcctcccgggtttctcggatttgcagtgaatatgatacagatcgatccagcttacttgctctgtgtcacatcatatggatatggtcttcgtgagaccttgttctacaatctattctctcgccttcaagtttacaaaacaagggccgatatgattagtgccctcccatgcataagtgatggtgcggtatctttggatggaggaatcatcaggaaaacggggatcttcaatcttggaaaccggtaagattctcacaattttataacctctgaacttatttccctctttggattcttccatttccttcttgctcttatccgctgtcctgaactgaaatcaatatgattttcagtgatgaggtgaacgtgagatttgcaaagccaactgcttctcgcacgatggacaactatagtgaggcggagaagaaaatgaaagagctgaaatggaaaaaggagaaaacgctggaggacattaagcgggagcaagtgctccgtgagcatgccgtcttcaactttggcaagaagaaagaagaatttgttcgatgcttggctcagagttcatgcactaatcag

SEQ ID NO: 183981 - DNA, 61 bp, Arabidopsis thaliana landsberg
tcatcacaatgtggatgcaaaactgcgtcaagttggacttcgaggacgcgtgtcattttaa

SEQ ID NO: 183982 - DNA, 65 bp, Arabidopsis thaliana landsberg
atggccgccttggcgtcttcgatgccggcgtcggccaacgcgccgagggatttgcctgtcgccgg

SEQ ID NO: 183983 - DNA, 614 bp, Arabidopsis thaliana landsberg
gagattgttaatatggtgctggcatcacaagtgtatcaaccatcacaggtgtttcaaccatctcaacatggtaagtattgattcaacgaatcttcaatattttaggaaatttttcaaaaacaaaaaaacagatatgaaaatattcataaaagtgctctgatttaatgatatgtaggggttcacaatgagcttcttaatcataataagcaatggttcaaccagatttatgcaaatctcacattcttaaacgtaagtatatattgaccaaaatttcgatctcttgagacaccaaaatcgctaaagaaaacttagtttacttaatttcctttgtgtttctttcttatacagctcacagacaacttagaccttttcagaaaaatccgggagaacatcaaaagccttctcaaagagtaagtaacataatcatcatttctgtaaaatgtcatcatgtataaaatcaagttatatcataattttatttttgatattacagtttgaatgagaatgtgtcggagacatggaagaatatgccatcatcattgccggagaagttgaacgatgaactatttcttggcctagataaagcaatcccatctacatcaaatctaccatga

SEQ ID NO: 183984 - DNA, 217 bp, Arabidopsis thaliana landsberg
atgaatcctggtcgtctgccccaagaagaggcttattctttttgtgaaacgcattctagaaaacgaaatgagcgaagaggcatggttctcaacctcgccgccttcaccgttcacttctcgttctccggtaaaggaagttactttctgcttctctcagttcccaattcaactgggttctctcctatacacagatttttggtcagacaagatcgattga

SEQ ID NO: 183985 - DNA, 172 bp, Arabidopsis thaliana landsberg
atggagaagaagcttatgatcttgttatgcatcatcttcttggtggaggtgttttcaattcttgggggagttgactgcagagcattgcgaacagagcaaacgaccggctgtgatcaaacgaccgccaccgtagagagtggtggttttggcgttttctcgggggcggcgaacg

SEQ ID NO: 183986 - DNA, 336 bp, Arabidopsis thaliana landsberg
atgctttcaacgaacacgcccatcaacctagagacagggtacattcgtcatacccttggccggttcaacagcgactccatcaagaggtgcaagaacatcttgtacgttgtattctcgaatacacacaaaactaggaggtaaaacccacgctgttgaaggctctcaaatctttgcacccgctcgtccagtctaccgcagggtcgatgcccatgcgaactacacctgtacactgggcagctagcggatcatgcttcaacaagccgccatcaacctagcgtggatcatcccatggacattcgtatttggcgcaagagactataccgccccaacggctag

SEQ ID NO: 183987 - DNA, 60 bp, Arabidopsis thaliana landsberg
atgacgtccatagcgggcaacgaacaatgtaatcggtgcaaccagaccaatttcctactg

SEQ ID NO: 183988 - DNA, 1819 bp, Arabidopsis thaliana landsberg
atggatttacttaataacatttcagaaaatgtggagacaaatattggtttcgctgacgaaaatgtcgaattaatattttcacatgaagatactcttattgaatgtggagaaatagaacaaacagtttcctctgttccgcagccgaaaaagagaggcacaccatttggaaaacaacaaagtaaaaaggcagtagagaaaggtacaaaaatgggtaaattttataactaaaatcagcttatagctttctttagtatcattgtagttggttttcttatggttaacttctacatgggatcaaagctaagaaattttatactttattcgttctatttttctaaataatagtgtctccaaacaatcttgttttagagctaaaaaagagatgccgtcctaagaacttggccgaaggagattcggcacgttggctttcctacatttgttgttgaatcatatgagtcaacaagatctgaatcattcccaacttctgttgagtctccggcacactttgaatattacgaccttccccatttccttcattaacttctcttggcagcgacagatttgggtgtgcagtgggttgattcacaggaacatgtggtctcgtccctgaatgtgacccttcagatgtgctatagtgcacagaccttggtaaggagtattccggtgtagttccgggaacatcccaatcaagcgctccatacatattggggtaatagtatccctcatctccttcccctccagcgtacggtacccagtcttccggaccgaaatgctgactccagttttgataaactggtgagaaattcatcgactcactcctttccattctttgaccagacatctgcatccattcaaccaaggtaaacttaacccatctacctaatagtggtgaacagaccggattatcctaaatgccttttgcgactcatttacacgataagacatttgaaaaacacgagtcatgctagcatgattaaccatgcttagaaaccataaattgtaacgcccccgagacgctctatgaccggacatctcacgggcgcctcaaaaacgccacattgagattgatcatcaatatccaaccgaggttcgggaacccatcccaaaccttggccggtgtattgacgaccactctcccacttaaacatcgtttaggcttgccaaccctcacgatatttaaatgttgtgccgactcggactaagtcattattagtcattactcgcaatttgtacaagaaaacccgatttatttcataagtattaatattacacaacatgttaccaaacatttataagtttcatggccagggcctagtgccaaaagcacgatacataatagaaacatacttgttttagaaaaggcacaaaactactccgggtttcctaatgtccaccatgccctctatttcccactacgggtttcctgcaaaacaaatagaatcatgagtaatctaatcatgagtaatctaagattactctatgagctcgggattccctgcagcagacattagtttaccccaacccaaatacccaacatgaaacacgcaatagagaatggcaacgaaatgtagcttgccgaagcaactacatataaatgcaatgcattaagactccagttttattaagtttttaaaagggcccgatatgctgccttcaaacccaacaccaaacacacacactcccgtgatctccctcgttacaaccacaaaggtatgcaaccggagcatcactacaaaatgttacaccgtcgtgtatacactcgaccagggtagctagccccatctcttcgaattctttgcacttcatggcgatcaagtaa

SEQ ID NO: 183989 - DNA, 129 bp, Arabidopsis thaliana landsberg
ctccacattttccatgagggaaaaccggacattcgattaaaccggaaccagaccggtcaacacaaagatagacttggtacaattggctattaccagaaccatctctataacactcaacccaaggagtga

SEQ ID NO: 183990 - DNA, 249 bp, Arabidopsis thaliana landsberg
atcctcttcggtccccaagaagacaacaacaacacaaattcaagcttcagcttcggtttcttctccaaaaagaactgtctctcgatctttgactccctcatcacgcaaaacaccatcaccaacctcaactccttcaagaatcagtacaactacttcaaccactccttccttcaaaacagctggagatgctcaaagatcaagatcgttgactccaagagcaaagcctcagattgcagcaaatgcaagtag

SEQ ID NO: 183991 - DNA, 342 bp, Arabidopsis thaliana landsberg
gttccagaagatgaagcatttttaacggaaatcataacagaagcggtgattaagtcagtggagaagctattcctcaaccctggaaacggaacttcacaaagaagtttacacttgaagaacattgctatcaactggttgtttctttttgacaagactatggcttctctaaggtatgcctataagttctatagaattaattgcttcatttgcttgattgttttgcttgatactccaaacgattacacaggagaaacaaagatcaagaaaaaatcagcatgtacacgaacatgttctccaattcacttattccttatcatttgatcaattgggtaatcagtcaag

SEQ ID NO: 183992 - DNA, 274 bp, Arabidopsis thaliana landsberg
tgcgagcaggcgctgggtgatcgacgacatgatcgcaatcatgtcgcaaacgggccgggcttcctatgctcggaggatgaattcccgcctctccccgaatccggccagcagcgtccgcatgctcgccgcagcggcgctgctcgcgctttcctccatcgcggcggcccagagcgtgcaggagcacgtgcacggccgcggccacgaagtcatgcccttcgacctcgcgcggacggtgcacgtattaaagatgacggaagacggcgggacgcagcag

SEQ ID NO: 183993 - DNA, 90 bp, Arabidopsis thaliana landsberg
gatgctttagtagaattatctgaacacggaatagttttgattgttgaagaatcaggttgtcttcaagccaaagtttatcttcaacgcgag

SEQ ID NO: 183994 - DNA, 1101 bp, Arabidopsis thaliana landsberg
gattagtacgaaagttagaagttttggtgggaatcggagagagccgaaggattcaagatttgtcgatgaaaatggcgtagttgatgaaatggaaggtttcttagacaatctctctctcgaatacgactccgtttgggacactaaaccctcttggtaagtctcagttaaatttccgattcattttagggaatcgtatttttggttcaatatatggataagaggttagatagagtttggataagttcacttttaagtggaccaatccttaatctttattagcaattccagtgatttatgcctaaagaagaacttttttgaatcatatgaagctgaatgtattgattgatgctacttagaacaagtcttacacaattgcagtttcatgatttatgttgggaataagaagatataagaaaaaagtttgaatcttttggttaggaagatagtgaagaaccaaaatacagattatgtaatcgtaattgggttgtttaacatttcaacctcagcatctacggctttaaatatctattgatctggtgtgtatttgcaatcaagaactttacggttcttcttagacgttttcagggcctagtgttcttccgtatggttttgaataagcaactggctatgtttctcaggtgtcagccatggacgataatgttaacaggtttttcaatagtggcatgtagctgggtaatactacattcggtcatagtttcgtcgcttgcggttggtgtaattggtgcttggtggtacattttcctttatagctacccaaaggtatgattttcccttccatcatataggaatgaatctgataacaacctctccttttcattgccttactaaagaaaagttcgtagctctaatttactaagtccaagttaaagtaaaaatcttgtttaaacatcttcagacaatgctagtttctataatcttagtgaacaagactttactttggtctttttgagccttgtctttgagattctggtggtttttttgtgtactttggttcagtcgtattcagaaatgattgctgaaagaaggaaacgagtagctgatggttttgaagatatttacggcaaaaacaagccttcatag

SEQ ID NO: 183995 - DNA, 554 bp, Arabidopsis thaliana landsberg
atggctcttggtatcacagatagacatgcggtagttcaaggaatgccgcttgtacaaggcaacgatgagtatttctggttcggtcgtccccatttgattctccatctcatgcatttcgccttgtttcaggtacttaataaacagagaaaatctcacaacacaataacaaatcctctcttttctgtttcgattattttcttaaatcgtgtttttattttgcagaacgcatttcagatcacttatttcttctggatatgggtaacactttagattttcctttgctttttaatgcattttcttggttacaagagtagctaatcctctgtttacatccattgatgtaatgcagtattcctttggatcagattcttgctaccatcctaatttcaagattgcacttgtaaaagtagcgattgcgtaagtgttatctaatcttgaaattctctacacaacatgatcatatactaatcttgtttccttttttctcttgcagtttaggagtattgtgtctttgcagctacatcacacttcctctttacgcactcgtaactcag

SEQ ID NO: 183996 - DNA, 801 bp, Arabidopsis thaliana landsberg
atgctctttgtgctgtccgcatttaacatcaaaaagcttcattatgtgctcgatgttagtaagatattttgtattcgagaacagatttcatacttaatgcaatttgggttttggtagagttatctttattacaacatcatgacagtaatgtatgaactaatatggtagagatgaatctttttggaacaaaaaacaaatttatttacacagattacaaattatgtgtctcgtttttctttacctaaaaagtgaaatgctcatctctcaatcgagtgttattgaaaatcttaatgctacagaatcagaaactctttaatctacatacacaatctttcttagaatcgaatacttgtaaaaaaaaaaactctgcactaagttaggacactccttgtttgtaagaaagctgattcagaaggaccatcatgtagatcttgtgatggttcttgttgctaccaaatcttgattaacaccacatatgattcaatgatttcatcagaaaagatagtttcaatagctttgcaagaagtgagaagaagaagaagagattcttctttctacttactgtaaaccactcttttaacagcagttcatgaatcttttttctgatgaaatatttgaaaagcatatacacctgaaactcttagagtggaactataaaatcatggctccattgacaaataattaatcacgggtctaggttggcgcgagctgagcaccaacgcaaaccgagtggccaagtccgctgcttcctgtctctgtctacggcgatgcaggatactgatggctgatgccatgatgtag

SEQ ID NO: 183997 - DNA, 3 bp, Arabidopsis thaliana landsberg
atg

SEQ ID NO: 183998 - DNA, 455 bp, Arabidopsis thaliana landsberg
aataacaaagctgatctgattagaatacagatagaaaaggaacagatggaaagagcacaacgtgaaggtacactactacgtgttcttatgaaagtaaaataaagtctcaaacttttcgatgtttgcctcttacgtttctttcacaaaatatgcagagaaagctagaattgaagccgagatgagagctgctaaggttgctgaacgaatgagggcacaagacgagttgaaacagaaacgtgagagtcaacggattgaaatagcaaaggtattttgcggaattttataaaccggttttgcagttttttaaaaccctgatttaacatattgaagaacgatgattctaatatctgtaaacatgtctacagatcaaaacaggcttcgattttgaacggaacaaccaaacgaaaatgaagaaaaaattcgttaaagtctgtggctgctttagtcggacatga

SEQ ID NO: 183999 - DNA, 379 bp, Arabidopsis thaliana landsberg
atgcatacggttatggaacgtggacaccgtcatcgagagcagcaggccgcgggtcaccgcgcagcgcgcgttcctggccgcaggggcgtcggtcacgatcgtgaccgtgttctgcctctggctcgcccactcctaccaagacgacttcaacgtctacctgcaaggcgcccgcgacctgtcctccgccgccctctacacgcgctccacccgcggcgacctgttcacctacccgccgttcgccgccctcgtcctcctcccactgcgctggctccccaccgcgaccgccgcgcagaccgcgtgggcgaagctgaacgaggcggaactcctggccctgctgcttgtcaagcaaaaaggccgtgcaccaggaccagccggcgcg

SEQ ID NO: 184000 - DNA, 140 bp, Arabidopsis thaliana landsberg
gcggatgtgtgtatgacgttcccttatattgttgcgagtatgcagcatctgctggacttactgctttgagttccggtctttgtgtttcgggtttggtctatttcgagggtttcagtatctttgggcccatagaagaaatg

SEQ ID NO: 184001 - DNA, 258 bp, Arabidopsis thaliana landsberg
atgagcggactcgtcgaaatcgtttacaaagttggtaacatcgaggtacgaagtaccctcaaatagcctgcacttcaattatgatactatcctcagcatagcgaaattacattcctgcactctctcaaagccttggaatctcaatttttttccactcctctaatgcatgagggagagttattactctctggtaactctccctggttggcaaaccgtgctttgaaagcacgcaacaactttgttggatgttttctgtga

SEQ ID NO: 184002 - DNA, 415 bp, Arabidopsis thaliana landsberg
atggcccgccattgcatccgagaaccccgctacgttcccccggtgcttcgctttggggaacaacccgacctgttcggcggcccgaccctttcccacgttgccgagcgcaagggaccgccgaaaggatggcagcgccaattgcagaaatggggccgctgcaccgtcattgccgatcttgaggtagcgccgccgtctgtcatcgaccctcccccgtccccgtctacggttttccttgtcgcttgcgttgctgcgaagctggaccgccccgccccggcgcgcgatctttacgcatacgcatggttccagaaggcccgtgcctatgtcgaacgacagggcggcgcatggttcatactgtcagcaaagcatggcctgatcgccccggaaaccgtcatcgcgccctatgacgaaacgctag

SEQ ID NO: 184003 - DNA, 318 bp, Arabidopsis thaliana landsberg
atgccaagccttaacacaaagagtgtcacaggtaaacacatacagagcaaatgcatgattctgtcataaagcttcaaatttagctgtaatatattacctccatggatgtgtattgaatcgtaaataggccgcttctctctcgaaacaagaactagcaatggtagcctgatgtcaacgtatgttgtatgaatcaagtccccagtgcaacttgaaggtaaaagaacttcttcacactgttaggtcgaaaggtgaaacttaaagcttatgtactagacaaggcgatggaacttcttcacactgttaaggacagacttagag

SEQ ID NO: 184004 - DNA, 190 bp, Arabidopsis thaliana landsberg
agataaacttagggtttcgaggagcgcaatatcaacagctgatatagcgaatgacttcactcttgggattgaaggagaagtgttttccttttcgcattgccataacaaagtcacggtcgctgaggcgtctggactaacaggagaaacagatcaggtacaagagttcatcagagaacacgtaaagccatga

SEQ ID NO: 184005 - DNA, 150 bp, Arabidopsis thaliana landsberg
atgaagtctcgagagtttttagagaagcttggctctctcccgaagaaatgccgtttgatttcccccatcattcgcatatcgatggtaaaaacccatcgaaagcttttgaagagcgttgcttataacgatcatccccaaattcatgagcag

SEQ ID NO: 184006 - DNA, 1811 bp, Arabidopsis thaliana landsberg
atggctggaaaaaggaaacgagctaatgctcctgaccaaacagagcgaagatcgagtgttcgggttcagaaagtgagacagaaagcgttagatgagaaggcgcgtttagtacaggagagggttaagctcctcagtgacagaaagagtgaaatttgtgtcgatgacactgagttacatgagaaagaagaggaaaatgtcgatggagcccttaaccgaagaagccctccaaagctaaccgcaatgcagaaagaaaagcagaaattgagtgtttctctgaatggtaaggacgtgaacttggaacctcatctcaaagtgacaaagtgtctgaggttatttaacaagcaatatctcctctgtgtccaggtttgtggtttttcctttttttgtctctaggctctagcaatgctgataataaatttcgtttttgctgtgttgttgacctgttttgatcctcttttttattgtaggctaagttgagcaggcctgatttgaagggtgtaactgaggcaagtcatgatttttcttacctctggccttagttgcctcatgcaacattgttttgtctatcaagaaatggaagatgtcacaatgttttgttaagcaacatgtatcattatactttgtgttcttgtaaatatgatggtttgtctattctgtaatcttcaatgcaagttgacttaagcctttaagaaaatttccagatgataaaagctaaggcgatattgtacccaagaaaaataatcggtgaccttccaggttggttggtagttgtgcttttacaactttgtttctttccctaaattttaattccaagccagcataagctttggtcttaagatttttacagaaaagttttcattattatgttctgacttctgatcacattggcttgcaggtatagacgttggacaccgttttttttcaagagctgaaatgtgtgctgtaggattccataaccattggctaaatggcattgattatatgtcaatggaatacgaaaaagtaatacaacttgtctttttgttattgtatttgatcccaaaatataagatatttcgtttcatttttcatttatttactcataaatctgacttttttcttcccactataggagtatagtaactacaaattaccgcttgctgtttctattgttatgtcgggccagttcgagaatgatctagacaatgcagatacagtgacttacactggacagggagggcataacttaactggtaataaacgtcagataaaggatcaacttttagaacgagggaatttggcgctaaaggtatgttatatttctttatgcttattaagaatgtaatttttttttctagctctccctactcttcttgttgtgctcattaagctagtcttttagttcatacacctcatcgttcttgacatataattatgttttacttgcatcttttacagcactgctgcgaatataatgtgcctgtcagagtaacttgtggtcacaattgcaaaagtagctataccaaacgagtatacacttatgatggactgtacaaggtactggtgcacatattcctttattattattcgtttgagtaacttttatctaatattgcatctgataaaggcgattcacaaggaaaaattgtttctcaggactacatctaaggtcttatgttttttccttactcattggtgtaactctggtccatttccatactttcttcgtacaggttgaaaagttctgggcacaaaagggcgtttcaggatttacagtgtataagtaccgactgaaacgattggaggggcaaccagaactaactactgatcag

SEQ ID NO: 184007 - DNA, 450 bp, Arabidopsis thaliana landsberg
atgcagcgcgagcacccggacctcggacgattccgccgtgtgcgcgcgatcgaaaagatccggcacctggagagcgtggcagatggcttccatgctcgggctctggcgatgccggatcttattttgatccgagcggcggtcggggcgatccgatgcaggttctcgtggatgaactgagccgcttggctgagccagtgtcgtctgcgcaagacgctgcagggtacttcaaccccggcgacggtctcgaggatgtcgcgcctgcacttgttcacaacgaacccagcctcgtcgtgaatcttgctgatccaagcgacgcgtttgcatcgcggccagctatgagcgtgcttgactacatcaacagccttgccgcgaccgtatttcagcacactggagcgcaagctttcgaggtctggctcgatgacacgtgcgcgtcctactcgtcctggagtg

SEQ ID NO: 184008 - DNA, 109 bp, Arabidopsis thaliana landsberg
atggcaaagttaatttgtaaagatgagaatacgagagacagtctttcgtggacgctaaagactaaatcattagaagcgaggcgctacgaacaaaaaaacatacaattgg

SEQ ID NO: 184009 - DNA, 120 bp, Arabidopsis thaliana landsberg
gaaaaaaaagaaaataaacgcattgttttggatgtttctactgagtttttgtggagagaagaagaagaagaagaagaatcatcggttcttctggttttgctctctcttcgaatggcgtaa

SEQ ID NO: 184010 - DNA, 110 bp, Arabidopsis thaliana landsberg
atgcatgctctcgctgagcagctgcaaagcgagggcttctggagccagattcgccttgatgaagacggccgaattatggcagtcttctttgcacatccgaagtccctggg

SEQ ID NO: 184011 - DNA, 7 bp, Arabidopsis thaliana landsberg
atggctg

SEQ ID NO: 184012 - DNA, 45 bp, Arabidopsis thaliana landsberg
atggccgcaggagccgcgttgtactaccacccaggcgccgggaag

SEQ ID NO: 184013 - DNA, 1450 bp, Arabidopsis thaliana landsberg
atgaccgcctctttaaccgccgagtgttgcggttccctcaacatgctcgtttcattcaccggttctctcccttccgggtaaatcagaatcctctgtcttttgatacagagagctcgtacatgagcgttatttaccggtgtttaacgtgtagtgatgagaaaggggtacactatggagtcaacttgagaggcaaggaactattactgttacgtgggacgctaggtggtaacgaagagcctatttccgatgtacagaagcatgagattccgatccctgacgatgttttaaatggttctttcaaggtatgaatagagatacaagatttcttgattaacacgttaggttacatgaagctggagttttatttggatccaggagttgtgcgatttcatatcgttggagcttgttaaatttcttgcgatgaatcccggtggagaagcagaagaagtgaagaatctcgggtttacgttgacgcgctctgttgagcagattgggtcacattcaatctcgtcgatacataggaagagtttagcaaatgacgatgatgagaaggttttgaaagatttggtgaatgatatgaatgaatcactggaaacacacggtctgaaaattcggatgaacacagcgctggtaagcaagtctaaagataatccgcaatgacgattaatctaagacttttaatgtatcttttgagaatctggtttttgaaatcaggtggataatactatagatgaattggctgcaggaaggtattatcacaaggactctgtggctgcagtatcattaggtatgggaaccatcgctgcttacattgaacaagctcaagagatatcgaggtggaaatctgcgatacgtgagccacaagagatcgtatgttaagatactttcaacacacttagttcaatatcatagagctttccaaagtttttatatcaagtggttgtacttggtaagattataggttgttagcacagagtggggagatttcagatcttgccatcttcctataaccgagttcgatgcttctcttgacgcggaaagcttgaatcccggacatcgagtaagaacacataccgattagtactttctatagtgtgttttgagaaatttgtctgtttctctgtttgaagatatttgagaagatggtgtcaggaagatacttaggggagatagtaagaagagtgttactaaaaatgtctgaagaatctgctctctttggagatacactacctccaaaactcacaattccttacattttatggtaccttaactatatacttcttttagactaagttatgaaactatagactaaactgcggttttccgagcatgttttaggtctccagatatggctgcaatgcatcaagatatatccgaagaacgggagattgtaaacaaaaagctcaaggaagttttcggtgtaagcttcatagagactcattcgctttag

SEQ ID NO: 184014 - DNA, 550 bp, Arabidopsis thaliana landsberg
agtattcttggattattccacctgcttccatctaagaagaggaagattgagattcttaaagatataagtggcattatcaaaccatcaaggatgactttattacttggtccacctagttcagggaaaacaactttgttacaagctttagctgggaagcttgatgacactctccaggtttgttttgttgtctatcatatttatattatttatatgtatgtaagctcttggttgagttaacattttccggggtctgtgacagatgtctgggaggataacttactgcggtcatgagtttcgtgagtttgttcctcagaagacttgtgcttacattagtcagcatgaccttcactttggagaaatgactgtgcgagagtcattggacttttcgggacgatgtttaggtgttgggactcggtaccagcttttgactgagctctcaaggagggagagagaagctggaattaagcctgaccctgagattgatgcatttatgaaatccattgctatatctggccaagaaactagtttggttacagactatgtacttaag

SEQ ID NO: 184015 - DNA, 413 bp, Arabidopsis thaliana landsberg
atgggtcaagaagttgtgagcacttcttctaaactagcttacttaaggaatcatgatgatttacccatagagtttgtggatgattggctaaaaggatggagtttggcagagtataactacaaaggcaaaagtctctacactctcaatttctcacctcaggccaagtcattcatcaccctaagaaaaaacaaaaatggagttgtgcaaaatatcttcccaagacgagtactaatgatgctggtaaaagaaaggaatccactggtgctcccaaaacgaagaggattgctaataaagacaaggctgacaaagtggcaaagaaaactaaaactggggaaaccctgaaggtgaatgtacttcagaagcaatacgagttaaaggcattttgtcgagctcgacaggcagtattgagctaa

SEQ ID NO: 184016 - DNA, 415 bp, Arabidopsis thaliana landsberg
tcgatttggaaagtttgtcgagcttcagtttgacaactgtgggagaatatctggagcagctgtgcaaacatatttgttggaaaggtctcgagtgtgtcaaatatcagatcctgaaagaaattaccactgcttttaccttttatgtgctgccccacctgaggtattggtgctacacaatgatgccaatataccttattgttaggcgttctgctttaaatcacatgattaagtggttgtggatttcatttattttcccaatctgtaggaaagagaaaagttcaagttgggagatcctaagttattccactacctaaatcaatcgaagtgctataaactggatggagtggatgacaccgaggagtatcttgctacccgacgagctatggatattgttggcatcagtgaagaggaacag

SEQ ID NO: 184017 - DNA, 561 bp, Arabidopsis thaliana landsberg
atgttagtgctaggagagtaagatcttcaacaaggcaaactaggattctcaagaatcaagccaaacttgatagtctcatggcagaattggaacaaatcaaagcgtatgagaaggtatgtgtctcaaatttaacattctttataagttactttatgttaaaactacattttattatatagagaatgtttacaaccttgaaagaatcccgatttaaaatacaattgaaccaacaaattttaaccaacccctaggactaggattggatcttgaacccaaatttatcacattatccaatttagagttttatttattgtatgacattattatttagtgcctttatatattatttttgttgtgttttatgtctaccaaacaatattttttttttgtaaattccaggttttgaggaaggggcaagaacagaacatcaaaaagtacaataggaaggagatttcagatctaaagttagaggacttggttatttttcagaaaaaactcgaaaatctccaagatgatttaaagaagaaacgtgtagagctggaggcttcgttgtctctatag

SEQ ID NO: 184018 - DNA, 220 bp, Arabidopsis thaliana landsberg
ctcatctcctgaaaagtatggagcagcttcacaagttggggatcatatgattagaagtgtactgacaccggaattgatggattgcagaacattgatatgcgggctctatgattacggagaaaacgagagagctaatgcagttatccataagctgcttcagtgtggcaagtactacgatgatgaaatagcttggccaatcctcactgaaatagcatgttaa

SEQ ID NO: 184019 - DNA, 2643 bp, Arabidopsis thaliana landsberg
atggtgatattgaaaatggatcatcatcgtgattactttaaccttcaatctttatattttaatcttctctatgatgagtcttctgaagagactcagctagcctgcgtagaagtaataaggagaattcttggccacacatccccagatattctggtaagaacaaggtctcaatggatcaggtgccttcaatatctgttagttcatgtaaatacagacgtaagggaagcattctgtgctcagattggtatcttcgtacagcatcctattgtgagctgtttgtttcttagtgaagatgctacggagaaaagttgcgaaagaaatttttttaatttgattgagcattctctagcagcagctaaggatcttcttgttatccagactctactggaaacgacagctgaagttatggtagctgttgatgttaccagtgagcttttcttgatttgtcttttcctgctgattgatcagcttgatcatccaaacttgatcgtacgaataaatgcgtcaaagttaataaatcggtcatgctacatccacgtgaaagggggatttgcaactctactttccacagcctctcatattcaaaatgagttgtttgataatctatctgtcaggctgaccagccgtccaaatgtggtaagagaatttgcagaagctgttttgggtgttgaaactgaagaacttgtgaggaaaatggtccctgctgttcttcctaagctcttggtgtattggcaggaaaatgctcaagcagccaataccttgaacgaactggccaagttaatagacacagatgtggtacctctaatagtaaattggctacccagagttcttgcatttgctctgaatcaagaagaggacaagaatttgctctcagttttgcaattgtatcactcacagattggttctgacaaccaagaaatttttgctgctgcattacctgcactcttagatgagcttgtatgctttgtggacattgctgatacacctgagacagatagacggtatgtactcacatagcttcatactttttgagcagaaattggtagttggaaatagcatgaaagttttctaaaaattttcttctggtaaattcttcggttcagttgtatctgttggggagcaagccacctatttgctctaagaactagaatttctctgcgtgtgttttgctctttcttgtgctctttcacatttacatgtcaacagaaattgctagaggttgtttgttttttaaagctgcgagaggaaaatgcattcatcatttttaaaaaataactgaacgtcctgatgcttttttgttttgtatgacatttgatttcactattttgcttatgcaggctacagagactgcctgatgcaataaagaagatctcaaaagttttaacaaatgccgaagatcttcctggattcttacaaaaccattttgttggactccttaacagtattgacagaaaaatgcttcatgcagatgacatttttcttcaaaaacaagcactgaagcgtattaagctgctcattgagatgatgggccattatctcagcacatatgttcctaagcttatggttctccttatgcatgccattgaaaaagatgcacttcagagcgagggtctcttggtcttgcatttttttacaagaaagttggctgatgtatcgccatctagcataaagtatgtgatttctcaggtttttgcggcactcatccccttcttagagaaagagaaggaaggtccccatgtatatttagatgaagtggtgaaaattcttgaagaacttgttttgaagaatagagatatagtaaaagagcatatttgtgagtttcccctcttacctagcataccatctttaggagaattaaacaatgctattcaagaagcacgtggattaatgagcctgaaggatcagttgcgggatattgtaaatggtatgaaacacgagaacctgaatgttagatacatggtggcatgtgagctaagcaaactgctgtatcacagaaatgaagatgttgctgcactgattgccggtgaacttgtctcagacatggagatcttgagctctttaatcacatatttactacaggggtgtgcagaagaatctcgaactacagtgggccagaggttgaagttagtctgtgcagattgtcttggagcaataggtgctattgaccctgccaaagtgagagttgcttcatgcagtcgttttaaaatccaatgctcagatgatgatcttatctttgagctcattcacaaacacttggcaagagcttttagagctgcacaggatacaataatacaagactcagctgctcttgccatacaggaactactaaagattgctggttgtgagccatcattagctgggaatgttgttgtgttgaccccccaggagcatgtacaagtcaatgtatctggttctagaagatgtggaggtaacaatgaagtgaaggataggggacaaaaactatgggatcggttctcaaactatgttaaagaactaatagctccctgcttgacttcaaggtttcagcttccaaatgtgtctgaccctggatcagctggaccaatttatcggccttctatgtcattaagaaggcggctatcctactggataaggaaattgacagcaattgcaactggatcccgt

SEQ ID NO: 184020 - DNA, 72 bp, Arabidopsis thaliana landsberg
atgaatgtgggagagcacattggcttcacttggtgttatcctcacagggccaagcaacatgtcgctttcgag

SEQ ID NO: 184021 - DNA, 311 bp, Arabidopsis thaliana landsberg
atgcggccctgcgagcatccgatagcacagcctcatgccggcgccgcaaagaagcagatcttcctgattcgaaactacgtacatcgatggagtcctcaacccgcaagggtgatgatttccggtccgggcattagcccgagcgccggatacttggtttctggtgatccaacgtgtgtcaggtacagcgaacttcgggcacgtgagcacatgacatacattcccatcttgaagaaatccacggcccattgatcgacgttggcgttctgcataacaaaaacgaacacggcgtcaaactccaggcccttgcatga

SEQ ID NO: 184022 - DNA, 1105 bp, Arabidopsis thaliana landsberg
atgttggctcagaatctccagaagctggaccagtttatacaggatagttcagagaatgaatcttgttgttctaaggaagctagttctaatgatagtccactcatctttaacatctgggaagctagaaaacttgacgtaaatggattcctcgggaacctgatgtttgccagagttggagatgtggcgtcaggtattggtggcttgacatctcacattagtgaagatggtgatgaaagtaatgtcagtactgctggtaaggaggaaagtgcagttgattctccgcagaacctggcatctggactactgagtatacctttatcaaatgtagagcgcttaaaatccacactgtccacgatttcattgacggaacttattgagcttttaccacagttaggacgaccttcaagagaccatccggacaagaaaaaactaatttctgttcaggattttttcagatacaccgagtctgaaggtatgaatcctcccatttttattaagaaccttaccgtttcctggcaacttagtaagcaaaaagagagcagcaggatgcattgcctataaatgttacttgtgcttgccaaagcttgtagttgactgttggaggcatttgtgttggttgaaatcattggaaagggatacctgttggttgaaattaccatgtcttcgtttttattgcctgccctagtcatcatcgcaactaatgtctgaactgttaaaacgtgtgtgttgcagtttctcaatactagattgtctgcttatataaggaacacattacttatttgcttttgaaatgtttacgtcctgtactataatttagtccatttcgtccaatataactctttgcggattccaggcaggaggttctttgaagaattagatagagatggtgatggcaaagtaactttggaagatctggaaattgcaatgaggagaagaaaattgccaagaagatacgccaaggaatttatgcgacgagctaggagtcatcttttctcgaaatcgtttggttggaagcaatttttgtccttgatggaacagaaagagccaaccatcctccgtgcctatacttctctctgcttgaccaagtctggtactcttaagaaaa

SEQ ID NO: 184023 - DNA, 244 bp, Arabidopsis thaliana landsberg
  unsure (1)..(244): unsure at all n locations
atgagaaagacagttactcataagtttcggatgaaagagcgccagattgtaagtantgcagttcgaatccacgggaacacacaaggagtagacggtgacganaccgaattcgaagatctaacaaagtactggagaatcgtaggaggattgctatacatatgtgcatgacgangtcacgtgatgtaccgaacttcttcgctactccggtacatgtccttaggcagtattccacagtatgaagaag

SEQ ID NO: 184024 - DNA, 195 bp, Arabidopsis thaliana landsberg
atgaattcgtcttcttcaacgtccaaccccggaagtcaacctcgatcggatattcggatacacacatacatatatacaagtagttccgtgatttttgttgaagaatcccttctaactcataaacataaccgtgatatataacacctagataagatttttgttcgtgttgcagagataacaatagacgagagctga

SEQ ID NO: 184025 - DNA, 448 bp, Arabidopsis thaliana landsberg
atgaatgcggaggccatcaacgcagcgctgaccatcggttaccagcgcaactacgaggacggcgacctcggccatttcggaatgggtctcaaggctgcgtcgttcggccactgcaacgtgctaaccgtttggtcgaacagccacgaagcgacacctgtcgggcgcagaatccgccgcgctgacttctccaaggatttcacctgtgaggtgctttccgcggatgcagccgccgatgtggaatcagagcgtcggaccatcctcggtgctgactgcggtaccacgatcgtctggactcacattcgcaatgtgtaccgcggcaagaacgctctcgaagctcgaacctggctatcgatcagagaggcagcgctgcgatctcatcttggcgtgacctttcatcgactgctcggcagcgggcggctacacctcgatgtccttgtcgacgaactcg

SEQ ID NO: 184026 - DNA, 946 bp, Arabidopsis thaliana landsberg
atggcgtcctcatcagaactaagcttggattgcaagccacaaagctactctatgcttttgaaatcctttggagataactttcagagcgatccaaccacacataagcttgaagatcttctctctcgcctagaacaagaacgtctcaagatcgatgccttcaaacgcgagcttcccctttgcatgcaactccttaacaatggtacatatatccatttacaatatttggatctacgtatatatacttgtgtataatatgatcttcaaaatatccctttattaccaaaaaaacctagtgaaccattagttttttgaatttcttttcacttttttttttttgaaaagatctttattcattaatttaacaatttattccataaaaatcaaagcttgcttttgatttctttgaatcacaaaacttttgtttcctcccaacactgaaatcaacaaaactaactaaagtgattttaaaggttataaaagttcatgttatatctgttactttcatattttaaattactttaccatctttaattactttgatttttttttccagctgtggaagtttacaaacaacaactagaagcatatagagcaaatagtaataacattaaccaaagtgttggtacaagaccagttctcaaagagttcatacccttaaggaaccaacccgaaaagacaaacaacaaaggaagtaattggatgacgactgctcagctatggagccaatccgaaaccaaaccaaaaaacattgattcaactactgatcaatctcttcccaaaaacgagattaatagtagtccgaaactcggacattttgatgcaaaacaaagaaatggcagcggtgcttttcttcccttctctaaggaacaatctttgcctgaattacctctatccacggaggtcaagagggtctctccgaccaacgaacatactaatggccaagacg

SEQ ID NO: 184027 - DNA, 967 bp, Arabidopsis thaliana landsberg
atggagaagcaacagagttttcgaggtgtcaacgttgagaatcataaacgtggagttatggagaagctaccgagttttggtagagcaacaatggagaggcagaagagtttccgtggtgggtttttggagaagcagaagagcttccgtgtggtgatggagaggcaattgagttttataggtgagaggaggaagaagaatgaatcaccagggaaaagaggagactcttctcttcatatcgctgcgagaaccgggaacttaagtaaggttaaagaactgattcgaggttgtggtgatgagttgaaagagttgttgtcaaagcaaaatcttgaaggagagactcctctttatactgcagcagagaatgggcattcaattgttgttgaggagatgttgaagcatatggaccttgaaactgcttccatcgctgctagaaacgggtttgatccatttcatgtcgccgccaaacaaggccatctcggtataaagatttatactttcttcatattttctccattctcaatggattgttctcttacttggctcgtcttcttttgtagaggtgttgaagatactgttggagacattccctaatttggcaatgacaacggatttatcgtgtacaactgcgttacacactgctgcaacacagggacatattgatgtggtgaatcttcttttggagacagactctactttggctaagattgctaagaacaacggtaaaactgcgcttcactctgcagcaaggatgggtcatgtggaagttgttaaatctctgataggtaaggatccaagcattgggtttagaaccgataaaaaagggcaaactgctcttcacatggctgtaaaaggtcaaaatgatgggattgttgttgagttggtgaaacctgatgttgctgttttgagcgttgaggataataaaggaaatacaccattgcacattgccacaaacaaggggcgtattaag

SEQ ID NO: 184028 - DNA, 1081 bp, Arabidopsis thaliana landsberg
aaaagaagggcatatatactcgctagccgcttctggtgaccttctctacacgggctcggattcgaagaacattagggtttggaagaatttgaaggaacacgctgggtttaaatccagtagtgggctaatcaaggccattgtgatattcggagaccgaatctttaccggccatcaagacgggaagatccggatttggaaggtttcgaagagaaaaccaggaaaacataagcgggttggaacattgccaacatttaaatcaatggtcaagagctccgtcaaccctaagcatttcatggaggtacgccgcaacagaaactctgtgaagacgaagcataacgacgcagtgtctagtcttagcttggacgtggagcttggattgttgtactcgagttcttgggacacgacaatcaaagtgtggagaatcgcggattcaaaatgtttggaatcgatacatgcacacgatgacgcgataaactctgtaatgtccggttttgatgacttggtgttcacgggatccgcagatggtactgttaaagtgtggaaacgtgagttgcaaggcaaaggaacaaaacatacgttagctcaagttttgctcaagcaagaaaatgcggtcacggcgttggccgtaaaatcacaatcttccatcgtatattgcggttcttcggacgggctagtgaactattgggagcgttcaaagcggtcattcacaggcggaatactcaaaggccacaaatccgcagtgctttgtctaggtatagcggggaacttgctgttgagtggttccgccgacaagaacatatgcgtatggaggcgggacccgtctgacaagtcccatcagtgtctctctgttttgacgggacacatggggccggtcaagtgcctagccgtggaggaggaacgggcttgtcatcagggagcaaaagcctcagtggccgagggagaccggaagtggattatatacagcggaagttataaacaagtcggtgaaagtgtggcgcgtgtcggagagaatggccacgtggaaggagatggacgagccagcagcatcttcagagcggaagagctcttcgtctccgcatga

SEQ ID NO: 184029 - DNA, 424 bp, Arabidopsis thaliana landsberg
agctacggccgccgtggccagcccactccagccgccctccagcccaacctgtgcttcggctacgtccgccagtagcccgtgaagctcgccaagccctcggacccgaccggacttcaccggaggcccgagatcaacctcaccggacttcggtcttccgccgccgcgcgtggaccgagctatccagtgagtctccgcccaattcctttcgctcatgtcttctctggcatcccgtggacctctctgacctattcaattgaactacctcgccgtgaccaggccggtctcctcgccgccgacgagcatccccgcctgcgcgcgtggaccgaccaactccggccatctccgttgacgttccgcacaccgttgtgatccccgcgacctccccttcatcctcgaccacttcaccggaacagtctcgccgccg

SEQ ID NO: 184030 - DNA, 747 bp, Arabidopsis thaliana landsberg
gtggagtttaggactgtgataagtaccaacaaagagttacagttttcagttgaggtcagctggatcagtttattgaagcatctttgtctattgttagctttacttatatttgtttttaatcgttgttgttaattttacaaaggtgttgttcacgggtgagaagataggcattgggatggcaaaaactaagaaagatgcacatcaacaagcggctgagaatgctcttcgaagtttggctggtaaagtttcttctaggggaattaataactgtggatctatttcaccacttgattaagtctgcagattgttcttagtcttttgtgtagtgagcaaatttggttacagattggtaaatcttctttgtgttgctttgtgcagaaaagtatgttgcacatgtggcacctctagctagagaaacagagaaaggtccggaaaatgataatggatttttgtgggaaagcagtgaagatgtatcaaacaaaggacttgaagaggaagcgcctaaagaaaacatttcagagttgtgagttttgcagaaatgcaaaatttaggtcgaaagagagatgtgattgtggggaaaaagacatacggtatatattcattaccaatgtgagaaaataagcaaagatcaaaaaaggtaacaaagtgtcccaaataagagactttttgatgaaaagatggcctattcctcagggagctagtctcatgactcttgctgttttggtttctagagttttgagaaagtga

SEQ ID NO: 184031 - DNA, 251 bp, Arabidopsis thaliana landsberg
ccttcatcgcggacaacgccgacatggaaatgggcgccgcattggccggaattgcgtttgctcaattggcggactacatggcggccccgtatatcgccaatggaaaactggtgcgggttctgcataaggaagagccgccggcttggggcttgtatgtctatcggcctcagcgcgcccctgtgtcatcgagagtccgggccgtgttcgatgaattgcagacagcgattgggtccgtgccggctttgccttag

SEQ ID NO: 184032 - DNA, 115 bp, Arabidopsis thaliana landsberg
ctgtttcctgtggctttcacacagtcttagaccatataatttccatcagtttgattacgaggccgtggcagtcttggtggatgtgaaggcaaccagggatcggaccaagcgttga

SEQ ID NO: 184033 - DNA, 90 bp, Arabidopsis thaliana landsberg
atgaagagcacgaacgacgaatctccttccttgggatacgacttcgccggagttagcatcaaggacggaaaatctaagccgccggcgccg

SEQ ID NO: 184034 - DNA, 395 bp, Arabidopsis thaliana landsberg
atggcggtgggcgaggtgtttttgttctccgccagccatttgccgccgagggcgtcggggccgtccaacaggaggcccttctccttgagcatcggtcccatcggggcgcaaatttcctcctcgcgcgcgggcagcgtcatcgccttggtatagacgtcgaccgcgaggttcgagcggaactcgcccgccccggacttgcgggtgatcgcgccggcgaacactccatcgaccaggacgatgcgcttgcctccctctgcgactgcgggaaggaaaggctgtaccatgaacggctcgggccaaacatggtcgaacaggtcggtcagcgcgccaagattgctgccgtcggggggcacgcggaacacggacttgctcgccgttgccgtgaagcgggttga

SEQ ID NO: 184035 - DNA, 1500 bp, Arabidopsis thaliana landsberg
agagctctccggcgattactactccaagaaatgtcctcagcttgaaactctcgtcggttccgtcacttcacagcggttcaaagaagtccccatctcagctccagccaccattcgcctcttctttcacgactgcttcgttgaggtcaaaattttaccaaaattggaaatttgcattatctttctcaggcatgccagcgcactatagcataattaaccatgtaccataacacacgcattttagcattagtaactagcatggtcaaatataatgtacaatctcattatgtcgcaataattattgcaaaagtcataacaccaatatggaaatagttcaccggtttggtttccaacgtagcgcattttagcaaacaaaagtcaagattcagcgcattttagtgaaaaactcaacagtattttggtctgcattactgcttgtttaacaaataacagtgcacatctcatgcataaaaactaataaattatggactacggtgattgataaccaataatattagttgaaattggaattttgaagggttgtgatgggtcgatattgatagaaacaaagaaaggaagcaagaaattagcagagagagaagcatatgagaataaggaattgagagaggaaggatttgatagtatcatcaaggcgaaggccttggttgagtctcattgcccttctctcgtctcttgctctgatattctcgctattgccgctcgagatttcattcatctggtaattcgaacttcaattctacattcctacttccgaataagtttccattcatatgatttgattattgatgtgtacccactgtccaaaccggtcttggaccaaaccgtattgtccactccaatggttgatgacttgatggtatatctacgtgtcattgaataatgttttgttatgattccaaataggcaggtgggccttactatcaagtgaaaaaaggaaggtgggacggaaaaagatcaacggcaaagaacgtccctccaaacatacctcgatcaaactccaccgttgatcaactcatcaagctcttcgcgtccaaaggactaaccgtagaggaactcgtcgtcctttctggttcccacaccatcggcttcgcccattgtaaaaatttccttggtcgtctctacgactacaaaggcacaaaacgacccgacccgagtcttgaccaaagattactaaaagagctccggatgtcttgtcctttttccggcggaagctctggagtcgtccttccgctcgacgctacaactccgtttgtgtttgataatggatatttcacaggtctaggaaccaacatgggccttctcgggtcggaccaagctttgttccttgacccgaggacgaagcccattgcacttgagatggcaagagataagcagaagtttctcaaggcgtttggagacgctatggataaaatgggttccattggtgtaaagagagggaagagacatggggaaatacgtacggattgtcgagtctttttatag

SEQ ID NO: 184036 - DNA, 99 bp, Arabidopsis thaliana landsberg
gctgctcgagctgccttaaagatgtttgaagaagggcgtggcaaagatgcaagagctatatttgacccagatagcctactccaactcatgaagcataag

SEQ ID NO: 184037 - DNA, 1027 bp, Arabidopsis thaliana landsberg
atgtatattggagagtcagagaaaaatgttcgagatatatttgaaaaggtaagttatatttcttcttccctaggagaagcatattgagtctttggttctgattcttaaactagtgtgttttcttcaattgcaggcaaggtcagcgcgaccttgtgtgatcttctttgatgagcttgattctcttgctccagctcgaggtgcttctggtgattctggaggagtcatggatcgagtggtatctcagatgcttgcagagatcgatggactcagcgactcttccaggatctgtttattataggagcaagcaacagacctgacttgattgatccagctcttttacggcctggcagattcgacaaacttctatatgttttagtcaacgctgatttttcttacagggaaaggttaggcatttaaacaatcaaaagcatgtccaaagacaaaaaaaattagaagcttcctgattcttgtttttgacagggtacttaaagcactgactcggaaatttaagttaagcgaagatgtatctctttattcagtagcaaagaagtgtccctctacattcaccggcgctgatatgtacgccttgtgtgctgatgcttggtttcaggcagctaagcgaaaggtgagagggataggggttgaaatttaagactatataagtctctgtaaaagcttttatgaaaatcgctttgtatctgcatacttggcaaatgcaggtgtcaaaatcggattcaggggatatgcctacagaagaagatgatcccgattcagtcgttgtagagtatgtggattttataaaggttaaaactcttttccttcatctactcatcaaaaagagttgccattttcatggttgagtagaaatgttaatttgttatggttcggttttatcagtcgagagttataatagtttcccactttgtcttctttgtaggcaatggatcagctctcgccatcactctccataactgagcttaagaagtatgagatgcttcgagatcaatttcaaggccgttcgagctaa

SEQ ID NO: 184038 - DNA, 30 bp, Arabidopsis thaliana landsberg
aattttaaaaaacgttacgaacaaacttaa

SEQ ID NO: 184039 - DNA, 286 bp, Arabidopsis thaliana landsberg
atgccagatttggatattatcacaggtttcagcaagggttatgatgaggctagttcttcgggtagcagtaaaaagaatctctcacgcaagaaaactcctgcatcctggtctcgtcaggggaaatcaagacaggatttgcctttgaaagaaaagatcattcaagaggaggagattggtcgatttgataaagtgtttaaaagaaaagcagtggtagcttctactactgaaccaaaatgtatcaaaagagagaaaactacggtggttccaggggaaccatcgtggatca

SEQ ID NO: 184040 - DNA, 156 bp, Arabidopsis thaliana landsberg
ccttcggcgaatgaattattcgagaaagagaaaaaagtgagtcgttttaggggaaactgttaccaacgccgaaaaacaaatgctttaactcatcaccggaacaaatctgactcaacttggtttgttacttacctgggcggtgttcacggtgaataa

SEQ ID NO: 184041 - DNA, 99 bp, Arabidopsis thaliana landsberg
gaggaagcgaagcccccattttattgcgctactgagagagctcgcgaacacgaagacggagaagaagaagaagaagatgttcttcgcgagttcgatagg

SEQ ID NO: 184042 - DNA, 39 bp, Arabidopsis thaliana landsberg
gttgttcgaacccacaaattaatcgatgccgaactttaa

SEQ ID NO: 184043 - DNA, 483 bp, Arabidopsis thaliana landsberg
cttctgtgcgctcagcaaaaccagaaacttgctcccttaaacacatccttatcaaacccaagtaagttatgttgcattctagcttcttaaattccacgtctataaatctaagccaccagcggaatcactaaacaaatgactactctcatgatctaaccctatatctctagccatgtttccctctttttttttctcaacccatcaataacctttgttctgtctcagatgaaaggacaaattcattaccttgaatagtgttgttgtggttacttgatgggattgagatagaaagggcttgaaaacacgatatgtgatatttatactttgcctcttctttgtcgcaaatgtcttttagtttggagcattctctattcacatcatccaatggagaatagcgacgtttgcaacaccttggcgttttcattcacaagctctgatgccaagaaacgcaaaaccagaagagcggaagctagaagcttgtga

SEQ ID NO: 184044 - DNA, 78 bp, Arabidopsis thaliana landsberg
ctgccttcaagtattcctttccttacgtacgaaatatatgatggtttagaaacacatacggatgagaatgatatctag

SEQ ID NO: 184045 - DNA, 442 bp, Arabidopsis thaliana landsberg
agtttctctctcccctttaaatggtcgccggaaactaaatcgtctcgaacattcattagtaaaaccggacgactcagcggcgatgttaggacgagatgaagatctggtccgaacaatgagcgggagaggaagtttaggctccacaagtcaccggagtttagccggagctgcttcaaaaagcttcagagatgtgtttgctcccccaacggacgacgtgtttggtcggagcgatagacgagaagaagatgacgtggagctccgatgggcggcgcttgagagattaccgacttacgatcggttaagaaaaggtatgttgccgcaaacgatggtcaacggtaagattggacttgaagatgttgacgtcacgaatcttgctcctaaagagaagaaacatcttatggaaatgattctgaaattcgttgaagaagattacgtaaagtga

SEQ ID NO: 184046 - DNA, 1168 bp, Arabidopsis thaliana landsberg
atggtggctcagcagctccaagagagatgcggcggcacttctcaagaagatccagttgagaccaccaagtctctgatctgtgctctcaattacatttctcgtgaccttcctttgcctcctcacctcttcaccgccgtttcttcaatctaccatggcgcttcttcttcttctctctctgactccgatgtctctccgccgctacctacttcgccgcctgtaattcactctcgagcccttctccagcctcaccctagattttgatgtttgcccctttttgtgttttgtgctttgtttgggaggttttgaatcgatttatgtggtcctgtgatttgtttttgtagctttgctttcgagtttatgttcaaagttttctcctttttcgagtttctatggaaattagatatcttcagtggcttgttttgtcgaattacagtctaaaggtttttgctttaatctgtggtttggtctctttgttgtttttgcaggcgaataaagctccctatggagctgatttgatgggtgaattcgaggatgcacttttgaagcagagaccagattgtgaatcaggctctcgattgatacaattactggataatcggaataagagtcatatccaacgccgcttatctgaacttgaaggttattatcgtatttattactcctaagttgcacttcaatccattctcaagttttgattttgttatgcttggcaacagtttttttgttactggagaactattgtcaattatgttactaaaaccctttattcttcaagggggatgctttgtgcttactctttgtgtttttgaatcagaattaccttctactagaggtgaagatttgcaggcaaagtgcttacttgagctttatgggcttaaggtatcatcgttgctagatgttctcattgatcgttgttgttatgttacattgtttgaattgttatatctttgacattgacactttacctggtgagttacagctacgggaattgcaaggcaaggttcgaaccgcggtgagctcggaattctggctacgtctgaactgtgcagatgtcagtagccaactatttgactggggcatgatgcggttgcctcgtccattttatggggttggagatccttttgctatggaagctgatgatcagttcagaaagaagcgtgacgctgag

SEQ ID NO: 184047 - DNA, 135 bp, Arabidopsis thaliana landsberg
atggcattcaggtcttgtctagtacggctgctgctccctatggcagcactgcttctgctcgctgccagctcgcccgcggcggctcagctggtggccggctactacagcaagacatgcccggacgccgaggccatc

SEQ ID NO: 184048 - DNA, 133 bp, Arabidopsis thaliana landsberg
ccttatggttctggaaccagtaaaagacgtttttaccttcgatatggccgtacgcacgaagcctaccggtgatctgctgaatctgatcggcgctcggagttcgtattccttccttgtaaagattttccagtag

SEQ ID NO: 184049 - DNA, 39 bp, Arabidopsis thaliana landsberg
atgaagttctcgcagctactccgacgaattgtgctgtcg

SEQ ID NO: 184050 - DNA, 407 bp, Arabidopsis thaliana landsberg
atggaaactccagaagaagttaatgaacttcatattcatagtgacgtagatagtgcctcccaggctcaacatcacactcttggatatggaattaatcaggccgcgccagggacagatgtaagtcgtcgtcttgcaattattgaggctcttatgaagtctcacggttggacgtaagatgcctaagcaaaaagaagagtttagttctgactctatccttcagaacatcgcagcaggtcttgggaacaagaagccgaaccattatgagtatctcaagtcgcttgaaaagaacactcacccgaagcaagttgccttccacaagtcacaggcaaatggtcgtcaattccttgggggtaaccgttcaggaaaaacggttgctggtattaacgagacgattatgtggttacttg

SEQ ID NO: 184051 - DNA, 163 bp, Arabidopsis thaliana landsberg
tgttactgttacgtgtgtgataagcctgctccttgtgcagagtggactatatcgacttcacattgcaatgcgtatgactctgctttgtggaatttgtgtaggacatagtgaaatctggctacttctacggattagagatctttcttatgacttcatcagttaa

SEQ ID NO: 184052 - DNA, 360 bp, Arabidopsis thaliana landsberg
atggctttaatcatcaaaagctttcgccaaatcctcaagcaacggaaggggaaggattacaaatcccgttccaataaggtttgctacaagtgtggtaagcccggtcactttatcgctaaatgtccattatcaagtgacagtgacagggataacgacaagaagggaaagaggaaagaaaagaagaggtaccacaagaagaggggcggcgatgcccacgtgtgccgcgagtgggactccgacgagagctccaccgactcctccttcgacgaggacgccgccaacatcgccgtcaccaagggactcctattcccaaacgtcggccacaagtgcttcatggcaaaggacggcaaaaggaagaag

SEQ ID NO: 184053 - DNA, 576 bp, Arabidopsis thaliana landsberg
  unsure (1)..(576): unsure at all n locations
atgcatggcaaggagttcggcaaggtttgccgcgatgctatcgccaactacgattacagcgtctctgccgagcattaccgccatggccgcacgcagatggcccgcctgatcaaggagggcaaggtctacaacgtcacggaagagcatatgccgtggctgatcaacgtnnnnnnnnnnnnnnnnnnnnnnnnnnnnnnnntgttctaccagaaggatggcgcgccgatctcgcacgggatcaagctctctcccgacaaccctctgtttggctacggccgccagatgatcgtcaaggcgatcgacaactacaaccgctacctgaccgagtttggaacggataccgcatgggttcctaccacacagcttgacgagctcgacgaagccgacctcccggtttggtaccagcaacgcctcacgacaggagcctgagatggctaagtgggtcaagggtgagcgcatcaccaatatgaaggacgcttacgacgcgattgctgaccagcaagttcttttcatgcccacaagccgcagaattccggatggcttcagaattggagccttagccagatacgccgcgaa

SEQ ID NO: 184054 - DNA, 103 bp, Arabidopsis thaliana landsberg
atgcccaatcctaatcatgattttatcccaaatgatgctagtgaaagcacaatggagaaacaaatgatccctggtctcgaaagatccggaacacaaactgcag

SEQ ID NO: 184055 - DNA, 825 bp, Arabidopsis thaliana landsberg
atgactctgctcaaaagtcagacaattcaaatttctggaattcaacactattatttactaaagtttgcaacttgtaaactttacaatgcgagggacagcgaaacaatcaatacaaacagaattacaggtacaaaagtaagtaagcttctttctttgatccaaaaagagaaagaagatgaaacctgcccattagagagatgcactgacactgagacatgccattgcagtaagtggtcttgcccgatccaggaggacctattactacttgtccaaacaccacgcttttgaagattgacaccaatttgagacacctgttgtgtaatatccgaaaaaaaaaaaaaaacgatcaactaatcgaagtaacataacagagaaacaaaaacaatccgccattataattgacacacttcacatctttcgtttataactcaacaaagacttcactggagaaacaatttgcttcaatagtataatcattataatctcagtatcaaccagagacaagaggatgaaatgagagaagctcgcctgtgtagttctccgaaaagagaagcagcgacaggtctgttagccgtagcaagagagactcgtcgaagactcgattctagacgaagtagctcgtcagcagtagatacatcgagatcgattcagcttcatcggcgacaggaagatattcggattcatcgaaggtttagcttttacattatcacaccgaccaatacagtgctgacacgtaaggtgtctcacactgtcttcagacacggctctcacaataagagcaataaaacgacatgtaaagcgttttatagcctggttgattattag

SEQ ID NO: 184056 - DNA, 404 bp, Arabidopsis thaliana landsberg
atggcgctcgcacatcgtgagccgctcagtcggcaaactgttggcgcggtcttgggccttggcggcctcaacagccgccatcgcctttgcctcggttacggcaaaccactccccgccctcatgttgctcggcaagcagccagtgagcggcgcactcgacggcctccgcgtccgccgacacgggctcgatatgcaccaggcggacggggcgtccgcgatctcgactgaggtgatagcggcggagcgacgggtctttagtcacacccaccttgtgtcggccctcgctgtcacgtgcgatgtagagatggcggggccaatcgctgaagctggccgtcacgcgtcgtcctccgccgccatcgccttctccaccaggaggcggatcgcctcagatcggctcgggatacg

SEQ ID NO: 184057 - DNA, 422 bp, Arabidopsis thaliana landsberg
aaatctctccccaagctacgagacacaacgagctatttcattggtacacgatttcacttaccggaacaaccaagttcctatggttctcttcctctgccttatgtcccgaacaaaacctccaaccgtcgatcctattttcaccagagatgaatgctccaccgcaaaatctcttgtaatctccgtacaatacccccgccttcatgaccctccgctttcacccaaagggaccctagggttacaactggtggacttttttggtgttggcccattaaagtgtcgaagacccaatgttttaaaaggtgatccaaattttttttttgccaaagcccaggtctgatctcaacttttctttgtccatctttagccaattacaaagacattcatcgataccactcgatcgaggacatcaactcgaccatgag

SEQ ID NO: 184058 - DNA, 174 bp, Arabidopsis thaliana landsberg
ccacagaatccttattggaaccaacatatagttggttttaatcaaccgacatatactggtaatgataataacctcctgatgagtttctggaacggcaacggtggagatttcataggagactcagcaagttgggatgaacttagatctgttatagatggcaacactaaaccctag

SEQ ID NO: 184059 - DNA, 1198 bp, Arabidopsis thaliana landsberg
ctgtccaggcccaaaaatatgaatgtagaatttcccatagtctggtaccattggattgaaaagaaggacatggtaacgtaatttgtttaacctaatcacaaggttcgcaagaagatgaaagtttgtctgtattacattgaaccatagagtttaaaacaacataacggagaatagtataatttgtatgagccaagcgtttatgccaaagagatggagtagaagccaagagaacagttgatggtggagatgttttattaaacaaggatgggagacaataaagatcaccttggctatcacatcaaagcagtatcatctgagtttgaaggtccttcacagaaaatccaaatgggtcaaactcaacagtacaccaattatcttttgtgaattgtctaacagaattgagatttttgacaatttgaggagtgacaaggacgtttttgagagtaagtgatctcaaaaggcttttaatagaggaagagccaacacaatttactggaatattggaaccattacccactattactgattgagtgttgctatgattaagaatagagtggagattacctagcgaagaagacagatgagccgttgaaccggaatccaagacccaagaatcccaattaggatccgtcagtgtctccgtcatttgtgatctaggttgaatttccattagatgcgcttgttgaacctgttgatgtggtgaagacgacggagtcggtggtcgaaacgagctttgttgataaggagaccaatttccaaagtagtcgggccaagctggaaatgggtcttgccaaaatggaggggtggtacaatttgaaaatgtggtttggaattgtgagttgttgttgttgggacctccacctttgtagtggttattgttgcttttgttgcccttgttgttattggactgttggtgttgatttgatgaacaaagcgctggcggtgcaagagcaatggtgagagctgtggttgatgaagaatgatcgttgtgggttgcaataaggtggtgtggctttttgagacgactctcctacagttccagcatcaatttggcgatctcaaatgttggacaaggatcgttgtgtttgattacattgattatgttatcaaacttttctctaagaccattaagcaagtacatgaccaagttacgttcattgaccggagcatcaacattggcaagcaaatcggcgagtga

SEQ ID NO: 184060 - DNA, 615 bp, Arabidopsis thaliana landsberg
atgattatcctgcagcatacatcgcatgcgtgtttgacgcaaaaaggcaaaactttccgcgatgacatgtatgcagaatacaaggcaacccgcgcgtcgatgccggaagacctggccaagcagatcgagccgatccatcaagcggtgcgcgcaatgggctggccgatcctgatggtcgatggcgttgaggcggacgatgtgatcggcacgctggcggtgcaagcggtcacgcatggcatggacaccgtgatctcgaccggcgacaaggatctggcgcaactcgtcaacgaccatgtcatgctgatcaatacgatgagcaatgaaaagctggaccgcgccggtgtcatcgcaaaattcggcgtgccgccggaacgcatcatcgattacctcaccctgatcggcgacacggtcgacaacgtaccaggcgttgaaaaagtcggtccgaaaactgcagtcaaatggttgacgcaatacggtaccttggacgacatcgtcgccaatgccgacaaaatcaccggcgtggtcggcgaaaacctgcgcaaggcgcttgactggctgccgcaaggaaaagccctgatcacggtgaagaccgactgcgacctggtcaagcatatg

SEQ ID NO: 184061 - DNA, 826 bp, Arabidopsis thaliana landsberg
atggagtatcgaaccctgctcttcagagccaaaagaatagtgtctgaaccactaggctgtgagtaactttttgcaatttaaaaatcaactctttccttagatctgatctcttcgaccatcggaagttggaaccctagtttctttgcgagggtaaacccagaatacatctaagagccaaggaaggtaatgtattcatttttcaacttatcttgtttgtatttggaagaaaagtgagagttctagtcttctagatgttttatattgttcttcatttactcaattttttcacgcagtgcaaacattattctcaagatgacacagagaacttcgagtcagatgagtacagagaaaaccaagaaagtagcagagttaaaccagactcaccggttaactatcaaacctacttgcagtatcgtttgtttgaaaagctgcatgcgatcattcatcttaattgttcggtttcttactcctctgcaaatcatacttattaccataacgtgatctagaagtttcaacaagaggctgatgcatagaaagctgatgaagaagctgaaactgcgggtaatgtaagaagtcactgctttgctcattttatcatatgctttagtgatgaacctcctttttgtaaaatcatatttgtttgtccggttctgtttgtgcatgtatattcagcaactacgatttgtcgatttaacctgaaaatttgattttttggcctggttttgtttcaaccaactggattagtttactcaaaattcatttcagaaaatgatcatttaaatgttgtggttcttgcaggcgaaatgcgaggaaacgcacgtgcgag

SEQ ID NO: 184062 - DNA, 111 bp, Arabidopsis thaliana landsberg
gacaaagttctctggtcgatcgtggtggtggttaaaggagcacgcgaaccgttcgaggactataatgatgagcgggagttacttttacaatttagaaatcttgctctttga

SEQ ID NO: 184063 - DNA, 459 bp, Arabidopsis thaliana landsberg
atggatattgacggagtagacgacgatcttcatattttagatcctgagctcttgcagctccccggtttgtctccttctcccctcaaaccaacctctcttattgctgatgacctcttctctcagtggctctcactccctgaaactgccacattggtagccaccttcttatttctacacttccttccttggcctctcttttacacaagtgtgttccatgaccttggtttcccatttttcatgtttctgtaggtcaagtctttgattgatgatgctaaatctggaacaccaactaataaatccaagaatttgccttctgtgtttctgagcagcagcactcccccactatctccacgaagctcctctggttcccctcgtttctccaggcaaaggactagccctccttctctccactctcctcttagatcactcaaggagccaaagcgccaactcattcctcag

SEQ ID NO: 184064 - DNA, 456 bp, Arabidopsis thaliana landsberg
gatattgaagccttgattgccccacttcggagtcttcctgaggctgagagccaaactcattttgagatgccagctagcaccgatgatgttgagatggacgtcgtgcttagcttgctagctggggaatcgtctgactctacctgtaccgagccgatggccatcacgactggacaagagtttggcgaggatgtgaagatccataaacccgaaggtgcccgcccaaagcgttcatgccgagtgaaccgcccgactacacctattgaggagaagaagaagaagaggcgacttcggcgactgtcgtgccttgatcaagatgctggtccttctgcgtcgatccttggtgatgttctagtggatgccattgccaaggtcaatgctgaaggttgtgatgatgtgcaggctgctagcggtgtgtttaaagaggatgaagaggaagaagaagaagaaattcactga

SEQ ID NO: 184065 - DNA, 569 bp, Arabidopsis thaliana landsberg
atggtccaactatttgatgatattgggatcgggaacatggactttagtattctgaggtataatatagttttcacgagtaatgtaggcattgtcgtgtgcaccacctcccaaataaatgattacaaaagttcagtattctaaaaaatggtttaggcggtcgtttaaactccatctaggcgctagactctcaggtaacgcctaaataatcgcttcgattgtctaaaataacataaattgccacactttccatgttcacttgtccatttattatcaattttagggtctaaatgattgttgtggttaaggtggacaaattcgtttgtgtatttgaccacgttttatttactatttcacaaattacgtctgtaatagtgtggatttaaaagagaaaactgatgcagaccctaaaccacataccgcttttacatacaaatagagttggttgcgacggtttgttgtccactttaaaaatagttcggactaaaccattgacggatttatccatcttaactgccgtaaccattcaaacttgtcggatgagagaagtaacaatcaaaaataccaattga

SEQ ID NO: 184066 - DNA, 384 bp, Arabidopsis thaliana landsberg
tttcagcgcgtgattcgacagacagcacacaaggtgcgcctgaagacgcctccaacaaatacctgctgaatgtgtacacgtcctacattttgcccaagaaaaagccggacctgtccgtcatctggttccgcacccccgacaacgaagaacacggctatggccctggttcagccaactaccacaaaggcctgcagtcacaggacgcacgcctgggtgaactgatggctgcactgaaagccaacaacatggacagcacgaccaacatcgtggtggtgtctgaccatggccacagcagcgtcagcggcccaaccagcctgttcccgctgttgaccatcaatgccagcaacaacgtgaccggcaccaccaccaacgccacgattggcg

SEQ ID NO: 184067 - DNA, 423 bp, Arabidopsis thaliana landsberg
gacaacgtgcccgacggcggcgtaccgacgatcggcctgccgggtaactcgtcgcccgatcccacgcggccattcctctccagcgcgccaatggtcgatccatccaacttctacggcaccgcggccgaccacgaccacgtcaagtccgacatggccacgctgatcgtgcaccacgagttttccgacaacgctgccctgcacgacaccctgcgctggggccgcacgcaggaaaactacctgttgacgtcgttcatgggcagcacggccaacctgctgacgcccgacccgctggatccatccacgtggacgctggcgcgcagcaacccgaacttcaaggaccagaccaaccgcatcctgaccaaccagaccaacttcacgctcaatttcgacaccggcgccgtcacgcacaacctgagcacgggc

SEQ ID NO: 184068 - DNA, 991 bp, Arabidopsis thaliana landsberg
atgattaactgcaaacttgtttcagttccaatgattccaaatgtgaaactgatgaaagctgatggtgagttacttgaggatagagaacaatatcgtcgtattgttggaaagttgatggatttgactataactaggccggatatcacttttgcggtgaacatgtcatgtcaattctcttctacacctaggactactcatcttcaagctgctcacagagttcttcaatatattaaaggcattgttgctcaaggcttattctattctacttcatctgatcttactctgaaaggatttgcagattcagattaggcttcttctgctgatagtcgtcgctctactactggtttcactatgtttgttggtgattcactcatatcatggagatctaagaagcaacatgttgtttctcgatcatcagctgaggctgaatatagagtgcttgcacttgctacttgtgagttgatatggttacatacattgctcgtttctttgatggctgctacttcagttcctatcttgttttcaaacagtacaaccgcgatctatattgcaatcaatcatgtcttccacgagaggacaaagcacattgaaattgattgccacatcgtgcgagaaaaggtagatgatggtgagttaaagttgctacaggttcgcacggaagatcaagtagctaatatcatgactaaacctttgttccctcaccaatttgaacatcttaagtccaagatgagtatgctcaacatatttgaatcctcatcttcagggggcatatcagagagtgttgtttatttatgtggtttagtatgtattttggttatgttaatgggttgtatagtcatagtatatatacttgtacaaatacattttatagagttaatgagaaaatatctccatcaatctctaacaaactctctcatctctctcaatcgtaatagctttcgcttacgcgtacccgcttccgattccatgcagcttagatatgggaagttga

SEQ ID NO: 184069 - DNA, 151 bp, Arabidopsis thaliana landsberg
atgaccaggcacctgacgctcagcctcacggccaccaggcaaacgtacctgaaccacaaagccagtcctaccgatgctctaagggaacaagaagacaaaacggcagctcgacagaacactcgagaaaacagcaccccaaactttcaacgag

SEQ ID NO: 184070 - DNA, 764 bp, Arabidopsis thaliana landsberg
gttgaagatgctgtttgggctacagaaaaagccatagccaagtgtcagtctgagtggaaggaagctggttcgttgatgaaggagttagagcttaagcctaagtttcggagtttccaagcatggctatgggcttctgcaacggtaagaacacttcactttatcacacgaaagttgctcgagaaatcgatgatggttgattagaaagctttgtgtaaacttacagctacaaactctacttctgtttgaagatatcttcaaggacactgcatgtaccatgggatagtgctggttgtttgtgtcctgtaggggacttgttcaactacgatgctcctggagattattcgaataccccagaaggtcctgagagtgctaataatgtagaggaagcaggacttgttgttgagacacactctgaaaggctcacagatggtggattcgaggaagatgtcaatgcttactgtctttatgcaagaaggaattatcacctaggagaacaggtacaagtcctcaactagcttttgttacagctgcaaaaactaatgaaatggaggcacaacgtagtaaagatactgaatggtgaggattgtatttgtgggtgtaggttcttctatgttatgggacttacacgaatctagagctgctcgaacactatgggtttatgttagaagagaactcaaatgacaaggtcttcattcctctagaaaacagccttttttctctagcttcttcatggcctaaagattctttatacattcatcaagacg

SEQ ID NO: 184071 - DNA, 549 bp, Arabidopsis thaliana landsberg
atggctttgcaaatgcagcaaacttcagcagccttcacaatctcctcaccatccaccgccgctgcacgcatcaaactctcccctttcagaaccgtggcggttaaccgcggagttagatgcagcggcggtggagtcggagtaggaggcggagatgccgggaagaaaaaagcagttcctaattctaattatgtagttcctattgataaattctcatcttcttcgtcgattactaggcctttgattgagatacttcgtgaccttaataagaagattcctgataacattgttaagagtcatgatcctccttctacttctgctgctacttctggttttatcccttggtattaattatccttttttttttatatctttttgttgttaagaagattcttgttggttcttgatctggtttttttatttataggtaccatgcaaatcggatgcttagcttctatgctcctggttggtgtggtgaagttagagatgttattttctctgagaatggaaatgttactgttgtttatcgtctcactattcgtggttctgatg

SEQ ID NO: 184072 - DNA, 796 bp, Arabidopsis thaliana landsberg
atgctcttacctagctctcgatgtgtcctgagcgtgggtgtgtgtccctggtgagtgtctgctccttcttccttcttgtgtcagattgcctctggttctcatagccgagattttcgtccatttccaggaggtggggtttcacaagccttccctgccacctatcccggagacgcggtggatcgagccgccggagggtcgctgcggagaagaagaaggagaagaaggacgcggaaaaggctcgggctcgcaagcgaatcgaggctcgggatgccttggagaggcttcgtcgtcggcaggagagggacgggctcccgaggccaagtcgactggagacgcctgacgatgacgacgacgacgacgatgacgatgatgaagacgatgacatggctgcccgcctcggcctcagcccgggtttgaggctaggccaggagtcgtcaagccagccctcgagcgacgtggcgccgtcagttcccggagtcgggacgccgaggtcccggcccgaagagcgggggcagaccgagggggtacttgacccctcgaccggggaagttgaggtgaccccggggagtcaggccgaggcgtttgttccccgagagccgtcgcccacgccggaagcgcaggagagcggccctcaggtcgccgtggcagcgcttgggcagtccgtctcccgggcgtccaaggtgcccaaggcgaggacggtaccgaagctggcggcgaggcagacctcggcggtaccttcgggggtcaagatccgagagacctctcctcaggcgcggttgatcatggcccggagcag

SEQ ID NO: 184073 - DNA, 201 bp, Arabidopsis thaliana landsberg
atgccggccggctttaaccgacatcccgaaccgatgacggtggccggtaccacctacgactacaccgacaccatggagccgtccggccagcactggctgtttgcgctggacacgcccatcgacgccccgcccgacgcgcatctgaacgccggactgacgctgatacggcacaaggccgtggaccagctgactcgctaccgc

SEQ ID NO: 184074 - DNA, 264 bp, Arabidopsis thaliana landsberg
atgcacatccttggcttggcttcagcgcaattctcaattcctcggccgggccggggtccactgatccacaagccgttgtgtgcggcccgtgcatgctgctgtccagtccaggcagcgcagccggtatgtactggggccatgatgagtccatgtccatgacgcgccctcccgccctgctgcgtgtcatgtctgcctctccttttttaatgctgacagacgacgcacagaaagaaacgtgatggtcctcaagtacgcaaagcatag

SEQ ID NO: 184075 - DNA, 249 bp, Arabidopsis thaliana landsberg
agatagtgccggtaaaggtggaagaaatgctgcatggaccactgacggtttctctagctggaataagtttaagaacatcttcgaacatgtaggaggtgttaataattttcataacaatgtagccatgagatgtgaaaacttgatgagacaagagcagtctatcaaacaagctttgcataaacaagattgttggtgtcggatcccgcaccagagtccgggacctaccaaagattgccacgtagatgaaaa

SEQ ID NO: 184076 - DNA, 74 bp, Arabidopsis thaliana landsberg
attttacacacaagaagaataagattcaagaacaacaaagaggaagaagaaaacttgctttggaagctctttag

SEQ ID NO: 184077 - DNA, 405 bp, Arabidopsis thaliana landsberg
atgatttctttacccgttggtatgctaatgggcgagaacctctatccgtcgggtagacaggtacatgtatgggtatatccgtgtacccgtgggtaaatatactcgtatcatatcactatttactatataattaaagtcaacttaactaaaagaaaatacttctccagttattatttgtttacctatcaagttatgtaaaccatatggtttattgtattttaagttgaacgtattttttatgtgtttgtttgacattttgagtgatttgtacattattattttagacttttctagcgggtatgggtaacccgacgggtaaaattactcgtgcgggtatgggtatgggtaaaattatagaccctcgaacttatacgggtaaccccctgtgtcgcatttttttgacgg

SEQ ID NO: 184078 - DNA, 126 bp, Arabidopsis thaliana landsberg
cggcgcacggacgatgcttgggccacggatagggaaaccggtcggaccaatgggtgcaccaacaccagtgtagcccggttccacgggactataggccatgaaatcaacggtggtggtggtggggag

SEQ ID NO: 184079 - DNA, 41 bp, Arabidopsis thaliana landsberg
atggtgaaacggccggagatgagaccagttgcaatgtggcg

SEQ ID NO: 184080 - DNA, 455 bp, Arabidopsis thaliana landsberg
atgacacagattgaaagcaacaatgccaacgtcgatgatgcaatcatgcttgacaaggatgggtttgtgtctgaaaccaatgcatccaacattgtaagatcctcggagtgaacgttttttactctccaaagagccgtactgaatctgtgtgtagcatttgcaaactaacatggtggaggaactctgttggtgcagttcatggtgaagaaagaccgagtactcactcctcacgcagattattgtctccccggcattactcgagctactgtaagagagaagaagattcatattctttctgataacatatttcaggactataacatgaccagtcttattttctaatccatgtccaggtgatggaactggtggtgaaagagaactttatcttagaagaacgtagaatcagcttgtcggaattccatacagctgatgaggtttcctcatcttttccttaa

SEQ ID NO: 184081 - DNA, 407 bp, Arabidopsis thaliana landsberg
atgtctcgccggaggattccatgcctggattcatatctggacaaggttagtaactccttgtctctcttttagtctgtgtgatatactcttaatgtatattacttgcagttgtgccaacttatgttttctacctggtataactttgaatgtcttgcatagattttagatatgagctcatagatgccgcttggttgatttccttaatgaatcttttgcaaattgagcaggttaatatttctttgtggcctcgttttaagacggtgtttgacttgcacatcggcagtctgcgaaatgcaaacataaatacaatatgggaagatgatgtgcatcctcactatatcatgagacgttatgctgaattcacggcttcgtttattcacctgaatgttgaatatggagatgggcag

SEQ ID NO: 184082 - DNA, 471 bp, Arabidopsis thaliana landsberg
atggctcgagttggtaagataaatttcttatgtatatcttccattcttaattggttctttgacattttaaacatgaatgcttgttcttgaattctttcaggttctttctgtaactgtatccttccagaaagcatacagctctcatcggttaatcatccggaagccctcgagttctctggtaagataatcatgttcgctcttcttcaccaaaaaaaactgcaataggcatttggatttcggataaaccagttgtgtttcatctccattgtagatgataacgatggatcagaagaatcagttgcatcttctgtgtcatacgaaacagatggagaaggatcggatcatcatctcataacagcaccaaacagcgacattgcgtatctacaggacagaccagtgagacttgcccgtgagctcctccaagaaccaactgatgatacatctccgcagtacttgttgaagcggtcctga

SEQ ID NO: 184083 - DNA, 65 bp, Arabidopsis thaliana landsberg
atgcatcgatacgaggcttataacggctcccaccgaattatctccttccccttgcatgctttcag

SEQ ID NO: 184084 - DNA, 499 bp, Arabidopsis thaliana landsberg
gtggcgaaagagagcgctgatgtcatcattctcgacgataacttcagcacgatcgtcacagttgctaaatggggacgttctgtttacataaacatccagaaattcgttcagtttcagcttaccgttaatgttgttgcactggttgttaacttctcttcagcttgtttaaccggtaggtttagaaagaataccaattcaatgtctcgaaaagaatcattttggattccttgtttgacacagctcttatgataatcttcaggaagtgctcctttaactgctgttcaattgttgtgggtgaacatgatcatggacacacttggagctcttgctttagctacagagccaccaaacgacgagctgatgaagcgtttacctgttggaaggagaggcaatttcatcactaatgcgatgtggaggaacattttaggacaagctgtttaccaattcatcgtcatttggattctccaggccaaagggaaggctatgtttagtctccccg

SEQ ID NO: 184085 - DNA, 56 bp, Arabidopsis thaliana landsberg
ataaaggaagtgggaaatggtataccgagtggctgctacgtggggagctggcgtga

SEQ ID NO: 184086 - DNA, 103 bp, Arabidopsis thaliana landsberg
atgaatatgatcggcaaaaaaaaactgatgttatacacttatactgtggtaaccgaaagtacaaaatgtcgatctttctttatgaaaagatggtttggtgaag

SEQ ID NO: 184087 - DNA, 4669 bp, Arabidopsis thaliana landsberg
ttcccgcgagtcaagaaaaatatacttggtttggtgtgcagagatacattccaagtgaaggagagcggtcaaacttggtgcaaacctcttgggcaatgatgggtttacttcatgctggacaggtttataatatggatatgctgagacttttacttcctcgctatatgaaagatcttattcaaagtatttaattgttccttttaatctcacactacaggccgagcgagatccgtctcctcttcaccgtgctgcaaagctcttaatcaactctcaactggagaatggcgattttcctcagcaggtacttttggaaacatgaaacaaagctaacacaaaaagctgctcatacaaaaaccttagagatgccctcacgatgaaccataacgactcaaattttatctggtccttttgctgcctaaaattttaactggtcctcgtgagttgatgctaaaaaaatgcataacgtttgaagagtcaatattgtatattttacaggagataactggagctttcatgaagaactgcttgttacactacgcagcatacagaaacatcttccccgtgtgggcactcgcagagtataggagacgagttcctttgccgtatgaaaaaccttcaacagagagaagaagttagatccatcagaacgtctcaaaactcacaggtcattgaccatgatgtaggatcattaagtcatgacctctattttgcaataagctattatttatatgaaggtggttgagtattcttactgaataagcaaactaatgatcgtgtatgaacatacacatctaatattatatgttcatatgtattatattcatgtattgtatcatgattcatgactatgtatgttctcaagtaatataaatgtattatattatatgtatgtagttaagtacgtatccaagattaagcaaaatattttccccaacaagtactctcatttttgtcttttaattctctatcatcccagaagtaacatcttcttgtcggtgttttcttatcacatatttaccaaaaatctacccaccttatcttaacttaatatacttccacttatataatctaatgtatgcgtttaagaaatgaggtacgtagctcacatttttgtaatgtggaggttgaagataggagaagggaacggagatgatccctacttattcactactaacaacttcgccggacgacaaacatgggagtttgatcctgacggaggctcgccggaggaaagacactctgtcgttgaggctcgccggattttctacgacaatcgttttcatgttaaagcaagcagcgatctcttgtggcgcatgcaggtttgtattttgtttttctggtttgtaatttattccttggaacattttattagcaacgtgctattttagtaaaaaataacaatttttcaaagtaacacgaatgattttgagttttgactcctacaaatttcctcatttgatgaaaaataaaaaaaaatcataagctcacttttatgctgttcatttttgtaatgtactaaaatacatggaaaataccaaaataaacacaaaaagatacgtaattttgagaaactacgaacaaggccctaaaaaaaagtttatttacgaaattgacctgctattttaaaagtaccgaattttgcaacagtttctgagggagaaaaagtttgagcaacggatagctccggtgaaagttgaagactccgagaaggtaacctttgaaacggcgacgagtgcattacggagaggtattcatttcttctcggcgttgcaggccagcgacggtcactggccggcggaaaatgccggccctttgtttttccttccgccactggtaagtagttttttccggtgtcaattgtagaatcagagattaaagagtgcaattgcgtaataggtaaaagaataagataatttcaaatcgatcgacgaatgaaattggattagggatcagtgtgattttagttttcgtgtaagtgagaatgttgaaattgaaagagggaatttttaagtgaaagtctgaaactttgttgctccaaatccaatgcacactgtgtactgtgtaggtgttttgtctttacataacgggacatcttgatgaagtgttcacttcagaacatcgaaaagagattcttcgatacatctactgtcaccaggtacagtttttggtctatagctccacaacgaaatgtatcttcttcaatgtgctcatgttggatttttatgtccatagaaggaagatggtgggtggggattacacattgaaggtcatagcacaatgttctgtaccacgttgaattacatatgtatgcgtatacttggagaaagtcctgatggaggtcatgataatgcgtgtggacgagcccgggaatggatccttagtcatggtggtgtcacctacataccttcttggggtaaaacttggctttcggtatgtattcagatcatctggtattataacctgagaatgactagaaaagttgtatcataagcgtgcgtcttgttgtctgcagatacttggtgtatttgactggtctggaagcaacccaatgcctcctgagttttggatcctaccttctttctttcccgtgcatccaggtttgtttcttgacatcagaacttatgagattgggaaactggattcctcttgttgatatttgaccaaaaaccttatttggcgtactacaatgattaagagtttctctacacaagtatgctatcaatgagatgtattaattaacgaaatcttacagcaaaaatgtggagctactgccggatggtttacttgccaatgtggtatctctaccggaagcggtttgttggcccaataacgtctctgattttgcaactacgcaaagaactgtacttacagccttatgaagaaatcaattggatgaaagtccgccatctttgtgcaaaggtaagaatgttaggatgtatcgacatttctctttatgattttctttcatggaaaagaacacggatacattcctctactttaccttaggaagatacatattatccccgtccactggttcaagagttggtatgggacagtctttacatctttgcggagcctttccttgcacgttggccatttaacaagcttcttagggaaaaggctcttcaattggcaatgaaacacatacactatgaagatgaaaatagtcgttatatcaccattgggtgtgttgaaaaggtaaaaacaccttaccttaagacacaaagtattgagcatctggagttaacttcagtctctttctgcaggtactatgcatgctagcttgttgggttgaagacccgaatggggattatttcaagaagcacctctctagaatctccgattacttgtggatggctgaagatgggatgaaaatgcaggtatgtccatggagattggaaatccaatttgttacgtttactaaccttgagttggtaagaaatcgaattttttttgattatgcagagctttggaagtcaactatgggatacagggtttgcgatgcaagctttacttgcaagcaatctctccagtgaaatctctgatgtactcaggagaggacatgagttcataaagaattcacaggttcgatatctctgcagcatatactgtagcacaaggaactatttcttttgaaaaatggaacattagcttaaaattgataaacaattgaaggttggagagaacccttcaggtgattacaaaagcatgtaccgtcatatttcaaaaggagcatggactttttctgaccgagatcacggatggcaagtttcagactgcacagctcatggcttaaaggtaaccagccgttaaaactaaacacattgacatgttcttcagtggcatgagtactacatccttgctgttttctggtctcatagtgctgcctgctgttctcgatgttggcgccggatattgttggcccaaaacaagaccccgagagactacatgattctgttaatatcttgctctctttacaggtgagcattatcagacatagaatagaaccaacatcatcaaagaaacacccattttcaggtcgtgacagtttcacttgtttgcagagcaaaaacggaggtatgactgcctgggagcctgctggtgctcccaagtggttggaagtaagaaccaaaccccataattattttcaaacaaccaaaagatactttttaaaacatttgcggtcatgtaaccttcttcatgtatttgtctcagttgctcaatcccacagaaatgttttccgacattgtgattgagcatgagtacagtgaatgtacatcgtctgcaatccaagcattgagtcttttcaagcaactctaccctgatcacaggacaacagagatcaccgctttcatcaagaaagctgcggaatacctagaaaacatgcaaacacgtgatggttcatggtacactagcgattacgatttatctgaaattgttcacggaaatccaaactaacaagaaatgaaccattgttctttgaatctacaggtatgggaactggggcatttgcttcacgtacggtacatggtttgctcttgcaggcttagcagctgcgggtaagacttttaacgactgtgaggcaatacgcaaaggcgttcagtttcttcttgcagctcagaaagacaacggaggctggggagaaagctacctctcttgctccaaaaag

SEQ ID NO: 184088 - DNA, 495 bp, Arabidopsis thaliana landsberg
atgaataggataattagtgaatgcagtgaacactatctaagtgttggtgttagtaagtatgctcaactctggaacgagcagaggaaattgatactggacgatgcggttcatggtttacttttgccgtcagtggagaaagaagcaagatccttgctaattagcagagcgaagactcagttgctttcagagtatggacaggttttatggaacaaagtgtcttcagggccatatcgaaagaataataatacctcggatgaggaagctgcaccgagggtcctaacttgttgttggggacctgtaaatccagaaactacatttgtgatgcttgattcatcaggagagctggttgatgtgctttacgcaggttccattgcattgcggtctcgggatgtaaatgaccagaaacgtaaaaaaatggatcaagatcgttttctaaagtttataaaagaccatcaaccagatgttttggctttagcagctgtaaatttgagttgt

SEQ ID NO: 184089 - DNA, 145 bp, Arabidopsis thaliana landsberg
gatgctctcatgggagaggcacaagtttaaatgtggctccatagccttaaccgtcacgaagctcttcaacgccattgtgctatccaaacaaacgggaggccttttacgagcagagaagattgacagctgctctggcagccaataa

SEQ ID NO: 184090 - DNA, 37 bp, Arabidopsis thaliana landsberg
atggttaatctcttcagacataagctgaaagagaaag

SEQ ID NO: 184091 - DNA, 494 bp, Arabidopsis thaliana landsberg
gcccgctggtgctggatggcgaaaaccttgacctggccaaggtagcactggatggccgcgagctgggcaatgacgactacgactacgacggcaccgtacttaccgttcccgccgccgaagacggcaacgtgctggaaacgcacgtgcgcctggacccgtcggtcaacaccgcgctggaaggcctgtacctttccggtcagccggaaaccggcttcctgctgacccagtgcgaggcacagggtttccgccacatcaccttcatgcccgaccgcccggacgtgcagtcgcgctacaccgtcaccctgcgcgcggacaagacgcgctttccggtgctgctggccggcggcaatcccgacggtgccggcgagctggaggacggccgccactgggcgcgtttcgtcgatccgcatcccaagccgacctacctgttcgcgctggttgccggctcgctggaaaagatcagtcgcgactacaccaccgtcgagggtcgctag

SEQ ID NO: 184092 - DNA, 62 bp, Arabidopsis thaliana landsberg
tgatgcgagtcaaaataggaagcagcaaagcagccatcatcatcatcatcaacatcagctga

SEQ ID NO: 184093 - DNA, 328 bp, Arabidopsis thaliana landsberg
ccccaactgggggcaggcactgctcgactggggccgctcctaccgcgcggccctgaccgagcatccgaacatcgtccccttcctcgccgccgggcccggcctgcgcccggtcgggctgcggatggccgacgccgtcttctgcggcatggtggaggcgggctggtcgccggcccaggccaccaggatcggcgccctgatgcggtacttcgtgaccgggttcgcactcggctccttcgcaggcggctttgtgggcgacgcggacgcctactaccccgtcgactacccgcacctcgggcaggcccatctggtggccggacaccggcagcgg

SEQ ID NO: 184094 - DNA, 68 bp, Arabidopsis thaliana landsberg
atgttgagagtccagtttcagaagttggacagctcttatgctaacgatttctccatatctgttcccag

SEQ ID NO: 184095 - DNA, 144 bp, Arabidopsis thaliana landsberg
tctcaaccaaaccgaaattttgaatatgtagtgaaagttagaagtcaagagcacatggaagcaatccaagaaggaggctcgagcagagctgggctaatggaagatgatgaagaagacgaagaagaacaaaacgaaacctctgtg

SEQ ID NO: 184096 - DNA, 143 bp, Arabidopsis thaliana landsberg
atgggcagcaccgtcttggacgcaaacccgtcaaccttaagagaacatccaccttcctcatattccatcaagtttgagaatatcgcagaactcgacgatggcaaatacgaatctagtcttttcgcagctggcgggtacaactg

SEQ ID NO: 184097 - DNA, 157 bp, Arabidopsis thaliana landsberg
gatcgcaaccaccaacgatgatacaaaagagggggaaaaattatcaataccaaaggaaaagaagaagacacttgattccggaaatgaaataactgatcaagaaaaagaaataggcaccttgagtcaggaaatggaatctcatccgtcccgttcttag

SEQ ID NO: 184098 - DNA, 511 bp, Arabidopsis thaliana landsberg
atgttggcagcagcggatcttgcagcgattcgtctcaaagatatctcatcaaataaacaccaaagcttcaagacaacaacgaaccagagagacagagtgttttgccttctggacaaaaacggggacggaatgatcagcatagaggaactaatggaagtgatggaagagcttggagctccaggtgaagacgcagaggagatgatgcagcttcttgactctaacagcgatggatctcttagttcagacgaattcgatacgtttcagaaacaagtccgtttatttttgttttctaacataaatttttcttcctctcttttattttataagtgacttactgatgaggtgtgtggtttgtgttttgcaggtagagttcatgcgtaaatgggaagatagagataacgagtacaagagtcttttagacgagaagcttcatgatcttccacatcaagataccacaggtttgatacagttatacaataaagagcttgaggatcgtctctcaacccattaa

SEQ ID NO: 184099 - DNA, 125 bp, Arabidopsis thaliana landsberg
atgtcatacttctttcgcattgtacgattacagaggtccagggaaggtgccgttttcgcgttgctcgttccagcgatcaacctgcgaattgaacacaattcagccgagcttaagatgccaagacg

SEQ ID NO: 184100 - DNA, 2131 bp, Arabidopsis thaliana landsberg
atggaaatctctctcgacaggcttcccattaaacgattggaatctatcgaagaaaatggcgccgagcgttttccttcgtaagtgttgtctggtgtttgagaaacgagacaaaatcttcccagattgttttgcttctaaattattccttttgtttttgacgtgtagtgatgttgattacgatgataagagagtatcgctgattcggagaatagacttcgcgtgggcgttggaagaggaagatgagctgaagaagaagaagcagaagaaaagctccaaggatagcgtggagcaatggaaatggaagggaatggttgagaatttgcaattggctcatcaggagctcactgtcatcattgaccttatcgacacagtgagtgactcttgttgataatagataagaattttgggatattcatagctcttacagtgtctgttttattggtttgaatggaaggagctgaagtttggtttctgatatttgaatagagagtaaaacttaaacaatttatcttctgattttatctttgaaggtccaagcaaatgatgcagtaacagttgctgggatgaccagacctaagccgatgccgaatgagattctctcggatcttgctgtgtctactgctaccaagctgcagggctaccgggtaatcagtagcttactttcttatgtgcaatttaactttgcttaaagatggaaggattcttgtaattgttattagttaggcactttttagtatcctgagaaactgttggaaacattaacttggtttcgtaaagagctttataactatataattgtctttggatggtatgcttatctcacttctgaatatctgtttcctctgcagaatttaggaaactactttaaacaatcagcaaaagctttagagcagaaaatcaatcgtgaagcaaggttttatggtgctcttatcaggttcgagtacttgcttttcatttaatgtcagtggctattttccttagtactattttgcaacttttaagaatttgttgtttgcattcttgatactagttttaggtagcttacaatgtcatagctatttgtgttgtgcacagataattagcgtccgaattttggatgtagagttattacgcacgtaggttttgtaatatgttatgacttatgactgacaaacgtgaaagcattttattattcttgtctaatgtgaaaaagttctaaattttgacttctacaccgtctctgttactgaacctgcatagtacagtacttcaggaacatccattttgttgtgtagtgactgcttaagattatgccaacacaaattagagaatttccgttgaaattgctcataatttgtataaaatgataagctgacttcagcttccaaaatagagattgatttatacgtgcaaatggttatttttgctatactaacaagcttataggttgcagcggaactggaaagtcaagcgacaacgcatgcttgcttcaaatgccagcaatgagggcttcaccattgatctttctgactgttcattatatgatccgacttctggttttcgcccatctacactgtccactattcgtgtagatcatgattcagctggtatgctggccattaatgtaccccaagattcatggtactctcttcggtttgggtatgttggcttaaatccgattggcaactcaaacgaatctgatgagcacatagactcgactactggtcacgatatccctggaacatcagagaagcagtctgcaagtgacgacaaatatgttaaagaaactcattcgctactgagggaggtgcataaatcaatttttgctgagcaggtggtatttttgtcatatatcttgtagtacgcttggtatatctcttcacgactatttctcacttctttggtcttcttaccagttgtttgacatgctaaatcgtgaagcattcaatgaaggtgtgggattcaacataagtggactacgagaaaattttatggaaatgagcatcggccaaggagcttctctgtttgtgtctctccacccatcaggcaaaaatcccagcatcaagaagtcggaatctgcaaccttgctcattgaatcatctggcagagtagaaccagcagaaggaggagactatcgcttgaagaagctagg

SEQ ID NO: 184101 - DNA, 339 bp, Arabidopsis thaliana landsberg
gttgccaaaacatttgatgttagcttgatgggagcttcatcgaggtcgtgtaaatatgttttgaacacacttatgcaggtaacttcgtgtgaattagtgatgctgctcttcttcattagctggctagcccacttagatttgtttgtgaagttcactactcataagtatgtatttttgcagacattccaaaataaaaagcttgcccatgcagtcaaagaagggactcttgaaagccttataacagagctcttgctttggcttctggatgaaagagttccacgcatggaagatgggagtcaacttcttaaagctctgaatgttttgatgcttaagatcctg

SEQ ID NO: 184102 - DNA, 979 bp, Arabidopsis thaliana landsberg
atggcagacaatttgcggcgagcagtacaagacatcaatctcggcgcaaacaatgctccagttactttatcggcggcagtggtggcccaaccggcggcagagaaccggttcatcctcatgggccgtccagttatcccccgcagacagaaccttcgttcaattgtggcctcaatgccacgagtttggggccaagccagcttgatccatgtcataatcatcccaggcaaccaatttcaattaatttttccatcggaagaatcgcttgacatggtgattcggaggggtccatgggctttgaacgaccgaatgcttgtgcttcaacgatggacccattggtgaatcctcctctgaccacaatcccattctgggtccaaggggcgggggattccttttcagttcctcagtgttgaggtaattggagagatcggaggcgcaatcggtgaggtccatgacatcgattttgatgctgaggcagcatcacgaattaaatttgttcgggtgcagataaactggaatgttgagaatccccttcgtttccaacgcaattttcagttccagggtggagtgaataccttgctccgatttcgatatgagcgccttagaggcttttgtgaggtctgcggtatgttaacccatgactcgggagcttgtgtgatcactaatggtggacatgattctgactctgagggtgacgatgatgatgacatacccaatgctggaatccaaacccaaggtgtagaaatccgtgagattgaagagggtgaagagaatgtcggtcctaacatggctctggtggttgaggctccagacgataatatgccccccattgatgacatagatccccaacaaaacttgctggagaatgcagatgatgatcttcaagactatcaaccttacagcatgtaccagggagaaagtgacacaaatgaactcttcaacccaatatcaatctttgcaaatgctacaggagacattcccg

SEQ ID NO: 184103 - DNA, 72 bp, Arabidopsis thaliana landsberg
atgactgtggagattctctgttacattgactcgcataaattctcacataaagcaaccactttccagattaat

SEQ ID NO: 184104 - DNA, 866 bp, Arabidopsis thaliana landsberg
atgtcctcaatatcttctccttacccgttcatgaagtggtccatggacgtcgtaggtcccatggaagcctccagtgggaagaagagactaaaaaacctgctggtcctcaccgactactctaacaaatggattgaggctaaagccttccaacaggtaaccgagaaacaagttgaggacttcctgtgggaaaatattgtatgccgacatggcataccatatgagatcgtcaccgataacgggactaacttcacctcgggaaaaatcatagcattctgcgacaagtggaagatccgtcttaccacgtccaccccccgttacccacaaggtaacagacaggtagaagcccccaacaaagctatacttagcaacatcaagaaaagacatgattctaaaaaatcaatgtagtccgacgtactccacggagttctctgggcctaccaaactacacctcgcaaatcaacgcaagaaacaccgttctctcttgcctatggtttagaagcagtaatccatgtcgaaaccatagtaccaagcgtgagaaggaccgccagtcctgctaactcggacctgaacacataaatgttacaggacaacatggacttcatcgatgaacgcatagatcagacaatgatccgagttcaaaactatctaacaaagctactgcccgctactataactccaatatcaaaatttggagattcgaaatgggagagctcgttttacgaaaagtgttcagcaacacgagagagctaaacgccggaaaactgggaactaacttggaaggtccctatcgaatcaccgaggtggtacgtgacagcgtctataagaacaaaaaagttatcaacggagtacctgagttaacgccttag

SEQ ID NO: 184105 - DNA, 71 bp, Arabidopsis thaliana landsberg
tttcgtcggataaatctaaaaagaggcaaaatcaaatcgaattctcgaagaagcaaataacgtctgcataa

SEQ ID NO: 184106 - DNA, 293 bp, Arabidopsis thaliana landsberg
atgctcaacatcaagcctcgacaagaaacaagccgagatatatacagagacgctcaacaagaaataaagagagacaatgtcaagttgtcaacatattcttcaataagtaagcgactaatcacatctttgcctctgaagagctgatctccatgcgtaaaacgctccagagatctgccagtgctaatttaaattcacctgccaacaaggatcatgggcatgtaagcagcaaggtaacacaagtgaccccaaaaacaaaaacaaaaaacatttcttttcgtgctcaaaacatataa

SEQ ID NO: 184107 - DNA, 134 bp, Arabidopsis thaliana landsberg
ctagcctactcttacagaagctgagatctctaagaaatgaatctttgaagaaatcagaagaagaagaaggaattaaaggcgatatcttcgagagagagagaaaagggagagaaggagagaagagggggctttga

SEQ ID NO: 184108 - DNA, 57 bp, Arabidopsis thaliana landsberg
agggttcatacaccgaatgttcatgctcgaggtcaaaacgaagaagataattcttaa

SEQ ID NO: 184109 - DNA, 394 bp, Arabidopsis thaliana landsberg
atggtggtggtaatctgtgggacgatagctccaacaatcaacgttgttgtcggtggtggtggtgctctgggtgtgtgtttgtgtgacaattcgaattcgtcgggtgggtgggtgtgtgttgtaattacacagaaacacgtattggtggagggggtgcaagtgtctcctcggaggtgggtgctgctgctcctgcgccggttcctcgtcagcccatagtaagtcgccagtgataatggtcgtctgtcacgtattcggagttgcgcccacgatattcacggtattccaaatggtattcgcgccgtcgcgtaagcttgttacaaatgtttggttggtaataataacggtattgataatcgtcagccttatattggtaatgattgtcgtcagaatccag

SEQ ID NO: 184110 - DNA, 199 bp, Arabidopsis thaliana landsberg
atgactcaaaagtttgagatgtcgatgatgggcgagttaagctatttccttgggttccaagtgaggcaactcaaggacgagaccttcatctcccaaacgaagtacacgcaagacttgatcaagcggtttgggatgaaggacgccaagcccgcaaagactccaatgggaaccgacggacacactaacctcaacaaaggag

SEQ ID NO: 184111 - DNA, 1595 bp, Arabidopsis thaliana landsberg
atgagtgtagacgtgagggttgaggtcttcaaggcatttgggataataggaactgcatcagaaagcattatattgcaaacactttctaaaaaagtattgggagctggaaaagggaagaaaccgcagaatcttctttctaatggatcagctgatgtcagttctgcagctggagtttacatccatggttttgaagatgaattctacgaggtactcttatgataaatttcctttctcgttttgtctgtgcaacatgattccattatgtgcaaaccatttaagtaggtgtttaagaagtttagttgagtttttattgttgctggactaatacatacagcatttgcatgcatcattttgaaggtacgggaagctgcggttgactccttccactccctctcagtaaattctatcaaattcccagatgaagctgtgtatttattgatggatatgctatacgatgattatatggttgtgaggttgaaagctttaaaggcattgcatcatatagcagacttggggaacctgaagatacaggaaacttatatgcctgccgtaagtcaccatattctttttgctctttttttcttgctatagtactgtttaggtaaaaagctaatgaaaatgcagctgcaatacttctcttgctatacttaataagtttggtgtcttgtctcgagttatccagattttatgcatatcacctcctatcggtttatgcccaatggagtagcttcagaattgtttgctctctagggcctaatgcttaataggacattaattgatttgctactaaactaaccccggtgtcatgaactccatgtgttgtcaccttgttcgatttggctatttttttgctatgagttgtgatgaagagctattacttgactttgcagtttttggatgctattgttgatacttctgaaaacataagagttgaggctagaaacattcttaaattggcaaagctgcctgatctgaagctggtcaacaaatgtattgacggtgtcctgaaaagtttagagatgtatccacaggttggcacacttacctataaagttcaattagcttctgatttcatcatttctttctttttcttttcgtgaacctcaaattttttgctgtttcatcctaggacgaacctgatatcttgtctgctctgttccatttcggacaaaaccacacaaatttcttagtcagtatggtcaagagatttagtgaaaaggtaagcgagccttttttttcactctttttcaggattcgtcaactataggcatactaatcatttctttgctcacttttgcatgctcttcagttagggacagcttctggaagtaaagcggaattcaatagccggcagttatctgcttctctgacgctgataatctcagcccctctctcaaacaaacaaagcatcacttcgataccacctctggcattttcatattcacttgcaatgctggggaaattctctagtggacttcatgatatgatggaccaggatatgcttctggcttacttgactcattgcgctattctttcttcttcttctgggacagcattcaacaaaggagatgtattttttcatgcatatagagaca

SEQ ID NO: 184112 - DNA, 715 bp, Arabidopsis thaliana landsberg
atggcgcatgaacccagtagcccaagttcgaatcttgtttctaatccggccaatctttcagcttctgggttagattatagctctgatttgagcaataagcgtgtctctgatggaattatttctgggtttgggagtgagaaggtaagtattgatgctatgaatagaaacaatccaaatttaggcaataaaagaagtgctatggatgatgaagaattggaaaagatgaagtttttatgtagctacaatggaaagataatccctagaccaagtgatggcatgttacgttacgttggtggtcaaacaaggatcgttagtgttaaaaagaatgtgacatttgatgagtttgagcaaaagatgattcaggtttatggtcaccctgttgttgttaagtatcagcttcctgatgaggatcttgatgctttggtttctgtttcatctagtgaagatattgataatatgatggaggagtttgagaagttggtagagagatcttctgatgggtcagggaagttgagagtttttttgtttgatgcttcttcgtctgaggtggatgattctttcggaatattggagtatggtgatggagttgatattgggcagagatatgtagaggctgtgaatggtgttgttgtgagtaaggaaagtgtagctagtggtagttctaatccgaattctgattttagtggcgtggatgttgttgatagcttgggcgttg

SEQ ID NO: 184113 - DNA, 1510 bp, Arabidopsis thaliana landsberg
atgccttttccgtggatcaatgatgaggataacgtcatacttcctggcagattttctgttgatgaatgtgcattgtacagagcatcatcaaggagaaactcatgctctctgctatatgagtccttcaacgatgaaacagactcagagttgagtgatgtgtcctgtgcttcaagtcttagtacaaatcgttcatcccggaaccataaacccggtatcaaggtctcttctaagtatctgcatgatttaacagctaaaccgagcaaaggcaacaacaagaccaaactaaggtcacaagatgattcacagagaactaatagctctaagggcattgagaataggttgcagaggaataattcagtgtccaggtatggaagttcgatgtctcagtgggctctttcaccaggaaggtcattggacactcaggcggtgacagttccaagttcaaaactgaagcctccaagaggaaaaggcgtgggtaaactaatcaaccttggtttcgatttcttcaggagcaagaacaagtcatcgccctttacttcaccactaaaaccaaagacatgtgacacagaatctgctcatcagctgaagcttatgaataaccggttgcttcaatggaggtttgtcaatgctagagcctgtgatgtaaacaagaacgtagcctcccaagaaaaggtaatgattgtatcatcacttcttctcatgcttgtcactttattgactttcacataatcatgcgttcagtgctttgttcatcctatgaggcatgaaataaaatagaagtgatccccttttgcagaatcaactactctgtgcatgggatactcttatcaagttaaataatttggttctgcaagagagaatcaacccgcagaagaaaaacctggagatgaagctgaattatgtgtttctttctcaagtaagtgtcaggtccaaacccatttacttattccaagccatggaggatataagcaaatatacacagggttgatacgaaatatatcttaaacaggttaagcatcttgaagcttgggaggacatggaaatacaacacctttcatctctgtccataatcagagattccctgcattctgttctttccaggcttcccctcaaagaaggcgcgaaggtaaattaaatcatgctcctctgatctgttaactatttgaactcaaaacaaatattctttgtctctattttccaacaactcctaaggttttttcaggtgaacttggaatcagctgtcagtataattaagaatgcagaagcagtcactgatgctatcatttcaactgtggatgattatgctcccacggtaggtttttctggctctgcgacaaatgtgacatgatagtcgtgtatctaagcggtgtaataacctataatgttccagtagcagatggagggtattgttccacttgcttcccaactagcggaagtggttgtacaagagaagttgatgctcgagaaatgccatgaccttttgagaatgatttccgagttagaggtataa

SEQ ID NO: 184114 - DNA, 892 bp, Arabidopsis thaliana landsberg
atgggagtttatgttgatgatttaaatattatgggaacttctgcagagatctccttcacagtagaatatttaaagaaagaatttgagaagagagattttggaaaaacaaaattttgtttgggactacaaattgaacacctaaataatgtaattctggtgcatcaagagacatatacagaaaatgttctcaaaagattctatatggatggagcactccccttgagtagcccaatggttgtaaggtcacttgatgtggataaagatccattatgtcctcgggaaaacaatgaaggagttcttagtccagaaatatcatacttaagtgcaagttcatgtccaactcgaagacattggaatggaattaaacatatacttcgttatctccaaggtaagaaagacatgagtctgctttttcctaaccaatttagaagatttaattggttttgcagatgcaggatacttatctgatctccataaggttttgcagatgcaggatatttatctgatccccataatggtagatcgtaaacagaatatgtcttcacatgtgggggtattgctatttattggcgttctatgaagaaaactgttgcagccacatcttctaatcattcagagattttagcaattcatgaaactagccgcgagattttagcgtgtatggctaagatccatagttaccatatacaaaaagattgtggtatatatgcaaggaaaaaagctccaacaattatgtacaaagacaatgcagcatgcatcgcacaactcaaaaacatatacatcaaaagcgatagaacaaaggacatcctaccaaaattcttcttcacacgactttttgagttttatgctcaactatatcagtatcgcaatcaagggtggcagagtgtcgagg

SEQ ID NO: 184115 - DNA, 229 bp, Arabidopsis thaliana landsberg
atggaaaagtcaaaccaaccagttcatgtaaccttgtccgaattgaaggacggagataaagaaatcgttgatgctgaatttttggttgatcttcttgagagctatagatttggtaaagataatgttcccgcccgagaatttcgatccaaggcggcagcgacggctccggcgccggtcaacaccaccgagatagagttggaagaggataatgatggatctcaagctcaag

SEQ ID NO: 184116 - DNA, 146 bp, Arabidopsis thaliana landsberg
gtccacgtcaagcgatcctgtttccaacactgaccgttgattacaaagaatcgtccaagggtccacgtgtacgaacaggatacgaatctgatccgtaccgtacctccaaaacaaaccctctggacagttcagtagtttcttcctaa

SEQ ID NO: 184117 - DNA, 71 bp, Arabidopsis thaliana landsberg
atgactttgatagagccaagctttgccatgaacaccggtccatacacgtcagccattgccccaaacgtaac

SEQ ID NO: 184118 - DNA, 185 bp, Arabidopsis thaliana landsberg
agtttaagcaagcattcatggagcattacattccaaatggtattctgcaaatgaagctggaagaatttgttcgtctgaagcaaggcggtgactctatgatgcaataccttgctaagttcaaccacctatctcaatatgccatagaacaattcaatacagacttaaagaagaaaattgcttcatga

SEQ ID NO: 184119 - DNA, 306 bp, Arabidopsis thaliana landsberg
gaaaaaaaaatacaacaagaaagcaaatcacaagatgatcaacccattagcaagacaaatcctcacaaatttgatctaaacaaaccctattatggcgaagaagtggttcatcttaacgaagtattggaacaaaaggatattagagcagaaaatttccgatctatcgagaagacaatctctactcgtaattttgatctgaaccatcagtatttcgaagaaggagattctcaaatcaacaaaagatggaatgaaattaaactggaaatgctgaggcttttgctgcctcctcgaaatttgaaggattga

SEQ ID NO: 184120 - DNA, 2341 bp, Arabidopsis thaliana landsberg
  unsure (1)..(2341): unsure at all n locations
atgatgctcgccaatcctcttccattcactcccttgaaatcgctaaaaccttacaaggacgcatggtgtatccaggttagattgcttcatgtttggagacaatattctgtaaagcctggtgaatccatcgaaatgattttggtttatgaagctgtacgtattatagttacaactttatgttttcgttgaccttatagtgtgttcaagcatcatttttctttactaattattatttaaattatttttgtcatatagggtgataagatgtatgctgctgtgagaagagagcagatcaagaagtttgaaaggtgcttaaccgagggtgtttggaagatcattacgacaatcactctaaatcctacaagtggccagtatcgtatttctgacttgaaatacaagattgattttgttttcaaaaccacggtctctccatgtgataacgtttctgatgctttgttcctctcacttgctaagtttgatgtgatcctctctagatccgctaactcaaatatcttgcacggttagattcaagttttcattttattttagaacatacatgcattattccttatatagtcaatatattcatagatttcttctatttgactatacagatgtaatgggtcaggttgtcgatcggtctgaaatccaagatcttaacgctaacaacaagcccaccaaaaaaatcgatttccatttgagagatcaccagtacaaacaatcgaaattcatattcattcttatttaaagtttgttgtttttttactttttattaataattttcttttttccatatttagtgacactcgcttggcatgtacacttgggggaagtatgttgagatcgttgacaaagcttgcaagaagtcaactgatggtattgttgtttgcttaatccgatttgcgaagatcaatctgtacaacggtaattatattgatatgtactactatatatatatatatatatattattttttagacatgtccttttatttataaaacagataatatgagtgtttccaattcttttgatgttttacaagtcttcgtggatcccacgttggctgagttgagtctttttaagcaaaagtaattttatttatttgccactaaatatatttgcatgctttaccagttttttaaagtatattttcttaatatatagcataccaaccgatgggttaactttgggaagttcggattctttccacataagacactatgcaccaagaactggcgatgacgatggtgattatcctaggcaaacaatcaagaaagtccacgcatcttatgatgtaccattcattaatttatgtggtggcaaacctttttattacattttcatatttgaaacttagtttgttaattcctctttatattcatttgaaagtgggtaagtgcaaaacagtttgtttaatccggcaattgatacaaattggccgtggtactatttttgttgtcgtgctcacaacaagaaggttgtcaaagaagaagttatcaaacttgaagatgtcaagctacctcaaaagccaagattttggtgtgaaatatgcaatagttttgcaaaatctgttgttgccaagttagtctttatgaaatccttatattgaatgtattatgatttataatttggtgtttagaagctaataatcctatttaacttttaggatttggttacatctcccatattatggaccaaagtggtgaagccagatgcatgttattcgatagtcatgcaaaggaaattcttggcattactgcccatgatttgctttctaggtcatttgatgaggtttattgccttttaaaaaaaaaaatctttcattaaaatgtctacgttcatgttataataatctatatttttctgtagatcgaagacccaactgttttgcctgatgttatcaatgagattgaaagggaagacttttcagtttttattgtgcattcaaagggagaacatatttggtggatatgattcattcactgttgcccaagtctacaccggtaacattgtcgatgaaatcgttcaagaagactctgatgcatacgttgatccatcatccttnnnnnnnnnnnnnnnnnnnnnnnnaataacattaaactattccaattatttctcaaaattttttagggttgtcttattaaaatgtttttgtattttcatatacggttcccttatactcactaatggtgttgacctttctgatgtcgatttgttgtcaacctctactccatcatcaaaacgaaaagattcagatgatgttgatggaaatgatcaggcttccacaagtaggaagaagtgttctacgatgaccatgtctgaggaacgctccggcgaatga

SEQ ID NO: 184121 - DNA, 188 bp, Arabidopsis thaliana landsberg
attgttacttgggatatcaccagattagtctagcgaaggaagaagaagaaaaaaccgcgttcatcatgccctttggggccttctgctacacctccatgccgtttggcatcaaaaacgctggagccacttaccacagggctatccagacatgcttagctaatcactggggaaagcgtgtggaggtttaa

SEQ ID NO: 184122 - DNA, 294 bp, Arabidopsis thaliana landsberg
agcaactttttttttgttattgaacttgttgatcaggaaatgttaagaacaattgcaagggagagtaatcatataagtgaaaaacttttggttgaggaaaaatatgactcaataagggaaaacgaagcttcggccaatgaatttgaagaagaagatgaaatagctaacaacgaggatgacgttgtaactaaagaggctgctgctttagaggcaaataatgataatgagaagaaagatgaaatatatattggaatggagttccgctctgatgagaatggatatataaccttataa

SEQ ID NO: 184123 - DNA, 78 bp, Arabidopsis thaliana landsberg
atgagatggttttcatacgatacaccggcaaaaagggtcatcgctaaacatggaacgattgatgatggagagaagaac

SEQ ID NO: 184124 - DNA, 407 bp, Arabidopsis thaliana landsberg
aagagagaaagaatttatggagtgcgttacgagatcatatcgactctccaattattagtaataaagcgtggatcatttttggagattttaatgaaatcctaaatatagaggagcactcgcaattggagaaccagcctgttgttacttctagaatgcgggacttccaagaagcagttcattactgcactctttcggacatggtttctcacggtccgctttttacttggagtaataagagggatcatgggttgattatgaagaaacttgatcgcgtcttggtgaatgaagtctggttgcagaattatcctatgtcgtataatgtatttgaagcaggaggatgttcagatcatttaagatgtaggataaatctgacaacagtgagtgaagaaaggggtcatgagcgttga

SEQ ID NO: 184125 - DNA, 462 bp, Arabidopsis thaliana landsberg
atgtttacatcttttaatcttatcaatcctcttgaaaccgcacttaaagctttggcaaccaatgactatgacactttaaacaggaatgttgatgctatgtctcaattcgcgatggaatgtgaaagcgagctgtcaagtgtcatcaagcctattccaaagctcttgaaaagggtttctatcgtcgaaaatgtatccgacattatttttgtaattgtggaatgttttttaagaaaagaagaaacttcatgtaaggaatcagtatcaaatctacaataataaattaataatcataatgttgtttggtatgatgttgccattaccgatttacaccgataattaattgttttagtgttaagaaaaatcgaaatccaccacaagagcataccaaatcacgaaaaagcttgtttgatagatcggattggaccggctttcgtatttgaaaaagtcatcgttcacctgtga

SEQ ID NO: 184126 - DNA, 306 bp, Arabidopsis thaliana landsberg
ggaaatttcaattgtatgtcaattacaataatgtcgatatttttctctgtaacgacgccggtaggaatcgcggttggaatggcaatttcaagctcttatgatgattcgagtccaacggctctgatcgtacagggagtccttaacgctgcatctgcaggcatcctcatctatatgtctctagtggactttctcgcagcagattttatgcaccctaagatgcagtctaacactagacttcaaatcatggctcatatctctcttcttgttggagcaggggttatgtcacttttagctaaatgggcttaa

SEQ ID NO: 184127 - DNA, 678 bp, Arabidopsis thaliana landsberg
catctccaccaactcaaaatgaggatgaagctcaagatgatgaagtagaagatcaagcaaatgagccacctcaagacgacggcaatgatcaagggggagatgcaaatgatcaagaaaaggaggatgagcaagaaccaagaccgccacacccaagagtccaccaagcaatacaacgagatcaccccgtcgataccatcctcggcgacattcataagggggtaaccactagatctcgtgttgcacaattttgtgagcattactcttttgtttcctctattgagccacacagggtagaggaagcactccaagattcggattgggtggtggcgatgcaagaggagctcaacaacttcactaggaatgaggtatggcatttagttccacgtcctaaccaaaatgttgtaggaaccaaatgggtcttccgcaacaagcaagacgagcatggtgtggtgacaaggaacaaagctcgactagtggccaacgggtattcacaagtcgaaggtttggattttggtgaaacctatgcacccgtagctaggcttgagtcaattcgtatattattggcctatgcgacttaccatggcttcaagctttaccaaatggacgtgaagagtgccttcctcaatggaccaatcaaagaggatgtctatgttgagcaacctcccggctttgaagata

SEQ ID NO: 184128 - DNA, 198 bp, Arabidopsis thaliana landsberg
atgggtttggaagtaggcaacaaggaagcaaggcgattccaaaggtaactcgaataaaatggaactagctctccgaagtttgacagcgccgtcgacggggttgactcgttaaccggaggttgcgaatccattgtagtcggctatcaattttctcagttcaccactcgccgggtttatgaccggagacggagtcgttag

SEQ ID NO: 184129 - DNA, 521 bp, Arabidopsis thaliana landsberg
  unsure (1)..(521): unsure at all n locations
atggcatccgcgacccaggctggtacacgcgcgacctgttcaacgccgaccgcgtcgaagtctacaagggcccttcggccttcgccttcggccgcggttcgaccggcggcgcgatcaacacggtgtcgaaactgccgacgggcgcgagcttcgttgacggcatcatcagcggcacgagcgaaggcggctaccgcgccctgatcgacgccagcggcaagaaggacaacatctccgggcgcatctccgcgatgtaccaggacgtgccaaccccggatcgcgataacgtctccgtcaagcgctggggcgtnnnnnnnnnnnnnnnnnnnnnnnnnnnnnnnnnnnnnnnnnnnnnnnnnnnnnnnnnnnnnnnnnnnnnnnnnngcattccggactacggcatgccgtatctgccgcagccatcatacaataagaataccggagcactgtcgaacggtggctactatggcaatggtcaggaaacaacacccgttccggtgccgcgtagcaactggctcggcgtg

SEQ ID NO: 184130 - DNA, 360 bp, Arabidopsis thaliana landsberg
atgggtaacatacagctgttggggatggtgagtgaattagtaattgcatagaaaattaagactttcttgtaacgtgattttgatataaaattggaaaagttcagtagtttctgaaatttctgcatgtcaaggaatatacttttcgtgacaactgtctcttccaatttatttataggtcgtaaggatggaaacggatcacaaggactgttccgtgaaagtagacaaacttgttgagaagcatacatggatagcatctgaaaagcaactttttgggaaaggagggacagattatgattttgaatcttgtgatccgtatgtggccagagaaaaacttgaaaagctccaatcagatcaatcagg

SEQ ID NO: 184131 - DNA, 112 bp, Arabidopsis thaliana landsberg
agggggacgatgtcatattacatggcctatcgctctggcaaggtttgtcgacgatcacagaagaacccgagaagaagaaggaaggattgatgatgcaaaggaagaatcttga

SEQ ID NO: 184132 - DNA, 226 bp, Arabidopsis thaliana landsberg
aaaacaacgaatttctagatacggaaacttcaatggagctttatctagacactacaaaagacggaacaaagctaaatccaaattcaaacctctagcgaaaaaaacgacaagagggaaaaagagagtaaaaccgtaccagtgtgaagaaatctgcgtaaagaaccgacgaagagcaaaccctagaaatttgaggaagaggattgatttaccggctctcggagattaa

SEQ ID NO: 184133 - DNA, 185 bp, Arabidopsis thaliana landsberg
atggttacagtggtatcttttgaagacagtttgcggttgcggctaacaggtgaggctgtaggttcagtgaagaattttgtgagaggattagggtctggtgagtgggtagattcggtgaagtttctcaaggctttttccatttttggtttctagggttttggtttgaggacaaaaggaaggtgtaa

SEQ ID NO: 184134 - DNA, 337 bp, Arabidopsis thaliana landsberg
cgtgtaatgagcagatagctcttccgggtgcaacaagggttttaatgcttgacatcatcgcaaacccttgtatggctcgacaagccatagagttggcttatcatccaggacaacaaaacaaagtttattcctataggcttgtggctgcggatacatcagaagaaggcgaagacataatagcagctaaaaaggagataatttctggaatatggtttgatgggaagacttatcctatagatgaaattttttgtattccgaccattgatggaaactacagcaatgattacttccttggagcttcatacatgagggaagacattaaaaccatatacaaaag

SEQ ID NO: 184135 - DNA, 8 bp, Arabidopsis thaliana landsberg
atgaactg

SEQ ID NO: 184136 - DNA, 263 bp, Arabidopsis thaliana landsberg
atgggaacgttcacgagctttcgaaaagcctatggagcgctcaaagatacaaccaccgttggtctcgctaaggtcaacagcgaattcaaggtcagattcttgatttgtttacatcaccattgtgtaaagctttaaatttaagattcggatttaaacgatcgatgcatgttttttttggaatggatcgttataggatttagatattgcgatcgtcaaagcgacgaatcatgttgaatctccaccaaaagaacgtcatgttcgta

SEQ ID NO: 184137 - DNA, 4797 bp, Arabidopsis thaliana landsberg
atggttgccaatggttctctcatggctttctctcgatttaaagcaggcctggtttcattccataacatacagcttcacaaaaatgcaatgcaggtaattggttgctcacctgttctagaagtcgagcaatgacagtgtgtgttgaaactgaaacagctgcgaacttttctgtagcatgaccatgaaacttgagcgaatgttgtgatgcttaaagttccatttcgtgtctctttcagattcttgggcttcttcttgtcaatgacaatggtagcacggcaagctacatacgcaaacaccatctggtatgccattgtatcctgtagaaagccttactggggaatgtatattcttgttttttttttgctaatgttcaagctatataaggtctcccgtgataaagaaattggttgtcaggagacttttgttaatttactagagtatgagaataaaactaatgataagtattggttttgtgcatatatttttgtttgtcacaatctgagcattgccatatgatagctgcaatctggtgtttaaatggtttcttttgtgatgtttacagtaatcttcaaaccatttgacggagtttctaagaatgcttgttcttggtttgtgaactgaaaatctatgttaggaagctagatcgctaggaaaactgcctcagatagattttgtgactaaggacaactatttggattctgtatagcgtgaaaaaggcccgcacctattatttgtttctgctacatctaaacggggctttttaacaaaaattctggcacaagttagtggtatgactgcttgttctgtttcgacgtcttccgaactaattttttttgctgagttcttctgcagataaaggttctcctaatggctgtcaaagattttgatccggattgtggggactcagcttatacagtgggcattgtggatttgttacttgaatgtgtggaactatcgtacagacctggtaagttcacttagacaaatcataagaactcaaaatatgtcaatgcttgtggaaaaggtagtagagagtagaaatattcggtagtcaccttctcagttttgggttggtaaactgctctgattgtggttgctaatgtttcttaaattttgactaatgtagaaactggtggagtcaggctcaaagatgacatacgaaatgcacatggttaccacttccttgtacagtttgcgctgattctatcttccatgccaaaagacattgtttttgcgttcgatcattcatccccacacaaaaatagaggttccaatgactctaaaaaacagccacccctttcagtgaaaactaggcaaaatgacgactctgaaaaacagcaatccctttcattgaatagtaggcaaaatgatgagtttgctttaaaacatttctcccctgcactttccagattgcttgatgttcttgtcaccttggctcagactggtcccattgagtcatctggaacaagtacctcactattgtcccaaacaaagctcactgggtatagcaggagacaaacaccatctgccaacaatcggtatgatgagccatgtgaacagggaagtggtaaagttaaagaccttgaagctgtccaaatgttgcaagacatctttctgaaagcagaaaacaaggatcttcaggctgaagtgttaaaccgaatgttcaagatattcacgagccatttggaaaactacagaatatgccaagaattaaagactgttccacttctcgtgctgaacatgggtggttttccttcctccctgcaagagttaatcctcaaaattcttgaatatgctgtcacagttgtaaattgtgttccagagcaagaactattgtcactttgtttcttgttgcaacagcctatcgattctgagttgaagcataccatactttctttctttgtaaagctcacatcttttgatcaacagtacaagaaagtcctaggtgaagttggtgttttggaagtcttacaagatgatctgaagcagcacaagcttctcaggggtccagatcagtatagtggagtttctaatcatttggatcgggtacctagctcacctagcttcaaacaacacctggatagtcaggatgccatcatttcatcaccgaagctgatggaatctggttcaggaaagttgcctatatttgaagttgaaaggactataactgttggttgggattgtatgatctctttactaaagaattctgaagttaatcaagaagcttttcgttctgccaatggcgtgaccgttattcttccattcctgatcgctgatgaacatcgtaccagtattttgaggattttttcatgtttaatcacaggagacattaaacaggtaagtctacattcaaggaatatgtatctcgatattctatattatacagtgtgttttcttgtttctctgatctacaaagtcaaattctattagcttggcaaggcttttaattctttagatcatgccgccactaatgaggtttctgttgcttaagtattataaatccttgagtttctgtaaagggtaactcgtatctgacccgtcattcaaccaggtccatcatgaagagttagaagctcttatcgatgtgttgaagagtggaatggtcaccagagtctctggggatcaatacaagcttcactatgaagtcagatgtgatatcatgggtgctctgtggcgtatcgttggggttaatggctctgctcaaagagtctttggtgaagccactggtttctctcttctattgaccacccttcatacgttccaaggggaagaagagtgtagggatgagtctcatttgatggtttacatcaaattgttcaaacatctattgcgcctcataacaactgctgtctgtgagaatgctatcaataggatgaaactgcacagtgtcattacatctcagacgttttatgatcttctggtggagtctggtttgctgtgtgttgatcttgaaagacatgtgatacaactgttgttagaacttgcacttgaagttttggttccaccgtttttgacatcagaatctatggcctcagctgagatggcagaatgtgaaaaagcaagctttcttgtaaaaaccgcgtctggccaatttaatcctgacaagcagaagatctataatgcaggtgctgtcagagtactgatccgttcactgttgctttgtactccaaaattgcagttggaatttctgaatcttctagaaaggcttgcacgtgccagcccattcaacaaggaaaccctcacgtcagctggtaagaactttgtcttagggttccacttgggctcgttattattggctaagttaactcttaaaatcacaccgttgctgtttattctcttcttcactcttaatgaattataatggagcaggttgcgtagaactcctgctagagattatctacccctttctgcagggttcgtctccatttctttctcatgctttaaaaattgttgaagttcttggagcgtacaggtagtcaaccatagctaaaatttttataatacgtagtcttaaggtgactaggtttgtttgtaggctgatcttactcaaaatacggtcttattctggtgcagattgtctccatccgagctcaaaatgctgtgtagatatgtcatgcagatgagggttatgaattcgggtccctcactaattggtatgatggaaaagctaattctcatggaagaagacacaggattggaatgtgtttccctggctccttttgtagaaatggacatgagcaaaactgggcatgcttctgttcaggtgtccctgggtgaaagatcttggcctcctgctgctggttattcatttgtttgctgggtccagtttcgtaactttttgacaacccaagaattagaatcagaagtttataaagctggtggttcgtcaaagacgcccattttgagtgggcagcaaagcgaacaaaatattttccggatattttctgttaatgctataagtaatgaaagtccatcctatgcagaactttaatttcaagaagatggtattctgacccttgccactagcaattcaaattctttgtcattttctggattagaaactgaggagggcaagtggcatcacctcgctgttgtccataataagccgaatgctcttgctggactctttcaggctagcgttgcttatgtttacattgatggaaaactaaggcacatgggtaaactggggtattctccttcacctgttggaaaatctttgcaagtaataattggaacttcagctacttgtgctagggttagcgatttgacatggaaaatacgctcatgttatctttttgaggaggggctcacgtcaggctgcattggtttcatgtacattcttggtagagggtatacaggtctttttcaggatgcatatctcttacgtttcgtacctaatcaggcttgtggtggggacagcatggctatccttgacttgttagacactgacatgtcgtctggtatccaaaaatttgaagacagtaatagacaaggcgattccaaggcacatggtagtgggattgtatgggatctcgataggttagggaatctttcaattcagttacctggtaagaaacttatttttgcatttgatggaagatgctcagagttcatgcgcgctaccggaagtttttcactcgtcaatcttgttgacccattgtccgctgctgcctctcttattgggggtatacaatgatcatatataatttcgtacgtgttttaccttttatgttttagtttcattctacgtttctcaattatataggaataccgcgtttcgggcgcctggtgggaaat

SEQ ID NO: 184138 - DNA, 288 bp, Arabidopsis thaliana landsberg
gctcttcatgagactgaggcggcgatcctgcgggagtgggaggtgcttgaggccgaataccagcgcctcagcgactggcatacccagctggaggagcacaccaaggcggtgtcctgccagtttgcctctgagcggtccgagcttgagagggaccgcaaggactacaaaaaggacctccagaaggtgtacgcccgggagttggaggtgggcaggaaggagaagaggctggccaagaaggaggaggccttgaaccagagggaggaggtcgtcacaaagctccaggcgaac

SEQ ID NO: 184139 - DNA, 114 bp, Arabidopsis thaliana landsberg
atggagagcgctagctgctgtgctgcccatcggaccgtcaccccggccgcattctctgcggtagtaccaatcgaccttcgtcgagcggccgcgcccaagcgcgaaacacgccat

SEQ ID NO: 184140 - DNA, 316 bp, Arabidopsis thaliana landsberg
atggaaaccctcatctccacgttatttgccactcactttggaaaatccagagttcaggtaaaatagtccatggcttagctaccatagccaaactgttgaaggaaagaataaaaattgagtctttttggttttgggaatgaatagtttgttcattgatttggtggttgaatatttacaggttccagattgtcatgcgagagaatttacagatcagaaaagattagaaatgtctgttactggatttgtgcagcaatggactaataaggattctattcaggaatctgttttgtatctgaaagatcggcactttgtgaag

SEQ ID NO: 184141 - DNA, 1207 bp, Arabidopsis thaliana landsberg
atgatcattagtttgatcatcatcatcatcatggctcctcgatcttcacatcctttgctcagcgtccaaactacgtcgtcttgtatcaatactgctcctttcgagcattgctcttaccaagaaaacatggtcgagctctatgaaactaaaccaaatttgatgaatcatcatcatttccaagcgatggaaaactcatacttcactcgtaatcatcctcatcatcatcaagagatcaatttggttgatgaacatgatcctatggacttggagcaaaataacatgatgatgatgaggatgatcccttttgattaccctcctacagagactttcaaacctatgaacttcgtaatgccagatgaaatttcatgtgtttctgcagataatgattgttatagagcaacaagtttcaacaagaccaaaccatttcttacacgaaagttgtcttcttcttcttcatcatcatcatggaaagaaaccaaaaagtcaaccttagtcaaaggacaatggactgctgaagaagacaggttcgttattaacacaagaaacgtcatgaatcaattaacataatcaagaccttttgatgattatagtattacactattctagaggttttaacaatattcactcgtttttgcttgtaaatgaagttttcttgttttggataatatagggtactgattcaactcgtggagaagtatggattgcgtaaatggtcgcatatcgctcaagtgttaccgggaaggatcgggaaacaatgtagagagaggtggcataaccatttgagacctgacattaaggtattttactagtatttactagtagctataagatcatgtattgatgattatggaacctaaaagataaagattattgcagaaagaaacatggagtgacgaagaggacagagtgctgattgaatttcacaaagagattggaaacaaaatgggcagagattgcgaaaaggctcccgggaagaacagagagctcgatcaagagccattggaacgcaacaaaaagaagacaattctctaaaagaaaatgtagatctaagtatccaagaccttctctgttgcaggattacatcaagagcttgaatatgggagctttgatggcttcttctgttcctgcaagaggtagacgcagagagagtaataacaagaagaaggatgttgaaattacggttgaggagaagaagaaggaagaggag

SEQ ID NO: 184142 - DNA, 480 bp, Arabidopsis thaliana landsberg
gaccttgatgttcgagaatatgccatctcagttgctggaaggtaatcggaaaaaaatccagcatacgtacttccagcacttcgtcgccatcttatacagttgttgacctatcttgagctgaggtaactacaaattttttagttcatatgggaagattcatttcctatgattatgtatctgttgcattgacttcaattgtaatgtcagcagtgcagataacaagtgcagggaagagagtgcaaagctccttggttgtttagttcgaaattgtgaacggctcattcttccatacgtagcccctgtccaaaaggtttaatttcttttcatttcttagatagtatggctattattgttgttcacggggttgtaactcttgttttctaggcacttgttgcgagacttagtgaaggaactggagtgaatgctaacaataatattgtcactggagttctcgtaactgttggggatcttgcaagagtg

SEQ ID NO: 184143 - DNA, 306 bp, Arabidopsis thaliana landsberg
aaagagtaaacggggtacagttccttccattcatacacaagcacctttcacagctgagaagaagaagcatccaattttgcatctatttgcgaaagttgatgccacaagacttgagaaattggctgaatggaagaaatcaaggaaaaacaagtgagttttgttgtaagatagtgagtttttttttttaaataaaacatttatttgtgactgttttgttgttgtaggccactatcaatcgccggaaatattatagatacaaagtggtttacaaccctagagacgccagggaaagcaataacagcaacg

SEQ ID NO: 184144 - DNA, 813 bp, Arabidopsis thaliana landsberg
atgcataatttgctagtacaactaggcctagacattgttcgtaagcaatctattcataagcctgggaaacgtcagttcttggttgatactgaagatatttgtgaagtactcactgatgatacggtaagttttaatatttgtccttcattgtctttggcctgtacaaatagtatacttatttcttttgatccatttcagggtaccagaactcttataggcatagatctcgagttatctggtgtaatcgagggcgtaataaatattagtgaaagagcctttgaaagaatgtgcaatctccagttcttaagattccaccatccatatggtgatcgttgtcacgacatattgtacttaccgcaaggtttgagccatatatctcgaaaacttagactacttcattgggaacgttatccactgacatgtttgcctcccaagtttaatccggagttccttgtcaaaataaacatgcgagacagcatgctcgagaagctgtgggacgaaaatgaagtaagtcattgttattattatccaattgtttaaaagtgtatatgtgtgtgtttgaagccatatgatctttactctctgttcacaatatattcatgctgcctttatttttctgtacagcccattagaaacctcaaatggatggatttgagtttttgtgtaaacctgaaggagcttcctgatttctctactgccactaatctccaagaattgagactcataaattgtttaagcttggtggagcttccctcttccattgggaatgtcactaatttactggaattggatcttattgattgctcaagtctg

SEQ ID NO: 184145 - DNA, 434 bp, Arabidopsis thaliana landsberg
atgaagagccaaggtatcctgcctaatgttgtgacacacactacacttgtcgacgtttatggcaaatcgggtaggtttaatgatgcgatagagtgcttggaagagatgaagtcggttgggttgaaaccatcatcgaccatgtacaatgccctcatcaatgcatatgcacaaagggtaccatgactgttaatagtatcagttacagatccctaagagaattatcatttgatactgatagttgaatgattctttcttgccagggtttatcggaacaagctgtgaatgcatttagagtgatgacatcggatggactaaagccgagtttattggctctcaattcgctcatcaatgcctttggtgaggatagaagagacgctgaagcctttgccgtgttacagtacatgaaagaaaatgtaataacttctcttggctaa

SEQ ID NO: 184146 - DNA, 1476 bp, Arabidopsis thaliana landsberg
  unsure (1)..(1476): unsure at all n locations
atggctacatccgaaggttgtttggttgctagcactaacagaggctgcaaggctatgtttatctctggtggcgccaccagtaccgttcttaaggacggtatgacccgagcacctgttgttcggttcgcttcggcgagacgagcttcggagcttaagtttttcttggagaatccagagaactttgatactttggcagtagtcttcaacaggttcatctttttaaccaatattttcccgttggatttgattttgttgacttttgatttaagatatatttcccagtgaggagacttgttcaactaaatttgataggaagcttttacatcaagtttgtgttgaaaatttgcattgaaagtatttgtgaagtgttttgatttaagatggagaattttgcaaggggattttactgaagaagagtgaatttttggatgcaggtcgagtagatttgcaagactgcaaagtgttaaatgcacaatcgcggggaagaatgcttatgtaaggttctgttgtagtactggtgatgctatggggatgaatatggtttctaaaggtgtgcagaatgttcttgagtatcttaccgatgatttccctgacatggatgtgattggaatctctggttagtttccttctttgtgtgattgatctgatttaaaaacttccctatatcaagcttagtgtcatcttgagacttaaaactctagttgatatttttgatgctatcttgtgaaattctgagaaccgcacagttgctaatatatccttatcataattcttcaggtaacttctgttcggacaagaaacctgctgctgtgaactggattgagggacgtggtaaatcagttgttgcgaggcntgtaatcagaggagagatcgtgaacaaggtcttgaaaacgagcgtggctgctttagtcgagctcaacatgctcaagaacctagctggctctgctgttgcaggctctctaggtggattcaacgctcatgccagtaacatagtgtctgctgtattcatagctactggccaagatccagctcaaaacgtggagagttctcaatgcatcaccatgatggaagctattaatgacggcaaagatatccatatctcagtcactatgccatctatcgaggtagttgatcaaacctctttctctgagctcacttataaagtttctgaattcaagagatcttgattatggtttttgggtttggatttatcaggtggggacagtgggaggaggaacacagcttgcatctcaatcagcgtgtttaaacctgctcggagttaaaggagcaagcacagagtcgccgggaatgaacgcaaggaggctagcgacgatcgtagccggagcagttttagctggagagttatctttaatgtcagcaattgcagctggacagcttgtgagaagtcacatgaaatacaatagatccagccgagacatctctggagcaacgacaacgacaacaacaacaacatga

SEQ ID NO: 184147 - DNA, 130 bp, Arabidopsis thaliana landsberg
atttattatctatataaaaggtggggaatattttgagaacgtcgaattacctaagaagaagacaatgataatgtttatcggagatggtatcggaaaaacagtcataaaagcaagccgcagccgcatatga

SEQ ID NO: 184148 - DNA, 520 bp, Arabidopsis thaliana landsberg
atgcacttcgcagagctgttcttggtcatgccaggtttgttgaacactacacagagctacaagagaagtacaacgacttatgctcaaagcataaagcaacagtggaatggataacagagttgaagaaggcagtagcaaaggctggtaaaaagggttgcggttctcgttttgctaaatcacttgcttctgagctctcagcacttagagtagaaagagaacgagaaagagatctgttgaagaaggaaaacataagcctcaagattcaactaaggaatactgctgaagctgttcatactgctggagaagttcttgttagactcagagaagccgaacaatcagcatcagctgctgaggtaaacaaatttttcatgttttaatcgatgaactgttggattgagactgtgacattgttttctgagtgactgtttggttgcaggaaaagttcaatgaagtagaagaagaaaacgagaagctaaagaagaaaatggaaaagttgaagaggagacacaagttggaagtg

SEQ ID NO: 184149 - DNA, 534 bp, Arabidopsis thaliana landsberg
  unsure (1)..(534): unsure at all n locations
atgacccgaaggcgacgccaccgcgacggggagtggctgggctgctcgaccacgggcctcaaccatggaaacacagagaagggcatgggagagagggagaagaaggggattcctcacatgcgcagggcaggactgaaccgcagtcggtggagcggatgcgaggnnnnnnnnnnnnnnnnnnnnnnngctcccccaaacatggtgcagcacatgggagaaagggcgcggggtggatggcatgctactacgtgtgagaaaacgaggaagacaatattcacgacagggggtatgtatatgtcagtaccctgaaacaggggtacccttactatagtgtaaaggcgcggtgcccatgcgactacctctagtcgcatggtaaacaacgcccgaccccaccacgtggtcgactcccgggtcgccacgcggccagaggagacgatatgctccaaggtatcaacagtgggtccgaaccccacgagaaagtgtcggaccctagatgcatagaccgaactccgggcgaggttcaggacctcacag

SEQ ID NO: 184150 - DNA, 310 bp, Arabidopsis thaliana landsberg
atgggtcaccttatcccattcgtcgagttagcaaagcgactcgttcagcacgactgtttcaccgtcacaatgatcatctccggtgaaacttcgccgtctaaggcacaaagatccgttctcaactctctcccttcctccatagcctccgtatttctccctcccgccgatctttccgatgttccctccacagcgcgaatcgaaactcgggccatgctcaccatgactcgttccaatccggcgctccgggagctttttggctctttatcaacgaagaaaagtctcccggcggttctcgtcgtcgatatgtttg

SEQ ID NO: 184151 - DNA, 197 bp, Arabidopsis thaliana landsberg
ccaaattcatcacaaaagaaaaagaaaagaaaacgaattcacaaactgctacagtaatggctctaattcgtaatcacccttctgcttctctcggtgagatcagaccatggaagatcaaagtgcagatagttagaacgtcgaagggaaataagaaagaatcagacaactccatcgacttggttttactcgattcgtcg

SEQ ID NO: 184152 - DNA, 91 bp, Arabidopsis thaliana landsberg
atctatcaaggaaaaggaagttgtggagtatcaacggcttctcatggaagaagaagaaaaagagttaaaggggcagctacttccagtatag

SEQ ID NO: 184153 - DNA, 184 bp, Arabidopsis thaliana landsberg
cgaagttaaactcttcaacttcaagggagagaccaagaaaaaaaaaaatgcaaaacaaccaatcatctcttccaatgaaaatgtgccacgtatacatgatcggaaacgttttgactcagttcactttggtttaactcgttatcggattaaaaataaaaagcctctcttttttttgtctcagtga

SEQ ID NO: 184154 - DNA, 116 bp, Arabidopsis thaliana landsberg
tacatgaattcagcaaaatctattactcatcttcaacgccaaatatcatcaatggaaccatttcctttctgagaattaaactaattgcagatgacacttttgaagaaacttcgtga

SEQ ID NO: 184155 - DNA, 677 bp, Arabidopsis thaliana landsberg
atggttttacttcaccatgtaagtctctctcattatcaaaattcatcttctctgttttcttcctcctttgaatcaatcctttgtttatttcttgtgttgtgtatgtttaatgcagttagagcaagggatgcgtccgatttcacgatgttacaatccaaccgcgtattcgacaacaatgggaagaagtttcttcgcaggtgcagccacaagcagcaagctattctccagaggtttctcagtcacaaagccaaaatctaaaaccgaatctaaagaagttgctgcaaagaaacatagtgacgcagagagaaggagacggcttcggattaattcccagtttgcaactctccgcaccattcttccaaacttagtcaaagtaagtttagctctgcattcaattacacaaaatgtttcaccagagaagtaacactttttgtattatgttcaatgaaactaaacagcaagataaagcatctgtgcttggagagactgtcaggtacttcaatgaattgaaaaagatggttcaagacataccaaccacaccatctttagaagacaacttgagattggaccactgtaataacaacagagacttggcaagagtcgtgttcagttgtagcgacagagcagggctaatgtcggaggttgcagagtcaatgaaagcagtgaaagcaaaggcg

SEQ ID NO: 184156 - DNA, 277 bp, Arabidopsis thaliana landsberg
atgaaccgaaaaccgcctgtattttggtacgtgatgcaacgatgtctcgtagtacatgatgttcaatcacaatctcaacattctgctcgtcaaagaagagaacaattgatccacgagcatggacttgatgaagaaggtgaagattactcagatagtgacagtggtaacatgccacaaaccgaggttcctgaaacgcaagaagaagaagaagtgtatcgtgttaccattgatgatgatgaaatattccaaaattctgctgctagaaggcaacaacgag

SEQ ID NO: 184157 - DNA, 1119 bp, Arabidopsis thaliana landsberg
atgaataagactgactctttcgttagtaagatcgatcggggattgatatcttccggtgttacaaactttccagtgcggatttattttgccccatccctctggtcccttttccgttttttgttcgtaagtaaatggagtttcgtcgtctgttttcagattaaagttaataacaaatcattaagtctgaattttgatacaaaagattaattttactagaatgaaatagagatgtagtaatcataccgacttcagaatgagcgtgtgaaatatttgggaaagatagatagatgaaaaacatagccatgaagaaaattgtttttgcgttggtatccatgtttctcttctttcgagattagattttgcttaatggagtatgttattatgttttggagattgaagggtttagagacaacctatttaagaggaggcttttgggggatgtttgttctgctgttttgatatggtttttgccgttgctacgattattagttaataatctgatgttactattggaaacatgaaaaaaaaaaaaaaacactgaatgcttagtaaaaaccattttggttgagttttctaatttggggtttataatagtaaatatatgtgaagtatgtcggtttaacagagattaaaaccgaccaggacaataggatctatgtcagtttaacagagataaaaaccgaccaggacaataggatcaagctcataagagaatacgccaaacgaccgaaacaaacaaaagttggaaccataaaataccaaattttataaaactaatgcaaaatgattcaagaaaatttggtggctataagagtcatagtaaaaagatttatgttctgtaaacaatccgtaatgattttccaaaagatgtcacgaagatagtgttctacaatctcatttctgacttaaaattacagcagtaccacaaaaatttgaaaaaggacaagataattaaaaaaggaacctccattgttgttgtttgattgaagcttcaactctcaaaagaacccagaaacgaaaggtgtagactttggacctgaagaatatagtatccaaattgtgaatgacgatgcttcatacgacgtttatacttataataaagatcatcaattaatctaa

SEQ ID NO: 184158 - DNA, 163 bp, Arabidopsis thaliana landsberg
ctctccgctactctccttagtcgcttcatatcaatcacaatttatatcatgcccttatacgtcttccatcgtcgcgctatacacgctttctccctgttatccactattagttacgaatttttaagtactcatctggtcgtggctcgctgccggtttgcgatgc

SEQ ID NO: 184159 - DNA, 539 bp, Arabidopsis thaliana landsberg
atgcaaatgcttattcttccaatgctcgcccatgctttccaaaacggccaaacttgggaggttattgaccctgatatagtcaaaaccattgttgagaggcttcttgatccacccgaagaggtaggttcctttactcccctaaacaaatatatcaagaaaattgtggggaagacttctttataattgtcatactggttatgaatgtatctgtacagggttttgggggttaccctgtacaaatcttcataaatttatttttctccactttttcagaattgttaagatcttattgttaaatctcctcatgattattgtaggtttcggctgaatatgatgaacctttgaggattgaacttttgcaattagcaactttgcttctaaaatatcttcagagtgatttggttcatcatagaaaagagctcattaagtttggatggaatcatctcaaacgggaagatagtgccagtaaacagtgggcatttgttaatgtttgccacttcttggatgcttaccaggctcctgagaaaatcattcttcag

SEQ ID NO: 184160 - DNA, 172 bp, Arabidopsis thaliana landsberg
atacttggtggagcagaattgcataaaagctttatgtgacatcctggtttgtccagatctaagaatcatcttagtgtctctaggtggactggaaatgattttgattgctggagaggaggacacgaacctaagagacgtgaactgtttctctcaaatgattgaagatgcataa

SEQ ID NO: 184161 - DNA, 303 bp, Arabidopsis thaliana landsberg
atgtgtcgtatgtactctccaggttttctgtttctatcggaaacgaagaatgatcttattcatcttcaggatatgcaagtatcattaggatttgattctcttcaaactgttgaacctataggtaatagtggtgtcttgctcttatgtattcgaaagattatccggttaagtttgtttttgttagtgatcggcttattgatattgaaattattattgatggaaatcgagtttttattacctttgtgtatggacatccggtaatccaataccgagaattagtttgggaacgtttgactcgaatag

SEQ ID NO: 184162 - DNA, 496 bp, Arabidopsis thaliana landsberg
cattgggtggtggtctcgggcacggcgaagatcaccaacgggagcgggagatcctgctgcaggagaacgagtccacctacatccccaagaacaaccggcatcgtctggagaaccccggtaccgcgccgctcagcattatcgaggtgcaatgcggcgactatgtgggcgaggacgatatcgtcagatttgaagatacttacggaagggtagtcgtctaatgaataaagtggctttgatcaccggggtgaccgggcaggatggcgcatatctggccgaattgctgttgaacaaggggtacatcgtgcatggcgtcaagcgtcgcgcctccctgttcaatacggatcgtatcgatcatctctaccaggatcctcacgtcgataacaagaacttcgtcctgcactacggcgatctcacggattcgaccaacctgattcgcatcatccagcaggtgcagccggacgagatctataaccttgccgccatgagccatgtcgcg

SEQ ID NO: 184163 - DNA, 189 bp, Arabidopsis thaliana landsberg
atgaaatatttgttggtcatgtaagttgttgaaagcaaaataagccatttttatcataatgttttacatttactaactagatgatcgactgatttgtctatatattcacagaaacttaagtggaaacaaacttagcggtttggttcctcaagcccttcttgatagaaaaaaggaaggattaaagctatt

SEQ ID NO: 184164 - DNA, 474 bp, Arabidopsis thaliana landsberg
ggagagcgggatggttcaaacgagtacaatgattatcagcctggttctctcaacaccactgatcaactcatcaaggacttgaagaacattgacattgttttccacattggagatatcacttacgcaaatggttacatctcgcagtgggatcagttcacagctcaagttgaacctattgcttctactgttccatacatggtcgcaaggttagcttgaccggccatataagtcttcgctttaacgatttccagattcttggcactaacttgtgtttctcttcagtggcaaccacgagcgggattggccagactctggatccttctatggtggtaaagactctggaggggagtgtggggttcctgcggaaaccatgtttgattttcctgctgagaacaaagctaagttctggtactctgcggattatggaatgtttcggttctgtgtagcggacactgaacatgattggagagaagg

SEQ ID NO: 184165 - DNA, 328 bp, Arabidopsis thaliana landsberg
cttccatgattatgacgacgaattatttggtaatggtatggatattggtattgatgggaacgagggggaagatgaatcaattgatgatgatgctgaggataatgatgatgattcagattatagcagtggagtagatctagatgataatgattctgatgatgacatggatagtgatgatgatgatgttgatgacatggatagtgatgatgaatgttttattgaaattgataacaacattatggataataatggtgatggaggtagtgagacgaatgttgatagtattagtggcagtcatcaagatgatgatgttgatgatgatgattaa

SEQ ID NO: 184166 - DNA, 1775 bp, Arabidopsis thaliana landsberg
atggtgtcgtttgtgaggcttctgcataaagaagggtatttgaacaaggctaatttcattactggagaaaagttggatatggggaatcttgatgaagagtatgctagaacttttgttaagtttgctgccgaaagatttggaaaggattaccaggagatagcaaagtgagaatctttttacttctgtattgatcatatattgtatttattctgttagattgttaaaagtttggatcagtgatcctccttaggcttcgtttagagaaaatgtatgtgaaaaatgttcatcttcagctgaaaaacttgtcagtgagtttgcattgtagtatatgtaacatttcgtgtggagtataggttggggttggaaaaggaggggttcactgctagttctttaggaatgaggaatcttttgtgatgaattgagctcttgtagtttgatcgcacgctacttgtagcattggttgagaaattctgatgtaagaagttgttaatacatttgtagatgctttaaatggagttatttggactgtcgagttttagaatctcttgtacggtcttgattgccataccctgcagcatttcattttatttgctcttagttaaattgttgtttggaaaattgatgcataaagattagggttcgtttagagaaatgttcttcatgggtctctgatgaaaaacttgggcatgttctggtgaaaacttctcagtacgcagttcatttctatacagtgcgcaactgctgagcgtttgcattgttgcatgtttaacatttcttggggagtatagtggagttgggaaaggaggggttcagtgctagttctaatggaatggggaatcttatgtgatccattgatgtctcgtgtttcggtcataggctaattgtcgaattggtagagagattctgatgtaagaagtgattaatacattctatgatgcctcaaatgtatggtcttatttggcttcatccctgaagcagtattttgttcgccccttagctattgttgcagctaggcagtttgaaattgattcaatcattctattgtctccacggctttttataacctcaaatttaacttacacaggtggttatcaggtagtgacctgaagaagattgtgctctttggttgcccgaggggggaaaaaagggcggtattcgctgctaaaacattgcgcaactttttcgatatccatgagaataatgtaagcctatcacacaccacactgtctctatctcattttgtaactcaccaacagcatctaaccaagtctttttttgttgcataataggtgtgcgagaaatgcgtgttaaaagagaagtgcaagtttccaaaccagagtgtatgggatggcaaaacaaagcacttgcacttgtctgttgtgatgaaagtcatcacactatatccattagacttgactcatccgaagctacaagttcctatagaggtacaagactcagtttcaagattgctgacggagattcagaacctaagccgaactatctgtactcctctcgcatgagttaacattatcaaatatttgtttgtagtaaacatcaatctagtgatcttgcaaatggaagttgaaccaaaaaagactcttatgaagaaaaatccttcacttctactttcacttgcaacagctaagggtacagatcccataagtagttagttatgttttcagcttttatctcgattttgtgcccctaaatcatctgttgaagaagatattttttcactgagaacaaaggaatatcattgtgaaccttatggctga

SEQ ID NO: 184167 - DNA, 294 bp, Arabidopsis thaliana landsberg
gaacgtttcggcataatggaagaagagaatgacaagttgaaacagcaaatggagaagttaaagagtaagcacaaaacagagatgagcacaatgaagcaatatctagcagaaagcaaattaccagggtctgcattagaggcatggttcaaggagaatgagcaagaagaggaagaagagcatgtatcatcatcagaacacagaaccggtgttgtgagctatgacaactatacagacgatcaagcatggagatctgagtttggagccatatatcaagaccatgaccatcactactga

SEQ ID NO: 184168 - DNA, 103 bp, Arabidopsis thaliana landsberg
aagagatcgactagtttggaaggaaatcctactattcgaatgattaacggtaaaaatttggagtttcgtcttttaaaatttcaagagttaccgccacgaacag

SEQ ID NO: 184169 - DNA, 1646 bp, Arabidopsis thaliana landsberg
cttattaatggatcacgaccgagcaattcgtcgctgcaaagaggtgaacctcaaattcagttcctggtttattactggtcagtagtctctgtgttcaccaattgtcttacttttactcttctatgttcttttttctaggaaatgaaatggctgatgagtatgtcgatgggaatgaaccgcctatctcaaggagctccagtggttagttgcaattcttcaactccttcataacattttcttgtcgtaggtctctgtggatcttatcatatgtcactgactcgtgtatatatcagaaagctatatatatatatatgcctctgctatgtttatatcatgatttttgtatgctttttatttgcccaaatatccttctgtaggatcatgttatggtaacagattatgtgttactgaataaagtgttgcttttcagattcggattctggtagctcggaagatcaatctgatgacgctaaacccatggttcaaggggattcttccaaggtataaatctaataatgtcagcttttcaaggcatgtcatttttaaagaatctaaaccacgcagttggttaaccttcagatgcctgaaactgcaaactctgaggcgcaaagagatgaaaatacaagaattgatgatctttttgttgggagtcgtgagtactttatctcctttaaattcattattatggtcttaagattattcatatgcttgcggatttgtttttacttctctaccttagttcctctttactactcccagtttcctggatagatttgtccaagatttactctgttgtaatatctatagttggccacaatagggaaatgtaatagatgttggttatcactgctggaggcaagatactgttaaagaattttctcgggatacgtattttcagtttgtatcactggtgtattcattacagaatctactggtgcgcttgagcagatggatatttgttctcagcaaaagcttagttctgatgaatcagatggccaacatgagggtgagatgtagtgaaaaagagttttattttttttctctatttgagccttgaattgagtgatctcatactttgtcaacttaatgcttcaggaaatatattagagactccagcttcatctgagaagcgctatagagctgcgctgttgaagagccggtttgcagatatcattctcacagcacccgagaaaccacttccacaggtctgtacttatcttcaatttagttccatctttaattgccttaagtggtcactggataatgcttctggctagaactcctgttaaagttgtttggctttaatagttattaaacataggagggtaggaagagtagaagtaattttaaacaatcacagaaacttggagatgtagattaggaaataagaatttttatttaaaaattatcagaattgttacccgagcatagttgtggaatggacctagaaatccacaattgcattagtcgatcttgaattaaatgcatggatcacatactctacaatatccttgaagcagtcttctttgtcctttgggaattaatatggcttaaatttgatctctcatgggagcagaatggtattaagggcgatccagaaaggctgcgtaaagaaagagaagaactcgtactgcagaagaagaaag

SEQ ID NO: 184170 - DNA, 447 bp, Arabidopsis thaliana landsberg
cttcaagatgaagttctcgtctcagatagggatagaataaaaacgactcagagcaatgttaaaatggtgagttatcatttcaccactctctttctctctcatattattaggagttaatttaacgagaaattgtttgattttgtttctacagcttcagagacatttgcaagcatcaaccttcccatctattgaaaggttgagacagaaggagcagagtcttcaaagacgcatgttgagggtaagagaagtcatcgcattgaaagatcttaccttcttatatgagtccagattacgttcaaagttacatttactgttgtgttctggcttgtgtgcttgaaggtgatgaggattatagaaggcttagaagggaagggtttccggttacccttgacgaaaggagaggccgaactgtctgagaagttaactgcaataacggggatcctctag

SEQ ID NO: 184171 - DNA, 190 bp, Arabidopsis thaliana landsberg
cctgtccggcaacgacgtgatgaccatggccctgggccgcaacggcgagctttgggtgggtacctatgcccacggtctggacctgatgacttcgcccggacattttcaacacttcgaacatgtggcgcaccagcccgacacgttgtcatccaacaacgtgctgtcactgttcagcctgggcaagggcaag

SEQ ID NO: 184172 - DNA, 123 bp, Arabidopsis thaliana landsberg
ctacgattagagtcacggtgggatccaccgagagcgtttcgtttccgaacgaaaactccgccggtaacggccatagataaggaggagaatcagccggcgacggagttgacagagatgaagtga

SEQ ID NO: 184173 - DNA, 483 bp, Arabidopsis thaliana landsberg
gaggaaaaacgagcactcattgtttctcgtgataatctggacaggctgtatcgtgatgccagtacctccttgaccattctagagagaagccatcgctttaccatgtcggatttggaccaccatcacaatgaactaagggtgtcacaagatgaggtgtcccgacttggcaagctgttgtccaccaaagattctaccatcaaggagctgtgtgcctccaagaagcttgttacgcaggagctagaggctgcccgcctcactatcaaggccttggaggatgatcgcgtcgtcatgaaggcaatgtgcaataaggccatggataaggttgttcgtgccgggcggatcctgatgaggaggcctggcgttgtggtgtctgaagacattgttgctgttgggggccttcatcttccaaagatcctcaaaaactgtaacacccactttgtaattgctaggaataataccagtagaggaacaatttctctttat

SEQ ID NO: 184174 - DNA, 1355 bp, Arabidopsis thaliana landsberg
atgagagataaagcatttttgaagaaaattgactggaactacatgattgttgatgaaggacatcgtctgaagaaccatgaatgtgctctcgcaaagactctaggaactgggtatgtttctgtatgttactctggtctttgagtagactgtatctagtttcttaaagatgtttagacatgcctttttacgcattagcttgatgaagtctgaagtgaatggtgttaattagttgttactctgatttatctcttaaagatactgtcacaaaggaaatttaaagacattttgcttacactaatttgtcctggatgcagctaccggattaagcgcagacttctattaactggaactcccatacagaacagtctgcaagaactatggtcgctgcttaattttcttcttcctcacatctttaactcaattcataatttcgaagaatggtttaatactccattcgcagaatgtggtagtgccagtcttacagatgaagaggagctgttgattattaaccgtctgcatcatgtgggtttattatgcacctttttttggtttagaccctttttcttttatagaaaatgcgttatgcatgatacttgatgttaatgtcactttcaggtcataaggccgtttctactgagaaggaaaaaaagtgaggttgagaaattccttcctggaaagacacaagtcatactgaagtgtgatatgtcggcttggcaaaaattgtattacaaacaagttacagacgtaggcagggtcggtcttcattctggtttgtagctaaacttgaacttccattctctccaaaatgctttcatctttcggtaaagaacataagtcaggaagttaaattgctaatggagtccttatgtgcaggcaatgggaaatcaaagagtctgcagaatctgacaatgcaattaagaaagtgttgtaaccatccgtacctattcgttggagcagattataacatgtgtaagaagcctgagattgtgagagcttcaggaaaattcgagttacttgatcgcctccttccaaaactgaagaaagctggacatagaattctgctcttttatcaaatgactcgtctcattgaccttctcgaaatttacttgtcactcaatgactacatgtacctcagacttgacggtagcacaaagacagaccaaagagggattttactgaagcaattcaacgaaccggactctccctactttatgtttcttctgagcacacgtgctggtggtcttggtttgaacttacaaactgcagacactataagtatatttgacagtgattggaatccacccatggaccagcaagcagaggatcgtgctcatcaaataggacagaaaaaggaa

SEQ ID NO: 184175 - DNA, 268 bp, Arabidopsis thaliana landsberg
gatctcctctcaatgtcgctagagacaaatccagaagcggttccatacattgttcaaagcttcgaactcaaggttctaattttattaatattacttataagtttaatgttttcaagtctaagtttatccctttttatataagaagctaaaaattatatgatttttgtgtgtgtgtgtgtgtctagaatacattaattctcaagaggttcaacatgatttgcctctaatacatgagtggcaacagcttcaaggagaagatgctcctcag

SEQ ID NO: 184176 - DNA, 1851 bp, Arabidopsis thaliana landsberg
  unsure (1)..(1851): unsure at all n locations
atgggaaccgacggacacaccgacctcaacaaaggaggtaagtccgttgatcaaaaggcataccggtctatgatagggtctttactttatttatgtgctagtagaccggatattatgcttagcgtatgcatgtgtgctagatttcaatctgatcctaagagaatgtcacttagtggcggtgaagcgaattcttcgatatttaagtcctacgccttgctttgggatctggtatccataggggtctaactttgacttgattggatactcagattccgactatgctggatgtaaggtcgataggaagagtacatcagggacgtgccaattcttaggaaggtccctggtgtcatggaactctaagaaacaaactttcgttgccctatccaccgctgaggccgagtacattgccgcaggacagtgttgtgcgcaactactttggatgaggcaaacctccgggacttttggctacaatctgagcaaagtcccactcctatgtgacaatgagagtgctatctgaatagcggaaaatcctgttgagcacagccgcacaaagcacattgacatctggcatcactttttgagagaccaccagcaaaagggagatatcgaagtgtttcatgttagcaccgagaaccagctagccgatatctttaccaagcctctagatgagaagaccttttgcagactgcgtagtgagctaaatgtcttagattcgcggaacttggattgatttatagcatacatgtgtttttatgccttgatcatgttccttatgcattttgttgtttatttgtggtgctcaagttgtacaagcactccccggacctcacaagtccatttgcaagtgatgcacatatttagggggagatgtgctacaacttgaccctttgagactaaccatgtgtttgagcttgcttgatttagtctcaaaggtggattgaaagggaaagatggacttggaccatgaaagacttccactgcactctgatgagagggtaacttactccaagttcatctccatactcttattgccttttattcttatttgaagattttggtgagacaatgggtttaagggccaagattgatcccgttttggtgcnnnnnnnnnnnnnnnnnnnnnnnnnnnccaaagcaaatggatcagctaccacttgtgaattttgaaaacaatagagttagaacttttgatttgtccaaaatactcttattgcaaaatttggtctcttatgggggagaatttttgattatgggaaaaagggggagtttttggtacttgatcaatttttccattggaatatatcttgatttgcccaaacaagtgtgtttgacttagagataggaaaaaggatttgatttgcaaatacaaaccaagtggtggcaaagaatgatccaaatatgccaaattagagtcaaaaacaatttggtcctcatttgcattgatattgcccttattttggttgctttttgaggtgttggcataaatcaccaaaaaggggagattgaaaggaaatgtcctttgggccatttctataatgttttggtgattaagtgcccaacacataatctttaagttcttaggtgccaaacaagcaagaagtgcaaatcatgtaacaaggtacgtttctagacttagtacattgttttgagtactaacatattctgtctaagtgctagaaacagcgagaaaagaattgcaaaaagtcttagctcagtgcagccaaaactctgcttagtctggcacaccggactgtccggtggtgcaccggacaccaggctgaactccggtgaactggccactctcgggaaaagtttggcggcgtatggctataattcaccggaccgtcggtg

SEQ ID NO: 184177 - DNA, 1160 bp, Arabidopsis thaliana landsberg
atgtttttacgtgtcgtttacgatgattttgtgtgcttagttgccactgattcagagtcggaagggggagaagatgatgacgatttgtctaaagagtcggacgcagtggtagtttgtgacgatcttgaggatctaaagttggacatgattacaaagaaaatgaaagtcaaaattgttcgaaggttcgtatgcacggcgttacgcaatagagtggtggaatttatctttgcagattcaaaggtaacaattattaattatcgtaaatttgttatgctataaggattcaacctgattttaaaatctcaaacagcatcgaaagatacatgccctaattcatgtacacgtggctcgacgattctcatctatcctcatagaaggacattgcattctcttatcagagtttaatgtcgatattgtacgaggatgttttagaccagctatgcacgattttttcatacgttcgaatgcccttagttcagttactttaataaggtccttcttagaaagtgattgtttcacttttgccaagtttcgtgacgtcaaccaaggtctcctagatcctaattacctgtgtgggtaagtgatatgttttacctttgttatagattatttttaaaactgtttattaagccgtatcaaattcaaatttatagatctgattgggaggcttgtttgtactatcaatttaagagcgtttgattcggttggctttaatcatcgtttttatttccagatagaagacaaaaggtaattctttattttatttacagattttgataatataacaatttgtttctctttacttttctgtcaaacgtagcaccatactaacttgatgaattctttgatgcagtgggttacgtatatcatgtcaattgccaaacttctgtattaatagatttataaaccgctgtgcaaattatgttaatgatgttaaaatcatcataatcagatttgataaattggagctctttgaaggtacataaaatattatcacatattaatggattttaacaattcatccgctattgtaacgattctaaaattttgtatttataggaaaaatccatgttacagcaactgaacagtgtacgcagttcttatccaatcatgattgtcgcgaggtttggaacatgaggatattctttgttgggcgataa

SEQ ID NO: 184178 - DNA, 136 bp, Arabidopsis thaliana landsberg
gatcgatattagaaggaatacgatttcaatgacaaacaaaaacaatgtaataggctactctcaactatactctatggagactatggagactgaagcagtagcaaaaaggatgtcacttcaagtcttcaagacataa

SEQ ID NO: 184179 - DNA, 990 bp, Arabidopsis thaliana landsberg
ggccaaaaagatgccgaggatgaaggatgtgttatggccctgagcaaccttcgttccgaagtaattgaactaaggaacgaaggtctcgaaaaagataaaatattgcattcattgataaatagaataaaagaagacgaagctacttttaaagttcaagctgaggctcagaggcatgaaattgaagatctccgaaaacaactagccagagctaaagaggaacgcacacttgaagaaacaaaacgggaaattagtgaacaatggtgaaccatttggaaaaaagcgttgaagagcttcatgcatctaggaaaagatgctatgaaaaatctatagaatgtgttaagagaataagaaccacgttcgccagcgttggcgcattctcaattgaggaaaacttcataagggtgaccccaaaggcccaattggatggatcagccacaaagctgaagcttttgaagaagttttgaatagccgtggagacatatgtgccttttcgggtgccagggggattgccactattttggagaggaaaggctgtgaccatgtgaaatccttggcacaatccgaagccgccttatcttctgaagatataaaagacccctcggccgaagcgagcctggtcggtggaaaatttttcaccgacatctgggaaaatggtggccgggaaatggctcaagaaattattcagagaagtgaaaaggcatccatgatgctagagaagtggctaaggctgctgaaaagagcacagagcccgaaggtcaattaggtactaaataatagcttctaccgtgttgtaatctttaggcttttaagacctgtttgtgatttgtaatagtaatgtagtcgtgtcctgcttcagatccgactaaagcgccttcgggccctcagccgaagggggacgacgaaattaaaaagatggccgaagatattatggacgaagtcgtcaatcggcttctgaatgaagctgcaggagtcgttttgagagaagattaa

SEQ ID NO: 184180 - DNA, 1081 bp, Arabidopsis thaliana landsberg
  unsure (1)..(1081): unsure at all n locations
atgaggacagattatgtgattggtgcactaggaagcacatgcaaggatgtcgaactacatttttggagagaatgcaaactgaacaatctgaatgaaccgttgcagaatcgacccgaaaaagtgctcgaagatcaatggtctcattaggttcacttgagattcaccgataagcggagggtatagctcaattgatggatattcatgtgtagtctagtattcacatatcaagtgcggtgcatctttgacagcatgtgagctctcataataagcacgaacggaccacaaagaaccaganaaatcatatcatgcctcacttatgtggaaggaagagtttttcaagaaaaagagacgagattgtgagttatttagttatgatatatagaaacctagtttattctgttgaatttgtatattgtttaacgtagaaaatcaagactgggaaaacgccatgtcgagcggagtttttcattgagagtcgcaagaaacatgatggaagtttcgtatcagatgaggcaaaattacgcgcggttggttttattaaagtctctgttggatttactagttaactatgtagaatatttatctttctttgctcgttttaggaagcacttacgacgttattgaatctaaatccgcaagtcacatacaacggtactgctagcttggatgacgaatatagtcaggtgttcggtccagagcgtccaggccgagtacgttgtgttggtcgtgggcccacaccttcaagattagtgagacattccaatgcaactagaagacatgatatagaaaattctgaattagttgcccagctgaagacacaagtaaagacattaggtgatcaagttaatgcaatgtctacgttccttggacaaatacttggtaattcaaccggtgaacaggtaataatataataatactttgtaagttcaattgcattattataattttctatatatagaggcaaatactaatgcttaaacaaaatattcaggcaagcgcgtgggctgcaaattttgcaacagcttttgcaaacatcccaaatccagcatttgtaaacattccaaatctgcctaatcctcag

SEQ ID NO: 184181 - DNA, 2392 bp, Arabidopsis thaliana landsberg
atgaaccctgatggaacgtttaatcatggtaattacaaaattgtctatgttgcaccaatgaaagcccttgttgctgaggtcgtggatagtctatctcaacgtttgaaggattttggagttactgtgaaggaactcagtggggatcagtcccttactgggcaagaaatcaaagagactcagataattgttacaacgccagagaagtgggatatcatcaccaggaaatctggagatcgcacttatacacagcttgtgaggcttcttataatcgacgaaattcatcttcttgatgataatcgagggcctgtgcttgaaagtattgtcgctaggactcttaggcagattgaaagcacaaaggagcatattcgtctggtaggtttatctgcaacactgccaaattgtgacgatgtggcttcatttttgcgagtggatcttaaaaatgggttgtttatatttgaccgtagctacagacctgtgcctctcggtcagcagtatataggaattaatgtgaaaaagccgttacggaggttccagttgatgaatgatatatgttatcagaaagtagtggctgttgctggaaaacaccaggtccttatttttgttcattcgaggaaggaaacagcaaaaactgcaagggcaatacgggacacagctatggcaaatgataccctcagcagattcttgaaggaagatagtcaaagtcgtgacgttctccatagtcatgaagacattgttaagaatagtgacctaaaagatattctgccttacggttttgcaattcatcatgctgggttatcaaggggtgatcgtgagattgttgagactcttttttctcaggggcatgtgcaagtcttggtttccacagcaactctcgcatggggtgtgaatctgcccgcacataccgtaattataaaaggaacccaggtgtataatcctgaaaaaggggcgtggatggagctgagtcctctagatgttatgcagatgcttggtcgtgctggaagacctcagtatgatcaacatggggagggtataattataactggctacagcgagctgcaatattatctttctttgatgaatgagcaactacctattgaaagccagtttatttccaaacttgctgatcagcttaatgctgaaattgtgcttggaaccgttcagaatgctagagaggcttgccattggcttggttacacgtatttgtatatccgtatggttcgtaatccaacgttgtatggcttagcgcctgatgcccttgcaaaagacgtagttttggaggagagaagagctgacctggtacggaatttgttcatctgcataaattttggcttttgctatctactgtcacattatttttctatagttaaatgcccataaatactatgcctagtatctgaagctttcatacagcctactattatgcagcctgtgattaattgtgcgtattttttatcactgctctgaaagttacttttatttgtgttaatattcttagtgaagagtttgtaacgctctttcatatagtatcattgcccctaaatattatgcctagcatcagtagctttgcctccgtgattaactgttgggatcacttgtgcatcatcatgtactgttgggatcacttgtgcatcatcatgttgattactaatctagtaacagaaatttctttttgagtattttgaatggggagtatgtacctgattatttaattttatttctctgaaaatgacgtttatttatttgatatcatttcccataaataatgttcctagtgtcagtagctttctcactgtctattacatgcaatcaatgatgaactgtttggtgtttgccttgtcttcttcaagttgatgacagattagtatttcatatatctttttgagatttccgaacaatgagtttgcatttggttatgtaatatcattgttctaaagtttcatatatcattgatcctttaatggcgagctgtgtctaatatttgcttgaatccttgtttttgcagatacattcggctgctactatcttggacaaaaacaacttggttaagtatgacaggaaaagtggatacttccaagttacagatttgggacgcatagcaagctactattacataacccatgggaccatagctacatacaatgagcatttgaagccaacaatgggtgatatagatctttatcgtctgttctccctgagtgacgagttcaagtatgtgactgttcggcaagatgagaagatggaactggcgaaacttttggatcgtgtcccaattccgatcaaggaaactttggaggagcccagtgccaaaataaatgtattgctgcaggcatatatttcacagctaaagcttgagggtctttctttgacatctgacatggtttacattacgcag

SEQ ID NO: 184182 - DNA, 121 bp, Arabidopsis thaliana landsberg
aatggcggattccagaaagtgttttaaccccataaagacccttgttgattgcaatgggggggtgattgactcccaacaaggtattattgatcattgtatggcctattatgagaggctgccg

SEQ ID NO: 184183 - DNA, 1562 bp, Arabidopsis thaliana landsberg
cagttcccttaccagcatcctatgcatcagcagcagcaaccgcagcatcttcctcatcctcctcacccacagatgtttggtcaacagcaacctcaggctttccttcctcacttacctccacatcaccttcctccgccattccctggaccgtatgattctgctcctcctcctcctcctccagctgatccagagctgcagaaacggattgataagcttgttgagtattcggttaagaacggtcctgagtttgaggctatgatgcgagatagacagaaggataatcctgattatgcgtttctgtttgggggtgaaggtcatggttattaccgctataagcactttctctctatgcatcccctggaggaccctttgatcctccattcccgtcatcttcaatgcctatgatacatcatccgccaaatcccatgatgagtccttcaatgaacaatgtacctggtgcattggctgtgccaccaatccgccaacctcctttcccaccattccatgaccaccaccagctccaacagcatcttccgcagcctcatccttttgcgccccatgctcgtcctgattttgatcagtcaactcatgcgttccgaggtctttctggtccactccctgctgatgttgcaatggaactaaatggtgtcttgggcaaccttaatggcacgaaagagtctattaaaagtgctaagatttggttcatgcagagatctccctttgcaccagctttagcagaggcacttagagacagggtctttgcaatggatgattctgataggcagatgcacatagtttatctagctaatgacattctcttcgacaggtatctaaacttcatccctgatcgctctttacatcattctagaggacttctgcatagactagtttttcgttcattctatattattaggagtctcagtctgtgctttcaaaattttgggttgcaacattagattcttctgccctaatattttctcatgtttattgcttccttaaatacagtttacaacgaaggacaaacttgcacgagtttgacaatgaagctcttgctttcagacctattttgggttccatgctggggaggatttaccactttccacaaaacaaggaagaaaaccagtcacgtttggagaagattttgcagttttgggcttctaaggaggtttttgatcaagacaccatctcctctcttgagaaagagatgaaaagtggaccacctgcaaataccttttctcattctcccattatagcagcacatgccttacaacgtccaggtactcctgctcttccgtgagaaagacagaaactataactccacctatgtataagaagaattcggtttagacttgacaatataccaacaactttttatctttatgaacttacaggaatgctgcaacagccaccaaacagtaatgtctctagcacaatgaatttagagcatctgactaatccggtcgcaacccaacaatttatcccaaatgtgatgcctcctggtgcctttcccggttccataccgcttaacgcttctgttccaccaccaacccaaccacctgctg

SEQ ID NO: 184184 - DNA, 86 bp, Arabidopsis thaliana landsberg
agagattgacgcgtggagatatgtggaacaatgatgggtttgacgtaagagtcggacaagtggacgatccacaatgtttaagttag

SEQ ID NO: 184185 - DNA, 621 bp, Arabidopsis thaliana landsberg
atgcgaatccaaaataggaaagaagtgactcaacgactcttaagtgaggtaaggtgtagcataactcgggtggggaaccttatggaaagtttggagtgtcttcttgattcccttacacggatcattaataagggtaatgtccctttccttatttggcatcgaataatcttgtacgaaaagtacttcagcaagtccttcagggagtccttcagcgaaaccttcggtaagtccttcagcgagtccatcagcaagtttgtcagttccagtaagatcaatgttggtattgattctcacatcatgttagtttgatatcttggttctgttcacgcagttctgctcctcgtgcacggtttctcatcaatggatcttctctccgttggtgttggcgtctcaatggggtcgggtggtggatcatcttcatcatccaagtcaggaaactcctccgcctcctcgcgggcattcctacgagcctggtcatgccccaattcaaccctgggatggggctgcttcaagcggcctagccgttgccttaatccccttaactcctccgtcaaagtagccatcatttgcattacggcgttttggggaatttctgttgcctctgccatagtatatgcctaa

SEQ ID NO: 184186 - DNA, 78 bp, Arabidopsis thaliana landsberg
atgaccaccaccaccacaacaacaacaaacgatggtagcggcggcggaaaaacgcaaacgcaaacgcacaagaaacaa

SEQ ID NO: 184187 - DNA, 274 bp, Arabidopsis thaliana landsberg
atggaccgtttcaaacgtttttgtttgcgaatgcccactgaggacaggagtccaaaggtttgcgagtcactcgaatgacttatgagttcagtcacattcaacctaaccatgtttttttaattagaaacctaaaacaagagcgtcgaccataagtatagctgtcaaatggtccgtccaaggaccattgggcgtgtccgtacggacagttttttttatgagccaagttggacggtccatagtggacaatggtctgaaaaatgtccatgcccaataa

SEQ ID NO: 184188 - DNA, 2179 bp, Arabidopsis thaliana landsberg
cattgcgccggtaaccttcctacgccgttggttgttcttcttcattccgcgccgccgtcccgcgttttttctttatttgactcttctcttcgaaacgaccgtggttttggtgtttattgaaacgacatcgttttgttcttcttcttcctcagttttgattctcaaaatccacaaccctaaatccacgcttcttctctgctcttcttactcaattcttctgcctctttcttggtccttgtccactaatcgtttgttcgtctcacggcacgaattcaaatttgtaagttgagctcgtcgaattagtgaaacccgagaatagtagaattcagcagagagatgaagattgcaattgaaggttgtatgcatggagacctagacaatgtgtataaaacaattcaacattacgaacagattcacaacactaaagtcgatctcctcctctgctgcggcgattttcaggtaatcgtttgttttttttaccttgaaaataaaaatccattcgattctgcttcctaagtctgaaaagattcgttctttgtggaaaacattaggctgttagaaatgagaaagacatggatagccttaacgtacctagaaaatacagagagatgaaatctttctggaagtactactccggccaagaagttgctccgattcccacaattttcattggtgggaatcatgaggcttctaactacttatgggaattgtaagttatctagtatttgagtttaggattccgaggcttaaaaaatgtgttcttgatggttgctggttgttgtgctataggtattatgggggttgggctgccaccaatatttactttttgggttttgctggagttgtcaagtttggtaatgtgcgaattggtggcctttctggtatatacaatgagcgtcattaccgttcaggtttgtttcttcttcatctctctgacaaagtaccaatttttcagcttttgaaatgggagaaagttggatttctgagttagtgtctatagtggaaatgtatagattagggaattcgtttgatttgtttggtgtcaataaagtgagaatcagtcatttgtgtgagtaggacactttgagcggccaccatataacgagagcaccatcagatcggtctatcatgttcgtgactatgatgtccagaagttgatgcaacttgaagagccgcttgatatatttctatcacatgattggcctgttggaatcactgattatggagactcagaatcacttatgcggcaaaaaccatactttcgtcaagaggtaaatctgtgggaacatgattctacttcttcattttggttttgagaggttttcaattgatttgaccaaaatttattacagatcgaggaaaaaactcttggaagtaaaccagcggctctactgctagaaaaactgaagcctcaatattggttttcagctcatttacattgcaaatttgctgctgctgttcaacacgggaatgatgggtcagtgacaaaatttcttgccctcgataaatgccttccagggaaaaagtttttacaggttctctttctttcctgtccacaacattatgctttgttcttttgaaacaaaaaggatatcttttaatttctttggatgttcattagattattgaaatcgaatcagagcctggaccctttgaggtcctatacgatgaagagtggctagcaatcacacgaaagttcaattctattttcccgctaacaaggagatacacaaacgtcaggtataccatcccgaacaagctacctactaagaaatgtttatatatcttccatttatctttctacctaccgtcccacttacgtattgttttactacaatagcactgctggaactatacaagagagccgtgagtgggtgaggaagaagctagaagaaaggcaatttaaaccttttgagtttgcgagaacagtacctgcatataacccatcacaacgtgtatttgattccattcctggtatgttaatagtgtactggatatagaggattataaaaagttgatgaatcgattaaaagtgttttattcatatggcattttgtagagatcccgcagaatccccagacgctgtctttgttagagctccttggtctcccatatctccttgattcatcaccagtaacaggggaaagaaccgatatccctgcttcactggctccatcag

SEQ ID NO: 184189 - DNA, 195 bp, Arabidopsis thaliana landsberg
atgagtttcagggatgataatgaggaggctaggaatgatttgcgtcggccgtttattcacaccggaagctggtaccggatgggttcgagacaatcgagtatgatgggttcctctcaagttattcgagacagctctatctctgttcttgcatgtgttttgatcgttgctcttggccctattcaattcggattcact

SEQ ID NO: 184190 - DNA, 631 bp, Arabidopsis thaliana landsberg
ctgggttcgtttctaaggaaaatactgaaatgtgataacggggatctgtcaagatcagagtttctagcagcagtcttcagataccttcagcacagaaaagatttggtgtcaaaggagttttcaaagttttgtaaatgtggcggaaagcttgagtttagtagactaaacgcccgcgaattttctccgggtcatgtagaagctattggtcttcaacagaaagagctggaggtcagaatttacatttctcttccaatactaagtttgaatttctcttgctttcgaactttctcatttggtcaattcgtaaatgaaagctgtgtaagaatcttgaatttacggaatggatttcttgctttgatgaactcatgtaggaagttaaatcaaattttgtggaaacaagaagccaagttaaacaaatgcagtcagaatggcagaaagagcttcagaggataggtaatgaatcttcttatacccaaattttctcttctcggtaattagagattacatgatcaatctctatcatcctctatggcagtccatcacgttaaggccatggaagttacatcttcttcttaccacaaggttctggaggaaaatcgcttactttacaatgaggttcaagatctcaaag

SEQ ID NO: 184191 - DNA, 125 bp, Arabidopsis thaliana landsberg
atgtgtgggaagaaagatttcgatgatgagtttgagagaataaagaagaggaatgtgcgttgttgggaattcttggaagggataggtgttcaagattggaggagggcatattttgaaggagagag

SEQ ID NO: 184192 - DNA, 844 bp, Arabidopsis thaliana landsberg
gaaaaatctcatacccaagagacattaaagggattcttgagacgggctcaaaatgagttcggcttaaggattaagaaaattagaagcgacaacgggacggagttcaagaactctcaaattgaaggcttccttgaggaggagggcatcaagcatgagttctcttctccctatacaccacaacaaaatggtgtagtggagaggaagaacagaactctattggacatggcaagaaccatgcttgatgagtacaagacttcggatcggttttgggccgaggcggtcaacaccgcttgctacgccatcaaccggttgtatctacaccgaatcctcaagaagacatcatatgaactcctcaccggtaaaaagcccaatatttcatattttagagtctttggtagcaaatgctttattcttgtaaaagagtagaaaatctaaatttgctcctaaggctgtataaggctttttacttagttatgactcaaacacaagggcatatagagtcttcaacaaatccactagattagttgagatttcttgtgacattgtgtttgatgagactaatggctcccaagtggagcaagttgatcttgatgagctagatgatgaagaggctctgtgcatcgcgctaaggaacatgtccattggggatgtatgtcctaaggaacccaaagagtccactcaagctcaagatcaaccgtcatcttccatgcaagcatctccaccaacccaagatgaggatcaagctcaagacaatgaagaagaagatcaagaagatgagccacctcaagaggaggacaatgatcaagggggagatgacaatgatcaagacaaggaagatgattaa

SEQ ID NO: 184193 - DNA, 398 bp, Arabidopsis thaliana landsberg
tgatctctttgtgttctctgtgtccaaagtcttatcctttcttcagattacagtctttagctcaaaaagcaagattgactatttgcaacggtaagtgtcttgccgtttattgatcgtacaaacggcactgtttttgattctggaatgtcaaattttgtgttcaagtctctgacaaacggaccggtccaaaacttatcctgaaacggcatataacataacctgaaactataagccaaatttggtaaataaaatatcagtgttcaaccacacgtggattgaatttgactaattgacttgtggactttgtgtgtgtttttaatagatttaacgagtgcttagaaacgacacgatttgttctctccaataagagatatttgtgttggtctctaaggctaccc

SEQ ID NO: 184194 - DNA, 125 bp, Arabidopsis thaliana landsberg
aaaatcgaatgtggttggtgctacgaccgactgtcacccaagtcaataacaccaacgaatcgatatctgccacgtggtttcggttacattttctctctttcgaagagaaacgaccactcgcctga

SEQ ID NO: 184195 - DNA, 213 bp, Arabidopsis thaliana landsberg
ggtacatacccaaataaagaactgttcaggttctcgcatcaagttgtttatcagttgcttacaagtaaagaatgtaagaatgctcccacagattgtttggagcttgatccagcatctttaacacatgagcttctcggagttctcactgaggaggatgagagaattggaataaccaaagtggaggaagctgatttggttagtggaaactattaa

SEQ ID NO: 184196 - DNA, 186 bp, Arabidopsis thaliana landsberg
gatgtctttagctctgagaatgctcataatcaagaagctttcttgaatgccccacacttacatccgaaattgaagaggtctcgactctcacacttacagattgtcttatatacctttacattgatcaacttgtattcatcgcggaaaataaccgaagcaatagaacctggattttccttagactga

SEQ ID NO: 184197 - DNA, 139 bp, Arabidopsis thaliana landsberg
gattcagttgttagcaaggtcaaaaagtgcaattacagcagcactgtccagacttggacagattctgacttgcaacttcaaaaattcacaactgaagcttcaggcatccaaacaaggtgatcctagactttctggaaag

SEQ ID NO: 184198 - DNA, 658 bp, Arabidopsis thaliana landsberg
atgggtactcgagggaacgaggaagaggaagattggttctctgatgctcgtgaagaggtttcatctgtttctgattgtaactctgaagtcgccgatgactttgttcaagcaactggtgatttagatctttggactatgaatccagagagtgttactaaccgtagacaaaagttttttcaatctatgggttttagtttcaaaaaacgagactttgatcttgatcttgatctgttgggagactctagttccgaccatatttcggtttcgaaacagttgacctctgtgtctgaaactgatcacgaggaggaagagaaggaggagaagttgttgaggaatgaatctacttcctctggatcctccgtttcgtctttctcaactgcttctttggctgaagcatttagtttcagaggttcttttcagaatcgtgccaagaacattgatgatcagattttgctgacgagagactattcaagtaatagtagtagcattgctgagggattgagtgaatctgattcgagtagggtcgatagctatggagatttaccgaactctccaatgagtccttatgaagaatcgcctaaaaaaggagctaaagggtggttaaagaagttaggtgtgttaactcatgttcttgacaaaactgaagagtgcactgatg

SEQ ID NO: 184199 - DNA, 254 bp, Arabidopsis thaliana landsberg
atgcacacgtggcagagtatcgacgctaatgctgatgcagagaacaactacaaatgcgcacaatggccttcttcttcttcatcaagctccggactcaaaacccaaatctctgagaaagaatcaaagccaatattcgatcaatcaaggtcagtattttcaacaatcatcaccagtctctctctctctctttcttcgtatcactctcgatctctctgtctcccagtcgcgttcgagttcagtggtgtgtttgttga

SEQ ID NO: 184200 - DNA, 86 bp, Arabidopsis thaliana landsberg
atagctcttatttctatccaaatgccttacgtgctgttgctttatcttccacggtgtcaaaatccctcgttgagctagcggtgaag

SEQ ID NO: 184201 - DNA, 278 bp, Arabidopsis thaliana landsberg
cacaagccgaaggatttgatccctctgatgctgaaacaattgaggcggtagatgagagattgattgagcaaatgaatgatcatatcactgactggaacgatgtagaaggcatgctatctgcgatgcaaagtaaattgaatttgacaggttctcactatgcgaaaataagaaggaagtatataatagttgaaaacgctatagaagtttcactaccgattcttgagcaatcaaaccatgccaaatttgacatctacaatacatgcttacgactatattga

SEQ ID NO: 184202 - DNA, 155 bp, Arabidopsis thaliana landsberg
aacatgtttctctccgtcttcgaaaatgtaccttcaaaattgcgaagaaagcggcaagactagatgaaaatgaaacgataactattaaacctaaacctaacagttccactttaacggcttctaagaaagataacggagaacgaaaacgccgttaa

SEQ ID NO: 184203 - DNA, 533 bp, Arabidopsis thaliana landsberg
atgagcaaaccccataagttaaaagccactccaggatctcaaagacttgttctgttatgtatagtcgcagttgcatttctcctccttttcacttcggtgatctccaccggcggattggctttaccgtatcggacaaccctaattggttattttgtgaggtcaactcgaaacatgacacagcatagtttgtcggacaagtacttgtactggggaaacagaatcgattgtcctggtaagaactgtgagacctgtgccggtttgggtcaccaagaatctagccttagatgtgcccttgaagaagccatgtttctgaacaggtaacttttgcaaaatccaccaatatgtcaaacttttgagatttctgatgaagttcttgaaatggcaattagcctatctggttcaatgagatggttagttgaataaatgatgcagctctcttggtaaagatggtcactgtacattgcaattttcttgttgcaggacttttgtaatgccatctcggatgtgcatcaatccaatacataacaagaagg

SEQ ID NO: 184204 - DNA, 194 bp, Arabidopsis thaliana landsberg
gaaaaaaacaactcaaaagctgcactcgtgtgaaacatattgggatattgtcagaagactacaccaccttcgaatttcgtcgttcaccaccttacaagatcaagggtcccttcttctacacgcatgacttatttcttgttttggcagacgaagatcataaatcaaaatttaagaataattttgtggacttgtaa

SEQ ID NO: 184205 - DNA, 267 bp, Arabidopsis thaliana landsberg
atgtccattgctgttctaagggaatttctatcgaaacgcaagcaagagcatgaggctaagtcatctaaaagaactagaccagcttccaaagtgattgagaaggatgcttctgaagcttccaaggaagaaactcctagcgagaacggtatgaataatggtgatcacgaagtagcatctgaagatggaccaagctctgtatcaaaagaccctgctaagacaacagaacgatttgcacctagagaacccaagccaccaaaagttcttgag

SEQ ID NO: 184206 - DNA, 62 bp, Arabidopsis thaliana landsberg
atggaagcgaataagtgtgcggagttggcgtactctgggcttactgcgctgtcgtgcgtgtc

SEQ ID NO: 184207 - DNA, 1910 bp, Arabidopsis thaliana landsberg
atatgatgacggagatactgtcagctacgacggtgatgattcaagtaacctcccgacggttccgaatcccgaggaaaaaccagtgccggtgccgagtcaatccccgagtcagaggataactcggttatggactcagttctctctcactcattgtgtatgttttattctgaattcaattactcattactcatttttattaggtgaatattgaattttggtgttttcttgcagctcaaattcatttgttcatgttcttttacttatgtgatgtttcttcggtctaaagtttcaagactagaggtatgttttagatttttctgattacaagatcaaaaaacagtggttcatatagatcaagctggttgtttttctgataacttgtgttttgttgttacaggcagagaatataatccttctaacaagatgtaacagtagcagtgacaacaatgagatggaagaaactaattctagagctgttgttttcttcagtgtcattatcacctttgtgttaccatttttgttgtacatgtatcttgacgatctctcacatgtcaagaatctactaagacgaacaaatcagaagaaagaagacgttcctttgaagaagagactagcttattcattggatgtgtgtttttcagtgtatccatatgctaagcttcttgctcttctgttggcaactgttgttcttatagtttatggtggattagcattgtatgctgttagtgactgtggggttgatgaagccctttggttatcgtggacttttgtagcggattcgggaagtcacgctgatagagttggtgttggagcaagaatagtttctgttgctataagtgcaggtggtatgttgatatttgctacaatgcttggactaatttcagatgctatctcgaagatggtagattcgctacggaaagggaaaagtgaagttcttgaaagtaatcatatactaattcttggatggagtgataaattggtaagttactaatttttgctttacagtgttggattggttataaatagcttagagacagaggatatatcatgtgtgtaggggtcactcttgaagcagctggcaatagcaaataaaagtattggtggcggtgttgtggttgtgttagcagaacgagacaaggaagagatggagactgatattgctaaatttgaatttgatttaatgggaacatcagttatatgtagaagtggtagtccacttatactagctgatctgaagaaggtcaagtttctaaagctttaattgcataactcttggctggtggtgaagcttctgaaaacctttgatctactgacaggtttcagtctcgaatgcacgtgctatcattgtactaggatctgatgaaaacgcggatcaggtttgtttatcgctatcaatcacttcttattctatggtgttactgtttcttgtgaagtattaatcacttttggatgatataaacagagcgatgcacgtgccttaagggttgtgcttagtcttacaggagtaaaggagggttggaagggacatgttgtggttgaaatgtgtgatctagacaatgagccattggtaaagcttgttggtggagaacgcattgaaacagttgtagctcatgatgtgattggacgccttatgatacaatgcgctcttcaacctggtcttgcgcaggttagtttgttcacctaacctgaagaacactttgaagtctacatggtattcttttgcttttaactgtttcttttaccatttttagatatgggaggatattttaggatttgagaacgctgaattttacataaagaagtggcctcagcttgatggttactgttttgaagatgtcctcatttcatttcctaatgcgattccttgcggagttaaggttgcagctgatgggaagatagttttaatccta

SEQ ID NO: 184208 - DNA, 370 bp, Arabidopsis thaliana landsberg
atggcgccaccgcattttctactggtaacgtttccggcgcaaggtcacgtgaacccatctctccgttttgctcgtcggctcatcaaaagaaccggcgcacgtgtcactttcgtcacttgtgtctccgtcttccacaactccatgatcgcaaaccacaacaaagtcgaaaatctctctttccttactttctccgacggtttcgacgatggaggcatttccacctacgaagaccgtcagaaaaggtcggtgaatctcaaggttaacggcgataaggcactatcggatttcatcgaagctactaagaatggtgactctcccgtgacttgcttgatctacacgattcttctcaattgggctccaaaagtagcac

SEQ ID NO: 184209 - DNA, 351 bp, Arabidopsis thaliana landsberg
atgttgcagataatgagaaatgctgccgagacgttgacacctgtcactctcgagcttggtggaaaagatgcatttatcatatgtgaagacgcagatgtctcacatgtaagtgttctttctgtgtcgtggtgctctcttctgtgtttttatgatctattatttgaaaaagaggcgttcctttcataaacctaaatacttctattgtacaattaggttgctcaagtggctgtaaggggcactcttcagtccagtgggcaaaactgtgcaggtgctgaaagattttatgttcacaaagacatttatactgcattcattagccaagtaacgaagattgtgaagtcagtttctgct

SEQ ID NO: 184210 - DNA, 289 bp, Arabidopsis thaliana landsberg
tgctggtgtatgaaggtaccgaaagcctcgaacagctttcatcgggtaagatcctggtgaaaacacccgtggccagccttaccgagggcaaaccttattccttcgacaagaccaccggccaggaaattccttcgcagtatgttttgaatggtaccaccatctcctttgcactgggcgaaaaaacattgcccaatacgactgtcatagtccctacggtgacctggtcgacacttcttcaacaacggcagcagcagcgatacctggacctaaccctgttaaaatggcacag

SEQ ID NO: 184211 - DNA, 83 bp, Arabidopsis thaliana landsberg
atgttgtcggtgtccgcgctacgaaagcggcggcaccggatacccaccgcccggcgtacgccccattgctgcgagcccaacgg

SEQ ID NO: 184212 - DNA, 844 bp, Arabidopsis thaliana landsberg
cgaggccgagattaactgggccagggaaactaatcgatttgctgaaaaagtgagtatcctcagtacatgttttctctatgctctttgtacaatgttgttgaatacgctgatggcttatgttctcacaggtggaatttgagactttacttgaggatagcccaccaattagatcaaagagaaggcttatacatataacacaactcatgcaacaactatttagcccacctccggctagggtgatatctttggttgctagctcaaattatgatgttgttgcatatactgctggaagagctgcactaggagatgcatgtagctccagtagtaccgacaggagtgagggcttttggccccccaacatttcaaaccggtaaggatattttcagtttatccttgaagtgttgtagattttctagagtttgtggttctctattgacacgaagagacgcactcttgtgtaggttgtctgagagaacgaaaactgaaaaaatcagtgaccaatacatctccaaagcagctgaagatttcattagtagaacacggaaactagagactgactttgcaaggtattaaccgtagctaactgattccattttggcatggccactcatctgtgctggtttgacctcattcatgaacatctctggttcttcttgcaggctagaaaatggaactacaattccagacttgagagtcgaagtccaggatctagagaagtttgcagtgatcaatcgttttgcgaaattccacccaccatctatggacaggaccttgaattcagttaggataaacccacaaagatatgttacggtagctccaaaagcctcagaatattccagacagg

SEQ ID NO: 184213 - DNA, 202 bp, Arabidopsis thaliana landsberg
agttggcgcgaatgatggcgctaacttcaaatcaattgaacttaaggcgattgcaaagcagaaggatattgcaattgagatcactaagacaaaccttccgaaatttctgaatccaaatcagcagaaattaatgagcattcttatttcgaagtcgctggcctcgaaagaaaagcacaacggaattgttacgttctctgaatcg

SEQ ID NO: 184214 - DNA, 1064 bp, Arabidopsis thaliana landsberg
aacttacctttcaatgatggggatggtgaagtttcagccaaaaaacaccatactgtctctgactatgtaatggaaaacatttatttgggtggagcatcaccacctcaccaggtaactcactcgtgtattatttatgttacagttttgcgtatttgtacgtacataaagaacaattactaaccaagtgtatggtttttatttcgaaggaggtaggagggaactcggagattcgtgaagattcttccaagatacaccaaaatgtctctgactctgtaatggaagaaaaatttgatagtgtaccatcaccacctcacctggtaacttgtgtgtttatgttatagtatttcataattgtgtacgtactgaagagtttctggtcttctttgtaacaacccgaacaaggcattcctgatagggatataaatgaaaaggccttgcgcaatcaaaaccaataatgtctgatgatgtacctacgtcgactcatcaagtacgtcgtgtactaataatgattgcgatttatttttgtgtgtacgtacatgttctttctaaagtgtatgataggctatcttaaaggacgttgcgaaagatgttgttggtaatacggaagaatcagttgtcgctgctgagttaccaaaaatggaggagaacagtatggaacctccacactcaccgcaaaatgaacccagagttagggatgaaattgatgttgcgcatacagaagataacaagcgcaatgtacgtacaatgtttttcaaattcatatggcacctttgcttgggtagctttgagagatactaatagttggacatctatatccatatattgaggcaggatgaaccaacaagtggggatggggaggaagtattgaaggaggcacaatctccaagctttgtagttgaaggagttgaggtaatgttaaactattatgcatttgtaacgcgtctatgtgaataatggaaataaccaaatctttgcttactgtggatgaaggacactgcggatcaagtacctatagttgttcctgacaggactctagaggctttttgatgatgaagccaatctaa

SEQ ID NO: 184215 - DNA, 338 bp, Arabidopsis thaliana landsberg
atgactcggcggttatctctaaagcgccagcagtgtcagccatcgctcggcaggtacctccaaaacgccggtagcatcagatatgactcggcggttatctctaaagcgccagcaatgtcagccatcgctcggcagttacctccaaaacgccgatagcatcagatatgactcggtgtctacctctaaagcgccagcaatgtcaaccatcactgagcagttacctctaaagtgctggcaacatcagacatcgctcggcggttacttctaaaaacgtcggcaacatggagcatatggacgaactgacaattgtgcgaacagaaaaggcggcaaaaacatga

SEQ ID NO: 184216 - DNA, 675 bp, Arabidopsis thaliana landsberg
gatttgatatctcaagtttccaccgaatcagaccctattgcacttctcgctaaagttgtctccctcctttttattaaggtacatacatatccacgttcgtgtaactatattctgtgctcaaaattcagattaatttatggttggaaaattgtcgacagattcacaataaagctttacaagcccctggtagagccattgctgcggctatttcacacttgaaggtataacataacaacttaggagattcacaataaccgtatcatcttttctctcgagcattcctattttttcgggtgtctggtcactctgtattatatcttagttttctttttctgtggctaacacgtctattttaaaccatgtaggaaaaacttgatgaatctgcgtacaagactctgacagattaccaaacagcaactggaactcttcttgctctaatgtcagcttcatccggcgaggttcatatccttctcttattttgtgggctacaaatgttcatttgaaatgaaaccaattaaatctgtagtgaatgatatcttaaaactattccatcaacatgaacaggaacatgattgctccgcagacagaatcttgaccaaacgggaacttctcgagagccagatgccattgcttagaaccctcgtccttggtgactcgcagccacaacaatcctaa

SEQ ID NO: 184217 - DNA, 413 bp, Arabidopsis thaliana landsberg
agccagctgcgcgacctggcctcgcagaacgacaacctcaagcaacaggtggcgaacctgcagcgctcgcaacaggtcacccagattgccacggcctcgctgcgcaagaccctcgcggaccgcgacgaagagatcagcggcttgcgcgccgacctgggcttctactcgcgcctgctcggcaacaacgccacccacgacggcttgaaggtgcaggaggtgcagttgcagccggtgtccggctcgcacgcctggaacctcaccatcagcctgacccagagcgtcaagcacagcgacgacaccagcggcaccgccctggtaagcgtggacggcgtgcgcggcaacaaggtggtgcagctggcgtggtcggcattgggcgacgacgcccagaaggacggcatgcccttcagcttcaa

SEQ ID NO: 184218 - DNA, 132 bp, Arabidopsis thaliana landsberg
ctgatacttctatgacactcactggcttaaaatcagatactacatatgatgtaaaagtacgtgctcacacgagcaaagggcccgggccatatagttcaagtgtccagttcaggacactgcctgtggatcaag

SEQ ID NO: 184219 - DNA, 1296 bp, Arabidopsis thaliana landsberg
accgaaagcgacacaacttaccttttttgataacataccaaactatataattgatcgcgttcattttccgaaaatatatgccgaatgcggcggggctataaataatagtttgatcgatcggcttgtttatcatccatactcaagccctcgaattaacacttctttgtcacatcgtcgatggaacgagtaagagatttggcatcggagaaggcggctgtgatattcacgaagagctcgtgttgcatgtgtcatagcatcaagactctcttctacgaactcggggcgagtcctgccatccatgagcttgacaaggacccgcaaggccctgacatggaacgggccctcttccgggtattcgggtctaaccctgctgtccctgcggttttcgtaggaggaaggtacgtcggctcagctaaagacgtcatctccttccacgtggatggctccctcaagcagatgttaaaggcctctaacgccatatggttgtgactacatatcatcacgcttcttactatcatttattctacacacactagttcatattatgtcatctcgtgaataatacatacatatatttatctaagcttgcatgaatattgaattatacttttagtaaccatatatatagaagattatgcatgctccgatgctcgtggagattaattatcagttgatacggagaaactagactgtaatcaatcatcacgtaaagatttctgttaatatcggaatatcatctggatttagcataatatcttccgattatagaaaaaaatgtacgtagtataatacctaaccgatatacaaatgaatatcgaacgtaactatgctataactagtatatatatgatcgtttttgaatcaaacataaaagagaatctcgctcatgaaaagattactacacccacaaaacaatcgaaaagtaagccaagaatgacgcagcagagttaacatatgcgtgtgattcacgcgtgcgtccggcaagaaagacatttcgagagaagtgaatcaaacattagtgtaagtgtgaaagaagaatatataaaaaagaaagatggaataattttctttggcaagttggtgttggcggaatcaccatgtacgatgcatattgttgatacatatatatacatgtttatcaccgaaaggtccaatctttttcatttatcctcactttgcgcaatgactcaatcaaaggagatatgttgagagaatccgttagattataaattgacaagcctcttttctttttctaggggtattaatcatgctatatttcttgtcacattgatttga

SEQ ID NO: 184220 - DNA, 101 bp, Arabidopsis thaliana landsberg
gtcaaacccaactcgactctgcccaagacatttcttccacagtggtcctctcaaaccaaactttaaacacaaaggcactgctaccaagtattgcctgccag

SEQ ID NO: 184221 - DNA, 149 bp, Arabidopsis thaliana landsberg
ggactcggccacattctgcttctggcatcagccccaaaaacgcgaataaatttacgaacattgaccacgattcagatccctacaagttcactcacgacagggagaaacccgaaaacagggaacgactggctcgacttgaaaactcttga

SEQ ID NO: 184222 - DNA, 1990 bp, Arabidopsis thaliana landsberg
agagtggactcacagcattttcaaacaaggagaatgacagccaaaatcatagacaatcagcttcagttttacaggacatcagcaacgtgtatcatcgtttctccacacctcttataactccacaaactgtctctaattctgcaattaacgattcaacaggttagtttgacttcttacagaggtattcaattacattggagaactttatgtatagattaaaactcacaaaataaatgttctattctatgcaaggaaaactttatgttcatcctaattcaagaaacagcaatcagacaaagtcttctataaataatccgtctagcaactttcatatcagaaacctagaagaagaattccgaaatgtttctgatagaactactgctgtaggtaatgtacttaacctttcatcacataacgatatgttttagatactgcaacattttcagaagttataactcacaaaatcattttctattatatgcaaggaaaactttctcggcatcataattcatttactatcagtaatcagccacggtcaaatatagattctctatctagccactttcattaccgaaacctacaagcagacttaaaaaacgcttctgtaactcctactgataaaggtaatatactaactgtttcattatagtctatattttaatttggtctaacaattccacacactttttctatgaaacacttagtaggcaaatctccaatgtacacacaaacagccatcactgatgatagcactgatgatgaaagcatggagcatcttcaaccacaatattttactgacaatgaaactgatagtgaacaaaattataatcttagtgcttcagaggacgactgtcctgaagagacctcagtgaatattcaagatgattcttctatggatttacttaatgacaatacagaaaatgtggacccgaatatttgtttcaatgacgaaaatgacttaatattgtcacctgaagagactcttactgaatgtggagatatagaacacattgtcccctcttttccacagccaaaaaagaggggcagaccatttggaaaaaagcaaactaacaacgcagcagataaaggtaatcatatcatacaatttattctgaaaatcattatacaactttttttcatatcattgtagttgcttttcctgtgtttaatttagacatgatattcaagcttaccaatttcctatattgacagcattgaattgtttactactaatagtgtttgcttaatatcctattttagttccaaaaaaaagaggccgtcctaaaggtttaaatccaaataaaaaagatgcagctttagccaaaagaatgggtaagtgtcatttttttctttaagaatatgatgtaactagattttaaatgatgcacttaaatctgaaaacaattttattctctgatgactgctaagctttggaaagtttatcattaaacacacctaaagatacttctacacaaccatagaaaagtggacggccagttggggcaaaaactgtcaataggtctccatcaaattcgaaaaacaacggtatgttttaatctgtaaactcatttcattgcctattaacaatataagtgcatacttactacagttttaaatttacccttatcaggttacctagaccacggtccccctacatacaaatgcaagtattgtggtgctttgatgtggtttaatgagaggatcaataaataatctaatagcgaaagtcgctcagtttagtctatgttgtggtcaaggcagtgtcaaattaccttttctacaggaatcacctgagctaatacgaacacttctaaagggcaatgatgcatcaagtcgtcattatcgacaatttatcaggatatataatatgattcctgctatgacttcacttggtggtaaggtcggcaaatctatgcctaaagggagaggcctgctatgtatcgtttgcaaggaggaactgccccagattggcagtatagaccgaaagatg

SEQ ID NO: 184223 - DNA, 120 bp, Arabidopsis thaliana landsberg
aatggcgtgaagtgtggaaaatatatcttcttttcctatgaaatcgattatagccattttcgttacggagagatcgaaagcagaaatggcaagagaagcaacgacgaaattgaaacataa

SEQ ID NO: 184224 - DNA, 395 bp, Arabidopsis thaliana landsberg
agagcccactagacccatctctgagaaacagctacgcagactcaacggaacagaaaagactcggatcaaacgtgaagaatctagtgtttgacctcgtcaacacgctgctcttggagctaacaccgagctatcttggacctcgtagtagccccatgatcctctctggtaagccagtgggggttcatgtgataaacagaatgcaagagggattaccgggtaacggaagagtggaagatcggtggcgggatgaagacggagacttgagcagtttggcggtgaataaagtggtgaggattgaagtagctgagattggttcacaggagagtttgagattggaaatggattccatgggagaggaattagaattgaagttgctggaggagttagtgcagtag

SEQ ID NO: 184225 - DNA, 152 bp, Arabidopsis thaliana landsberg
tgacaacacttcccaattcttctgattatggcgcaggggatttgccggaagatccaatctgtgctgattttgcaagaatcgatgggctcctcaaattatcggacgctttttacgacactgcaattgatcgaaaccttcgcacaaaatcgtaa

SEQ ID NO: 184226 - DNA, 1968 bp, Arabidopsis thaliana landsberg
ggttttagagaaatgggagatagaaacaacgacggtgatcagaaaatggaggatgtattgttgcccggatttaggtttcatccaaccgacgaagagctcgtaagcttctacctgaagcggaaggttcaacacaaccctctctccattgagctcataagacaactcgatatctacaaatatgacccctgggatcttccaagtatatatgactttcatacttttgtatatcatattataaggtttaatataagaaaataaagtctaaacaagtttttttgtttttttgttgttgttaaaatatcgtagagtttgcgatgacgggtgaaaaagaatggtacttttattgtccaagggacaggaagtataggaacagctcgaggccaaaccgagtgaccggagctggtttttggaaagccacgggaacggaccggccgatatactcgtcagaaggaaacaaatgcataggtttaaagaagtccttagtgttctacaaaggaagagcagcgaaaggagttaagactgattggatgatgcatgagtttcgtttgccttctctctccgaaccatctcctccttctaagagattcttcgactctcctgtctctcccaacgtaagctcatattctctcagtaattttttcttaggtattgtttattaacaaagaaaataggattggaagttatccggatcggacgacaagttgagctattattagttattaagatcgcaagatttggttagaagtttttgaagagtaaatacatatctcgaacatggtgcatttttgtgttgtaaagtagtgagtttgaacgagttaaatgagaaatttattgatttaattgttttgtatatctatctttaggtctgagaaagcaaaataaagtcttaagtttttggtagaagacatatttgacaaatattaaatgcgagagattttaatatatgtattttaggtactccttttatgtttctttgatattaagtttaaatcttaaattattgtgtgtgtgtgtgtttttttctttttgtactactaatctttcttttaataagtatgtttattcaaacaatttctcaaaaataaaatataaaataattaaataaacaaagtgcaaatattattttgaaattagtggacttctattttctataaattaaactcatttgttattaacattttgaatgatatggaccactgcaggattcatgggctatatgcagaatcttcaaaaagaccaacacaacgaccctaagagctctctctcactcttttgtttcctcgttaccaccagaaacaagcaccgacacaatgtctaaccaaaagcaatcaaacacataccatttttcttcagacaagatcctcaaacctagctctcacttccagtttcaccatgagaatatgaacactcccaaaactagtaatagtacaactccatccgttcccactataagtcccttctcttacttggatttcacttcatacgacaaacccaccaaacgttttcaatccggtttcatgtttagaccaacaatacctcacaaatctctttcttgccacacaagaaacacaacctcagtttcccaggctcccctcgtcaaatgaaatcccatcgtttctgctaaacacgtcttcagattcgaccttcttgggagaattcacgagccatatcgacctcagcgcagtgttggcccaagagcaatgtcccccgcttgtaagcctaccacaggagtatcaagagacgggattcgaaggaaatggtgtaatgaagaacatgcgtggttccaatgaagatcatcttggtgatcattgcgacacacttcggtttgatgatttcacttcaacaattaatgagaaccatcgtcatcatcaagacctgaaacagaacatgacattgctggagagttattattcttctttatcgtccatcaatagcgatttgccagcttgtttctccagtacaacctga

SEQ ID NO: 184227 - DNA, 813 bp, Arabidopsis thaliana landsberg
  unsure (1)..(813): unsure at all n locations
atggggcatcatacttcaacttcaaaacctaagaacaagaacaagcttttgaagatgcttcctaaagcgatgtcgtttggacatcgagttccaccgtttagtcccggaagagatctccaccacaacaaccaccataattacacggcggctaacaaaatgtttttctctggtcctatggttcctttggtacctaacgcggctcgggttagaagaaacannnnnnnnnnnnnnnnnnnnnnnnnnnnnnnncctaaagtctcttgtatcggtcagatcaagcttggtaagtctaaatgcccaaccggtaaaaagaacaaagcaccttcatctctgattcctaaaatctccaaaacgtcaacgtcgtctttaacaaaagaagatgaaaaaggtcgtctttcgaagatcaagagtatcttctcgttctcgccggcgagtggacgaaacacatcaagaaaatcccatcctaccgccgtctccgccgcggatgaacatccagttacggtggtttccaccgcggcggtgccttcgttaggtcagatgaagaaattcgctagcagtcgtgatgctttaggtgattttgattgggcggttgagatgaaacatgaagaagaatcacccgctgatcatcaccgtggttactattctgacgacgacaccagaggagcttacttgagatacgatgatgacgaggatgaagatgacataataatccctttttcagctcctttagggttaaaaccaaagaaagaagttaacttgtggaagagaagaaccatggatccaccaaaaccacttcatcttcaaaccatttga

SEQ ID NO: 184228 - DNA, 265 bp, Arabidopsis thaliana landsberg
atgcaaggaaacaagaagctacttctcggtgagcctcttgcaaaagaaagtgtgtttaatgtggtagtttcagttcaaatttgatgacaatctgtttctatctgcagcttttttgtggcagttgatgagatacacaatgctccaaatcctgaacaacttgaggtctcactgccaaggtaaagatatcacagaggcagatattctaaactgggcaaataggaaagtcaagaaaagtggtcgaacctctcaagctgtgagcttcaag

SEQ ID NO: 184229 - DNA, 630 bp, Arabidopsis thaliana landsberg
tacatattcgacgaattctccggtgtggtatgagagagtcttagcttgttttgtgttttttttttaattagcacatgtcttctaactcatgttttgtttttaattagcgtcatgatgtcaaaagattcttgcttaaacgtatgtggaccaagtacttggtagagtatgaagctgaatttggagctgctttcgttcatgatgtttttgaagatgctcttcgacaaagggctaaaattgcatcggttaccgtcagaatttgctggactccaagctacgtaactgttgttggacaggtattttgaaacaaaattgaattatttaaattatcggataagagtattaattctaatgttttcacagggaggaatttaccaatccactgtggatgagattgcagctaatgtttcggccacttcctcttggtgctccgtccggtgacgattgatggtgtcgactgctgggaatgccaagactctttcagatcaagctccaatcatatgacatggttgataattttcctcgtaactgtagcatttacatgctgtcttattctcaattatagatcttgcatgttatcccaatttaaatagtcgatattgcttggcaatttcggagccaaaaagactttaa

SEQ ID NO: 184230 - DNA, 424 bp, Arabidopsis thaliana landsberg
  unsure (1)..(424): unsure at all n locations
atgtcaacggttaagatcgaatccatccatgccgatgcgtcgagggaagctaagccgtcggatgttaaacggaggggtaagattagatctcgggggaagattacctcagggtcgtccgattcttgttcaacggtagagattagtttaggagtaccttttcgtaggatcggatcgtgtccacagatcggtgggnnnnnnnnnnnnnnnnnnnnnnnnnnnnnnnnnnnnnnnnnnnnnnnnnnttgatctgacagccaggattgcataccgttttcggtgcattccagatctaatccgtgccctcggctggtgatccaatggctaaggtttgcagataccccttcgaccgaacgattttgcagagaggcccttaaaggttttaggaatcaacccgccgtccatctggcttgattctgagtcttag

SEQ ID NO: 184231 - DNA, 137 bp, Arabidopsis thaliana landsberg
acgcagcagcagcgagagacgaggaagaagaagaagaagaagaagaaggaatgatcatagaatgtgtcgccatgcaaattttcttggagcgtcaaaacaaatgtgatgatgatgatgccactgtttttgccttatga

SEQ ID NO: 184232 - DNA, 908 bp, Arabidopsis thaliana landsberg
atgggcaagatcttgaaatctaaggtatgttctgtaaacaattcgtttacaactctcctttattttctttgctaaaaacggctgcgttttacagtcttcttggccaagaaccgtcgtgaggaaatggttaaacctacgtagcggcgcttacgaatttcactctgattacccagtcaaaggtgagatgttaactcgtgccgttttagatatttttgctcaaatttcttgccgttttttttaatattctcgtctgacttaccggaggtttttttttctttctagggatggagccaaggcgaaaaagctgctccgacatgatcgtgccggaaaattttcaaggtaaaaatataaaaactagctcatgaatttgatttaattatactactattgttttgttgcatcgaaaacggcgtcgtatctattgtccgtagaccgtactgaattgagactgtctccgtaccagataaagctttgggtccatctctaaccgtaggattagacatctgtgttaaaaacgacggcatataagaaactgagattttctcttgaaaatcgtgtttttttttgtcggaaaaaaaaaaaaaaaacgagtttacaaatgaaaattgtatcatctgtatccacgtgtagggtgagagataaggtttaggcggaaagttaaaaaaagtctttggttttaggtgtacttgccactctaaccattcaccagtttttgttttatccacataatatctctgtctgattataatagtctaaatactaattaagtgaagtatataactaattggttttgtttatgttttgtggttgaaataggttggttgggccaaggaaatggggatttaaaacattcaaccggtgaacaacatgtgacacgcgttgatgacaaacttgatcttaagttataa

SEQ ID NO: 184233 - DNA, 71 bp, Arabidopsis thaliana landsberg
aaccagatggagatggagtaagagatgacacaatcagaaaccaagaggataacattcagccaccattgtaa

SEQ ID NO: 184234 - DNA, 591 bp, Arabidopsis thaliana landsberg
atggtaacagatgcttttcacaaattgactgaaagtggaattgaagaaccaaacttagaagcgaaaaagttttttgatatgttagatgcagcgaagaaaccgatttatgatggttgtaaagagggtcactttcgtttatcagctgcaacgcggatgatgaatataagaacagagtataacttgtcggaggattgtgttgacgcaatagctgacggtaatttgtatatttttatattttttgtatatgatatagttttgacgtaatagagaacagatgggaatttgtatattttttgcatatgatatagtttttatcaaattcagtctacagttttctataatgacatgtttctgtgtttcaaaactgtttcgcgtgatgaggtgacaggagagctcccagatatggttacttttatggaagcaacccataagagtaagtctgatggtgtatttgtgtgcaaaaaagctgagttgatcgccaaaaaatgtcgaaacatggagcaccaaattctcagtcaaagagacaatgacgatggtaacactttggacactaaccatctttcacaagaagaaattgatgctatttactaa

SEQ ID NO: 184235 - DNA, 131 bp, Arabidopsis thaliana landsberg
gactggtagaaaccccaaaacctgttattgcttggtttgactctatgaactttgattgcatcttaattgctagcatcacacccatttggattgacaacctaaaatactacaacgacatgattgatgtttga

SEQ ID NO: 184236 - DNA, 841 bp, Arabidopsis thaliana landsberg
ccaacagactcacccttccgacaacatcctcgactctgacgaaacactccaactactaatctcttacgaagaaaacgaagagccaaagaaagagatcaaaaccgaaaccgaaacccaaaacgatgacgtctctcttcaccctccaccacctcctcctcctcccaacgttgtagccaaactcatggggctagatcatcccgcaccgggatcaaaacggttccggtactttgatgattccggttcggctgtcacaaggagcaaatcggttaacttcatggactacatcctaaaaggtcacgaggaagaagaagaaaatgaagacgagaaagacggtcaacgtcagtgccggagagtcaaagcttccgtttctttccgtgagatagtcccaacctcggcgagatggagctctaataaccaacaaaagaagcatgatttcttgctgttgtatcttgacaagcttgacgagaagagagaacttgtcggatcatcgtctttttcgaggtctaaaaggttcgagaaggttgtggaagattccaagaagccgccattgccacctccggcgccgaagaagaaggagaacgagaaagttgctaagaagtttaaagatgagccgaggaaagttgcgaagaagaagaagagtgagaatcgaaatgacgttaacggagccaagaaagttcgttggtttctttctccatctaagagtaagtcgtcgtcggagaagactgcgcttctaggagaatcaaagaatattcgggatgatgagtttatcggaaaagagagtgagtcgccgccgaataagtataaccccagtccggtttcggttcttgatcgagatcaataa

SEQ ID NO: 184237 - DNA, 228 bp, Arabidopsis thaliana landsberg
atgacagactacggagggaatgaaacagcggttgatgcgtttgatttggaaccatcaaataggaagtttacatatgcagagattgtgaacattacaaatgggtttgatagagatcaagggaaggtaggatttggaagaaactaccttggaaagttagatggtaaagaagtaactgtcaagcttgtttcttcactatcttctcaaggctacaaacaactcagagcagag

SEQ ID NO: 184238 - DNA, 1057 bp, Arabidopsis thaliana landsberg
aagcaaaacgacggcgagcttggtcgattggattcaacgtcggaacaaatcgacgttggctgcagtcgtcgatttagattttgtgagggaggaaaagaaattctgggaatttctgataggttaatattttgtgacttaaatggtattggtttagagacttaaccgtaattggttggtttggttcgtccgtccggttcgggtttgttgggtaaggtaaacaaggatttttaaaattcattaaaagtataggagtatgttagattttttttttttggtcaaactagctttttataaatgattctacaatggagaaatatttagactcattttaggagagtagagagtacatgagatcattgtcctaaaatgtgtcacaatctaatgcatttgactaataataagagttaaagatggattaggagtgcttagacaacacttatatccatttactcctaaaagtggataaaaccaacaaaaaattgagtagaagcattaaacaactttgttagtgtttttatggtcaaaatgtgtcacaatccaatgcatttgactaattataagagttagagatggataaggagggtttagacaacacttatacccattttctcctaaaagaggctaaaaccaacaaaaattttcttagaaacagtaaatagctttgttagtgtttctatggtcaaaatgtatcacaatccaatgcatttgattatttataagagttagagatggattaggagtgtttagacaatagttatatccattttctctgataacactgtattttactcattttaggtgtatgtttatcatcatttagccttgcatttccccattgtatcatatcagtttactcgaccctcttactcgatcaaggcaacctcaaatgaagcagcagattgatctactctcccctcttactcgatccactactcgacccattttcttgaccaagtgtgaccatctctacaagacttgtcgagctatcaaagcgtcttcagatcctcctcattccccactcaaccagacatctgagcatacgaataggagaggatga

SEQ ID NO: 184239 - DNA, 395 bp, Arabidopsis thaliana landsberg
gccccccagccgccgaacgcctttcatttccccgccccggccgacgattccctcgacctgctgggcatagagggcgggcccgtcctcaagcggctggcgcccgagctggccacactcgacggcgtgacgctgaaagccatggtacgccggcttctgagaggacgtgcctaatggccatccagcccgccagcgacaccgggcccgccagcggcaccgccggtacctacggcacttacgacccctccggccctgtcacctctacaggcactgacatctccaccggcactgacacctccaccagcactgacccctcccccggcactgccgacgcggcggcgggggccgaccccgggatcgaaggcgggatcaacgagcgggcgggtctcgtcggcaca

SEQ ID NO: 184240 - DNA, 91 bp, Arabidopsis thaliana landsberg
atggcagagacacctcgtgttgctatcatcatgggttcagacacggatcttcctgttatgaaggatgctgccaaaattctggacctgtttg

SEQ ID NO: 184241 - DNA, 245 bp, Arabidopsis thaliana landsberg
acaaaaacaaagatctagatatagtttatgagtttcctgatcttaattgcagggtaaggattgcaaattggaagacgggagtgaggcagtgatttagacatcgacgtacttcctgtcggtgatgcagtcgaggctttccagacggatacgtgaggcttcgccggtggctcttctagttatggacgctagaggaacgacatgaagctgctcacggcccacccattcgtggaaggtcctcagcatga

SEQ ID NO: 184242 - DNA, 86 bp, Arabidopsis thaliana landsberg
cctattataatggcaaacaaaaaggaaaatgtttctctcatacttttggtgtgacagatactgatggaagagatgatggatcttga

SEQ ID NO: 184243 - DNA, 1367 bp, Arabidopsis thaliana landsberg
atgcaagatgaaggtgttggaaattcctgtgatgcagttcgtgtttctgttctggtattattccattggaactagtgtttttgttcccttatatgcaacgtattattttctgtttcatctttcttctttcgtaccatttgtagaatttggtggatctagctggttcagaacgggctgcaaaaaccggtgcagagggtgttaggttgaaggagggctcacatataaacaaaagcttgatgacactcgggactgtcataaaaaaactgagtgaaggagtagaaactcaagggtacgttttttttgtcagttttgttagggaacgaagcatatggtacataagcattaagtgtctaatcttattggccttttatttggttgagtcagtggtcatgtcccgtaccgagacagcaagcttacaaggatcttgcagcctgccttaggtgggaatgccaacacagctattatatgcaatatcacacttgcatcggtatgtattcatcaccaataatataatcaggataagccagacagatgaaaccaatagcaatctttattttctctttgtttgctttggtgcgattaacaatgttaatatttgtttgctttggtgcgattaacaatgttaatcttcgttttgatgttagattcatgcagatgaaaccaagagcagtcttcagttcgctagccgagcactacgtgtcactaactgtgcccatgtcaatgaggttggatcagaatcattttgcacttattctctctatctttaacatgctttctaattaagtatgttataagcattttcttaaaaactaattatccatccattcttgtttttccacttttcaatacagattttgactgatgctgctctattaaagcgccagaagaaggagatagaggagctcagatccaaactgaaggtttcttgatcgttttcagtattagtttcttaaaagttatctcaagcttgtattgtgggttaataaatatcagctattctatcgcagacttctcactctgaccattcggaagaagagattcttaacttgcgtaacaccttgttgaaggtatgtcattttttctttattacttagttgtttattctttcatacgtttctgatatatccttatatcctgtttttctgcagtctgaattagagagagagcgaatagcacttgagttagaagaggagaagaaggcacaagctcaaagggaaagagttttgcaggagcaagccaaaaaaattaagaacttgagttcaatggttcttctttcgaatagagatgagaagcgtgagcaggatcactttaagaaggtttttcctgtttcttccatcaatttacttttcgataacttgagagtttaa

SEQ ID NO: 184244 - DNA, 480 bp, Arabidopsis thaliana landsberg
atggaggacactgtttgcaggttcgcacgcttgcgtgatcttcaggtccctgagacgtttccagtttcttccacctggattaagatttatgcttcagcgtttggtaagtttcacatgacttatgatacattctgaaacaatggtaaactcacaacacgatatggatgaatgcagatgggagtcactctcacttgttcccccagaagcagaagcatattggttagtccatgaattggattcatcatactctcttagtctcatgttaaatatagatgttgtacagatctttatatggttttgacactgtgattatagattggatgcgtcttggtgcctttgttcttgactctcgaacttcattcctgactgagagtttgagtggtcgtctgaaagtcccaacagaaggaactatagaacaaatgttacaatccagtggttcatgtcttatcaacgacatcaaaagcggtatttggattgcag

SEQ ID NO: 184245 - DNA, 561 bp, Arabidopsis thaliana landsberg
atgggaggctggtcctataccagaagatggactttgggctccatggtggtacgagactcttcataaatcaacagggttctcgtcgccccagaagtaccctcaggtacaagacctgttttcgctgcaatttaagatcctgaaactcagacatcattcaaactacaatgtgttttgttttgctttcagactttccctttaatgcattacgatttgctggagcaatgtttaccgctgtacaacattctgaggtgccacatgaagcacaagtcatcgctcttgtccagcaccttacctcctcccagtctcccagttcctgaaaatgctaaacttcttgcttgggttggtgatgagattgtgccacgagagatggcgaaggtgcttgagccatacatggatctctgtttgttatttcttgtttatgcttatgttctgatgttatttgtctttattcttgcttaaggtttctgtttttgactcggtcgtgcaaggcggtgactctgtatgggaaggtcttcgtatatacaaagggaaagtatttaagcttgaagaacatctagaccg

SEQ ID NO: 184246 - DNA, 133 bp, Arabidopsis thaliana landsberg
atggatgatatgcttatatggagtataattttggaactgaactctactggtgaatctaatatacaaaatcaaccaaaacttgtttttgtggctgtcgttataaacaatttgtttattcttcttctgtttgatg

SEQ ID NO: 184247 - DNA, 193 bp, Arabidopsis thaliana landsberg
gtgtttgcagatgctcgcaagaggggccgcatgactagcgatgtctatattgcaagcgctcttatagaataccactgctacaaggatccggctgccaccaagatattcgagcggggtgccaagctctttcccgaagatgagaatttcgctctcgaatatttaaagcatttgattgagggcaatgatattatta

SEQ ID NO: 184248 - DNA, 1310 bp, Arabidopsis thaliana landsberg
atgaatcaaggaagtaaacgacaaacgactgaagcgggtaattaaacaaggaatgaataaagcaaagaatatgacaaagaattaaggaagcaagcaaactcacaaggactgaaggaagtaagcaacaaacctctaaagttggtcacataacaaggaatgaagaactaaaattagtaaagcatacttgggttgacaaaaaaaaaataagtaagcaaagaatcagacaaagaattaaggaatcaagtaagtaaacaacgactcaaagaagcagagaaggaattataaatgtgtaaaagtaagaaagtatacatattacacataagcgtagatgtatgtatgtatgtgtgcaatgtagattatgtatgcattatgtatgtatgtatgcatttatgtatgtatgtatgcattaatgtatgtatgcatgtatgtatgtatgcatgtatgtgtgtatgcatgtatgtgtgtatgcatgtatgtgagtatgaatgactgcatgtatgtatgtgtatgcatttggttgagtgattgcgaacaacccataagaaatgtggctctccaatttgttgttgcagaagaaaagtggcacaacatcaaactccttccaaaggagatagagtcgccaattgcttcctacaccaaagttttgagaaaagaaagcataagatatcagagattaaaatagatgagtaagtcaacactaaagatgctttcacttatctgaattacgacctagacgaatcttatgaagagaacacaaataatgtgcaagtgtcttctaaagttttatccccatttggaaaactattagcaagtttcagtataactatgcatatgaatcaaaacaacaaacctttaaaattacgaatggcaatgacataagaaaacaatatgattttccacaaccaaaatgatttctaaaagcttctatcaaccaaagacacaacaaattagatcaaaaatgatcggatgagatcgcgaaaattcaaaatcaaacttattgggttcgcagagataaacgaacacaagaaatttgagacggtggaattaaatcataataaattcgactgaaaaccacaaacctccgtcaccgcctgcgtaatccacctcacggcggccacccaccaccaacacggtctcatccactgtcgtttcctttaaagagtcttgttctcggcacaaatcataattctcttgatcccccagtttcgcgatcgctagacgctagtgatcttgtcaaccccaatcaaacaaatcaggagttagaaggttttggaagcaatgaaatgacaaaatcattcgatcgctcttaa

SEQ ID NO: 184249 - DNA, 164 bp, Arabidopsis thaliana landsberg
gtattctatgcactgggacaacaatggagataaggagtcattttggagcaagatctaaggaaaaggaagctaaggacgattttggactcaagaatcagcgaggagtgtcgaccgacacacttttggtgtcgattgacaccagtttcggcccagcaaaaccctag

SEQ ID NO: 184250 - DNA, 66 bp, Arabidopsis thaliana landsberg
gactgcaaggacctggccaatcttcgaagcttcaaggatacacgctttagagggcaagaggtctga

SEQ ID NO: 184251 - DNA, 624 bp, Arabidopsis thaliana landsberg
atgctgacccgcgaccagctgatcggcagcgccgaccggctgatgagcttctacgtcgcgcaatacgaccagccaggctggcccaccgtcgataacaaggttgcgctggtcgacgacacccgccaggcgttgcgccatgtcatgcgcggcatgccggccatcaaccgcgtgtacgtcgagatcaagacccgcgccgccacccgctatccatcgctcagcgtcgcctcgatcctgggcgaccagggcgacaagctcctgctgggtagctacgcgatccccggaagcttcacccgcgaggcctgggaaggctacgtcaagggcgccatccgcgacgccgccaacaaccagttgaacgccaccgactgggtgctgcagaccacccagcagaccgacctcacgctgtcgggcagccccgaacagatccagaagcagctggaatcactgtacgacaaggactacatcgcacagtggcagaaattcctgcggggcgtttccgtggccacgttcggcgacttcccggccgcggtcgccgacatgaacacgctgggcgatccgcagaattcgcccatgcgcacgttgctggaaaaggtgtaccaggaaacctcctgggacaacccgccgctg

SEQ ID NO: 184252 - DNA, 67 bp, Arabidopsis thaliana landsberg
atgatgggaccatcctcatgtgagaaaaaaaaaactgagcactctcttctcttatccccatcgcaag

SEQ ID NO: 184253 - DNA, 602 bp, Arabidopsis thaliana landsberg
ttttgcagaaccctttcagcggcggatgttcaggcatcggatgtaagaccgctcccagttttagaagaaaccctgagataccttctaagtttgctcgactccaaggagcacccgtttgaagtggttcatgattttattttcgataggacaaggtctattagacaagatcttagcatccagaatttggccaatgagagagtgatctacctttatgaggaaatggtatggtttgacttttttctaactcttttctctttcctggttcggtaaatgaattacactgagcatgtctattttgtctttagaattgctttccttgggttttgttgacagtcgtttgtgtgtttaaccctctgctattaccaaaagaatatttgtaagtttaagatattttgacttaatgtgttgattgtagtttacatagtcgtaatcttaatcaggatgctcaaataggatcatttttcttcttttgtaattttcatagaaatatataccactctgattgatcatcctcttctgattggtaatcatcagtttgttttattttctatagagttccgttgatgttattattgttgactcccgaatggcttctgtaacag

SEQ ID NO: 184254 - DNA, 671 bp, Arabidopsis thaliana landsberg
gtgcattgcagcaagaaatgtctgcaatgcaagattctgcttcttccattaaagtccagtggaactctcacatagtccaagcggaatctcatcatctcgataacatatccgcagttgaggttgcaaaggaagatatgcagaaaatgcatctaaaatggtaatcacttctctcttctattaaaccacaacaatttcaactactttcttatcttttatgcgacattaaaacctttgtgtcatgattgatccttagtctggagaattcaaaaaccggaacccaacaatggaagactgctcaagaatcattagttgatctcgaaaaaaggaatgttgcaaccgcggattctattattcggtaaggcacctttctaatgtcattcattacaacattctccaaattcaaatcttctcagtctcaccatgttaattgtaataaacacaggggagccatagaaaacaatgagaaactacgaacgcagttttctttcgcggtctcaaccactttaagcgatgtcgattcttcaaacagagaaatcatctcatccattgacagtaagttatcataattcgtttttttttctttctcatatttctatcccaatttataaccaatccttttaactttggtttcgcagacttgttacaactcgataaagacccatcaacggatg

SEQ ID NO: 184255 - DNA, 233 bp, Arabidopsis thaliana landsberg
caccaggggatcccaatgggaataaccgactcagccagtggtttgtcgaggacggttcttatgtccgcattaagaatgtgacgcttagttaccattttccacatcagttgctttccaaactttccatgaccgggttaaaactctccgccagcgttcagaacctgtacacttttaccggttataagggctatgatcctgaagtcgggatggttcaatatagcaatacattaatg

SEQ ID NO: 184256 - DNA, 248 bp, Arabidopsis thaliana landsberg
tggctgcaaccactctagaccggtcatttcccacacctattacacttgggaacaataaagtgatcctggtaaagcagagtaaatgttcgcatgcgcttttgtttctctcttgttatcaatggaactctctgattatgagtatttttaatcttacttcagggtcaagcaacgtacacaggtccagaacttggcttaactagtttggtttacccagagaatgcaaggaacaataatgagacctttagcgg

SEQ ID NO: 184257 - DNA, 88 bp, Arabidopsis thaliana landsberg
cttcatatattactggtcaaatggtcaaaccatttgtattgatggaggtctaactgttaatggcttcacctatcagccacaggcttga

SEQ ID NO: 184258 - DNA, 1234 bp, Arabidopsis thaliana landsberg
atgattgggttattcaaagtgaaagagaagcaaagagaagagtctcaaagtaacaacggaagaggagcttctactgtcaagaagcaatctgctggtgaacttcgtcttcacaaaggttctctttctcttccttctctctgtttttttttttttgcttttgatcttattcactgtctaatgttgaccaatttgtaatttctctgtagatttctagggttttatgttgtcttctagttggtgtaactgtaaaatctctattgaatttggttcgttatgtgttagaactataagcattgtagaggttttatgttgtcttctagttgatgtagttgatactctctcagtgtgttttgatctttcttcatcaggtgtagctgttgatcttactcagtttcgatgttgaacaaactgtagatgttaggttcttttacagttatcactatcaagtatttttagggttatatgttgtcttccagtaggtgtaactgataaatcatctctgtttactttgtgcatagatatatcggagctaaacttaccaaaatcttgtaagatatcttttccgaatgggaagaatgacttgatgaattttgaagtaaccattaaacctgatgaaggatattacttgtaagtaaacaaaatctctatctttcatttttgtttttgggtccctgaatttgcgcaaaaacacactcattcgttcttgttatacctaaacaggagtggtaactttgtgttctcattccaagtctctaatatgtacccccacgaagctcctaaagtgaaatgcaagaccaaggttaggctttttttcctcagtctctgaagcgttttatgttgtctgatatgtttatacagaatgctaaagaatgtcaatgttgtaggtgtatcatccgaatatcgatctagaaggaaacgtctgtctgaacatcttgcgtgaagactggaaaccggttctcaacataaacacagttatctacggtcttttccatctcttcacggtaacaagttctccctgaccgatgatactccattgatgttattatcttgggccttctaatctgaagacttgttttgctttgtttgtttcacataggaacccaattacgaggatcctctgaaccatgaagcagctgcagtgttgagggataacccgaagacgttcgagtataatgtcagaagggcaatgatgggtggccaagttggccaaacctcatttcctcgctgcatgtag

SEQ ID NO: 184259 - DNA, 425 bp, Arabidopsis thaliana landsberg
ctagacagtagtcgaaatcagctaattaaggtgagtgaatatagaaattccaagattgttgaattagttcttagataaaaaatcaaaaccacaagtgctaatcttcatcttcgtctcacttgtatcagttcgaaattattttaaccgctggaagcatctgtgtatcagtgtactctgtagttgttggcattctaggcatgaacattcctttcccgtggaacatcaaaaaacatatgttcaaatgggtatgaaataacacttcaattccatggacctgttagtcctttcgaatttccgggaccctgatatagttggtgttttttgtttttatttgaaaggtggtgagcggcactgcaacagtttgcgcaatcttgttcgtgactataatgtcgttcgctcggtacaaaaagctctttggtttttga

SEQ ID NO: 184260 - DNA, 357 bp, Arabidopsis thaliana landsberg
agcgaaccagtggaacgctctatcaccagcaagaatatcgacgatgaatcaaactcggagccatttcaaccggaaacttctgaggaaacactttgcaaaaaggaacagagcaaagcagaagtgtgttgctcttgcactaaaaaatctttgtgcaagaccaaaagttgcaaatgcaaggcaaatggaagtggatgtggggactcttgtggctgcttagcttccaaatgtagcaacagagacgaaagtgcgaaacccgacaaaccaatggaaccaatagatgttaagaagcctgctggaattagccatgacgacaaaggcgcaaataaacaaccattacgtgacatagggaatatacaa

SEQ ID NO: 184261 - DNA, 447 bp, Arabidopsis thaliana landsberg
tttagtcttctctctcgcttcacaccgttaaaagccgtagcaacaaaaaccctgagacttgtgaaatccccaaaccctaaccaaaaccctaaaatctcagccgccacttccgttcaaatggcgaagaagaaagtgtctcgtaactccaatggagcttccaatgagcagcaacaaatccagaatcagtcagtaccagtcacttaccagaaatcgacgaagctaagtcgtgagtcatcaatggaggaccatgactcatcggaggaaaagtttcagaatttgaagtcactcaatgcgattcttctgaagcagactatggagaagagacaacagattgaatctctcttccaggcgaaagattcgttggagatcgagttggttcgttcgggaaaggagaagactttgctttcggaggcgttgtgtggttcgagcgatgagaattcatgttga

SEQ ID NO: 184262 - DNA, 153 bp, Arabidopsis thaliana landsberg
atgcctgccgccgcgcgcgtcttcctccttcctccccgccagcttcgcgcttccttccccggcagcccgcacccgccaagtcccccaccagctccgcgcttccttccccggcagcccacacccgccagctccgtgctccacgctccacgctcc

SEQ ID NO: 184263 - DNA, 194 bp, Arabidopsis thaliana landsberg
ttgctgcgcaagctggccgggcgaattcacgcgtggtcgctgacccccagcggcacggcgggctacaagaaagccgaagtcatgcgcggcggcgtcgacacccgcgagctgaaccagaagaccatgcaggccaaggccgtgcccggcctgtatttcatcggcgaggcggtcgacgtgacgggatggctgggcgg

SEQ ID NO: 184264 - DNA, 673 bp, Arabidopsis thaliana landsberg
gtagtggagatgatgtttcagctgatatgcgatccgtctggcctggtggttgaaactacattgaaagaactacttcctgcagtgataaaatggggtaacaggctggatcatatcttgagaggtcttctctctcacactttgagctcagctcaggtatagactcaatacattatccatttttaaaattgtaagtgaggatagctcatattaagttattttcatttgcagcactgcccacctctttctggagttgaagggtcattggagtctcatctacgagtcttaggtgaacgggagcgatggaacattgatgtcctactacgaatgctcatggagttgcttccagctatacaccagaaggcaatgacaacatgtccgttttcttccatctcaaagtcagaggaatctgcattctctgtttccttgcttgagatctatgccgagtaagcttctcaaccccctcaatcactctgggcaacaaaaagttcttcaagtttctgacgtcttcttgtatgtaattttaatacgtcttatctgactggaaattctgaccaggggacgttctgagtggcctatgtttgagtggatgcatgttgattgctttgctaacttgttgcaactggcatgcatgttgccccagaaggaagaccatttgagaaatcggataacaaag

SEQ ID NO: 184265 - DNA, 389 bp, Arabidopsis thaliana landsberg
aatgtgtgatattgattctttgatttgggtttatgttcacagagatagcaacatgactgtctcatatctcaagaagtatctaatggtgaagctcggtctcgaaagcgaagaccaagtaaactaactcttctctctatctatgtctcactctctcttgtcttttaactctaatattttttgatgttcttttgcaggtggagatatggttaagggatgagccagtgtgttcgtcactgacactacataacttggtggattggtgggtccaaacaactccattgcctgagcgacaaagcgcgatggtcggaagctccgctgctgaattcatcatggatctctattacagcttcaaatctgacgcctctgactctggctctgcctctgaataa

SEQ ID NO: 184266 - DNA, 186 bp, Arabidopsis thaliana landsberg
atggtgtacataaacccgagagatggctcactcgaagaacaacatccgttgcagcaacgaaaaggtttaatgtgggcaaagtactttaacttcactttactgaaaagcatggatgaagacttagcagaagcagcagatgataaagaccatccaagggaaagatggctatggccattgaccggagaa

SEQ ID NO: 184267 - DNA, 176 bp, Arabidopsis thaliana landsberg
attctgcgggtactggcgccaaatcataattcgtggttccggtcaaagtcacggcgaaacagccatggctgatcctcaatccggttccaatgttttcagtttacggatagtttcaatcgattattacatggcttctccaatccctggttataatatttgctacagtagcttccaag

SEQ ID NO: 184268 - DNA, 1993 bp, Arabidopsis thaliana landsberg
aagccacacttcagctacagatcaactatgtagtacaaccaagtcaagtgataaagcagattactcctcacccaatacaaatttccccgtggtatttctgagacaggaacctatgattccgagacatgtaagcataattaatctattcattgcgtaaatttagcagtctttctggtctaagtctgttttcctcaaattatgtgcaggatttggagacaaatagcgatgattcagatactcaaaaatctcttcctagagaagagagtattcactatagtggattgccacttaggaaggtgggaagtagagaaactacttttatgcacacgcaggggtcagatgatttcttcaaaagcaagctgcttggtccacagttgatagttgaggatgtgacgaacgaagtaatttcagataatctcttatcagctactattgtccctcaagtaaatagggagtccgatgatgatcacaaatcctacacaagggagaaagagattacaaatgcggatcatgaatcagaaatggaggtacgaaatttatgttttcctttagattagaaattctggctgtcttggtgtgtgtcaggttggggtttatctctctggtatttttttcatattgcaggaaaagtacaagaaaagcagaaacaccgatgattcattcagcgaagctgcaatggttgaaatcgaagctggaatatatggcttacagataattaaaaacactgatcttgaagacttacacgagcttggatctggtacatttggaactgtttactatgggaagtggagaggaactgatgttgctatcaagaggataaagaatagttgtttctctggtggatcatccgagcaagcacggcaggtttaactcttctctcgagtctttgtacttttgaagggaatttcagaaccgcagttttcactgatgccttactgaaacagactaaagatttctggagagaagctcggatattggcgaatcttcaccatcctaacgtagtggccttttatggagttgtaccagatggacctggtggaacaatggcaacagtgactgagtatatggtgaacggatctttgaggcatgtcttgcagagaaaagacaggtacacaataatctgtcaaatctttgtatgaccttttgtgatatgacattctgagtttactgatggaaaaactttgggcacagattacttgataggcgcaaaaaactgatgataactcttgattctgcatttggcatggagtatctacatatgaaaaatattgttcattttgatcttaaatgcgataacttgcttgtaaacttgagggatccacaacgacccatttgcaaggtaacacttttccccaaaatcaggtaatttcaagccaagttgtatgagtaaagtgctgtatttattagtctcactgttgaatttgcaggttgaagatttcggattgtcgagaataaaacgaaacacgcttgtctctggtggagtaagaggaacccttccatggatggcaccagagctgctaaacggaagcagcaatcgggtctcagagaaagtatgttgttgagtccaaaatcaaaacattgaaaatgttaagagtctttgttttaatcttaacatgtttttgcaggtcgatgttttctcatttggtatcgtgatgtgggagatcttgacaggctaagaaccctatgcgaatctgcattgcggtgccatcattgtgaagtttctagcatgagcagttcttcagtctttgaacaagatgaacttggattgagctttggtttatgatctaatttttgatctgtttggttttgataaaaaggtggaattgtgaacaatacgttaagacctccggtgcctgaacggtgtgaagctgagtggaggaagttgatggagcaatgctggtcattcgatccaggagtacggccatcgtttacggagattgttgaacgacttcgatcaatgactgttgccttgcaacccaagcgaagaacctaa

SEQ ID NO: 184269 - DNA, 271 bp, Arabidopsis thaliana landsberg
atggacttagcaaaagctatcgtcaaaatctgtgggaaaaagatgatagagcctgaagcaatagaatgcctttcaattggtgctcgtgagcttacaccttcatctacagttggtgcttcatgcgtgtatgtgatgcggagacccgataagagattgaacattggacaggtacatacttaccatattaatactataaaacttctcttagaatagacagaaaacgaaagttattgattatgaggatattctgtaccaaactgcagaccgatga

SEQ ID NO: 184270 - DNA, 67 bp, Arabidopsis thaliana landsberg
atggaagggaagaaaaacagagtaaacgaagaggaagaggaagaagaaggaggaggagaaggagaag

SEQ ID NO: 184271 - DNA, 72 bp, Arabidopsis thaliana landsberg
atgaaagagtatgcagtatttcattctctggatcaaggcccaacctcggtaaaacagctccagacatctaag

SEQ ID NO: 184272 - DNA, 119 bp, Arabidopsis thaliana landsberg
atgacacgtgtctgcaaacgcgttgacttcgtaggcctaattaaaacgcttatgaaattgccaataaacacacacgggaaaatagtaacatcaaaacattgcatggagaagagtttaag

SEQ ID NO: 184273 - DNA, 92 bp, Arabidopsis thaliana landsberg
atggcaacaaaaatctgcctgcagcgtcccggtaaaaaaggtaaccctttcttcctcctcgaagcagccggcatccgaatccccccgtggcg

SEQ ID NO: 184274 - DNA, 514 bp, Arabidopsis thaliana landsberg
gtatttgttcccatccacaggggtgtgcattggaccttggcagtaattaacaacagggaaagcaagctcttgtatcttgattcactgaatggagttgatcctatgattctgaatgctctggtatgatttaatttctaactcttattcgctttatttagtctattaataactgacatgttggatgcattaaaagatattagatgctgataaatctttatcatcatttcttgattttgaaatctgtttggagacattatggagatgccagaagctgttattgctttttaaatcggacactactgtgaaagtttttaaaccatatatactagtcgttatagctaatgccagatctgatattctgcttcaggcaaaatacatgggtgatgaagcaaatgaaaaaagtggaaaaaagattgatgctaattcgtgggacatggaatttgtggaagaccttccccaacaaaagaatgggtatgtaactatgcttgaacttgctatgatcatgatcatgtga

SEQ ID NO: 184275 - DNA, 112 bp, Arabidopsis thaliana landsberg
accaacaccgattcgcacgccgactcgtggacttcggagggcaatcatgaccaagcacgatcggagactcaaagatacctttcttaatttaatcgcattactctcattctaa

SEQ ID NO: 184276 - DNA, 307 bp, Arabidopsis thaliana landsberg
attgcagaggagcttagatcttctgtttattccgagactggactgacatgcagtgctggagtagcggcaaaccgcttgctagccaaggttttcatatgtgcatgatatcctatacgtcttccaatttttatctctttattgtctcagtttggtctatattactatattacaaaaaacattgtgttcttactctagccctactatgtttcaggtttgctcagacattaacaagcctaatggacagtttgttctacaaaatgaccgatcaactgtcatgacattcgtatcttccctccctgtaagaaag

SEQ ID NO: 184277 - DNA, 535 bp, Arabidopsis thaliana landsberg
atgagtagatatctagcaagatatatggtgtctagatacttctcttctgcttcttcccgtcctttacacgtttgcatcgtcggaagtggacctgctggtttctatactgctgacaaggtacacacgtctttctctcatattctgcaaaatatagtgtatgtaaaccagattttgtgatttatatcatcaattaagactcttagctcgtgatttgatggctggtaatcaggtattgaaggcgcatgaaggagcgcatgtagatataatcgatcgattacctacaccttttggacttgttcggtctggtgttgcccctgatcatcctgaaactaaggtaccactccttagcttaatcttgtttagagaaagactaggattttctccattgatttaatgtcaaccacaatgctttctacaacagattgccattaatcagttctcacgtgtcgcacaacacgagcgttgttcgtttattgggaatgtaaagctgggatcggatttatcactttctgagctgcgggatttgtatcatgtg

SEQ ID NO: 184278 - DNA, 443 bp, Arabidopsis thaliana landsberg
atggtcagcaataagactaatataaaagcaatggatgcggcagacatgcgagcgcaaaatgctcgtgaggaatctcagcgccgtgactcgcaggcgcggctgagggatgcggaacgtgagtttcgaatttggcgtcgaaatacgatcatgaggatcgcgggggatatttcgggtgctgctctgagtgcggtcgatgcctatcaagatatcgcgacccatgagacctcaagagcggacgaccctggaacgctcgcgccattcgaagaggcggttcgaagcatccatgcgcttgcgtcaagtcttctgtttattggtgagcgcgaccttgctgagatggctaaagaattcagttatgatttacgtgacaaaacgctaaagagacggattgtcaacctgaatatcgcctttcggagaatgcgagagcctgatccggcttccgaact

SEQ ID NO: 184279 - DNA, 99 bp, Arabidopsis thaliana landsberg
atgactctcggcaatgtcgccgaccacacgaatctcctccaaacaatgggtgtgcccctgccgctgctgctccatctggcggtcgaggatggccagctc

SEQ ID NO: 184280 - DNA, 1020 bp, Arabidopsis thaliana landsberg
atggaaaccgattcgggtaaactaaaccgacctagctacctaagatctctcatcaagagtgcatctcttcctcctgtttcatcaagatttaaggtttttataatcgatgagtgtcagttattatgtcaagaaacttggggtactcttttgaacagtttggacaatttctctcagcattcggtttttatactggttacatcagagctagagaagttaccgcgtaacgttctctcacggtctcagaaatatcatttctctaaagtatgtgatgcggatatatcaactaagctggctaagatttgtattgaagaaggcattgattttgatcaaggggcagttgatttcattgcttctaaatctgatggttcacttcgggatgctgagataatgcttgatcagttaagtttgctcggtaaaagaataacaacatctttggcctacaagcttgtaagtttacacttctttcttcatatttgtcttggaaacattagatagtttagaagtgaaagatcaacatttctttgattctgcagattggggttgtttctgatgatgaattgcttgatctgcttgatcttgccatgtcttctgatacttcaaacacggttataagggcgagggaacttatgagatccaaaatagatccaatgcagcttatttcacagctagctaatgtcattatggacatcattgctggaaactctcaagaaagtagttcagcaaccagacttcggtttcttacaaggcatacatgtaagcaccccagtgatgattactttgaatatcagcttcaaattaaaacctgatctcactctttatcatatactgttctactacatatagctgaagaagaaatgcagaaattgagaaatgcattgaagatactatctgatgctgagaaacacttgagagcatcgaaaaaccagacaacttggctcactgtggcacttttgcaacttagtaacaccgactcatcatcttttgcaacagatgaaaatggaagaaaccaaataaacaaag

SEQ ID NO: 184281 - DNA, 60 bp, Arabidopsis thaliana landsberg
atggatgagaaacttaatccggctccactgtttttggctgatacctccattgacttactt

SEQ ID NO: 184282 - DNA, 67 bp, Arabidopsis thaliana landsberg
gtttctgggttctttgttttttttggctttggctttggcttttgatgaccatgtgagaggagattag

SEQ ID NO: 184283 - DNA, 1065 bp, Arabidopsis thaliana landsberg
atgcgctacatgaaagacaacaacaacaacaaaaaactagtagatatatattattactcgaagaagacgatgaaaaaaccgtcgttgtttcagatcattattatagtgctaagcataccaacgactacggggaggacggtgggaaatcttcgggtgcgggaaggatcacctttcaagatcgcaatatttgcagatctccacttcggtgaagacacgtggactgattggggtcctggtcaggatgtgaactccgttaacgttatgtccgccgttctcgacgctgaaactccaggtcatcaatcatcatgtcacactgacaagttaccgtacaacaattttctaccattatctctcattttgatatgagtaacgttatttggtgtagaaagagtgataaccacacaataagatgtggtttagctttggatcggtttgttggtttggtttagctacagaaattttgattctattaaaacgccacgtccaaacacaaatattgaccttcaattttcttaaaaatgttgtgagattagctttaactgaaataaccgtttttttggagatatgaacagattttgtggtctatttgggagatgttgtgacggctaacaacatagcaatccaaaacgcaagcttgttttgggacaaagcaatctctcctacaagagacagaggcattccatgggctactctctttggtaaccatgacgatgcttcttttgtttggcctttggattggttgtcttcctccggtattcctccccttcgttgccctgcagcatcagatgatgatggatgcacgttcagaggaactacgcgagtggaactgattcaagaagaaataaagtcatccaatgcactctcatactccatgattagtcctaaggagctatggccaagcgtatctaactatgtccttcttgtggaatcatcggatcattcgaaaccacccgtggcattgctatattttcttgattcgggcggtggttcatacccggaggttatctcaaatgctcaagtggaatggtttaaaaccaagtctaatactcttaatccctatttaag

SEQ ID NO: 184284 - DNA, 5483 bp, Arabidopsis thaliana landsberg
atgtatcttgtttcgaagatctttgagatagaaatggatgacaaaaacaatccatgtaggtagaggacaaaattgtacttatgaaatatatcctgtgaataagtgcttctcggcacgtgactcataatccctcgcacgtgacttgcttcgtcactttcgtaaaaccccttgactgtgtttttgcttcttccgccatcaaaatcaaaactttcaaaacctccaaaatccaatttttatctcatgaatctctgttgcaaatctctatgcatatacgtacacatactctatatgtgtgtacgtttagctctttgttgcttgatcatggcaatcttcagatctctcttctgtctttctcttgtttcgcagtgcgatttaagcagattgattgctggattttggaattggaaggacgtttatctgctttctgtgagttttttcataaacccttattcttcttttgctctttagccttttcttatatgattttagaccgtttggtttatgggttcttgtgtgtttgaatccatcgaagttggtgggattttattttgaaatgggttttgaaatctatgcaggaatttgaaattttgcaaccgaggacttgaaaatgggagctaagtgttgcagaggtcaccgaggatcagtggtggaatcaaatggttccgtgatcttgtcgtaagttctgaggctgaattattgaagtgaatctcttctataagtatcgaaaagtccaacactttgaataagttttgtagccagtctttgagaattgtctactagttaaatgctttgataaggaatatatggaatgcaacttagtatgtcactgaaacatttatttctgcaacagtatatccgagtctatatttacttaaccattctgcttttgcctatgtaggttagctgacctagaggtccaagctactggtaagcgaagtttgattcttaatattttggtacctacgttattcgtcttttcttgagtgaaacctatgggctaaggagacactcttgtgattttagaccttagggagatgactgtggtagaggcaagagatgctgctggaccatcagaaccaagacctccaagtcctaccttgaggccttcagaagttgaggagacatccgagcctgtatgtcagggatcactagtagaaacctctaatactgatgatgctggaccatcagaaccaaatccaccaagtcctaccttgaggccttcagaagttgagaagatatacgtgcctgtatgtcagggatcactagcagaaacctctaatcttgatcaagatggggtgtcaagttatgaagcatcgaatattttttggagtactgggtccttatcagacccgatcccaagtggtttttacactgtgatcccggtaagctatctttaggttggtattatctttgtccaataatatttcagttagctttattaatgcttggttacgtgctgctgtttgtcaacaatcattttcttatcttattatgttgttgaatttttcaacaggttgagagattgatgcattttaaaagcattcctacattggaagaaattaatgcgctgggggaagatcgtcttaaggctgatgcgatttttgtagatcttaagaacgatatacagcttgttttgataaaggagtttgtcatcaaacttgtcacaggattggactccgataaagttattaagaaaattgctggactggtaagaatgggcgagcatctttttatcatctcattttctagtgaactaactttggcgacaatgcatgtcattttgttactttatcttatcgctgcatgcaataaatatttggttctgaataagaaaacaaataactgtaatcccatttattagactcttaaggcacatcacattatttcagcaacctcattatattcttttagattatcgggaaatctgaattggatttttccttcttatggcaggtggcaaatatatataaaagaaaaactctgcagagtccggcaagaacgctgcaatattttgacgttcaagggtttaccctgctaggacaaatcaagcatggttcttgtcgtgcacgagcaatcctctttaaagttctagctgatgctgttggtcttgacagtaagcttgtaatggtatgtactgtataaaaacgtgatcagtggctttggttataactccaatttcctcatgtcattgattggttctgataacttggcatttcggttaaatttcttgatcagggtttccctactgatctgagattttctgctagcatcgactcatataatcatatctctgctgtggttgagctcaataatgttgaaatgctagtcgaccttaagcgatgtcctggtcagcttaaacccttctcacccaaggcagtttatatggctcatatctcaatggcatggcagcctgattttgtagacaataacccttgtgcttcaccattggagccaaacagtcccatggaacggtctggtccaccatctgcattacaatccggtttaaggtgataagcatacttgtttagttttcttgattatgtttgtatatttgctaccatatatatcttatgtttctctatagggcaagcaaaagcgttatgcacgtataaaagtaacttttgttgtttcctcagtcgttcactaggcgagccaaacatagctactgaagttttgcggagaaaggtcatcaaggaaccgccacctgctgatttcaggttaaattgttagtcaatatatatttcctttcaacagtggtgtagttttgataaactttttcaatgctaagtagttgtatatagattccatgctacttctctcttaaaacttgggtgtcgtcatgttccctcaaattctgtcaattatctttattgataaaaggtgaaatatggtaaccattaaagtccattctagtcaactacaatgcaagagctatgagttacgttgtgagagtattgggcttaactatcagatgaggtgaattcaatatgtactgcaattgatgagtttgcttcaaaagcatatatgatttttgtagctgcaaaagttcatggcattttcttagtcattattgtctggcttacaagaacgttttggctgaaaaaaatggttgtaatgcataaagaaggctgatgttttcattttttaatgtgcagtggtaactcaggagcagcggaatcggaaagtaagagaacaaatggaaggtgtatgaatactcctgatctaaacaatgacattgccaggcaagtgtttgttttataagacaaaaaaacatgtgttcacagtcatccttatgttaccaaatgaggttgctgtcatttcgttttttattgtgaacattggcctacataactggcggtacaatctcttatggaaattatataaaaatttgacaataggcaaagatcttgcgttattatctttcataaatcttgagcaccacataatataactaaactagcatttgcttgcatcatgtacagacttccacatatggtagtgagagtttgtagcatttgtatcggctgttgttgtcactaatatttgaatggttttatcaattatcttttgtttaaagtaaacttaacaatctgtttcagggcaacaatgatgcagagtgacctcttgaaagagcgaggtgttgatgattcatctccttactctccagatgaaaagaatgtatgtaacagttttcctgaattctcatattgatatataaaggcgtcttgatatatgcgtcattgaaatacttatggtatgtttggcagctatgcgaactacagaacactttctgtatcttttctcttcgcctaagttgaaatgacagttcatgaaattagaaagaggaattttagggaaagtgctggtgttgtgattctttgtttgagaaaacaaaagcagaacatccatttcctgtttcaataagtcgcaataaaaaatggaaaattgttctatgctgttataagaaaatatttgtgagaagagtatggatatctcagaattttttactaaatttccttataagggcttatttctgcttctaggtctctggtttccagcttgattcccatgacctagtgtctggtgaatgttcgacagtatatccgcggaagtcaatatcattgccgtcatctccgcgaagctatcaaattcaattatctgaaagaagtgaacattcacctcaagaaataagccacatttggaatgaagtgctggagtctccaatgttccagaataaacctttgttaccatttgaagaatggaacatagatttctccaagttgaaagttggggcttctgttgggagtggtaagaataagaatcgtttttatatcaagacgtgtggagtgttttcgaattccatctatctgttgtgttaggcatatatcttcagcaagaaaacttggatatggtctgtgagcataagtatacattttcctttgaaaccctattaactcttttttgttgttatatgtcattcaggaacttctggagtagtatgtcgtggcgtctggaataaaactgaagttgcgatcaagatatttcttggacaacagcttacagctgagaacatgaaagttttctgcaatgagatatctattcttaggtatgtgtcctttaattttttctgtgcctttgcaacttatcttctcacctttcttcctgtcatctcttctgtgcagccgtcttcaacatcacaatggtaaacatcatctatttctttttttgctttgattacttgtccaacgatcctcaagcggtcaatttgtaagattttaaaaccatttttcaagtaacgaggcatgtcatgacatcttgtagttattctgctccttggagcatgcacaaagcctcctcagttatcactggtcacagagtatatgagtacggggtccttgtatgatgtgatccgtaccagaaaaaaggagttgagctggcaaaggaaactaaagattctggctgaaatttgcaggtgtttcatttctacactaaatactttccgttaatattttcgccacatttagagctttctagagacactccatagatttgatcaccaagttctcataaggatcaagattcacaccgtctccttttaacataacaaaacttagaaatagtgccaggaagctctcataatcatttgtatttttttgtttcacaggggtttgatgtacatacacaagatggggatagtccaccgtgatctaaccagtgcgaactgcctgttaaacaagtcgatagtcaagatctgtgattttgggctctcgagaaggatgacaggtacggcagtgaaagatactgaagctgcaggaactcctgagtggatggctcctgaacttatccgcaatgaacccgtcgcagaaaaaagcgacatctttagctttggtgttataatgtgggaacttagcactctatccaagccctggaaaggagtcccaaaagaaaaagtatgttcgttgaacgtgaaaaacacttggtaa

SEQ ID NO: 184285 - DNA, 309 bp, Arabidopsis thaliana landsberg
aatattcagattttctgacaatcttattgttcaacttaaaaaaggaatctatgaagcaatagatggagatcttctggactctgacagcttatcaaagctaaatccttatatggtaatatagctttgtggttctcagctaaatatctttctccctgctattaacttcactgaatccatttggcttttgaacgacagccaaacttgagcgcatcatggctgtttcaaagagcaatgtctgcaaagcaacagctcgatgtttcccgtggcttcaccaatgagcttctccatgtaaatttcagttgcatgcag

SEQ ID NO: 184286 - DNA, 70 bp, Arabidopsis thaliana landsberg
atgagtttcagtcgagggcggcgcgagaaggagctgaggggatatgcatcggaggggggggggaaggaag

SEQ ID NO: 184287 - DNA, 279 bp, Arabidopsis thaliana landsberg
atgcctatgctgatgcccctgctgagccttattatcggcactgtcgataagctcatagagatgctgctgccgtttattgaccagctactgacaggtcttgctcctatcatcccgattgttacgcagctggctagtgctttcgctaagttcggtcttactattctcagtgagctgctggcggcgcttgagcctcttatccctgttctgtcgcagatcatcactgcactgatgaagcctatggctgccctgctggaaggcgcactcggacagaacactaag

SEQ ID NO: 184288 - DNA, 230 bp, Arabidopsis thaliana landsberg
aaaaattatgggaacttgcaatgataaacagttctaataaaaaaagtgactcgatcattgtaagatctatatacttctcagtgactgcaactaaccaaccacatataacaaaaaggccacaatgttcagaaagctccacgtaccttatgcagccacagttgtcaggtgttcctcaactatggcttctttccgcactgctgccgaaaaattctcatcgaaggcgaagttga

SEQ ID NO: 184289 - DNA, 1770 bp, Arabidopsis thaliana landsberg
ttaaaaggaatcgaacgtgaaaaaagtgatagttttagacttcttaagtcttatgaattactacaagttgagaaaaagaacattgtaattggcagatacatcatacaactccatctccgtccagatatgaattctcaagctggaaacagaatgagaattgaagaatcaattatgtacgctaaagtgaagaatcgcaaatgaaaaaacagttttggcagcaaaagaaagtgaaaacaaaggtaaatagagaaatagctgaatcatactgtttaagaaaggctaagtcactctttgtcataattgcaaaaactaaagtatggcacaattaaagcaagtgttagattttgtagctcattgttttttagtgatcaccggttttctaagaatatatagaatggatctaataatgtaagataagttacttcgataataaaacagagaaatttcaaattctaatctaaagaaatacctaagatggatccgaaaattgcataaagtccatttttcatcaacatcatcagggactatataacatatgtacttaacacaaaatattcaaagatcacataattaatctttaatctattatgagtccaatatctctaaccactggcaaattggttgagtgaaaacataatgcatcagaaatttatatgacatattacatcagaaactttaaactcgacttgagaatcctcgaagcaaaaacaatatgtaaccgagcattggtggcacttttgcaaatattatggactttatttagaaattttcgtacaaaaccccgatacttttaaattgtaataataaaccctaatttcgggtaaaattttaaattatttacctttagggacctataatgatactgaaccctaattaacaaaacccccttttggtctctgtaatcgtaagctttcaatcaaaaacccaaatctctctgttcgcagagaggatcaattcgtgattcagagaatcaaacttactgtgagagagagataacgaagatggacgctatgaggaagcaactcgatgtgctcatgggagctaacagaaacggcgatgtcactgaggtcaatcgcaaatactacgaccgcgatgtttgccgtctttacctctctggtctctgccctcacgagcttttccaattgacggttcgtatttatattcatcttcttcgatacccaattcttttcttcttcttttgctcaatggctttctcattagtatcttggaaaaaaacttaatttcctcatcctttgtgagctttgattcataaagttttagtattggtatgtgttaattgatgtagttattttggataatgttaaaaatcctagcttgatttgggggaggttgttgatttaggtaacaatgtggctaatttggtttatgagtagtctttgacatgtttgttattattatcagaaaatggatatgggtccttgcccaaaggtgcactctttgcagctgaggaaagagtatcctttttttaatgaatgtaaagtctttttcttcttcgtgtgttgttatttctaaagtccacactagttattcagtaggatgttatttcgctcctctactgttttgctttaactcgtctttagatataaagatgcaaaggcaaaaggtgttgacaactatgatagggaattggaagatgcgatagataggcttattgttgagtgtgataggaagattggtagggctcttaatcgtcttcaagaagaggatgccaaagctgccattgcaatttctgtcacagaatttactcag

SEQ ID NO: 184290 - DNA, 531 bp, Arabidopsis thaliana landsberg
  unsure (1)..(531): unsure at all n locations
gaaatcaccaacgcgtcggatggcgccgacgaggtcaaggcgaacgtgtcggccgatgcgatggacatcgccgcgacgcgcgtcgacgcgaagtcgttcacgtacatggacaacttccgccagtctatgcagcgctgcggtgaaatctatctcggcatggcgcgcgagatctatgtcgaggaaggccgcacggtcgagacgctcggcgaggatggcgaggagggcaatgccgttctactcgaatcccgaaccgacgaaaatacgnnnnnnnnnnnnnnnnnnaatgatcttgagcatggtgcgtacaaggtcatctcggatgtgaccgaggccaccaccacgcgccgtgacaaaaccgtcaagacgatgatgaaggtcgccgaggtcgcgggcacgctccaggatatcgagaccgcgcaggccgcgttgatcacggccgttcccaacatggatggcgagggcatggacgacaaccacgatttaatgcgcaagaaggcgctgggaatcgggctggtcaagcgagctccgtag

SEQ ID NO: 184291 - DNA, 90 bp, Arabidopsis thaliana landsberg
atgctgcgaaagccccctgactctttaaaaacgctgaaacacgcaattttggctgaggaccggatagacaggaccaaccctgctgcggag

SEQ ID NO: 184292 - DNA, 699 bp, Arabidopsis thaliana landsberg
aaaaggatacctcaaaaacccgataaaccgagtcgagttaggcctttaccacttcctcaacctcacaagttacgacctttaggtcttccaactccaaagaagaacattatcagatcacctgcattgtcttctgtatcgaagcaagtgtataaagatccaagctttctcattggtttagctagagagatcaagagcttgccttcttctgatgcagatgtctctcttgttctcaataaatgggttagtttcttgcgtaaagggtcactctctacgactattcgagaattgggtcatatgggtttgcctgagagagctttacagacgtatcattgggctgaaaagcattctcatttagtccctgataaccggattcttgcatcgactatccaggttttggcgaagcaccatgagctgaaactgcttaaattcgacaatagtttggctagcaagaatgtaattgaagctatgatcaagggatgcattgaaggtggatggttgaatctagctcggaagcttatactgatctcgaagagtaacaatcgaatacttgactcgagtgtttacgtgaagatgattctggaaatagctaaaaaccctgacaagtaccatcttgttgttgctcttcttgaggaactgaaagaaagagaagatttgaaattgagccagcaggattgcacaagtaaaataagatctgtgtaa

SEQ ID NO: 184293 - DNA, 226 bp, Arabidopsis thaliana landsberg
tgagtctgggcaaatttcgggagaagttttagtgtatagaaatcctggattacattttggagacatacatattcttaaggccacatatgtcaaggccttggaagagtatgttggaaattccaagtttgctgtgttcttccctcagaaaggtccaagatccttgggggacgagattgcaggtggtgactttgatggtgatatgtatttcatatcaagaaaccctgag

SEQ ID NO: 184294 - DNA, 77 bp, Arabidopsis thaliana landsberg
atgttaagagagacatctacggaagaatgttggtatgagcaactgattttgagaactgagaagtatcttcaacaaag

SEQ ID NO: 184295 - DNA, 583 bp, Arabidopsis thaliana landsberg
ctcaatggaaggctctagtaatcctccaaagcttcgtcgaaactcttcagcagcagctaatattagcaaccttgcatcttcctcaaatcaaggttattatatatgcatctcaacaaagaaatttaaaactataactctttgttcattcagacgcgtgactaatatctgatcttagtttcagcgcctttgaaacgaagtagcagttggtcattcgatgaaaagcttctcgtccaatctttatataaggttatgtgtaaaactataaagagtttaaaggtaatgtgttatgtgtaatatcttgtttataatatcttgcaaacgtgaagtgcaggtcttggcctatgtctccaaggcgaatccgattgtgttatatcttcgagacgtcgagaactttctgttccgctcacagagaacttacaacttgttccagaagcttctccagaaactcagtggaccggtcctcattctcggttcaagaattgtggacttgtcaagcgaagacgctcaagaaattgatgagaagctctctgctgttttcccttataatatcgacataagacctcctgaggatgagactcatcta

SEQ ID NO: 184296 - DNA, 1668 bp, Arabidopsis thaliana landsberg
attgtgggagctgttatatatagtgttctggtggcagccttttatgtattcctcgggtttttcttggggaatcgaatagctgttatcgcgcttctttcggttttctcctctgtggtaagtaaagctcaagaagttgcatttgtttaacttctcttcttgtaacagaatcttgaagaaccatgtgctgagtttattgaggattttttttgtgtttcaggcggtttcggttatagttttattcgttaggtgtactgcgattgatcccacggataagactagtgctaagaaaaagagaaaggataaatccaaaggggtcttgatgaagctgagagtcaaggttgttctgagtcaagttgttgtgaggtttttcaggagattagagaggaaaatcttaaggaattttcttagaagaacttatctggatccatggaaaagcagtgtgcagctagaaccacttcttccatttccacttgttatgaaagatgatgattctgttacacctgatcctaaagaggaagatgatatctcttattgttcactttgtgatttagaggtttgctttcttttcttcactagtatttacattagcaatcacttttatttaaaagctaggacttatttagacgtttctttgtgtgttttgcttaggttaaacgcagcagtaagcattgcaggacatgtaaccggtgtgtcgaagggtttgatcaccattgtagggtaaggttttgggggttctttccacctgaatcttacagtttctgagtttttgaaactgctaatctttgtgtggatttggtgtattcagtggcttaataactgcgttggaaaaagaattacacgacgtttatactcctgatggttttcgtcttgcttatggtgtgtgttgctctctcaactacttgaaacgtaaaccttaaaagttcttgttcattgaaacaatgatatagacttgcttttgttgcaacagctaataatagaaggtggaacagctcttgccgtatttgtcagatgttttgtggacaagaaaggaatggaaatggaattgaagagaaggctttatgtagagttccctcaatgggctcttgctacaatatctgtaaagtttcatatacatatgctgcttcctcatgacatctacgtagcttctttttgtttatgagtttatgatgttttgtcctcttacagattatcttggtcttgttcacggcttatggctcagccgccatggggcagcttttcctcttccatgtagttctcataagaaaggtaactcttacaggtgaatgaatttgatttagagttctttatttgacaagtagtatcaaacatttgcaggggatgagaacatatgactacatattagcgatgaaggaggagaatcaatttacagaagtggacccttttgatgaattagattcgtcttcagatgaaagctcagattttgattcgcctgaaagattaagaccaacgtttatctccaagtttatgtgcaggaaagcaaatgaggtgattcaacttctcatttctccttgtattgttgtcacttttaaggactctcaaagattatattttgtgttttaacagaatcagcagagactatccataaaaatagaaggagatgaccagtcaccttcttccacgctgatcaacaagaaaccggggtttcat

SEQ ID NO: 184297 - DNA, 513 bp, Arabidopsis thaliana landsberg
atgaactttgacaaaaaaggattgatgaaaaagaccatttcatatttcaaggttaagctgaaagatccgactgaagaaggagctgttgccacggccccgcgcattgaaacaatcttcaggaactataaatcgggcatatccatcgattatcaaagagagttcgatgaatcgaattatttctcggtaatcaaaggaaaatttgttgccgccaaaacatacgcagattataagatcaaagataccaggctaaaaaccaagtaaccaaaccagtacctatgaaaaagccgaatgtcaaaattggatccatcaggttattgagcgcccttgtgctctttttaaccggttcctgcatgaaccagttgtgggctgtgcagcaaccgcccattacacagcggatcgaaaccaatccctcaacgctggtgccggtgaacgttggcgctatggccgaagtgaacatgatccccaaaacaggtccctttactgatgtgagcgtggtcaccacgcttgaattcg

SEQ ID NO: 184298 - DNA, 160 bp, Arabidopsis thaliana landsberg
acatgactggaccggactaaataaggtcaaaccgtatcgggtttggtacacacgtggccgatcatcatcaaagggcttaccaatattacgatggactcgaccacagctgatagaagttccgatattacaaaaacagaaagacagaagggtttacctatga

SEQ ID NO: 184299 - DNA, 125 bp, Arabidopsis thaliana landsberg
agggcgctcacgaacaatgagctcaccgagacttttggcgtcgactgtgcaacacacgtcgagttggcagtaggaaacatgcgatgcaaaaaggagaagcgagtaggggatgtggctcagttgtg

SEQ ID NO: 184300 - DNA, 93 bp, Arabidopsis thaliana landsberg
atgggtgtcactccaccaccccagcagcttcggcttcaagacccagccaacttcggctccaagattgattacttgagccgcaaggcaccgcgt

SEQ ID NO: 184301 - DNA, 176 bp, Arabidopsis thaliana landsberg
aagttgaactaattgatgaagtttcagaaggcaagtcagagtttttagcatcaaaagatgcacaagattttgaagaatcgaatggatccacctttcttccatcattgcctcccttcattagatcaagcctaacaagttctggagaagtttcaacgacttctgatgctaaagattga

SEQ ID NO: 184302 - DNA, 86 bp, Arabidopsis thaliana landsberg
attcgatttggtgtagagatatactcaaaaagattccttatcttgatgatcctaatgattatgatgattatccagagaccggttaa

SEQ ID NO: 184303 - DNA, 273 bp, Arabidopsis thaliana landsberg
atgagccctgaatgtaaggtatgtttttagaaaaaaaactaagtttatttattatatagaaagttactaattaacaatcatttttaggttataagcgataactacaaggaaagaaggcgcaaccgaattcttcatacttgtagtcgcaaagggatggttagactagtagaagattgttatgttttttattgcttagagtttttattaaacttactactaatagtggcatgttgtgttgttcagaaaactggtagtgcggaccagctgaagtga

SEQ ID NO: 184304 - DNA, 811 bp, Arabidopsis thaliana landsberg
attgcaggatgtggtgcacagcgagaaacgtttgtatctggtttttgagtatcttgacttggatctcaaaaagcacatggattctactcctgatttctccaaggatctacatatgatcaaagtgagtgctaagaaactttaggcattgttttatatatgtgcttaaactcaatactcaatataagctgatcagagctgttcatccactattttcagacatatctttaccagattctccgtggaattgcgtattgccactctcatagggttctccatcgtgatctgaagccacagaatttgttgattgatcgccgcacaaactcactgaagcttgctgattttggactggccagagcattcggtatccctgtcaggacatttactcatgaggtaccaaagagctttattccttgttcatatgttcctgttatgaaatcttttggctggctgcattccttatgagtgtaatgtaaattaagtattataccacttatgtgtctgataaatgtgatgaaaaggactaagccatttcacatagacggttgaagtaagctagttcaagatactgtaaaatatttcaatgctacatccagatttcagatctcttcctggttattcacacaatttttgcatattgttccttttaggttgttactctctggtaccgagcaccagagatactcctaggatctcatcattactctacacctgttgatatttggtctgtggggtgcatatttgctgagatgatcagccaaaagcccttatttcctggagactccgagattgatcaactcttcaagattttcag

SEQ ID NO: 184305 - DNA, 102 bp, Arabidopsis thaliana landsberg
gttacatcacctaattatatcaacaagatcagcggttatgagaaggccaaacacgagattcgaaaaccccatatccgaacatggggatatatctttctatag

SEQ ID NO: 184306 - DNA, 2217 bp, Arabidopsis thaliana landsberg
atgtcgggtatgggtgacggctacgttggtacggctcaagatgcggtgaggatacggcggcttcagaagcaaagagaggccgaacgcaaaaaaatacaagagctcaagagcaagtctgcctccggcaatgaccaatctggtcttctccaattcggcaccagctcgtgcgaggtaatcgatttctaaggtttcgagaggagaaatggtggattgtggtagaaactagatttagaacttgttctggctctgacttagtagcttccgcaatatttagggtttagtataattctaacgattagttctgagaagtatcggagaaaaagattagatcatcatattgtattgcagttttggtgtctcaagtgtttacgaatcacaaatgttatcttgctatttgggctgtgactaattcatttgtttttggttagattcttgacactgctttcaagaaggaaacagcggctttagtctcacgagaggagtatgtggcgaaggtaattggagtcatggcttgtattactctccaactttaacattcatctagattgtggtgtttaattctgtatgtgatatatgtagagggttaatattcgtaataagttcgaggaagaagagaaggagaaactgcagaagctacagcaagagtgagttttgtttttaggtctattgttcatagttattggtgttattctttggattaagcttgattgactttttttttttaaactacagggaagaggagttgcacgctagagaagcgtaacaagaagagaaagattaagggatcttcccgcttatcttttgctgaagattttgagaatggcagtgatgaagatgatggagaaaacagtaagtgcattcattcatcaatctcgtagataggacttagtctacctcgactgtttttattagattttcttaagcttttaacttgattcctgaatatgctgttgttacatcaatggtgaattgtggtatagttaggattaggtgtgatacatgctgtcattcaattaaaccactataacttttttcctttttgtaaaagttgaaaaaatatttatctatctttcgcagatttaataaaatcctttttaaaatgtatggaagttgacaaaatatagtctccatcttttgcagtaataaagaatctcatcatgtattacagacattaattctacaaatgtagattggaatattgcttggttgttggaggattttatatgcaaatagcttgctgcgtaggaatttataatatcatctaatgttgtcctttttgtaacttctatcatgtacactatttatgcagagagttctgggacagggaacttacgctgcggaaaacttggcaaggacccctcagtggaaacgaatttcctgcctgacaggtgatctctagctctcttgtttatctgtatcttccttgtctgcttttgcagtaagtctcaactttagctgtggtgttttgaggttgctgtttcagtgagagggaggcggaggaacaagctgaacgtgaaaggctgaagaagcagtggcttcgtgaacaagagcagattaaaagttgtccattttctagttaccttctaatttcagttgtaatacttgattcaaggaagattgtctaactattttttgtttttcagacgagcctcttgagattacttacagttactgggatgggactggccatagacgagttattcaggcaagcacaaactacacctttgtcatactgcttgagccttacgtgtgtgatcatttacttacctttatgatatatacccattttacaggtccgcaagggtgacccaattgggaattttctgcgggctgttcagcagcagcttgcccctgacttccgggagattcggacggcatcagtggagaatttactatatgtaaaggaagatcttattattccacatgtgagaaccctttaaacttaccaagttatcctccctttactatataggacttaacgataacatggggtatttttttgtaaatgtagcaacacagtttctatgagctgatcattaacaaagcgagggggaagagtgggccggtatgccttgtcgacactttttgaaattcagtttatatagaaattgtaaccgagactcacttctcctacattgttcttgttaacagctgtttcactttgatgtgcatgaagacgtgagaacaatagcagatgcaacgatagagaaagacgag

SEQ ID NO: 184307 - DNA, 128 bp, Arabidopsis thaliana landsberg
atggaagaagaggatttgaaagaaacccagaaaagaagatataaaagagagagagctggagaaagaaaagaagatagcaaggcaaacaagtacagagaaacaagagagagagagagagagagtcaaag

SEQ ID NO: 184308 - DNA, 194 bp, Arabidopsis thaliana landsberg
atctcgcctccgaaacgctttcaccgaaggattctttcaacggcggcgaaggatatgattacacgacggagaaggacgatggccaagagagggatagtgaaattgacgaccagttggcagattctttggctttaaaactacaattcgactgcggaggaagcagacgaatttgtgtttcatcgatcgatccataa

SEQ ID NO: 184309 - DNA, 79 bp, Arabidopsis thaliana landsberg
atggcaaccaagaagctgagctctgcatcgcgcgctgcgcaacgaccttcaccgacaggcgtggccgtggcggcggcag

SEQ ID NO: 184310 - DNA, 149 bp, Arabidopsis thaliana landsberg
aaaaccgaacccgaaatcataactataccgaaatcacatgtcttcatggagacgtaactagacttattttccggttgaatttggttttacctattgagattgtgctaaccgaatacagaaacggttatgacgccaacgaggcaagaggg

SEQ ID NO: 184311 - DNA, 195 bp, Arabidopsis thaliana landsberg
aggaacgaagaaagcgatgaagtacctgaagaagtaaaactctcgttccatgaagatcttctgaataatccaaaagaagaagaagaaggagtaacagaaacagatggatttgatttgagattgatctgtttctttggaaaattcaagcctaagcttagacccagatcgtctttctccaacatcatcttctgttga

SEQ ID NO: 184312 - DNA, 142 bp, Arabidopsis thaliana landsberg
atagattacagactagaattaatggacggtcggccaaatttttatcaaaggatgggaaagaagtgatgattgaatcggtacgtgcagcattacaaccttatgttatgtcttgttttaggctaccaaaaaccatgacttataa

SEQ ID NO: 184313 - DNA, 114 bp, Arabidopsis thaliana landsberg
atgggtttggtaagagaagaagagtgggttggtgaagatagcgagagatatattgattgggctttggtggaagagtgggcccatgttgacgatatcaccgaagcaatagtccaa

SEQ ID NO: 184314 - DNA, 374 bp, Arabidopsis thaliana landsberg
cgtggtagttcctccgatacctggtaatggtggttacagtgatctcttccctggcccaggtgctggaatgtaccctggcaggtttgttatagacatttatagtttctattatacaactgtatcactttaaatcatttataatgtcactcaccacatatattttctctccccaggggtggttatggggatggaagcatgcttgtaggtatgtacgattcttcaatccctcttgagaagcaagatattataacgtcttacttgattataattcgttaaagtgattctgtttggttgcaggacctactgatcctcgctttttcccatttggtgatggatctgatcgacctggcttcatgggaccaccacacccgtga

SEQ ID NO: 184315 - DNA, 321 bp, Arabidopsis thaliana landsberg
atgaatgcggaagcagagagctggccttacagttttccagcttcggatgattatgtgaaaacagaacaacgtggtaatgttgttggcagactcctcgttcaagacaggtaaattactaagtgaaccccgttggttttaatgttagtacttaaataccacaaatatttcacatcttgtggttgttattacactatataataactaagtgatggtttatttatgattttaaggtatgtagataaagatttcattgcagccaatagaggttatgttggtttggctgtgcctggagctgctggttcatggcaaagagaatgcaag

SEQ ID NO: 184316 - DNA, 453 bp, Arabidopsis thaliana landsberg
ctttgcttctgttgtcacgtgaccgctttcgcaacgtcgacaatcgcctttgccgcgatactctcaagtcacgattacaccgttattgccgcttgtaaactggcatccgcatccgccatcttctgtctgagcccctgccggcagggtcaactcggggtgcggtcagatttctgttcgcggataccggaacgggagacatccatggctgacggcacggctactcaggtcacgacgaaggcgagcccgcggccggtggccgagacggtcacgcggctgaccggcatcctgtccgccaagggcctgaaggtcttcgccgtcatcgaccagcgcgaacaggcccgcgacgccgggcttgagctgcgggagacgaccctggtgatctttggcgacccggcggcgggaaccccggtgatggacgccgcgccgctggcccgcctcgacctgccgctgaag

SEQ ID NO: 184317 - DNA, 67 bp, Arabidopsis thaliana landsberg
atgtttgcgtacgatcgtacgtacgtgttgtatgattcttcgatcaccggactcgatttttctgaat

SEQ ID NO: 184318 - DNA, 1749 bp, Arabidopsis thaliana landsberg
atggatagaagggagaaagcaaagttagtgcagcagattcatgagcaggcgcgaaagaacattgaagagaagaccaaacaatatgctaagcatgccaataaacatagaaaggagcttatcttcaacgaaggagacttggtttggattcatctccgaaaagagcgttttcctgaggagagaaagtctaaacttatgccaaggatggacggaccttttaaagttctcaagaggatcaacgataatgcctactctatggatttgcaaggtacgtataatgtgagtaatagttttaatcttactgatcttgttccttttattgtagatgaaacagatttgaggtcaaatccttttcaagtgggagaggatgatgtgataatgggaagcttggatcatggaggtaaggagcagcttgaagaagggaaagttatcaaccactcgatcaagcatgctgttgaagacttgagggagcttgaatctaatgactcgatggactactcgacccaacatgaagatgaactgcttggagctacaaaaaaggaagcaatgcatgttcttaatggtccaatgacaagatcgaagactagactactaaatcaagatatcactacacttctacaacacattgagggcagtcttaaacaagatgcttgtcaaaccacgttggttgtgattcaagcggtttaagcgacaacaatggaggtgtgtgacttgcactctttttccctcctcttggttttgtcccattgggttttccaagagaggtttttaacgaggcaagcccacacactcttatcatggctcattgttgttttaaagcccattagcaaaggagaaacccaaatttcgtttttgtgtgttcatttctctaggatgactcttcctcttctctagggctcctctacttctctatatattctattctcttctcctatgtaaaactcatcaaactttttatgatcaaatctttttctgaattgttagatctgaagggtgtgtaatatctcttcaacttgtgattgctttggtgcgtaatatcctagcaagatcgagcctgaaagttcaagagtctttgcgcaactcttggaagtttcactttatccatttctgttggttttcatcatcatcattccatcttcaacccttcaacttctgcacagatccattcattcaccatatcattatcacttcatcacaatctatataaagagacttcaagggactggatcttaacacccaatgtcatatcataatgagtccttgaactcatcttattcatcaaagagaacgtactcaacaagagaggaagttgaaaggagtcaggctgaatggaaataacgagagtacagaacaacaagtatcaaagaaggctactcaaatagagagcgaacttctggtgttggttctacggacctcagagataggcttcaaaattcaacaagttttgtaagaagttcccaaaaccagcagctccaatggcgtgaaaagatgcattcaagagacaattttaggcaagattcctttgaaacttctagaacaaaaagaccacctctggaaaaggagtttgaaaaaacggcgttagctctcactgacaagtcaccatttaccacagaacaagtaataggagaattaagggaagcaacagtccagtataccagctgttcggacccgatagagagtgctgccataaaacaaagagttattcaaggggaagcaagaggattaatgccaaaaatgctgctaaaattatag

SEQ ID NO: 184319 - DNA, 125 bp, Arabidopsis thaliana landsberg
attttatccaacagatgaagaacttgtaggttattacctgcacagaagaaacgaagggcttgagatcgagctcgaaataatcccattaatggacttatacaagtttgatccttgggaacttccag

SEQ ID NO: 184320 - DNA, 839 bp, Arabidopsis thaliana landsberg
atggagatcattctcgacgagctgacttatgatggatactcgctgtcaaaatttcttcaggtaagagacataccacttctgaaactcactgtggactgtaaaattcttctctctgtggttcttgagtgaaaatttcttaatcaggttttcgatgatcctaaatggaagctagagattgttctccaataccttactaaatacattcctaaggtttgttgttaattctctgatctctcgctctctgattatcttctccaacaaatgatgtacaatatatagttatttctctgatttctctctctgaccaaatttctttcatgttgtagcctgttgtacgtacccgaagaacaactgttcctcaagcagaggattcgaaaacactaaatgggatcttgaagacgttttcaaatggcacaaatccaaagaacatcactaaaaagataggacctgacattgttcagatcctcatcggccatgcctttctggtaacacaataatacctttgtttcttctttcacgttctcagagctttttttggcctcctaatgtatttaactattcgtcaggctcggcttacattctctgaccctcacgaaggagactctatttcagagatatgcagtagtatcatctctgcatttactagtctaaagcgagtagatcagtaagctgcagtttctttcactctcagttttttttctctttgtgcaatcgagatactataccgctttcctttgtccaaccgaaagtttaatggttgttataggaaaatcgagattctaccgtttgggaaagaagtgttgtttactgcacgaatggtactcaaggcaaaagcttaa

SEQ ID NO: 184321 - DNA, 140 bp, Arabidopsis thaliana landsberg
ttatccttttcgatgttgtatatattaataaatatttacaatttagcaagaaatccgttgtagcacactggctaaattcgtcttcattgccgaacttatcgggttcaaagcccgacaacggaagactttttttattttga

SEQ ID NO: 184322 - DNA, 429 bp, Arabidopsis thaliana landsberg
atgtccataacaagcatatctatggaccttttagaccacttaatttcaccacgtcttccgtatttacacctaccgaagttgtcgccgatgcaaatgggcagtacatattttcgcttcaaagaacaggaaattcgactttacctcctctgctcaacgctatggagatttattcggttaacttgttgccgcaacaggaaactgatagaaaagaaggttggttaaactaatttctttattgttgattaagaaccaaatttcttacttacctaaggaaaatatgttttcagttgatgcaatgatgaacatcaagtcggcttacggcgtgaacaagattgactgggaaggagatccttgcgtgccgctggattacaagtggtctggtgttaattgcacttatgttgacaatgagacccccaagatcatttcttt

SEQ ID NO: 184323 - DNA, 33 bp, Arabidopsis thaliana landsberg
atgcccatgactccccctaaactcatcacacag

SEQ ID NO: 184324 - DNA, 101 bp, Arabidopsis thaliana landsberg
atgctcgcacacggcctggattggcacgccgtatgtgcggacgacccgatggacatgcaatgtgttagcggtttggttccaacaattaatatcaaagccag

SEQ ID NO: 184325 - DNA, 53 bp, Arabidopsis thaliana landsberg
atggcggtggcgaaagtaacgaaaaaaacacacaaagaagaacaagcctctga

SEQ ID NO: 184326 - DNA, 108 bp, Arabidopsis thaliana landsberg
ggaaaagaaccagtggagaccgaactttctgtacacacaaagattcgcgatgatttcccagatagcttcaaacaatgggtagcatacggggaagcactctgccattga

SEQ ID NO: 184327 - DNA, 492 bp, Arabidopsis thaliana landsberg
atgtccgttggatttgcggtaaatcgaaatctaacaaccaagagattcaagatcgtgggcatactcgagatggaaaccgtatacggattcgagatcaacgaaggagactcttggagattatcggaaacgagtatcaccactagctcaaaaagtgatctcactacgcggatgaaacctgtttacttggacaacactcttcactggctgagaaacgatggcagcatcatatcttttaatcccgagacagagcaagcatgcttgattccttccatatttcatcgggaaccggatacgaagctacttttcgcggaaagcgttaaaatcaatcgcctgaccctaatttcggggacgatagaaacaatctccgtttacacacttgtcgagaatcacaaatggacactcacaaggcggatcaagaacatatctatcgaggaagaaacccttgtatattggaacatagctatgtacgatggcaagtcttttgtggggagg

SEQ ID NO: 184328 - DNA, 105 bp, Arabidopsis thaliana landsberg
gaaatcgcgacattgtttggtatccgaagaaccagaaaagccacttcccattgtgaagtgccagatcactggatccgacccgttgaagtaaatggatccggatag

SEQ ID NO: 184329 - DNA, 369 bp, Arabidopsis thaliana landsberg
cttatcggaagctcgctaggagttatcatccagatgtgaacaagtaagtgaagggtttagtttactttgtatccagtataaggtcttcgtctgtttatattatttaccttcctgcatcaagattggtgtgttttcttgttacaactccattacaatatttgagaaacgcttaatcaagaaaattattgcaattcgttggttaagtctctccttatatgaacgaacatacgaccaccaacctgtaaaattcttatgaagaatttctgaaactgcttcaaaaggtttcagttgtcacagttctgtttacactttgattacagggatgctggggcagaagataaatttaaagaaataagtaatgcatatgag

SEQ ID NO: 184330 - DNA, 364 bp, Arabidopsis thaliana landsberg
attttgctaatcttgattatgatgctactggtgctgggtacatgcgaaaggctactgaattccgttctcggattcaacaagagggagctaatcttgatgatgatgatgctgatgctggtcaacgcattgttctgccacatcttctagactatagacttcctaaagggatgagtgtcaagaatttagaactatcaagctcacaacacagtttggggcttggtatgggaatgatttttggctagggttcaaggaaagagatggatttgagtttacgaatccaactgatagtaagttcccacgattcactctatttgttcttgagtattcagaagtatttaaggcacctaaagatctgaaagaaaag

SEQ ID NO: 184331 - DNA, 633 bp, Arabidopsis thaliana landsberg
atggcagcagcaagcacaacctataaagcacaggttccaactttagaaaacgcgccagacactcatcaaacactaaagttaacaccaaattgcgaagatgcactaaaaaggaaaaagaaaaaaaccaatcatagaacaaaactcaataccattttgattattcaggcttttactttctcggcgattataagaaaggtaatgcgaatctgaaatacaaagaaccaatgttagagtaaatccagttagagcgagatcagaagaaacaaacgggatttgatcttcaggatcataaatcacgtaatagaggaagagatctcgaatacacgaatccaaacgaaactagactagcgaatcgaaaatataaaagaattcatcgcagatccaacggatctacgagcatcagaggctcataatcgaaaaacataactgtagaatcaaaatcaacacaagcggatcaaattcatgaaacaggatcgcgaaatttagaaggaggagaaaattcttaataatggagatccacagaaatgtagccagagagaactttcattcaaaggaaaacgaaaatcatcaccatcagtgaagacgaagagcgagagaacaagacgataccttgggagtgatcgaaggagatga

SEQ ID NO: 184332 - DNA, 125 bp, Arabidopsis thaliana landsberg
aaaaggaaatctcaattacgaaatcgccaagtcatcacataaagcgacaagatttagttcgctattcgatgtcgtgtctgattcgaccgttggtgtggtcttacacgaggatgggccttaaatga

SEQ ID NO: 184333 - DNA, 532 bp, Arabidopsis thaliana landsberg
atgggtagtaagaagagaagcaacgacgactcgacggagttggtggagaacgacaacctccccgattcttcaattgtgaagaagaagaaatctaaaattgagaagatgaataccgttgctaattctgattctgatacggcggcggcggcggcggaagttcctggtgttgcgagctccggtaaggatatggagaagaagaagatgagaaaagcttctgataaacagaggagactagaagctgctctgaagaaaaacaatggtgtaggatcttcgcggcctaagcctatacctgtggctgtaaattcaaactccgatgaagccgacgacgagtctcttccctccgcagccgcttcttcttcctcgttgcctctgaactattttacagatttggcttcttctgatgcctccgttagagaagcagctgctgagtcgttggtattgaggttgcaagagattcagaagcaatacgaaatgttacctgataaagaatctgttgatggtggtttgatgcttgaagctgagaaaaacgatg

SEQ ID NO: 184334 - DNA, 121 bp, Arabidopsis thaliana landsberg
cccaatccgttttattgttcagttttggcgccatttagaccggaaaaaaattcgtcaatttaacgagcaagaagactacagaagaattatgaagacttcagcttccaaaatttcaacatag

SEQ ID NO: 184335 - DNA, 267 bp, Arabidopsis thaliana landsberg
atgcgtcggcttgctgggacaagcggggcacattttgctctgggtacgcataaaatcattgaatcttgctttcttttagcagtagtaatatatggtttgccaagtgactgttagtttcttcatttatctggtttagggaggagcagagagttacaaggtctggctaaggcaatggtaaagctatgggcaaaaagtgcgatcgccaaaatagcaatcaaacgcggtgtagaaaatacgcggaatgagagaatggcagaagaacttaag

SEQ ID NO: 184336 - DNA, 862 bp, Arabidopsis thaliana landsberg
  unsure (1)..(862): unsure at all n locations
atggaccaaaactctaggcgtcggatgtgtagagagaaagtggacgtaatcctaaaaggagttgtaaaacactttttcgtagagaaagaagtttcatccactttggtgatggattccttgtatagtgggttgaaggctctagaaggccaaactaagaacatgaaagctaggtcgagactttnnnnnnnnnnnnnnnnnnnnnnnnnnnttgttagcgtggacaaagatatgttcgtattagttgatgatgtgctgttactcctagagagagctgctcttgagccattgcctccaaaagatgaaaaaggtcgccagaaccgtacaaaggtcggctgaaattggttataaaataatttttggccgtaattccattatctgttatcatatcttcagtcatttttgtcattctctgatccattattccgtttcagaggacttctggcattattcactagaaagttacttgtattgaaaattttgtttttgttcttcgatgcaaatctaggatggcaatgatggagaagaggtcaacaaggaagccgatgagcgtgatgagagacgtttaactgaattgggtagacgaactgtggagatatttattctttcccatatcttcaggtaacaatgtgtaatatgtttctatacggtatgccattgtgttcttccttgatgtgcttacatatattacttccatatctctgagaactgcagcactaaaatcgaagttgcacatcaagaagctatcgcgctaaaaaggcaggaagaacttattcgtgacgaagagcaagcgtggttggcagaaaccgaacaaagggccaaaagagaagcagcagagcgagagaagaaatctaagaagaaacag

SEQ ID NO: 184337 - DNA, 180 bp, Arabidopsis thaliana landsberg
ttgtgagggtggtgccatcaataacattgtggagaatgtaccaaaagtactagaatgcattcctgcagagggaacagagaatccaagagacgcatatactgaatttcgcaaaggtaaatatggagcaaagcctgagagatcttcttcaaacgctaaaacgaatgctgatttccttgacag

SEQ ID NO: 184338 - DNA, 337 bp, Arabidopsis thaliana landsberg
atggtccgtcctcgacggattcaatgtttgtatcttcgcgtatgggcaaactggttcagggaaaacgtatacgatggtatgaccatttctatttgcttgcatggtgactcccataaaccgtcagacattgttatttcttactctgcctttgacattggtttgtctctgttttgccttacagagtgggccagatctgatgacggagacaacttgcggcgtgaactaccgtgctctacgcgatctcttccagctttcaaatgcaagaacacatgtggtgacttatgaaattggagtccaaatgatcgaaatatataatgaacaagttagagatctacta

SEQ ID NO: 184339 - DNA, 216 bp, Arabidopsis thaliana landsberg
ctaagcaatgatgaagaggctgcagccgtggtttcttcttcttctcatcaaaacaacgtcaagattgactcgagaaacacgggttatcatgtgatagatgagggaataaatttgccggagaatgattctgaaagggttgttgaaatgggagaagagtattcaaatgctcatgctgcttctacttcttcaagttgtcagattgatctctggaaatag

SEQ ID NO: 184340 - DNA, 911 bp, Arabidopsis thaliana landsberg
  unsure (1)..(911): unsure at all n locations
atgcgagatgcacgactccgcctgaacccggaaaagtgcgtcttcggtgttagccagggcaagatattgggttacctggtgtcacaccgcggcatcgaggccaacccaaccaagatccaggccatcgtcgacatgtcgcctccgcagtccgtcagggacgtccaacgtctgacaggcagattggccgctctcaacagattcatctccaggtccgccgagcgaagtctccccttcctcaaaacacttcgcggtgcaaagacttcgcttgggggccggagcaagcagcggccttcgcctcactaaaacagtacttatcggagctggctgtcctcacaagccccgactcctcgctccccctatatgctctaggcngntcgtcgccgcatgctgtcaccgcggcactagtgcaggagcagacaattgagggcgtggtcaggcagtgccctgtttactatgtctccgaggtactgacaccgtccaagtgcaacatgacagagctggagaagattgcctacgcagtcgttatgtcttccggcaaactgcgccactactttgaagcattcaaggtccgagtcacctcagacaggggactcggcgaattattcagaaacccggaggcatcggtgaggattgccaaatgggcagccgaactatccggctaccacatcagcttcgagcccaggacaaccatcaagtcacaagtcctggcagacttcgtcgtcgactggactgggccaataactcaaccagacccgtccacagagaaatctggccatccattgcgacggtgcatggtgccatgcgggggcaggcgtcgctgcaattgtcacctcaccaaccggagtcaaacacagatatgcagcacgcctcatcttcactctagagtccgacagatgcacaaacaacattga

SEQ ID NO: 184341 - DNA, 444 bp, Arabidopsis thaliana landsberg
atggtttgctcaagcaccgctctgtttctcgccatggctcgtcaattccatggaaatcatcaaaatcctaaggttcttgatcagactctacgacccattctccgttcttgtctatcttcaggtacgatctttatctctatggctcggatgtttttgataaattttcccgggaaaatttaaaggttttcttgggatgcagaggaaacgaagaaacaggggaagaagataaagaaagtgcggttcgcggataatgtgaaagatacgaaaggtaacggggaagagtaccggaggagggaattgaaccggaaaagcgtaccgaagccagtgactaaaccgggaaagaccggttctatgtgtagaatctctaccatgccagcgaaccggatggctctgtacaatgggattcttagagaccgtgatcacagagttcaatattcttattga

SEQ ID NO: 184342 - DNA, 311 bp, Arabidopsis thaliana landsberg
gattaggaaaagaaaaaaacttttcgtcaatggactacttgttgacatcaccttcgtcactgagattctccgatttcatctcttcgattcccaaagaaaccgatcacaaatggcttcgcttctcagtaaatctcggcgatgcgaggaggtcgacgaggacgaggataacttgcggtgcgatttcgtcaaggaggaaacttgctgagagagagagtgcccagagagaccctagagtgctggttcggagtcttatgtcgaggattagtgacagagagccattggtgaagacgcttgataagtacgtgaaggtc

SEQ ID NO: 184343 - DNA, 137 bp, Arabidopsis thaliana landsberg
gtgtctgcgagcgtctcatcagagtctgcgactatgacagcgcttcaacaatggaacaaactccacggggaaggtggatccggaaagcagcaatcattcagcttctacacgtaggagtaggattgaatatattttag

SEQ ID NO: 184344 - DNA, 650 bp, Arabidopsis thaliana landsberg
atgtccaaaatcttagtgatgttaggtgcagaatataagaagaggcctgttgattcagaggtaaggatattttgagaaagttatactttggtcccctacccaacttcaataagtcaattgattgttacattttggggaaagagtgatgaagtaaatactttatagtatacttgaagtgtttgtaatgtaaaagtgaaatttaaaaaggaatatttaacagtactgtgctaaaacattgaatttaatgcattgtgacgtcttcttcgtcttcttgtccctatcattgtattttcctcactttctttagcttatcaagttaagcacgttcaagctcaacaccattactttttcccattctgggatctagataacacctgcggttttttttgtctttctttggcttataatgaaggtccaattatttgatttgctagtgcactataatttttactatactccacttcgatcagattaagcatcatatttcatttaatcattagaatagtatagtacaaaaattattcaaagcgactaaagaatttgccgtaaacacttgggatatcatccattccggagattctaaacgtcgtgctaagctgcagatattcatttggtttccagtttacatatgtacacacgaattatgtaat

SEQ ID NO: 184345 - DNA, 368 bp, Arabidopsis thaliana landsberg
atgggagaatctgcttgtctcatgcagccattctcttatgcagctccacaggtttgttagttgctttctcttctatttcagttacatattcttttaaaaaatcatatgttttcttagaaattaagctctctctgttctttctttagggagattctcttggtgctttaggacagtctgtgtccttcggaagattcatgtcggagaaacttgactgggagaaatggtctgctttctccacacagaacccttacgtggctgaggcagagagatactctaagcccggatctgttgctcagaagaaagctttctttgaagctcactacaagaaagtcgctgctgctagaaaagctgctgctgaagaggcactc

SEQ ID NO: 184346 - DNA, 50 bp, Arabidopsis thaliana landsberg
gaacattacatctaattatttccgattctgaacattttcggcgagtgtaa

SEQ ID NO: 184347 - DNA, 388 bp, Arabidopsis thaliana landsberg
atgttgagtaacatcaggtaacctatctgcatctgtacaaagttttaccatttgccaccttattcgatttattatacctatgaccatgcccaagagaatcactcaactcacagagtttatttagtggtgtgacctggttacctatgacactcttaacgagctgagaagcgccaagggaaaagggctataaatctatataggggggtgggcgatttcgtgagcattgaggtaataaagaccatctaattttcaggtataacgatattgcaaagcatggattcgaggcaattgagatatctgacttaaactcagctgaagcattaagacaaggtgaagctctggcgtccctgaatatggcaaatgctgaaaggccttctggtcttggagg

SEQ ID NO: 184348 - DNA, 205 bp, Arabidopsis thaliana landsberg
ggagggcggaccgccggagctggtcaggatcaccggcattgacctgccgcagcctggctttcgccccgcacagcagatcgaggacaccgggcgccgcctcagcgattgcgcacgccagctgggcgtgccgttcgagttccggggcatcgcggccaagcgagaggcggtgtctccagaggacctgggcatcgacccagctgccgag

SEQ ID NO: 184349 - DNA, 803 bp, Arabidopsis thaliana landsberg
atgggttcggaagcgaccaccgccgtgaacaaccttcagcaaccgttactggagtcaacaaaatcagaagctgacttcaggatggagagtgtattaacggacacacacttgtcatattttcggcggatctaccttgcgtcgttgatcgagatgaagtaccttttccacttggcggctccggcgatctttgtctacgtcatcaacaatggcatgtctatgctcactcgtatcttcgctggtcgtttgggaagtatgcaactcgctgccgcttctctaggaaacagcggtttcaatatgttcactcttggtctcatggtactttacattttcatttctcttaaaaaaactaatttcagctatacaaaacttcaaatcacatcaaaaatatccataaaacacaaatactactaaacggatccgatgaaatgatcaaatacaagttgatgtttatgttcttcagaatctagtctaatctttaaaatgaataaagtcttctatttcataccaaaaaaaataaagtcttctctttggtcttcagaatctaatctttgtttttttaatggccggtgacatagcttggaatgggaagtgcagtggagacattatgtgggcaagcgcatggagctcatagatacgacatgcttggagtctacttacaaagatccacgattgttcttgtcataaccggacttccaatgactttactcttcatcttctcaaaacctctcctcatttccttaggcgagccagctgacgtagcatcagtggcatcaggatttcgtctaccgtatgatccccaatga

SEQ ID NO: 184350 - DNA, 380 bp, Arabidopsis thaliana landsberg
gccaattttgcataagtatgcaaatgaagatgtgacactcgggtcatggtttatcggtcttgaggttgagcaaatcgatgatcgtaatttctgttgtggtactcctccaggtaaaatttcttgtttctttttttagtatgcctcaagaagttagtaaaaaagaaaagataattgagtttttctcatattcttactctccttttatttctctctttcccaaagactgtgaaatgagggcagaggctggcgaaatgtgtgtggctacatttgactggaagtgtagtggagtatgcagatcagtcgatagaatgtggatggttcatgtgatgtgtggtgaaggtagtaaagctgtgtgggacgcaaatttaaaactctcttag

SEQ ID NO: 184351 - DNA, 128 bp, Arabidopsis thaliana landsberg
atgattgacgacaatgatgataactacatgggattttatctgcgttacaagaaatcaaggacgcatgcaactttttcatcattctgtcctttcttcaactacgattcgggattttcatttattagaag

SEQ ID NO: 184352 - DNA, 159 bp, Arabidopsis thaliana landsberg
gaaatcctgagtgcgttttccgggacaaaagtggacttcaacggagtgctggagatactctatcgaaacgtgcgggcatcgacggacgaatcgaacatgcttactgacccagtcaccatcttgcctgacactctttttgcactgcatctatttcagcag

SEQ ID NO: 184353 - DNA, 2547 bp, Arabidopsis thaliana landsberg
atgagaactaagtgccctactcgatcacaggttcgagtagaaccaagcaaacgacagattcaaggacaaaaatgcaataataggtaactgaacagggtgaaggcaaataataggtgaaagaaatgcaataataggtgaatgtaaataagcaaataaatctaagaagaatagaagccctaaagatggattcattgataaaaggaattctagggtctatcaggtggttaacaagtgaaaggcaaataccctagacaaaatgttttaatacagatcaaagtagtctcgcatcaatgacctcaaacagagctaggtccagacttggtcttgtcaaaggaatctaactcagcaggcactaagcaccaaaaaatcaaagccaaaaagccctccaaagagccatgtctgggatagaggaaccaatctctggaattagtagatcagacattccatgtgaacatcttttggatgaagaatgccttagccgaattccaattgatcagaaagaaataagcattaagcccaactaatccaaaagggatctaacctaatcttaaccacctgaaaaaccctgaaattaccttaatgtaatccatcctcaagaaccctaatcactactctagcaacatgatcaagaacacaaacccagaaattactctaaacatatcaaaatgtagatctaagctagataaacaactttactcaaagaactaaatgcaaaaatgaaattgattaagagtaattaaggttcaaagattctaaaacacaaaaataaactaaaggataaaagcttggtcctttggacaaaccccaaagtgacctatttatagtaaaatcccaaaaaccctaggacacaagaagataaaagacttgagacggtttagtggatactcgacccttggggatcgagtgacaggatgctacaaagattgcgcctttgcctttatgctttgaatgatcgcttggtcgagtagttcttcttcctctccttttcttatgctcagttgtctggttgagtggggaaatgaggtagatcggaaggcactttgatcgatctttaggttaggtggaatccgttggctgtgatcgagtgattggtcaagtaaaggatcgagtatggggtcgagtggtgatgtatgtttatttcgcctcaggcttttacctaatagacaacacaactactgcaagagcacattatattggagtagtattttaggatcaaatccacaatgagagaagtagttcagagaaatccttaagaagagagtgaagctaggaccaaaataaaagagaggggttgttgtatgctacgaataactaaactaagagactactaactaaactaaacgataaactataagagagaagcgttaggtcatcgggggtttctccggatgttcacgattcaataataaggtatagatctcaatctaggtgataacatggctaggtttgtttacttccaaattcccgaacatacgaaactctatcaaaactagttaatcctaactgctagtaggtgaaaaccggctattatcactagtatattacgtactcagttgccctgtcggctagtaggtgctaacatggtttcaaaatacaagatcaggcattaagttcagattcaattctagttcataagtccctatcactcggcgggtgtgcaacggttatagttctttattcaatgagttaggtcaaacattcaaacgagattgtgccaaataatgaaatacctaaaggcaagtactaggtggcgttccggacatacaagcattaagaataaactcaactagaagaaatagtgtaaacgatcaaacaaagccatagaaaccgccaacctagatctttgatctattggtccccatgaatttccctttgaaacccccctcaaccccaactagagatctactcgctcatggcaaaggagctaatccaaagttgggttgagtaaaccataactaaaagatgaattaaacttaaaaggggtttagagattacttctttgaatgtagaatacaagaggcaaagctccaccttaaagagtcttacacgaaaacgagaaagagaaagagagagatggtgtttttcaagcttcaagaggtgcgacggctaagaggcagctcttggcgacggctagggttcgctggtgataaaggcacatttaaggttagggctaaggacaagtatttatacttgaggcccaagaattaggtttaggagtaagaacgtcattccgccggataagtaagtgatcgggccgagtagtgggcttcaggaaaagagcttaatggcggtggcgcaaaaagggaaagacttgggaatgacctaatggtcggtggtgagccactcggagctgcccgagttcaagtctcatcggccggatgtgttttggactttttatttccaaacagccggttcttgacatgttttcactctttggaccataacttctgaccgtcttcatggattgtttcgattcaacttcgacgttaattttgactcttctagctttccaatgacaccgagataccctcatgccgagatctgtaa

SEQ ID NO: 184354 - DNA, 1311 bp, Arabidopsis thaliana landsberg
aggctgcgttagagtcaccagatgaagaacttggtgaaggtgaagttagagaagaagatcaaaagtcgcttaatgtcggcatcatcggtccacctaatgcaggaaaatcttcgctgactaatttcatggttggctcatttccttaatttcacatttctgtgatttggtctttgagaatcaattgagacattgcgtatatgtttatgtagtgctgctatgactcttgattagtcctaaagttgcaatttttgaagtgattgtgtatctttgtttattgcatcttgatgagagttatgcttagtgtttcgttatgtccaagtgtaggttggaacaaaggttgctgctgcttcacggaagactaacacgacgacacatgaagtgttaggagtattgacaaaaggagatacacaagtcgtaagttttcccttatatatctgttgcatatgtaaactactcgttatggttagttgtggagatcagccattcgtagattgaatatttgatatttgtgaaccttgcagtgtttcttcgatactccgggtctgatgctgaagaaaagcggatatggttacaaagacatcaaggctcgtgtgcaaaatgcttggacttctgttgacctgtttgatgtcctcattgttatgtttgatgtccataggcatctcatgaggttagtcgtttactagtttttgtactttgttagctttacataagttatctcggaactgagagtagtatggttatgagcatcatcatcaagtggggtatcttagggtgggattattattactagcttctctgtttcgatatctttcatatcttgttcatctctccgagattatccataagcttgagaaccgtaaaccgatgggaagacacatctatttctttcttttgaagaaggcatcatgactgtggtttttcattaattacaagtagaaatagagttctcttagacttattttgtagtttgtgaattctgttttctctttgatttatctagtcccgattcaagagtggtacgcttgatcaaatacatgggagaagaagaaaatccgaaacaaaagcgcgttttatgtatgaacaaagttgatctggttgagaagaaaaaggatctattaaaggttgctgaggagttccaagatcttccggcatatgaaaggtggatatatatataccagactcagtttaaaaacaattaccggggaagtcttcgaattgattgaaatgtgctttttccctgtttgggtttctagatacttcatgatatcgggacttaagggatcaggagtgaaagatctttcccatacttaa

SEQ ID NO: 184355 - DNA, 83 bp, Arabidopsis thaliana landsberg
tcacaagactgagcacatcatcggatctacaagaaaacgcagaggtagacaaagaagaaacggatgacgagattgtcctctag

SEQ ID NO: 184356 - DNA, 918 bp, Arabidopsis thaliana landsberg
ggtttggaaaatctgcggttggggggaatacgggtcgatctacgtggttacaaacccatcagacgaccctgaaaaccctagacccggaacactgagatacgcagtgatccaatctaaaccattatggatcacatttgcacgtgacatggtcatagtgttgcgtaacgagctcatcatgaacagctacaagacgattgatggaagaggggctaaagtggaaattgcctatggaccatgcataacgatccaacatgtgagccatgtcattatacatgggataagtatccatgattgtaaaccgggtaagtcggggcgggtacggatcagcccgacccatgttggtagccggaaaggatcggacggtgatgcaatagccatttttgattcgtcacatatttggattgatcattgtttcttttctcggtgtcaagatggtttgatcgatgtacttcatgcttctacggctgtcactatttctaataactacttcacgcagcatgataaagtaagtttatattttacatagatgtaacttctacaatagtattttgaatacttgatgataatttggtatgtttttatgaaggtgatgttactcggacataatgacaataatgtggaagataagatcatgagagttacaattgcgttcaaccatttcggaccgggtcttattgagagaatgcctaggtgagtgtacatgcatacatattgatatctagattacttgaactagattagaaaatgctgacatggatatgtgactgatgacgtggcagagtgcgaagaggatatgcgcatgtagcaaacaataggtacgagaaatggcaaatgtatgcgatcggaggaagtgctgatccaaccatttttagtgaaggcaactacttcgttgcttctgatgaccctagcaaaaaacag

SEQ ID NO: 184357 - DNA, 181 bp, Arabidopsis thaliana landsberg
atgagcagaacttctcatctcaacattgtttccttgcttggtttctgctctgaaggttccaaaagggcaattatatatgagtttttggaaaatgggtcacttgataagtttatattaggcaagacctccgtgaatatggattggacggcactatatagaattgctttaggagttgctcaag

SEQ ID NO: 184358 - DNA, 40 bp, Arabidopsis thaliana landsberg
atggaggcatccaactgcccgttttcactcgatcaccaag

SEQ ID NO: 184359 - DNA, 316 bp, Arabidopsis thaliana landsberg
cttcccattgcttatcctggaatacaaacccatcaatcaactcataacccaactcgaagctgaatttaaaattgtttccgataatcgatcataccttgaagaaattgacaacgtgagcattgattaggaaagaaaacggtttaaggaaatcgataatggctgtgatccattctagggtttcggctctcgttttgcaagaaaacttattgctcttcattatcccgatgacctgagtagcagcaacgattctagtttccgccgccaaaagccaaccaaacagcaaacacttgcttttaaccgtcaaaatgttttctaa

SEQ ID NO: 184360 - DNA, 338 bp, Arabidopsis thaliana landsberg
ctgaccacaattcgatccagcacgccctccacggaaccgacggccagctggacgacttgctcgccgtcgccctgccgtggctgggctcacaggtgctcatcgaagacacccaccagcggccggtggcctggcacccccataagccgcgaccaccgaccctgaccgtgctgatcaccggcggtcggctggcccggctggcggcgcggctggcccccggcgagcccgagatcgtccggctcggcaccccctaggtcgggacccggctggacatgcggatcggggtggccaagccgttgggctacgtatcagtggacggcttcgactgcagacgaaccaag

SEQ ID NO: 184361 - DNA, 91 bp, Arabidopsis thaliana landsberg
cgctgagattattaaagcaaccggagttgttacaacaaccgcttgggccggtgctgcttacaatctcctccagtatatgcttgctagccat

SEQ ID NO: 184362 - DNA, 268 bp, Arabidopsis thaliana landsberg
atggaggagcagaatcgtggatgtcccatcgttgtgtggtgggatttaggtagcggtggccttccaagtggctacgacgctctcggagtcttagagaccataaagtcggccatgaatggtttaggattctgcggttccctaaacgttgaggcacttacagtaaagggatatgaggtaagtacgtaagtgtggacatcgtcgacaggctcattgttactggggtagagtttgtacctgtggttttgaaagaagagcacgacggcaacag

SEQ ID NO: 184363 - DNA, 506 bp, Arabidopsis thaliana landsberg
atggatcaaggaggtggagagggaaaggccatgtacattgatgctgagggaacattcaggccacaaagactcttacagatagctgacaggtatgttattcttgtaacacacatgagatcacaatagcgttcttgagacggaatcatctgtaagaaatcaaatgaaatgatgcaggtttggattaaatggagctgatgtactagaaaacgttgcctatgcgagggcgtataatacagatcatcagtcaaggcttttgcttgaagcagcatcaatgatgattgaaacaaggtgtgttgagtttattttggtgttcagttccgttatgtctatcatgagagtgctaacttttaaagttacgatgaccctattggcacaggtttgctctcctgattgtcgatagtgctaccgctctctacagaacagatttctctggaaggggagagctttcggctcgacaaatgcatcttgcaaagttcttgagaagtcttcagaagttagcagatgag

SEQ ID NO: 184364 - DNA, 67 bp, Arabidopsis thaliana landsberg
atgcagattacccggtcctcaccaatactcatcatcgtcaccccccataatgcgcgcaagttcttgc

SEQ ID NO: 184365 - DNA, 108 bp, Arabidopsis thaliana landsberg
gtttttgtaacaccaacacatcttgccatagtaatggagtatgcagctggtggtgaactttttgaaagaatttgcaatgccggtagattcagcgaagacgaagtataa

SEQ ID NO: 184366 - DNA, 1595 bp, Arabidopsis thaliana landsberg
agtgctttcgaaacaattgcatgagaggaccggttctttgaaagagcatgaggaccaagtaactagacttggtgagcagctagagaatctaagaaaggagctgcgagttagagaatcttcacagaagcagctaagagatgagcttttgaaagttgaaggtgacattatgcgggctgtatcagtggtcaagaccaaggagaactctgaggtgcggaacatgctaaatgaagatactccaaagaattctgaaagaatcaacaaacttttgacggctaaagatgatgaaattgcaagactgagagatgaactgaagattatatcggctcactggaggtttaagaccaaggaattagaagatcaggtaacaacacgtcatgctttagcatctcttagttctgtgatttatttttggttttatgtagtaaagcctttgttcttctggatcaggtggagaatcaaaggagaattgatcaggagctgaagaagaaggtgctgaagttagaattttgcctacgagaaacacgcatccaaactcgaaaacttcaaaaggtacactcactttcttttacttgggataataatcttgaatccaataccaatcgagctgcttttctgcgggatggtagatgggagagcgaaacgatgtggcaatacaagaactcaaggagcaattggctgcaaaaaaacagcatgaagctgatcattctagcaaccaaaacttgtgggacaaatcaggtttcaagattgttgtctccatgtcaatgctgatattagttgcgttttctaggcgttgaattagcgatgaaatcattttagatcatattaaaatagttagacagtaccctccagtgtatgaaggattaagatacacctctttgttacaatgtctgagtttccgcttttggtcctaaagagatattttaaaaacaaatcaaccagaggttttctgtacaaatccgaagccttagcaataccgtcgaaccaaagaaatttataatgtcttacattcctagcttcttcctaggaagatactctaaaagagctttaacttgtgtgtcataaagctattttgactcctacatattcttctacttctaatgaaatagcactgcgtgaagaatcaatgttgccaccatagcatgaccaaagtgaatcttcaagtgtgtagagtctgatgatgttggattgttcccatttggcgaaccatcaaaaccgtaaccacccgctaaacctcctgaggatggattgtttagcgtatttgatgtaggatttgcggggttaaaaatcgttggcggagttccaacccttgaatataaatacagagaggtacatttttagttaagaaactctaatgaggctttaagactacacaaaagagttgaaaagaatgctcttattacccgattatcccgcctcctgttggtattataggtgttgatgtgacaggaggctggttcactgtttgtgttgatggagttggtgttgttgttcctgctgtcattggtgttgatgtcgatgaacctgtctggtatatacaagaaccagtgcctgttttggaacaacaatccaaaccaaagtcaatcaaagccatctaa

SEQ ID NO: 184367 - DNA, 262 bp, Arabidopsis thaliana landsberg
gttacccttgccttggagtattgctgcagaaattagaaaatccagctctgcgggagtgcctcaaagttcctacaaatgaggtaggtttgctttgttagttcgtctgtctcttgtcggattaagattttaccaacatagtggaggatattgagtcttccttgttagcagtttgagtatactcaagtgatataacctatatttgtagggggttctggtgcgaagagttgaacctacatctgatgcaagtaaagtcctgaaagag

SEQ ID NO: 184368 - DNA, 93 bp, Arabidopsis thaliana landsberg
ccttttgaggacgaactaaagccggctatagaaaaaggtagggtgctcttaattgagaacctggaaccatcatacacatcgctggaggtagag

SEQ ID NO: 184369 - DNA, 304 bp, Arabidopsis thaliana landsberg
cgttagggacgtgggttaccatcgaagtatcattgcggattagacgtggtcatctatacatcgacgtcagcaaagaaccatacttctgttgtcctacgcgtaaagatgtaagtataattgattttgggttttattggtttcgttgttaattggtttgtgattgaaaacgcaggaccatttgtttaaatgggtcgaagatggtacatacaaagtggttgtagacagttggccgaaattgtccaccatggacagtgagataaacgcagccaagtctgaggttgcagttaagctagaagcgttatag

SEQ ID NO: 184370 - DNA, 330 bp, Arabidopsis thaliana landsberg
atggcagctaggcaatgtcgcgggcaaaacaagcaagttcccccgccacctcctctagttcccacagtgcaggagcttatggcccaacagaatgagattctacgacagctcttgcagcgccagccccaccctcagcagtatggtggaggccagcagcagcgacctccggcaacggcaacctaccaggagttcctgagtatgcagccgcccttgttcaccaaggcagaggatccactggacgccgacgtgtggctccgtgtcgttgagtctaagtttcccctcctcacgggagactgccctgatgataccaagactcgcttcaccgtgtag

SEQ ID NO: 184371 - DNA, 1626 bp, Arabidopsis thaliana landsberg
atggcggctgtgcataaaggaaaggtttgtgtaaccggtcccgatggttttttgggttcttgggtcgtcaatcatctcctctctagggattacttcgtccacggcactgtcagagaccctggtactgctctcctcaccttttatctctccctctgtaaattgtcaacctttattctctcgcatttctagttcatcgaatttttgtagctcagcctggtcaaaattgattctttcgtctactttctaaggttttctattcccaattctttttgtagctccgatgtttctgtctacagacagaagattaagccttttgagtttgtctattgttctgatgaagagtttcgcatggttcttgttataggtaatgaaaagtatgctcatttgaagaagcttgataaagctggtgacaaactcaagctcttcaaggctgatttgctcaactacggctctcttcaatctgctattgctggctgcagcggcgtcttccatgtcgcttgccctgttccatctgcttcagtccctaatcctgaggtgaggatttcatttttacaatctcattggtggctatatgcattgtctcactatggtttcactggttttgcaggtagatttgatcgcacctgcagtggatggtacgctgaatgtgcttaaggcatgcgttgaagcaaaagttaagcgtgttgtgtatgtttcctctgtatctgcagttgctatgaaccctatgtggtcaaagagtcaagtgttagatgagaccgcttggtctgaccaagattattgcaaaaaaactgaggttaataatgcatcttgaatccctcatctcacttttttttcttcttttaaatctgactttcgtccctctggcagaattggtattctttgtcaaagacacgagcagaaagtgaagctttcgaatttgcaaaacgaaccggacttgatctcgtcagtgtttgccctacccttgtcttgggacctgtattgcagcagcacacagtaaatgctagtagccttgttcttctcaagcttcttaaaggtattataaacaagcctctcatttcatctgggattgttagaagcagcaacttggtatatgagttggtattgattttatacttaagtgtggtgcagagggttatgaatcgcgtaataaccaagaacggcatttggtagatgtgcgtgatgtggctcaagctttacttttggtttatgagaaagcagaagctgaaggaaggtacatctgcataggccacacggttagggaacaagaagtcgctgagaagctgaaaagtctttatctaaattacaactacccaaagaggtaagcaaacaacagctgcacatctctctacccaatttgagtgaaaacctttaaaccttaataagctgtttttgttactttcatcagtaaacagtgtcacttacctttacatcaatgtctctgaagtttcttttagaccttacctttgatctaaattctacttatccaatatcagatacatcgaagcggatggaaaagtgaaggtgagttcagagaagttgcagaagttgggttggacttaccggccgttggaggaaacacttgtggattctgttgagagctaccgcaaagctaagcttgtggactga

SEQ ID NO: 184372 - DNA, 225 bp, Arabidopsis thaliana landsberg
atcaagcaacgagtggcgtcgagaaaacacaattcacgagaagcagatccaaaaaaaacagagagagctaggagagaagcattaatgataaagctagaacttctggagtcgagagcttaccgtggatttttcgccgaagcgttaacgagagagagagagagagctgtggaaaattgcgagaagagtaggtttctacatgattctcgacttctggtcctaaactaa

SEQ ID NO: 184373 - DNA, 102 bp, Arabidopsis thaliana landsberg
gtctacaagcggagttacgatgtgtgcacacaactatatgagaaagagttattgaccgagaattcatatcttcacgtatatgggtttgttgctttttcttga

SEQ ID NO: 184374 - DNA, 211 bp, Arabidopsis thaliana landsberg
gagcatctacggacaaccagagaaactacttccaattgccattcctgtacaaacgacaagaaccatctcccacggattagtgatgccacatagaccaaagcgccgcccctattcttctcaagaagacgctactcgcctcaaatttttgtttggtgaagatttgatagattcggttgatatgtccgagcctactttgcatcatctcttctaa

SEQ ID NO: 184375 - DNA, 100 bp, Arabidopsis thaliana landsberg
aagatcagaaatagagctcaaggagttatttgacaatgaagcccataacgtgtcctttgaagaaccctgcaggaacatgaacacaatcaatgacattcac

SEQ ID NO: 184376 - DNA, 349 bp, Arabidopsis thaliana landsberg
atggtgcttaacatgtcagtaacatctcctcctgctgttaaaatcacagagaatggaattgatgcgacgattcagctagatatagcgttcgatgttcaagactctggagaaaatctatctgtagcacgcctatcaacagtaagactaatagtaatccaccaaacaatctaacttaagaagcatcttttgatcactaaagttagaatcttgttcttgtttgcagattctgagtgttgcgtgttctacagaaatcgtaaagaataatctaatcggtagcctcagattaaatgatttcaatgcaacaatgaagtggagtaaaattggagagtttcaaacaaactatgttcag

SEQ ID NO: 184377 - DNA, 172 bp, Arabidopsis thaliana landsberg
aatgagaatgcacaagcctctttatcccatcgagttcaaggagtacttgaagagggaaacatgtgctcacataaagaaagaagagaaagcgcaaatatccagaagcgaatatgatcagcatactgaaaatctgaagaggaccgaagaacacaaagtccattgtgcagtttga

SEQ ID NO: 184378 - DNA, 122 bp, Arabidopsis thaliana landsberg
atggttggggtggtctgtgacattgcacacctttcgtgtatcaaggatggtaccgttatcgtggatcacgcctgtatatcggcggctaaatatgcccccgttgatcgaccacttcagctttg

SEQ ID NO: 184379 - DNA, 928 bp, Arabidopsis thaliana landsberg
atggaagcactcatagagcattttagcccttacctgcaaaactggtctgaatttgatcagcttcagcaacgtcatgaggaggaccccaaggatgacagcattgctcagcaagcggcgaagcagaggtttactgtggagaattttgtaagagtgtcagaatctctcaagacaagttcatgtggagagaggttaaaagacatagttttggagaatggtatcatagctgttgctgtcaaacacataaaggaaatttttgcaatcacgggacagactgggttcaaatctagcaaggaatggcttttggctcttaaacttccgtcagtgcctcttattttgtcaatgctaagaggattgtcgatgggtcatttgcctacccaaacatgcatagacgagggaggaattttaaccctactttttgccttataaggagtctctggagaaaacgacatcggtgcatgggctgaaaatttgctagatacacttgccgataaagaaggaaaaggagatggatttcttggagagaaagtccgtgcattacgagatgccaccaaagatgaaatgagacgccgtgcattaagaaagagagaggagctcctgcaggtaaatataataatgattctctctcaaggaaactaaatgtgtaatttggtcttgtgacaatatttaccaagtttctcttttgaaacagggacttggaatgcgtcaagagctatcttctgatggtggtgaaaggattgtggtttctcaaccaattcttgaaggttttgaggatgtagaggaagaagaagatggattggcttgcatggtgtgtagagaaggctacaagctcaaaccttctgatttattaggagtctactcttaccagcaacgggtgaatctcggtgttggcaattctggaagcgcacgtggtgaatgcgtttacactaca

SEQ ID NO: 184380 - DNA, 60 bp, Arabidopsis thaliana landsberg
atgtcggctttcgttgctaaaaaccttgtgacggcatcggacagtatgttgtcttggcac

SEQ ID NO: 184381 - DNA, 33 bp, Arabidopsis thaliana landsberg
aaaccaaaaaaccgaaaccggaaacccgaataa

SEQ ID NO: 184382 - DNA, 1222 bp, Arabidopsis thaliana landsberg
atgcttcttgtaagcttcataaagagacctcaccagagccttgcaggaattggtattgctgcgtttgttcgtctgatgagcgatgctgatggcttgttctctgaagaaaagtggttagaggtggtgtcagctttaaaagaagcggcgaaaacaacttgcccagatttttcgtatttccttagcgaagaatatgtagcaagaagccagagaagtgctctcaacattcagaacagtaatgctgagtctgctgctccaactgctaccgatggcaatgaagagagtcagagaacagcaacccatctttacgctgctatctctgatgctaagtgccgagccgctgttcaacttttgttgatccaggttagttcctctcaagccttacgtttatgtattataataatgtgtgttccttcaaatgaaccgacaatgtttgttccttctttctttaatcaaatgttcttttgtaaattgataactcaaaaggcaaacgcaaacagaaggaggaacttgggagtcttttccgtttacaatttaccaaaaaaaaaagtaaatgcaatttgtgttgttgctgttattgtagtaatgtttctatttttttcaggctgtgatggagatttacaacatgtacagacctcagctttcagcgaaaaacacattagtcctcgtagatgcattgcacggtgtagctttacatgctcacggaataaacagtaacacaatacttcgttcaagactacaagagctaggacccatgacacagatgcaagatcctccactacttcgtcttgaaaacgagtcttaccaaatctgcctgacattcttacagaatcttgttgcagacaaaaccaaaaaagaagaagaagaagaggaaatagaatcacttctagtcaacatctgtcaagaagttctcaacttctacatcgagacttcttcttctgcgaaaaaattacaatcagaatcatcacgggccagcgaataccgatggagaatacctttgggatcaggaaaacgaagagaactatcagcaagagctcctcttatagttgcaacacttcaagcaatgtgtacattggatgaggcatcatttgagaagaacctgaaatgtctatttccacttctggctaacttgattagctgcgaacacggctctaacgaggttcagactgctcttgctgacatgcttggcctatcggttggcccggttttactccaatggtcctga

SEQ ID NO: 184383 - DNA, 405 bp, Arabidopsis thaliana landsberg
tcacacatgcagactacatggatacacaggaaatgaagctgatgacatcagtcccgattggtacagctcgcaagaaaacattgctcaagatctggtacacacatacaactgaaaatcccgacacatgtctgcagacggagttacaaattcaccggagcaacatcaggtcatagttatacattcctaatttgttctacaagtaccaaacatgagacgtacagactcttcggcgtgttgcctgtaggcttcacttcccttcacccagactacggcaacaccgtggacccttgtgctacggatcgctgcaaaggatttcggtgaagacggagagtgcgtcctgcaggtacgacgacctgctctcgtccggaactggagcgttgagcatcgttagaagacaccccatgg

SEQ ID NO: 184384 - DNA, 295 bp, Arabidopsis thaliana landsberg
atagagagttttatcagcagcaaagcccaccaccaccaccccaagcagcagcagatgcagatcggtacaactataaagtcaagcttaccacccatcttcttgctataacatgtgaagtttgtgtgcatgtgctgctagaggttagccgcgaggaagtcgccgatctcctccatgacctcgtggtagtggtccgtgttggacagcaggtagaacccacggtggccttctcacggtacacgaccttcacatggtggccgtcttgctggaggcctcgggtacgcagctgccgatgcag

SEQ ID NO: 184385 - DNA, 60 bp, Arabidopsis thaliana landsberg
atgctgaccggagacaacgcccgcaccgccaaggcgatcggcgaacagctcggcattgag

SEQ ID NO: 184386 - DNA, 482 bp, Arabidopsis thaliana landsberg
atgctgatggctaaaggttgcctacttgacgatgagaaagccaaattatattccagtctagttaataagggttgtgctgcaagatttgctttcgcggctgcaatttttggagaaacttccgaggcacttttctggctacaactgccttctgccatgaaacatgtcgtcaacaaaacagcaagtaagtctgcgaagaagcaatttgaggagacagctacgctgagtaaaacgtcatcaaagggcccatcatctacaggatttgagaaaaatggttctatggtaagtcgtactatggaataaattagaaactgaatacctttttgactgaacccttatgaatattatgtggttgttgtacagagtgaaggtcagcttagactaatggcttttgaacaaaaagatttatgggtatgcgctaatgagcgaataccgtggcatgagaaactggaaggggaagaggccattcagaaccgagtacatga

SEQ ID NO: 184387 - DNA, 480 bp, Arabidopsis thaliana landsberg
atgaaagttgctgaagctgccaaggcgcaagccgaaactgatactaagcaagcaaaagtcgaagctacaaaaactcgggctgaaaccgaagctgggcctttagcgcccgccgcgacgaagcctatcgcgcctgaggaagagatggcagggcagactgcacctgaaaaggtcgagactgccgctcccgaagctccaattgaaaatatcgactacatcgttcgacatgcttcggggaagaaattgtccgaagatgaaatcgctgaagcaaggcattatgctcaaaaactgaaatatccgaaaggagccttagtttttaacggaagcaatgaagatgacttcttatactatctcccggacaacaaagaaatatctgtttgtcgggagataggcaaaagcatgggattcccgaagctggaagatggtctttcaattttgtcgaaggatgatcttgccgacaacctagcctacaacagtataaag

SEQ ID NO: 184388 - DNA, 399 bp, Arabidopsis thaliana landsberg
atggcatatgagttgatgtacggcgacatggcaatttttggatatagttttcttattattacatatcactatgtatcaggctttgaaaatgaaggcccattccatagttgtttccgacggtactttttttcaaaaaacggtacgtaatcgcatggcctttgtagcttacaaatacaattatcatatcactagacactagtttacctttgaatctcccaacgcctttcattgctaggatagttaaagctaattactaattagacttgataacccgagttcttttatttggcttaattgcacatagccaaatttcggatcgtagccgctggatccagcaaaaacttaaaaaagtacccacatgcatgggaggaaaatccccatgaagaaatgaacggctga

SEQ ID NO: 184389 - DNA, 1077 bp, Arabidopsis thaliana landsberg
atgaagaaaaactacagggaagttccattgtggtggtttttggtaatccttttactgaatatcgcgcttatcatgttcatctccgtgcactacaacgctactgtgcagcttccttggtggggagtgttacttgcttgtgccattgccatcagtttcactcctttgatcggtgtcatagctgccaccactaatcaggcaccgggattgaatatcataacagagtatgttatcgggtatatctacccggaacgtcctgttgcaaacatgtgtttcaaggtctatggatacattagtatgactcaagcgctaactttcatttccgacttcaagcttggtcattacatgaagatcccgcctagatccatgttcatggctcaggtatgcatgttatcaattggtcttgagacagatgtcaataaaactaaaacatagctaatcaaactgtaacaagtgcaggtggctgggacacttgtggcggtggttgtgtacacaggaacagcctggtggttaatggaagagattcctcatctttgtgatacatccttgcttccttcagacagccaatggacttgtcccatggaccgcgttttctttgacgcctctgtgatttggggactagtgggaccacgcagggtgtttggagaccttggagaatactcaaatgtcaactggttcttcctcgttggagccatagctccactcttagtttggctagccacaaagatgtttccggctcagacatggatcgccaagattcatatccctgtccttgtgggagccaccgcaatgatgccaccagcaacagcagttaacttcactagttggctcatcgtcgcattcatctttggccacttcatcttcaagtacagaagagtgtggtggaccaagtataactatgtgttgtctggtggtttagatgctggctctgcttttatgaccatacttctgtttctagcactcggacgaaaaggaattgaagtgcagtggtggggaaattccggcgaccgagatacatgtcccttagcttcttgtccaactgctaaaggtgttgtcgtcaaaggctgtcccgtcttctag

SEQ ID NO: 184390 - DNA, 547 bp, Arabidopsis thaliana landsberg
atggggctgttagcaccccaacctttaaggacctggttcctaccctcggggaatggaggaattacccctcttgaggttcttactgttttacgcctaaagcttaaaaagtggaatcgagatgtgtttggggacgtcaagaaaaaaaaagaggagttgatgagggagattcaagtagtgcaggatgctttggatgggcatcaatccgatgatatgttgcgtaaagaggaggatttaattaaagctttttacgtggttttggagcaagagcaaataatttagtttcagaaatcaagggagaagtggattgcgcttggggatcgaaatacaaattatttccataccacaactattattcgtcgcagaagagggtacatggatttctgatgctaaagagttggaagcgctggcggtgcagtattatcagcggctgtattctatggatgacgttcttcaagtcgtgaatcctctaccacaagacgggtttgagcagctcacaagagaggaagtgttgtctctgaataaaccgtttttagccactgaagttgag

SEQ ID NO: 184391 - DNA, 21 bp, Arabidopsis thaliana landsberg
gatagacaacaacgccgataa

SEQ ID NO: 184392 - DNA, 652 bp, Arabidopsis thaliana landsberg
atgaccgatgtgacgccgtacgaaccatctcttacgaggctcactctcgtctccatgatcctatttacggctgcgtctcccaaatcttctccctccaacaacaggtattatactttttcttcggaaatgtatacataatttttttttgcttttgcttcatcatctctagtgtacttacaagtaacttcactgactttgttcttaaggttgttagtttacaagcacaagtggttctacttagagaagaagcttcgagaaggttccctcaagatgatcctggttgtaatatgaagcaacaagaaaaggttcttgctcaacaaatgccacaagatcttcacaattggtttcaccaaggaatcttggactcagacttcgacccaatgagtggtactacacgcgacaatgagcggtccatggatcataatgagtctccttgtagctcaaatgaatcacttaattactaccaggaggtcaattttccttggtctgtttgagtacaagtgactactttgtcagagatggaaccttacaatctttctattgtatcgacttttcgacatttttcatagtagagatcgaatcatgcaaccattttctctttgagaataaccacttcttcgatgatctttcataggtacaacatcagatctga

SEQ ID NO: 184393 - DNA, 131 bp, Arabidopsis thaliana landsberg
ctttttttagtttatttgttttggtcatggttgatggttgggaacgggacatcatcacatcacttatcaacattctatttggtccccaactctatgaagcattatttgaaatcattagcatgactatctaa

SEQ ID NO: 184394 - DNA, 288 bp, Arabidopsis thaliana landsberg
atggggcttctcctgatgagctgcgaggatttgagtgaagtcaaccaaaatcccaacagcccggaagaagtgtcggcgaactacatcatgagctacgtgctcacgcactcggctaaggcttactatgcgctcggcgcagaaggttcggacctttcgggggcgatgcagtacatccagatggggacgaacgagggcgcgatgaaaatcaaccagtatggctggtcggcggcaagctggtcggagtactataatattctcacaaacaccgatttgatgtatcaggcagcg

SEQ ID NO: 184395 - DNA, 1274 bp, Arabidopsis thaliana landsberg
ggtcataaacgacattttctccaagattgatgaacatattgagaaggaaacgctgataacagaattgaacctgagtgctcttcctgatctgtatggccagttcgttcggctaatcgaatatttggtacttactgtagcattaccatgatgaatttctctgctgagtttagcatgaatttaaggaaataactgaggttggtctacttgcaacagctagaaaacagggaggaggacaaggatcaaattgtaattgtcttgctgaacatgttagaattggcgactagagacatcatggaagaagaagtcccaaggtgagaccatttctatgagccgtcttctaagtgatcgatcattttggtttgaagcatactcatttaaagttttctttttttatcatgctagagtcaactcacaatggatcttatgttttgtatgacgtagggacccctcttcatcaacagcgcaaatatttcagccaacttcgattcccagtgtactctcagacagaagcctggaaagaaaaagcaagtctcctctttaaaattcatctatttgcttcatttatgcttctgcaatactggtgcatttgatctcttttgcctgagggccttctaagttatctatctccttacgtttttattgtgcagatcaagaggcttcatcttttacttactgtcaaagagtcggctatggatgtgccatccaacttggaagctcgaaggcgacttacattcttttcaaattcattattcatggaaatgcctgatgcccccaaaatccgcaacatgctttccttttcgtaagttccattccttttcaatttgcaagaaactccattgcagttatatgataaatctttttatttgcctcttaattccttctttcctacaagcagtgaggatgtacaaattctaatagctatacatttttttgcttttccatagggtcctaacaccatactattcagaggatgttctattctccatttttggtttggagaagcaaaatgaagatggagtctctatactcttttacttgcagaagatctttccaggtttcactttttcttctgtctccaaatggtcttgtgccactactattgtcctctgaatttctattccataaactgactcggtggtttacctcagatgagtggacaaactttttggaacgcgtgaaatgtggcagcgaagaagaactcagagcaagagaagagttggaagaggaacttcgtctgtgggcatcttacagaggccaaacactgaccaaaactg

SEQ ID NO: 184396 - DNA, 164 bp, Arabidopsis thaliana landsberg
atggaagaatttcttgacttcagtggaagagcgtacatcggactcaagagaagaaaacttgtctttctaggccataacgtcatgttccctatcaagcaacaacctctcgtaatactcaatcatgtcattgagtttgctgtttgcctgaaccaagggttacaaag

SEQ ID NO: 184397 - DNA, 457 bp, Arabidopsis thaliana landsberg
gcactcaaagaccagcaggcacatattcgtgccacgttgtcggcgctgcccgagcagaccttggatcagagtcaagacgtgcgtcatcgcatcgcgatgctgaccacgcaaatacaccagattcaggcccagttagccttgcagcacacgaaggcggccatggatgcgacgctggtccgcaagatggacccgttgtcccggcgcggcttcgtttccgtcgtggaaatggaccagtacaaggcgcaggtactcaacgtacaggcacaaatcaaggccttggcgcgccaaaggctgtcggctgaacaacagcggagccaattgcgcagtcagttgcaattgttgcccgtgaccgccgctgccacggcccatcaactccggggaaaactggcacaactggtcgtgtccatggcgaaaaccgacgtggctcgaaatgccgtgctgcgcgatacagcgcgcc

SEQ ID NO: 184398 - DNA, 1586 bp, Arabidopsis thaliana landsberg
atgggctttgtgagagaaaagcgcaatgctcattgtattgttcagtgtgatgatggtggtgatgaggacgtcaactctgctccaaacattttcacttatgataatgtgcctcttaagaagcgccactaccttgggacaagtgacactttcagaagctttgagccgttgaacgaacacgcatgtattgtatgcgatattgcagacgatggtgtagtaccttgttctgggaatgaatgccctctcgctgttcacaggaagtgtgttgagcttgattgtgaagatcctgcaaccttttactgtccctattgttggtttaaggagcaagctactagatccacggctttgagaacaaagggtgttgcagctgcgaagacacttgttcaatatggatgtagtgagctgaggagtggagatatagtcatgacgagagaaaacagtcaactagagaatggttctgataattcactaccaatgcaactacatgagaaccttcatcaattacaagaactggtcaagcaccttaaggctcgaaattcccagttagacgagtcaacagatcaattcattgatatggagaaatcttgcggagaagcttatgctgttgttaatgatcagccaaaaagggtactatggacagtcaacgaagagaagatgttgagggtaaaaccaccacacttttctcttgaaatacacttttagcttaaacttatagtatatgtttattttggataggagggagtggagaaattttctgatacaatcaacaaaaacatgccttggaagaagattttggagatgggaaaaggtatattccacacaactcgtaattcctccgatcttaaggacaaatggagaaatatggtgcgtatgtgattcctttcaccataaaatccttagaagtattaaatgacgcatttgatatcaaaaacattaagacaaatcctagtgaccttttgaattggcagtatagtagtgtgacgactttgatgttagtccttccttgtaatcgcagtttcggattcctccgtgtagatcttttggtaacagtagtccttatagatgatgttcgctttgtatcccttatgttgatattaagagaagataacgtgtcttttgtagtagccgtcccactctgttagtcttttgttttgtacccttctttaaacaaaacagaggattgagaaaaagagaatcatatgggaattatggatataattttgaagaacttaaaaataggttaatcttttaagactatggggagataacttgtcgcacaagtaccaaatgtttcggaaacaaaggtgaaaaaatctacaaacttaacaataaaaccacaagtcttccatttgtacggaggttaataataattaataccaaataaacgacaacacttgaagtagtcaaaacttttatagaattatcttgatttggttgaggtcgagattgacatcatcatcgtcgtcgcagagatcggagatcaaaatggagagggaaagaaacgcaggagtgatgaagaagatgagtccaacaggaaccatccaaagattagaatttgtgggatggtatttgtaaagccaataacttag

SEQ ID NO: 184399 - DNA, 151 bp, Arabidopsis thaliana landsberg
tgaaaaaacagtgaatattgttacatatcccattaagtatttgactccaaaacgtcatcatgaaatcatttccatcacacacaaacgacaaacactgaaagatattgaaaaagaacagaggacagatctcatacagaagaaacaatgttga

SEQ ID NO: 184400 - DNA, 1036 bp, Arabidopsis thaliana landsberg
atgtttgacactcaacatggattcgttattgaaatttgtgaagatagggatgctgaattaggtgagtcccttttgattttctgatattacttgagaaaaccagagtgaattctttaatctggtgcagtgatcttttaaatctgcaggctttcatgtggaaaattcagacattacattgaatgtttgtttgagtaaacaaagtgagggaggggatatattattcacaggcacacgatgcaataaacatttgaaagcaggtccaaagccagaggtatgtgagtcctcttacgttcctatattcagtaaatggcaaaatggttagctaataaaggaaccaattatttctcactgaaacaggaaatttttgagtactggtatgaaccgggtcaagctatacttcaccttggctgccacagccatggtgcaaaagccgccataacatcttgtagtcgggccaatatgattctttggtgcataaagtaagcaatcatgaagcttgcctcaggatttcagatcacaactaaaacaccttttcttctgcatttccatttgcagctctttgttcagagagatgcaaacttatgacaacgaattccgagactggtgcggtcaatgcgcccgtgaaaagaaagaaaagaaaagccagagtcttgcttccaaaagaaaggttaagaaaagaaaaaaggacatgattttgctcaagtttataagatgttttgtttgagcatggttatgaacctgtgggggtccttattgcaggagatgattaggataatagagtaaagccgaagcccgctgaaaaaaatgaagtctatgctttgaattttgactctttacttggaaaataacactgagtatatgtagaatcatttgatgtaaataggtctttgtgtcttcgaatttcttacattactactatgtacatgaaagttaccagttacatgtttaggatcggctatatgtttacattttactcgccgtatcgaagcagtgttcagtgtcagctgaaaaagagtacatatagccggtccattcg

SEQ ID NO: 184401 - DNA, 1007 bp, Arabidopsis thaliana landsberg
atgccgaaaaagtccgacgcctcgcgtaagggcgtgtacaaaccagaggaatttacagtcggcgatcttgtctgggccggctgtggtacaagcgcctgatggggtcttgaaacattgcgtccctggcgcaatacgtgtcatgttttttgggtactctaaatggaaaaaaattgtcaattgtcaaaaagtcgtgttaaatatagatgtattgtacagatctttgactttgaagtacttcatttgctgatcacagcctcatctttatctgttttttttacactgtaattatagattggatgccgattggtgcctttgtgcttgattctcgaacttcactcctgactgagagtttgagtggtcgcctgaaagtcccaaaggaaggaaccatagaacggatgttacaaaaatgtcttattcatgatcttcagaaactttgtcaactgcaggaaaaactgtaacatatggcttatctcattttccagatttacagcttgtgcgacctgtttgtgacctcagtacctgtgaggtaaaagacactaatcaactctaatctgttgctgaaacttttgtattgatctctgcaataactaaattgcaactaaaagtgtttctgttttactaatgtaggaacaatgcaaactcttgatgttaggcacattgaactcttccttagtgaaggctacaaagatggaagctgccgatttataatctgattggatctcataagttgcagaaaaacgcaagtgcagcttgtggagccatatttgacctcaaacaccataaagaatcttcatcctcaggtaacttcaaatcttcattactgttatgttcctttacttctcctctttgaatcattctcctttgtctcatacaaatttcacatgaaacctctataataggtattctcaacctcaagtcttggaccggacagccagatatttcccaacctaaagcagttatcgcaccccatgcagttgctgttcacacaagattgcgagaaaacgaag

SEQ ID NO: 184402 - DNA, 223 bp, Arabidopsis thaliana landsberg
atgcgcaagccagcgagacttgtcctggaaaatgggatggtctttcacgggcaagggtttggtgcgcttgactttccccgtagtttcggagagggtgtttttacaaccagcatcaccgggtatcaggaaatccttaccgatcctttctatgcagggcagatcgtcacaatgacaaacccgctcatcggcaactacggtacaacccatgaagacttggagagcg

SEQ ID NO: 184403 - DNA, 897 bp, Arabidopsis thaliana landsberg
atgcaggcttacaattcttcgattatgttttcaagaaacgcgtttcttgtggatatagtcggagccccaccgaagcgagtgatgaagcttgactcaatctcgagtggttcgttgtggaaaaccgcagacgttttggtcttcaactcttggcattggtggcttcacacagaccgaaaacaaccgtaaaatcatctttatgtcgtcaaacatatcttgctatggactatggacttattagtatctaactaatgtaatcatttggggttgcagatgggacgcaattatgtccgggaatgtaacggttaaagacatggaccggttagtggcatatgagaaagcaatgatgacttgggctaagtggattgatcaaaatattgatccttccaaaaccaaagtcttcttccaaggtgtttctccggaccatggccggtaagttctacctctatataacttctttttgattcgatacatacattaaatcaacgataaaaacttaacacgattgatatatgttggattagtctataagttttcgttagaaccaaataatttcatgttgatattgttaacaataatggtacataatgttacagggcaagggaatggtcgaaacaaggtggcaaaggcagttgcataggagaaacaaagccgattatgggatcgagttacctggctgggccgcacgcagccgagatggtggtggcgaaagtgataaagacgatgaagaatcaggcgcggttaatggatgtgacattgatgtctcagctaaggaaagatggacatccttcagtatacggttttggcggtcacagaatggcggattgtagccattggtgtctctctggagtcccggatagctggaaccagctcttgtattctgagctgtttcattcttaa

SEQ ID NO: 184404 - DNA, 696 bp, Arabidopsis thaliana landsberg
atggacctgataaatactggagtgtcagcaagtgaacgaatgaggcggaatacctttgcgtcgtcaattagagacatagctctggagaagatgcaaattggaggatcatcaatgcgcttatccgaggtattcatgcactactcctttctttttcccaattttgttatatgccaaaagcaagcaaatcagtttacaataagagaaaccgtttcttaagtacaatggaaatgttgttgttgcagttacttgaagaactgaagaagcatggaggcaacataaacaccgaaattcatcttcatgatgtgagtcatttataacactttgctacatatcaaaaggtttttggtctaaggacagagacataacaaagtatttgttgttgtgacgcattaaacaggttagaaaagcagtcgcgacgctagcgagtgaaggatttctggtagctgaaggtgatagaatcaagagagtataatcacagattcatgaggaaagcttaatattgctgtgattagagagtttgatgatggttttagtagcatattaatagtaggatacccagcaaatgatgtggctcggtccatcttctcactattagctaatttgtaatgacttattttgttactagatatcactttggcactgacaaaaaaatggatcaaatatactcccaacaaagctaacttgcgaatgagatag

SEQ ID NO: 184405 - DNA, 258 bp, Arabidopsis thaliana landsberg
ctaatcctggaattcaactccgtcttctacagtcatgaagatcagctttctgacaaagatagcgaactcgacaacttcaggcgaagtgaagacgagaacgctcatacggtggagagggccagcagagtgttgaagcgtatgaaagacgttgaaccccggatccaggaactcgaggtgaacaacattgacctcatggcgaaactagaggtaggtaaaaatgcctatcttgctgcagccgacaacgagaaccaggcctga

SEQ ID NO: 184406 - DNA, 285 bp, Arabidopsis thaliana landsberg
aagcagatcttgtactctcgatatacatacttattttatatggcttccaactcaatgagctctagcgcttcttggacacgtaaggagaacaaattatttgaaagggcgttggctacatatgaccaggacactcctgaccgttggcataacgttgcaagagccgttggcggcaaatcagctgaagaagtaaggcgacactacgagctcctcattagggatgtcaatgacattgagtcagggcgttatccacatcccaattaccgttcaaatggaaacaaccactga

SEQ ID NO: 184407 - DNA, 434 bp, Arabidopsis thaliana landsberg
atggcagtggatatcgaggggctgaaatgtcagttacaagcatctgagcagctgttagctgacattagatcacagtttgattcagctcagaggtcaatcagattggcggatactcaactcagatgtatgactgagtcatatagatcacttgaatcacgtgcagctgatttagagatcgatgtgaaccagcttaaggaaaagatacagaagttggagaacgagcttgaggatgaaaaatgcaaccaccaagaagccattctgaggtgccatgaacttgaagaacatattcaaaggtatcatctttaccagaatatgtaagagcctgaatttacttactgctttttacatgtctatattttcacttttttctcagacacagaaacacttctttggttgctgaggatgatgaagaagctgatatcaagagcaaacag

SEQ ID NO: 184408 - DNA, 2399 bp, Arabidopsis thaliana landsberg
atgacaacggcgatgatgatattcgcggttttggttacagtggtggaggtggaagcacagactgagtgcgtgagcaagatagttccctgcttcaggttcttgaacacgacaacaaagccgtcgacggattgttgcaactcgatcaaggaagcgatggagaaagattttagctgtctctgcaccatctacaacactcctggtttactcgctcagttcaacatcactacagatcaagctctcggtctcaaccttcgatgtggagtcaacactgatctatccgcttgttccggtactttaattctccaagatcttcgaccgttgcaattatgaatctgagatttgcaatatgataggtgttttgtttaatttacaggttctggtgctccaccaccaccacctgatctatttcctccaccttcagctcaaatgctccctccacctccaggtatataaaccaaactcttcacctacgtactccttgctagtttataattgagtttggtaatatgttatttaattattaagtttctgtgttatagcaaaaggtgcttgtaagagtcgtaactttagtttgggcagttttcaacagtcacaacatttagtttggtcagatatgtacttaagatcagtatgtaagtgtgtgtgtcttgtcttaataaaacaacaagtttcagattcaataaagagttctttcgtttactttgttttgttataggcttctctttgtgcttcccactaggccctagaatcaataaagctctgatatatatatattcattattagtaatgttttgtttaattatcagcttcgtcacctgcacctccatcgccaccttcttcatcccgaccacgtccattgccacgtccatgtataaaccaaactcttcacctactctttatattatacgtttaaaatctctgcaatatatcttgaatttttttttgttatatgtagcaatgtcaaggagctttacgatagaaaacaaatgccaatacaccatatggcctgcaacctacggctataggagatcactagaaacaaccggttttgttcttgagaaaggagagacgcgtaccatcaaagcgccgtcatcatggataggtcgtttctggggtaggacactctgctccaccaactcaacagggggtttctcatgtgccacgggagactgcacctccggaaaaatcaagtgcctcggtatccccatagatccaacaacagtggtcgagtttaacctcgcttcttacggtgtcgactattatgtcgtcaacgtcttcaatggttacaacctccctttgcttgtgacccccgagaacaaaaactgcagaagcattgaatgcgttattgacatgaacgagacatgtccctcggagctaatggtgaacagtagtggccttggatcgcaccatccaatagcctgcatgaccacttgtcagagataccagttgccagagctttgctgtatcggactctcttctggggtggtcgtaccaccgggaatatgcaagcggacgatctactcgcggacattcaataacgtgtgcccaagcgcttatagttacgcctacgacgttgataacagcagtttcacttgtccaaacttctccaactttgtcatcacgttttgtccgtctagctcaacggtcccagaggcaggaaacatcaatagctccgcggtcccagaggcaggaaacatcaaaactggaacagaagcaaaaggtaagtttttcttttctttgacctacgggagaatgtatcattttattttttgttaatcgaaataatttctgtaatacatttgcaggaaatattccattgaggttaaaactcatacttggtacactttagaagaaacctggtgaaattactctcaactatcttactcatttttgatgtatataacacctaagttttaaggcttattctcttgtaggagtttcatcagtattggctacaatgatcattattgtgattgtgggaaaggttagagcaaataatatgagaaagagtgatttgaatgagaagaacatggaagcagtggtaatgttgaaacgatttagttatgtacaagtcaagaagatgacaaaatcatttgagaatgttcttgggaaagggggatttggaactgtctataaagggaagttacctgatggcagccgagatgttgcagtgaagatattgaaggagtcaaacgaggatggggaagacttcatcaatgaaatagctagcatgagtaggacatctcatgctaatatagtctctctacttggtttctgctatgaagggaggaagaaagctataatttatgagttgatgccgaatggatccctcaacaagttcatctccaagaagatgtcggcaaagaaggaatggaaaacgttatacaatattgcggtag

SEQ ID NO: 184409 - DNA, 318 bp, Arabidopsis thaliana landsberg
  unsure (1)..(318): unsure at all n locations
atgtcggaagtcaccatcaagcaattggccgagctcctgggcacgccagccgacaagctgctggcgcagcttggcgaagcgggcatgcagttctccaatcccgatcaagtggtcagcaacgacgaaaagtcgaagctgcnnnnnnnnnnnnnnnnnnnnnncggcaagagtgccgcggccgagacgggcaagaccgccaccccgcacaagatcaccctgcgccgccgtcaggtgagtgaattgaaagtgtcgaccgccagtggtcggggccgtggcagtacctccaagaccgcaacgttgaagtgcgctccagcgcat

SEQ ID NO: 184410 - DNA, 685 bp, Arabidopsis thaliana landsberg
atgttgaacttgaaacaaaataggattgatgagatgcggaaagagttgtcgtctaagatggataaactatctgagaccaggtctcaaacgaggcaacttcaccaaggaggaggaagataccattatccaccttcaccaagcttatggaaacaagttatcatctctccctaatctctcaaatcatcatcttatcatctagaaacatttaatgatcagtgcattatttgatctcaggtggtctaagatcgcatccaacttcccgggaaggacagacaacgagatcaagaatgtatggaacactcatctcaagaagcggttggtgaagaggagcatttcatcatcatcatccgatgttaccaatcattcagtgtcttctacctcttcttcctcttcctcaatctcgtcagtcttgcaggacgttattattaagagtgagaggcctaaccaggaagaggagtttggggaaatcttggtggagcaaatggcatgtggatttgaggtggatgcaccacaatcactagaatgtctctttgacgatagccaggttcctcctcctatatctaaaccagactcactacaaacccatgggaagtcatcagatcacgaattttggagccgactgattgaaccagggttcgatgattacaatgagtggctcattttcttggataaccaaacttgctag

SEQ ID NO: 184411 - DNA, 418 bp, Arabidopsis thaliana landsberg
ggtttcttcaaataacagatctttgcaagactctcaaagaacaaaagaattattcgattaacgcggacggtgttcttgatattattattgaaaagatgatgattcgatcgtacaagtgtttagaaaggtaaagataagtgttttagccttcaaagtcagagcgttttaatagcctgaagttgagagcctttttttgtgtttcccatgtttgttctttgaggtgcttttttatagggtccgagaatatcacctcttgcgatattctcggaaaatccctctttatctttatctcgttgaaagagatttgtctttatcctccgaagattctgggatttttgtatctggtgatatcttcgaagattatcggctaagtctttcgaagtttttctgtctaaaacgagatctttccgagccgtga

SEQ ID NO: 184412 - DNA, 46 bp, Arabidopsis thaliana landsberg
atgtgcgaaaacgacaacaaggagaagcagaagaagaagcaacacg

SEQ ID NO: 184413 - DNA, 328 bp, Arabidopsis thaliana landsberg
atgactgaagtcacattgaaccaagaagatcactcgtacatgtttgatgatgaaaatactcctgtgaaggcatgtagcgagttgggttaccatgtcacaacaggtgggttttttttttcaagtgatcgatcatttccattcctgatgtatggttgacgatggtttctaatctaaagaatctttggctttagaggacacgaacaggaaaatggaagtgcacagtgagacacgctctgctttaaaaaggcgtcggatgttgcagtttgaagaccaacctgaaacatcccttttcagcagtgagagtttctctgcaatcttaaaatcaagt

SEQ ID NO: 184414 - DNA, 37 bp, Arabidopsis thaliana landsberg
atgctggcatttcgagatcgcagccgtcccaatcacg

SEQ ID NO: 184415 - DNA, 111 bp, Arabidopsis thaliana landsberg
atgaagaaggatgttcttggtttcatcgtcgaaggtaagcagattagagtaaaagccgtggttgagaaagaggcaggaggaatctgctgcggacaatttggtggagacttc

SEQ ID NO: 184416 - DNA, 76 bp, Arabidopsis thaliana landsberg
gtggcccgagaaatgtgcaagggaagtggagccaagatcagaaactatttgagtcttggagagatgccaagacagg

SEQ ID NO: 184417 - DNA, 69 bp, Arabidopsis thaliana landsberg
tttgatttgcctcttgaattgggatttgtcgacccctacaacaagttaactggtgtcagtgctctgtga

SEQ ID NO: 184418 - DNA, 151 bp, Arabidopsis thaliana landsberg
agacacgacaattttgggagcagatgcaaaagaatttaggccagagaggcatttagatttgcttgtggagtttaaaggacaaggctacatgtacacccatttggatcaggtagaaggcgttgtcccggaatctcatggcggacccacatga

SEQ ID NO: 184419 - DNA, 1186 bp, Arabidopsis thaliana landsberg
cttcttgttgtcgagctttacttgtgtgacgtgttacggcgccaaggagcatctgaggcgatacggtttcaagagatctttgactgatattcctatcgtctctgttgtcagatctttccttgtcatctgtaaggtcatatcgttgcttttttcttgctcttgtttaggaaactgtttgatctttatgaatttgtcatagtaaagttttggtctttggctgttactgttcaaagctctgttggttgagttagctctcgcagatagctatgattgatgatcaagtctgctcttttaatgatcattagttgtacattttgtggaataggtatctatttactctcggacgttcctgctctctcgcacggtccttaccttggaactgtatctctgtgttctgtggtttcggttcttcttctttcagttaaagcttgccttttcactgttaattctcaactcaacaacgaagcctcgttctctccatctaggaaacggctccacctgaagaagtcgtgggggatgccggttttgttcctctcatctgtggtttttgcccttggtcatacggttgtagcatacaggacaagttgcagagcgaggaggaaaattttgtatcaccgagttgaccctgaagctgtgagtttttgttctttctttcacgtgaatctcattaatagaagtcatttgctttgttttttttttgtttaaatggactgtgtgtggcaggttctttcatgcaaaagcatcttctctggccaccagaaagtcccgcggtcacccactcctgtggttggaaaggcctccaagtttgatggagaagcaaggcgaaagcctttgtcccacgatgaaggagagcttccagtgagattgcttgctgatgttgacagtttattcgttacaatccgaggcctcactgtgcattacaagctttgttcacctggttcaccttggcagtctatctcctcaaatgttctcgaagccaattctagttacaatacgccagagataatggcaggaaggtcgaagtttgacagaaaagtgttgagtatggtcaccaaaagccagcatcatcatcaccacaggagctacaacagtttgtttaacaactcttccttgcacgaccctcttctggatggttatcctaaatctcctcttcttttcaaagagattaaggaaggaacgggactag

SEQ ID NO: 184420 - DNA, 235 bp, Arabidopsis thaliana landsberg
atgggtttccagaagcaagtcaatggtgaagttgattggtatgatgttttagcggtcgagcgaaccgcagattttataacaatctttaatcgttatagcacattagctattgacatttcccttgaccgtgacgaatctgttggtagtggtgttaaagaggcactgaagatactcactgatgcctcgaaatattttctcgagagacgcgaacttttaccttcacggagagtttctg

SEQ ID NO: 184421 - DNA, 546 bp, Arabidopsis thaliana landsberg
atgaggatggcagagagctttatactatatttccatggcatttataaaacagcagcattattaaagtttccggtgtttatgcttgttataaacttgttttacgaacttttacagggggttgttggaatggtttttggcgacaatcaatcttctaatgaagacaggtacattttcttctcttttctttgctatgagtctggagatatatgctatcatggctcgtaagtatttcgagaaatgaagtaatgaggattggatttttatttggtgtatatttgtagttacattcaacgcctgctggatcgtataagtaatggtaccttgcctgacgataggagaactgctatagtagaacttcagtctgttgtcgcagaaagtaatgctgctcaattagcttttggagcagccggtatgtgtctttctgttttatgttatgtgtctgattgattgtgagataaaatctaaagttacaatttacattctgtcatttcaggatttcctgtgatagtgggcatcctaaaggatcaacgagatgatcttgaaatg

SEQ ID NO: 184422 - DNA, 24 bp, Arabidopsis thaliana landsberg
atgtcggagaagattgtggataag

SEQ ID NO: 184423 - DNA, 554 bp, Arabidopsis thaliana landsberg
agacctccaaggcacatcaatggaaggtcctattccagcttcgatttcaaacttgaaaaacctgactgaattgtaagcaacccgtacttaacatttaacatcttttccaaacttttgagcttaaaaaatctctctctgtttatcaggaggataacagatttgcgtggaccaacttctccttttccagaccttcaaaatatgacgaatatggaaagattgtaagtttttaagttttaactttgacttgaagttaaagaaactctgtttccatcaaaccaacatttgaatatcttctttgcttattatgaacttcatcagggtactaagaaactgtttgataagggaacctataccggagtacatcggtacttccatgactatgttgaagttactgtaagtcaaaattctcttgctagttcttactgcctaaaggctaaattttttgatcaagttctcacattaaagtatgtatgtgtgttcagagatttaagctcaaacatgttaaatggtacaatttcagacacatttctgagtctgaacgcattcaactttat

SEQ ID NO: 184424 - DNA, 180 bp, Arabidopsis thaliana landsberg
aacccccacacgtcattcagtctggctcaagcgggaaccatacactaattcacggagaacctatcaagactcgtactattttgaattcctcttcttcttcggaacccgcacacacagtacgctgtgagatccccacaaagagtgattcgaaccggaaaaatcaaaactttgccgaaatta

SEQ ID NO: 184425 - DNA, 1436 bp, Arabidopsis thaliana landsberg
atgactcttatgcattatctttgcaaggtaaaatacaatgcgaaagaaatagatgctgcatgttttagaaatgatttgcttaggaggaatacataatcctgaatcccctgctctttctttttccgaggtccttgcttccaaggcagcagatctactggacttccataaggatcttcaaagtcttgaatcaactttagaggtttgcctttgtacttactttttccgtccttagcgcagtaagtggctcatcatttgattgtcctgtctattgcagataaatttgaagtctctggctgaggaaatacatgctataaccaaaggattggaaaaactgaagcaggagctcaccgcatccgaaactgatggtcctgtttctcaagttttccgtaaagtatgttgttgtttttctatctatctcgatcttttgcatatcttttatcaaccgtgaatttgagattaggtccatgactgtgccacataacgtaattttccatcacttttgtaaaatctagtttttatgtttttcaacagttattgaaggacttcatatccagtgctgagactcaagtagcaactgtatcgactctttactcctcggcggtaatttttgtcaacctctactagactccaagcgcctaacctttggcaatgtgtttgatcctgagattactttttttttttgaataaatcttatgatggacgacagagaataaatgctgatgcacttgcacactattttggcgaggatcctaaccattatccatttgaaaaaggtatacaatgaacatcatcctcatttgtgctaatacattagaagaaagtggctcattgttatgttgttgctaataagaatacatgtggtgatcgattgcctgcagttagcgcgacactcttgagttttataaggttgtttaagaaagcacaccaagagaatgtcaagcaagaggacttggagaagaagaaagctgcaacggaagatgtatttggtgggcctgaccacaacatagactcagatacttctttagatgattcggaggccaaatcgccttctagaataagacctccgccttctataccaagacccccttcacgtccaaggtatgcatgctgccgaatacctgcagttaatccgcctcctcgcttggtgtgtggcccatatccgctacctcgcttagtgcgtgtaggatcccatcaccaccacctccctcgatgagtggaggagctccaccgccaccacctccacctccaatgcttgttgccagtagaacagctccacctcctcacttgagtcatgtacgttcaatccctttccaaactcgcttggtgatgggcacatctccgctacctcttttagtgcgcgaaggagccccaccaccaacacttccctcgatgagtggaggagctccaccgccaccacctccacttccaatgttaag

SEQ ID NO: 184426 - DNA, 417 bp, Arabidopsis thaliana landsberg
cactccagcttttagcattcgaaacactctcatccattgctaagctaggacctgatgatgaagctaacaggacatttgctgagaggtctatccatcgactttcctcactgcaggcaagccggacatctagcatattcgagtgtgaggctgctgatgaggtgtgttcaattgtttatgtacgtacataaaaagtaaatgtacattctctatggttaacaaactcatttgtgtaggttgaggtcaactatattgtgaaaccatcggacaatgtgtaggctgatgatgaagttgatgatccaaaagttgattacattgagcgactgttgatagatgggcacgagtggcaggaggatgaatgggatcgaggttatactggagtaacaaagcaggtgtgcccacaacagcaagaagagatag

SEQ ID NO: 184427 - DNA, 95 bp, Arabidopsis thaliana landsberg
atggatgatgttgctggtttacaagaggcagctggaaccagatttagccagtttgagctaatcggaagaggatcgtttggtgatgtctacaaagc

SEQ ID NO: 184428 - DNA, 342 bp, Arabidopsis thaliana landsberg
atgtggtcgaatgggaggtcgagtgaatgcggaatgaagaaggctctgaagcttgtcatcgagtatgcagtcgagtggtgtgatggtgatactcgacttccaggtagagtgatgaggtcgagtagaggtctggcaatgggatgaagtcactcgacctgggggtcgagtgatgtgatcgagtgatggtcagaagatggagatgaagtcactaaacctgggggtcgagtgatgtgatcgagtggttgtcaagagatggaaatgaagacactcgacctgggggtcgagtgatgtgatagagtggtggtgtcttctactcccctagccagtcgagtggtctcttga

SEQ ID NO: 184429 - DNA, 934 bp, Arabidopsis thaliana landsberg
ttgttgctccttctgcttccgctattcctttaccttttctatcttccctcggtgcctggttccgccgcttccgtcgccagcagacgataagcaacgtcaatagcaagataaggactagtactccgccggcaacgcttccggcgataatcccgatcagcttcgctttgctcttcttagacttaggtataggcgttggtttcgcagacggcgcaggtgagattccgcatggacttcaatctgatcgccgcaaagagcgacgtttccggtaaacgatgactcatcaaactgcttcaaagctcgtgtcagtggaatttgaccagagagcttattgttggatacattgaagtatctgagacttgtctggttaagaggaggaatcgaaccagtgaagagattgtcctcaacattgagcgtgtaaagacgagagagacgaagcaacgagctagggattcgaccggacagtctgtttccggagaggaaaatagttttcaatcggtgaagagacgtgagagactccgggaagtcgccggagaagttgttatcgttaagataaaccgatttgaggttaaccaaaccggagaggttagggattgaaccggagagagagttagctttgaaactaagaaccctaagttgatccaactggttcaaactcttctcgttaagtgagccggtgagattcaagtactcaagaacaagcttggagactcttccattcatacattctctaacaccttgccagttgcagagatctgttcctctccaagaaatcgaattagatggatcgattgaagatttcaagcttagtaaagcttcgacgtcgctagatctcgccggagtaaccaaacagaagaagactgtaaatgcaaagactacgaacgacaccgtactcgaagacgaagaagaagaagaagaagccattgtcgatgaatga

SEQ ID NO: 184430 - DNA, 602 bp, Arabidopsis thaliana landsberg
agttgcgtagagaggcatgtgcttgcagaaaattatgaggttggcaagattattgcctttgagagaaggctctcacatctgaaggatgttttcactatagatggataccgaatgtaagtttccagttagattggcaagaacgaatctcttagagagccagacacaaatacttaggttcagattataagggagggacataaatatcaggtgttttcaaattttgtaaaatgagataatgattttacctaggaagaggtttgagttgagatcactagagccaacttctgatgattttactgagtattgacttaattactggaaaggctatatgtctatattaatttcatctgtagaggaagatctgcgtcaacattacagtaatctacatattcttttcttaggttttcccgcgggcctgttcagacaacccttcctcccgtcctcgaagacctactagattgtgtgcttcttttgatgaccaaatcaaggatcttgaaatagaggcctcaagagaacaaagtgagatacaggaatgtaggggacaaaagagggaggcagaaatgaatctcgagggtcttgaatcaacaatgcccacactgaag

SEQ ID NO: 184431 - DNA, 211 bp, Arabidopsis thaliana landsberg
atggggagttgtttttctcttcaagttagtgatcaaacactgaatcgtatctttaattgcttaattggtaaaggttatattcgaaacctcaagaagaatctcagagctctgcagagggaaatggaagatctcatagcaattcaacatgaggtacaaaacaaggtagctagagacgaggcacgccatcaacgaaccgcttccagctgtccag

SEQ ID NO: 184432 - DNA, 4249 bp, Arabidopsis thaliana landsberg
atgtctggcacggctgcttctgatgttttttccgagccttccgtatcttattcttcttcctcttcctccccgaatcaggcatcacccactcctttgtcaaacatggatcctgcagtttcgacggcgacaggatcgaggtacgttgatgatgacgaagatgaagaggacgtttgcaggatctgcagaaatcctggcgatgcagacagtccggttcggtatccgtgtgcctgtagcggaagtatcaaatttgttcaccaggattgtctccttcagtggcttaatcacagcaacgctcgtcaatgcgaggttttgtttcttttcctctttattatttgattgttgagattttgaagattcgtattctaattaagatctggattcgtgttgatttgaatgccttttaggaattttgatatgggtaaatgaatgggcaattgcatatttctgtgtgctcatattcaacgttgacagtttaaagtcttctcttttaatgtgtttcttaagtaggagttccacatagaagagaacacgtgcttattgttaatttcatctctgcaggtttgcaagcatcctttttcattctccccagtatatgctgacaatgctccgtcaaggctccctttccaggagtttgtagttggcattgctatgaaagcttgccatgttttacagttctttctgcggttgagttttgtgctttctgtctggcttctcactatacctttcattacattttggatatggcgtttggctttcgtgcgaacttttggtgaagctcaaaggttgttcttaagccacatctccaccacagtaattctcactgattgcttgcatgggttcttactatctgcaagtattgtcttcatcttccttggagctacttcattaagggactactttaggcatttacgagagcttgggggacaagaagagagagatgatgatgtggacagaaatggtgctcgtgctgcaagaagacctgctggacaggctaataggaatcttgctggagaggggaatggtgaagatgctggggatcagggtgctgcggttggtcagattgctagaaggaatcctgaaaatgttctggcaaggttggacatacaagcagctcgtcttgaggctcaggttgaacagatgtttgatgggttggatgacgctgatggtgcagaagacgttccatttgatgagctggttggaatgcaaggtccagtgtttcatttggttgagaatgcctttactgtaagttgatgtttctactttttggcaatgtatattttaaattctatgttccttcttcttcactattggccctcattaaatcttcatgatgtgcataattttgcaggttctagcaagcaatatgatattccttggtgttgttatcttcgtgccctttaccttgggacggattatattgtatcacgtgtcatggctttttgctgctgctagaggccctgctgtggctgcatcattgcatcttacagataccggactctcattggaaaatattactctgaagagtgcgctgactgctgtctcgaatttgactagcgagggccaaggaaatgggctgcttggtcagctcactgaaatgatgaaagtcaacggaagtgaattgaatggagcaaacaatacgctatcagttgctactgatctcctgaaaggttctactgttggggcctcaaagctttctgatattacaactctggctgttgggtacatgtttatcgtatttctggtgttcctttaccttgggatcattgcactgattcgatatgccaaaggtgagccactgactgttggaagattttatggtattgcatctatagtagaagctgtaccatccctccttagacagttcttggcagcaatgaggcatctgatgaccatgatcaaagttgcctttcttttggtcatcgagcttggggtctttcctctgatgtgtggttggtggctagatgtttgcactgttaggatgttcggtaaaacaatgtcccacagggtacagtttttatcaatttctcctctggcaagctcacttgttcattgggttgttggaatcatgtacatgttgcaaataagcatcttcgtcagccttcttcgaggggtactgtgttgtccctactcattttcattctagaaatagtttttttcgctgctgctatctaaatatatcttttcactttgtgccaattgcaggttcttcgtcctggagttctgtatttccttcgtgatccagcagatcctaattacaatccattccgagatttgattgatgatccagtgcacaagcatgctcggagggtactgttatcagttgcagtgtatggaagtttgattgtgatgctggtatttttaccagtcaaacttgcgatccggatggctccttcaatctttccacttgacatatcgtaagaaatattgactaacctcttgtttttggagattttgtgtttgattaggtctttcctaacttgggcatatatgcagtgtatccgacccattcactgagattcccgccgacatgcttctgtttcaaatatgcattccatttatcatcgagcatttcagacttcggaccacaattaagtcccttctacgctgctggttcactggggttggttgggcgcttggtttaacagacttcctcttgccaagaccagaagacaacattggtcaggacaatggaaatggtgaaccaggaaggcagaacagagcacaagtgttgcaggtcggaggacctgacagggccatggctgcgcttccagtagctgatgaccctaacagaagtcgcctccgtgctgggaatgtcaacacgggtgaggaatatgaagatgatgacgaacaatctgattccgagtaagttcttactttaaaaataagctaatagcttgtttgatattaagaattttggcatacttgaataaattaacaggacttttcgcttggtatatagagttgactaagtactttaagactcccattagggcttcccctgatatgaatgtatatttttagcaggtacaactttgtggtccggataattctccttctacttgttgcatgggtgactcttcttctcttcaattcagcattgatagttgtgccagtttcgctgggacgtgctctattcagtgccattcccattcttccaataactcatggcatcaagtgcaatggtaatgtttgttaattttgatcttctgagtcattctttggcacgggttacacattattaacagtattccctaaaaatatgtagatttgtatgctttcgtcattggcacatatgccttttggactaccatatctggggccaggtatgctatcgagcatgtcaagtcaaagaggacttcagtcttgcttaaccaaatatggaaatggtgtgggattgtattcaagagctcggtgctgttagccatatgggtaagtgttttgtgctgttaaattttcaatatatgagaaactccaaactctactaaatgtggattctgtacttttcaaatggtgattgaacaggtttttatcattccggtgctaattggacttctgtttgagcttttggtgattgtcccaatgagagtcccagttgatgaaagccctgtgttcctcctgtatcaagactgggctcttgggctcatctttttgaaaatctggactagactggtaagtaattttctccaacaatcagcaacttatttccgcagaataagatattttgtcactaaaaaacaacgtcaatggacaggtaatgctggatcatatgcttccaatagtggatgatagctggagagcaaagtttgagcgggtaagagaagatggcttctcgaggcttcaagggttatgggtacttagagagattgtgttcccgatcgtcatgaaactcctaacggctttatgcgtgccttatgtgttggcgagaggagtgttcccaatgctcggatatccgcttgttgtgaactcagcggtctacagattcgcatggataggttgtctttcggtgagcatcttctgcttctgtgcaaaaagatgccatgtctggtttagaaaccttcacaactctatccgtgatgaccgttatctcattggtcggagactgcataactttggggaagctgctttagctaatcaaaaccaaaaccaaaaccaaagtagtgaggatgcaggagatggtgtcttgataggacgagagggagatgttgataatggacttaggctcagacgtgcaatccaacaagaagcttag

SEQ ID NO: 184433 - DNA, 322 bp, Arabidopsis thaliana landsberg
caggttccgacaatatggtttatgggaaagatatgcaaaactatatccggataaagacttggtatatgtagttggctctagcgactatagaaaagactggttttacgctcaagtcactaggtgattctcatcatctccagcgtgatcatttctatttcttgattgacaatgacattgttacattttcgttcatagaaaaaaggatagcaaaacatatcaaggaacaacatggcaaatcaaattcgaacttaaaaacattgataagaatcagtcctatactctacgagtagccatcgcatccgctactttttcggaactccaa

SEQ ID NO: 184434 - DNA, 234 bp, Arabidopsis thaliana landsberg
  unsure (1)..(234): unsure at all n locations
atggcggccgacgagcgcgtggtgctgccgcaggtcgggctgttcgccgacggcgtggcggtggctcagatcgnnnnnnnnnnnnnnnnnnnnnnnnnnnntcatgtggatgaagtggtcaccgtcagtaccgacgagatctgcgcggctatcaaggatatctacgatgatacccgctcgatcaccgaacctgccggtgccctgggtgtggcggacatcaagaagtacgtctag

SEQ ID NO: 184435 - DNA, 241 bp, Arabidopsis thaliana landsberg
atggtgtcgtcaaagaaacccaagaagaagaaggcgaggagcgatgtcgtcgtcaataaagcgagtggtcggagtaaacgcagctccggttccagaacgaagaagacgtcgaacaaggttaacattgtgaagaagaagccggagatttacgagatctcagaatcatcgagcagtgactctgtggaagaagcaataagaggcgatgaggcgaagaaaagtaacggcgtcgtgagcaagagag

SEQ ID NO: 184436 - DNA, 300 bp, Arabidopsis thaliana landsberg
ggatagcttgcggccacccgggctccgccaagtaattcatcccccagcggcttccgtttccgagatctgcccggttaaggtgcgccggtaggaatccagggtggttcccagggcctggcggatatgcctccgcagtgtttcgccggtggcgaatcagcattcctgcgcgatgaggttaatgccgtggtcggtgcgttccagcagttcctgcgcgcggcgcagcctctgctcgtgcagccagctgagcgggttggtagcgatccgctggcgaaaatgaccccccacccagcggggagtcag

SEQ ID NO: 184437 - DNA, 1059 bp, Arabidopsis thaliana landsberg
atggctgagcatccggccgttaaagttaccgttattaggtttttggtaagagaaacgttgaggagtaccgccgtcactttacgaccggcaccgtctaaaggcaaggagaagaactatgcctttttaacaaccaacgtggatccagaaaaagaaaaggtaaatctcttttgatcccctatgtttacataccagttatgacaaatataactatagctttctttcttggaaaattaattataggaattagacgaaggggcattggaagacttcaagagcaaatggaaagaaatggtggagtacaaagaaaaggaaccaaacaacatcattgaagaaatactgtcaataggacagagtaaagactttgatctaatagtggttggaagagggaggataccgtcggccgaggtggcggcattagctgagcgtcaagctgaacatcctgagttaggtcctatcggagacgtgctcgcctcttcgatcaaccacatcattccatcaatccttgtggttcaacaacacaacaaagctcatgtagaggatattacggtttccaaaattgttagtgagtcttctctaagtattaacggagacacaaatgtatgataacaataaataaattgatctagtacttaaacttcggcttaatgcatggttaaagtggttagttgaagatgtagtttatctacaatatatagatagctcttgagtaagaattgtaagatcgtctacatataaataaccatgattgggcatcttgggcatcgtctacatataatttcatatttggactaaatagtaaatacaattatcatttgggccatttgagaaactaccggaaacctctcacgtgccagagacacgtaccaaaaaaaacccgaacgtttattaggaagaagagaaaaaacggaaaagaaaaaaaaacgcatcaatctgagcagcacaagtctgcgagatttggattagatctgattcaggttggattgatcatcgttcggagctccgggaaacatggcggcgacgagacaattacgaactctccaatctcagcctgaaaacaag

SEQ ID NO: 184438 - DNA, 182 bp, Arabidopsis thaliana landsberg
atgcaggtagagtttgtcggtggtccgatgtgctggaacactcgaaccttttctgcaactgcaggtactatgtgacaagcttatgtttggctatatatctaaattttgtctaactagttcacttcttaggtggtggagcattgtgtaacgggcaaaaaattcatgtcagtaagaccgatgct

SEQ ID NO: 184439 - DNA, 380 bp, Arabidopsis thaliana landsberg
ccgatggcggctggcgcatgtgtattgattatccagcgatcaacaagctcactgtcaaaaatcgctatcctctgcctcgcattgatgacctcattgacactctgcgtggtgcgcggtttttcacttcgcttgacctgcaggcgggctaccatcagcttcgtttgccggagtcagacatcccgaaaatggctttcacgacgccgttcggccactaccagtggaaggttatgcctgtcgggcttgctaacgccccagccaccttccagtctgtcatgaatcgtgttttcgcaaagcacctcaaccaatttatcatcatctatctcgatgatgttctgatcttcagcaaaacagcggatgagcatgcagaacacatcgcgatg

SEQ ID NO: 184440 - DNA, 1121 bp, Arabidopsis thaliana landsberg
atgaatcagaatgaaggtgacgcccttgtcgattccatcaaagcgaagttagcctttttatcttctctttccaccaaatgctgtatatacaaggtacctaataagctccgcagactcaatcctgatgcatatacgcctcggcttgtgtcttttggcccgcttcatcgtggtaaagaagagcttcaagctatggaagatcagaaatacaggtatttgctgagttttatccctagaacgaactctagtctagaggaccttgttagacttgctaggacttgggaacaaaatgctcgcagctgttatgcagaagatgtgaaacttcatagcgatgagtttgttgagatgttagttgtagatggtagcttcttggttgaacttcttttgaggtctcattatcctcgacttagaggcgagaatgatcgcatatttggcaattcaatgatgatcaccgacgtgtgccgtgacatgattttgatagaaaatcagttaccctttttcgttgtgaaggagatatttcttctcttgttgaattactaccaacaaggaacaccttcaatcatacagctcgcgcaacgccacttcagttatttcttgagccgcattgatgatgagaagtttattacagagccagaacattttgttgatcttctgaggtcttgttatctgccacagtttccaattaaattagaatacactacagtgaaagtggacaatgcacctgaagcaacagagcttcacactgctggtgttaggttcaagccagcagagaccagtagttgtttacttgacattagttttgctgatggagtactgaagattccaaccattgtcgtcgatgatctcacggaatccctctacagaaacatcattgggtttgaacaatgtcgttgctcaaataaaaacttcctcgactacatcatgctgctcggttgcttcattaaatcccctacagatgctgacttgctcatccacagagggatcatcgtaaactatctcgggaactcagtagatgtttcaaacttgttcaatagcatcagcaaagaggttatctatgacagaagattctacttttcgatgctctctgagaaccttcaagcttactgcaacacaccatggaacag

SEQ ID NO: 184441 - DNA, 394 bp, Arabidopsis thaliana landsberg
tttcctctcgtctctcggagtggaagaatccggaaacttgttctggaatcaaaagacacgaacctgaacctagccgctgttccaggcggctcagaatcgttcgagcttgctgcaaagttctgctacggcgttggcgtccaatataactcgtccaacattgcggcgctgcgatgcgtggctcattacctggagatgacagaagacttgtcagagaagaacctcgaggcgagaacagaggcctacctgaaagactccattttcaatgacatatcgaattcgatcactgttcttcactcctgcgagaggctactgcctgtagctgaagagatcaacctcgtcgggaggctggtcaacgcaatcgctgtaaacgcctgcaaagaacagctagcctctg

SEQ ID NO: 184442 - DNA, 249 bp, Arabidopsis thaliana landsberg
tccgctaacggagttacaactaatgttgcccctccagcaaaatccgtttctgaagataactccgtggttagtaactatgttttttgtgggataacatatattaaaactgtcttattttttgcggttttttaaccaggattgcatttacaccgtttgtgaaattaatatttttcctggttacagtgtgaaaacaatgttcttattgatgaaaaacctccatccgaagccagcctgatccatgattcacag

SEQ ID NO: 184443 - DNA, 560 bp, Arabidopsis thaliana landsberg
atgaaagctgaaggtccaaggcccaatgctgtcactaacagtgtgatcattgaaggcttgtgttttgcacgtaaagtaaaagaagccgaagatttcttcagtagtttagagcaaaaatgtccagaaaataaagccagttttgtgaaaggttactgtgaagctggcctttctaaaaaggcatataaagcattcgttagattggaataccctctgcgcaaaagtgtgtacatcaaactattctttagtctctgcatcgagggttatctcgagaaagctcatgacgtactgaagaaaatgtcagcttatcgagttgaacctgggaggagcatgtgtggcaaaatgattggggcattttgtaagttaaataatgtgagagaggcccaagtgttatttgacacgatggttgagagaggactcatccctgatctgtttacttatacaatcatgattcacacctactgtaggctaaatgagttacagaaagccgagtctctttttgaggacatgaagcagagaggaatcaaacctgatgtggtaacatacacagttttgcttgatag

SEQ ID NO: 184444 - DNA, 352 bp, Arabidopsis thaliana landsberg
gtaatttttctactgagtgccttttagcatacaacatgcgtctattttacttttgtgtcactcgagatttatattcttttattcaggctacagatgaaactttggttttggtacttgaaactcttcaacaagcaattaaagctggtaagtatacatatttttactctttgcaaaaaactttcagaatctagttatgcagtagttcccacctatatcttattttctttatcatctgctaggccatgaagcatcagcttcaatagagtctattatctctccagtgattcttaatgtgtgggtggcacatatttcagatccctttatgagtatcgatgtaattgacgtcctggag

SEQ ID NO: 184445 - DNA, 2535 bp, Arabidopsis thaliana landsberg
atggttcagacattactttttgtttctggacttagcactttattgcaaagtttctttgggactatacttccagcggtcattggaggctcttacacgtatgtaccaaccacgctttccatcatcttggctggtcggtacagcgacattttggatcctcaggaggttagtaaaagaaaaacagagcatctatctgtttctgtatcatattttctcattgatagagtgaaaatatgcagaaatttaagaggatcatgcgaggaatccagggtgctcttatcgttgcctcgattcttcagatcgttgttggcttcagcgggctttggcgcaatgtagttaggtaagctaagaacactcaatcatatacacaaaaaacagattctcttctcctactttctgatgattgttcttactttctttaggctcttgagtcctctctctgcagttcctctagtagcactagctggttttggactttatgagcacggtttccctctggtgtgttattgctttacttgatctctctttcagttttataacatttttttgaatacagagttgttttgtttctggcagctagccaaatgcattgagattggactgcctgagatcatacttctactcatattctcacaggttaagctcttcttgttatttcataagaggtgataactagatattcatctttttggtttctttttgcagtacattcctcatctcattcgaggagaaagacaagtctttcatcgatttgctgtcattttctctgtggttattgtctggatttacgcgcatctacttaccgttggtggagcctataagaacacaggaatcaacactcagacaagttgtagaacagatcgttctggcctcattagcggctctccatggttagagaaactttgtcttttatctttgtgcattctctagtgacattatttggctacataatttggtacaaatttagactaattcttgataattccaggataagagtgccttatccttttcaatggggacctccaacatttcatgccggtgaagctttcgctatgatggctgtttcatttgtttcccttattgaggtcagatttaaaaagtttctttttgctgtaacaacaataaatacttagatcattgggcatattcatgttcttatacttttgattcatgtaaacagtccacagggacttacattgttgtgtcgaggttcgcaagcgcaactccgcccccgccttctgttctcagccgtgggattggttggcaggtaacattaacaaaaaaaaatcatcttaattttccttactagattatatatataagcaaatgcatttatgtatagggtgttggagttcttctctgtggattatttggagcaggaaatggagcatctgtgtcagtgtaagactagtttacctatgaacaaatgaagtatttgaaccgaaaccaacaatctttattgcaaaatccaatggttataatgatgatcttgcagagaaaatgccggtttgttagcgctaacacgcgttggtagtagaagggtagttcaaatatcagccggttttatgattttcttttccattcttggtaaatttggagctatctttgcttcgattccagctccaatagtcgcagcattacattgcttgttctttgcttacgttggtacgtttcttgaaacacctcttcttttgttcaaaccgctaggttttttaaactgcaaaatgagcaaagaaatgaaattgcatgcaggtgctggtggtctaagcttacttcagttctgtaatctacacagcttcagaacaaaattcatcctcggattctcggtcttcatgggcttatcgatacctcagtactttaaccagtatacagctgttaacaagtatggaccagttcacacacacgcaagatgggtaaaaagcaaaacaagaatcttaatcttttcgatatcttcccacttatgataagtttataaccaaaacacaaagctgatttgttgtgttctgtgcagttcaatgatatgatcaatgttccattctcttctaaagcctttgtggctgggattttggcattctttcttgatgtaacagtgtcatctaaagacagtgcgacgaggaaagaccgagggatgttttggtgggatcgattcatgtcgttcaaatcagatactagaagtgaagagttttactctttgcctttcaatctcaacaagtattttccctctgtgtgatcaatgaaaattatgctgaaagtgttcattggcttggcactgactctactcttatgtataacattttgtatatcaagtataactttattttctcaaactgcgtcccgtttatttattttggtaatgtacttctttgttgtgtttgcctgttttcagcgtatggcactttgcacagcttgccgtttcaggtagatgtgtatttgactgttttttctagctggaatatttttctttctttagtattgtattgggctgccaatgcgagcccaagcccgcataggcgcataccgcccgttccgacactttga

SEQ ID NO: 184446 - DNA, 100 bp, Arabidopsis thaliana landsberg
cggccacagataaaccgtacttgcgcattcgatggcgtggttccgtggctggtctgggcgccagggtgacccttggtcgccgttggagtttaccagcgag

SEQ ID NO: 184447 - DNA, 1082 bp, Arabidopsis thaliana landsberg
atgactgattcttggtggcaaagcttcttccgggctcttatcggctccggaagcataggaagcggaacggtggagtctctaggaggaggcaacgccggcggcaacacaattctgaagctatcgtctgttgccgacgaacgggagaaaagaggactgattgatttctcgttctgcagaattgccttcttaaccaagaaatttatattagggttagggttagtattttctcctggaaaaactctgaaaccttgccactcattatcgttagatttacgggctaaaccatcgtcaaacgcaagcattgccggaggaggcataatgtcaacgaaaaaaacaagattagattttgaaaatgggtttataattttacgggaaaaaaatatggagaggatagagatataagtagtaggaatataaaagaaaatggtaagcacgttcatggcaaaagtagtgacttacatgtcggttctatctttgtcctaagattttgacatgtggttactctcatggttaatgtgtgtgtatagatcgaaaatatattcaaatatgagaattcaaggaaaaaatataaggtttgatttttcaattttaggatgttagatggagaccgatgaaatggtttgcacgtagtttgtgacttgatcattctgacttttgagtttagtaagcgtttgtgtgtgtgtatgtgttcctctgccttttctataggtaagtcaacacttttgtgacatgtggaattagttctacttacgaaaaggattcgaaattacttgccaagaaacattcgaaatagtacaaagtcacatgtgaacatggtacatcgaacttgattctcattttatctgaaaaatcaaacacttcataaacctacaaaaggtttaagaaagtattgcgcattttccttctccttagacaaaacaataagtattaaaccttctgtgcttttttggcgttctagaatcccggaaactcgattaaccaataaagagaatgcaattgtgcaaatgttgacaatcggttctttgaaacgttccacaaacgtccaaatcaacaaatgtttaacaaaaattccatgttcatag

SEQ ID NO: 184448 - DNA, 276 bp, Arabidopsis thaliana landsberg
gatcatttaaaaaattggagaaaatcaacacttatcattacttcaatcctcttcctcgcagctattatatggggaattggtaaggactcaaattgtttttattttttttcactcatctcataatcttttggtatagcttagtaaatttgtttgtttaattgtttgtgtgtagggatatttatgaatagtgtggataggtctaatgaagtaagtgaagacgatgaggtcgaagaagataaattggaaagcaaaacagagaactctactctcgcctaa

SEQ ID NO: 184449 - DNA, 154 bp, Arabidopsis thaliana landsberg
atgggcctctacatcgagatggccttcgagagcgacctgcagaagtaccccatttggactgtcgaccggagttgccacacaactcgtcgacatgttcgcgccgcggcacggtcgcgcgcccacacgcaatgtggagccacgcgcgaaacgcccg

SEQ ID NO: 184450 - DNA, 174 bp, Arabidopsis thaliana landsberg
atgcagctcggggggacttttattggtgaagatgtccgaacatctacacaggaaatcccaacagacctgagcgtgtggcacggtgccgatggacatgtttggatagagggctcgaaggttctacataacgccaaggaaacattggaacttgtgtgccgcgacacattgtggagg

SEQ ID NO: 184451 - DNA, 173 bp, Arabidopsis thaliana landsberg
atggtggattgcagcgatgtttacatcagcttcgacagaagtgaggatacggtgcggtactcttttgtcagccacctctgcgccgctttccgccgcagaggaatatcttcgttcatcagagaaaacggctccgattcggaaagcaatggattctccaagttggagacgtctag

SEQ ID NO: 184452 - DNA, 440 bp, Arabidopsis thaliana landsberg
atggttgtacaaactggtgacctcgcattcatttccatttcaggatctagttctctaaaccagtgggagctagaggatttgaaggtattgctaatttcaagcattaacatcgacgtttgttttaaaattagtgaagtttatgtaagaacttatgcatctccagggctcgattgtgaacctggaaatggagaatgaaaaggttcgcaaagtaccacattctgtcattgctcctctagcagtaagcggtaagagcttaattttctgtcttttcttcttcttcaaactagaaatgctttttcaaaatcatgaaataatttgcttaattatttaaaattcttacagcttcaagaggagtggcttgtgtttttgctgaaagaagacgagctttggtgtacatattggaagaagatgaagatgaagaaatctctgatgaaaagtaa

SEQ ID NO: 184453 - DNA, 444 bp, Arabidopsis thaliana landsberg
atgaagtgttgtaagtttgttgcagtggctttgatgagtcttctgatctcacttgcttccgttgaggcggcaggtgagtgtggtcgcatgccaattaatcaagccgcggctagcctaagcccgtgtttgcctgctacaaagaacccgaggggtaaggttccaccggtttgctgtgccaaagttggtgctctcattagaaccaatcctcgttgtctttgtgctgtcatgctctctcctttagcaaagaaagccggaatcaatcctggaatcgcaatcggcgttcctaaacgctgtaacatccgaaaccgccctgctggcaagcgatgtggacgtatgtattccaatattcttgtaaatctcatgagcttaatataacatgaacttgatatgatcacttcactaactttttcttatgttttgtttgcaggttacattgttccatga

SEQ ID NO: 184454 - DNA, 1170 bp, Arabidopsis thaliana landsberg
gtagtcttcctggcacggcgccgtgtgggtttgtggtcagcgatgctcttgaacctgacaaccctatcatttatgttaacactgtttttgagattgttactggttatcgagctgaagaagttattggtcgaaattggtgagtttgctcttcttgacttttaccctaaatttgtggtgttgattttgttttactgtagcgaattttgtctcatttgtggtattggtacgatgttactagaaagctttgttgaaagctgttttgacagaaagaaatttatatttcgattcattattatggttcttgttgattatgttaggtattattagctagaaccattttggaatcatgggttggttattgaattagaagtttgttgtggaggaactaagctataatgtgaggttcagtttgtaatgtttcctatgtctgtggattagtgtttaggaactcgaactttgatagtttttcacatgtcttgattggtttatgaaagccttgggattattgatttttgtaatattgaattgtaatgcgtttttgtctaagtatatatgtttctgttgaatatgtttctcttgggttttagcggcttttgatctggtattccatgttaattatgcatatagtttagtctttgttcaatacttgtgtgtgaggaattgttcgccaaagtactgtatctgtttagttgttagttatctattcgatgaattgaataggagggtcttgtatctgatatgtgctgttgttttttatttggcagccgtttcttgcaatgtagagggccatttactaaaagaaggcatccaatggtagattctacaattgtagcgaagatgcgacaatgtctagaaaatggcatcgagtttcaaggcgagttgctcaactttcggaaagatggatctcccttgatgaacaagctgcgtctagtccctatccgtgaagaagacgaaatcactcatttcataggcgttctcttatttacagatgcaaaaattgatcttggcccatctcctgatttatctgcaaaagaaattcctagaatatctcgctcatttacttctgctttaccaatcggagagcgtaatgtttctcgtggactaagtgggaaaatcgaactgagtgatgaagtaatagcaatcaagatattgtcacagttactccggtga

SEQ ID NO: 184455 - DNA, 122 bp, Arabidopsis thaliana landsberg
aaaaaacttcaaaatccttccgatggctccatcaatcaaatattattgtagaaagccaccgtcatatctccgttgaatcatttggcttgaatggacccggaaatgatttaccgatttcttga

SEQ ID NO: 184456 - DNA, 581 bp, Arabidopsis thaliana landsberg
atgacagaagcaggaccaattgatctgatcgatgatgacaacagcgatgaagaaggtggcattgataaacagtcgagagggaatctgggttacgatctgcctggatccaggcctaaccgtggcaggcccattatccggacaaaaagcctcagcattgccccaactggaaggagctttgctgctgcaacaacagaaggagtcctcatcttttcaattgacgataccttcatctttgatccgaccgatctagatatagatgttactccagaggtgagccttttgtaaatcgctgatggtggttatagttctgattattggttttgaaatgtaaagctaaggtgttatttgtgtaggctgttgaggctgccatagaagaggatgaagttagcagagcacttgctctaagtatgcgtttgaacgaagatagccttatcaaaaaatgcatcttcgctgtagcccctgcagacataaaagctgttgccatctctgtccgccagaaatacttagaaaggcttatggaagctttggtggatctgcttgagaactgtcctcatctggagttcatacaacactggtgtcag

SEQ ID NO: 184457 - DNA, 189 bp, Arabidopsis thaliana landsberg
gatcttcctcaggttttattgtacaaagtacagtttctcagagatacacttctaaaaccagctcttataaatgctgatctaaaaattatctctggcctggcatgcttgatgtctgaaatcggacaagctgtgagtactagactacttgttccactttatcccctcatggatgtacatccaatgctgtga

SEQ ID NO: 184458 - DNA, 381 bp, Arabidopsis thaliana landsberg
atgcataaggcagggcattccaaaggcgaaccctctacctcatcaggaggcaaagtcaaagatgttgctgacctcaggtctctccttttgttccttgggaatacttgttgtttttggttattggagattagagaaaaggataatcggttaatccggttaaaattggttttgttctgaaatctgtttttggtttgcagtgaatcacagccaggaagttcgcagctgaccatattcttcggagggaaagttttagtatataatgagttccccgtagacaaagctaaagaaattatggaagtagcggaacaaggggagcctgtgactgagattaacattcagccgccaatcaatgtcgtggtcgacatatacgagtacagcatg

SEQ ID NO: 184459 - DNA, 116 bp, Arabidopsis thaliana landsberg
atgaaggatagcatggtagatcagttctttgagagagtggaagaagaggagcgatgggaggatcttaagctttcaccaaggaacaacttgcatgctttaagaattaaaacaaagtt

SEQ ID NO: 184460 - DNA, 445 bp, Arabidopsis thaliana landsberg
attagaccaccaatctccagcgttgagcagagagttgtttttcgaattacgcagcgtaaacgataacttcgagattattgaatgtggtgccagattgattgaagaagagagcattgaagataactatgagtctggatcagaccaagcctccgaagaagatagcatcgaagagaactatggatctggatcagaccaccaagcttccgaagaagatagcatcgaagggagctatgaatctggatcagaacaagcgtccgaagaagacagcatccaagaagagaactatgaagagagcatccaagagagctatgaagctggatcagaccaagtgtctgaagaagagagctatgaatctggatcagaacaagcctctgaagacgaaaatgagtttgaacacagcgaagaagcctctgaagactacaaatggagtaatactaatctgtga

SEQ ID NO: 184461 - DNA, 250 bp, Arabidopsis thaliana landsberg
gctgggactccttggttttcaatattaacgagaaccggagtattcaaaggaaaagataaccatgccgagtttcctgctgatctggtaagcatcaacatcatcacttagccttgagaagaagattattattattcccgtgagtttatgttcatgtgaaactgtttaacttcttcaggtcgttgacaccgtcgaggaagcagttgatttcattttgacaagagagtccgccaagcaaagcttactgtcatga

SEQ ID NO: 184462 - DNA, 590 bp, Arabidopsis thaliana landsberg
atgcatgacacgtcaacagatagcatgggttacttcttaggagaggtatgcttttcagtctttaataccttccttttagagttaaaactttggtttatattggtagtaaaagtatcaaagagataattggattataagttctccacgtatgaactggatgtacataaactgtttttgattagagaaccaaaaagacaggctacatctagattccttttggtcctcattgatgtgccattataacatattatttccctttttaaaaacgttttcaggtcttgttcccatatcacggtgtgacagatgtcgagctcagcttatcaactggtgaatacgttgttgttagaaaggttcgatagtaaaccaactcccacatgagaaaaaccaacaaagtctcctttaattcatattaaccaatacggttattcagtagtgtttgtttgatataccacttctctatttgtcattgccaggttacaggcagtggatgggccgaaggtgaatgcaaaggcaaagctggttggttccttaatgggtacaaaaaaaaacgggaacgagttcttgctagcaaagtgtccaaagttttctga

SEQ ID NO: 184463 - DNA, 74 bp, Arabidopsis thaliana landsberg
cgaaggcgaagctgaaaccctcatcggataaacaagaatcgccggtacagtttcgaatggtccgatcatcctag

SEQ ID NO: 184464 - DNA, 562 bp, Arabidopsis thaliana landsberg
atgattctatgcgatgaaatggtaagatgaaacttcttatctttgttgaatctaatatatgaagactataagagatgaaactaatgttgtttatgtaattttttaggaaatagtgattgatgcatagcttcttacatttatgatattaacatccatagagtttttgctgaaggacaatggtatttcgtgaaatgcattcacctcatattgatatgcgtttttttatcctctttcaccattcatacacattttagacctgccataaccgcttgatccgcactctttccaccaaaaccgcttgatcctcactttatctacttgatccgcttagactgctaaatccactttctctagtcggagccaaagtaaagtaggtgatatgaaaaaatgatattcttaataggtaaataaattgaattaaagtggtctaaaaagaatctttccacaagttcatgagatttcagctttcttctcattttttctctattcatttatgttcttcttcctttagtcctcttcatttaatctcagtctggcccgaccaggagttaaagtccgtgaa

SEQ ID NO: 184465 - DNA, 26 bp, Arabidopsis thaliana landsberg
gggaagcctttcgaaagttgcattag

SEQ ID NO: 184466 - DNA, 205 bp, Arabidopsis thaliana landsberg
ttagttcgtcggagtccgagtcgggtagaagttggtcgagtcgagagtcgtagtcgggtaataaggtaagtagttccgcccttagtcttttattctttttagaatattttgcttaatttggttttcggtccaacgcttagatccatcgttagtacgcgttggagatagcttggtcggatcaaaattattaggcggtcaagggtag

SEQ ID NO: 184467 - DNA, 511 bp, Arabidopsis thaliana landsberg
ccactgccccgaagaatggatcgagggggcccagttgctggacggcacgcgcgtgctgtatgaaactgtgcgcgaactcgaccgccgcctggccggctgaacacgcgcggcgcccgcccgggcgccgccgaatgcgctatcgtccgtactccgccacgacaccgcccgccgcatgcagcagaccgacctgaccgacagcaccgccgaccgctatctgctcgacgcccccggcctgtcgctgctggccttccacagccgcacctgcgccacctgcaaggtggcccgcgaacagttgccgcagctggacctgccggtcgagcggctgtgctggatcgacgccggcgacaacggcgggctggtggcgcgctacgaagtcttccacctgccggccctgttcctggtgcgcgacggcgccttctacggcccggtcaacgcgtcgctggccgaatgggacctgcgccagcagatcggtctggcgctgacagctacccggtcgaacttgtctgaatga

SEQ ID NO: 184468 - DNA, 526 bp, Arabidopsis thaliana landsberg
atgagaaggctagtgattgcttctgtgacggtcgtaaaagatgcgcttggatcacccctaaatctggtaatacaatctctcttgattcatccatttcattttttgttggaatacaattgttcccacttatcagttactctgatgtagtagcatagactagtgatgcttggctttaccggtgaattgtcaatgtccataaagaagttgaatagtttaaaagatttgtattctcttgctttggaagttagtttgtgaatgtagagagcaaatcttgactatgttttgtgatcaggcagatcatatctctattgaacaatgaccacagaaacaggaatttgtagagattagtttttgtcatttctctacgccgatgaggctaaggccttaacttccaaaggcttgaatcttttcatctgctatgactaaccggtactttttttctttctttttttttgtttcttgtaaaagatcaatgttacattgccttccatgatgaagaatggggagttcctgtccatgatgacaa

SEQ ID NO: 184469 - DNA, 90 bp, Arabidopsis thaliana landsberg
ggtgggattggtccatccggaccttctgatgaagatgtctacatgcttgacatgactaataacaagtggattaagtcagctcatttatga

SEQ ID NO: 184470 - DNA, 67 bp, Arabidopsis thaliana landsberg
atgaggtcaaaggaagatcgaaaaggacataatatagagaaatggaggaagaagaagaagaaatttg

SEQ ID NO: 184471 - DNA, 1312 bp, Arabidopsis thaliana landsberg
atggaaggaaaagttgtgttgtgtttcgcagcatctccaccatcaaatgatgctatagccgcagtaataaatgctggtggtcttgggttaatcatggcaaaaaatccgacccactcgcttactccaactcgtaagtttccctgggtttccatagacttcgagctagggaccgacattttgttctatatacgctccacaaggtatattttcaaaatgatcacaacctcttcaacaaacacattcaactaaacatattgtgtgtgtttttggtagatctcccattgtaaagatacaggcttcaaagacgctttttggacaatccgtgtcgacaaaggtagcaaccttctcgtcaagaggacctaattcagtttctccggcgattcttaaggtatatcataccatttcatacatttctaaccttttaagattctctgttttgtaaccgcttctatgttttgcagccggatatagcagcacctggtgtgaacatactagcagctatttctccaaatagctctataaatgatggaggttttgctatgatgtcagggacatcaatggctactcctgttgtttcaggagttgtagtgctcctcaaatcattacatcctgattggtctccttctgctatcaaatcagctattgttaccacaggttcttatcatcatcaaaaatgttgttataacagttttcttatcaaaaaacttattcatccgaaggaacacattttaacattgcagcttggagaactgatccatctggagagccaatattcgcagacgggtcaagccgcaagctagctgatccgtttgattacggaggaggactcataaatccagagaaagctgtaaaaccaggtctcgtatacgacatgacaacagatgactacgttatgtacatgtgctctgttgattacagtgacatttccatttctcgagtcctcggaaaaaaaactgtctgtcctaatcccaaaccttctgttcttgatctcaacttaccatccatcacaatcccaaatctcagagacgaagtcattctcacaagaaccgtcactaacgttggacccgttaactcggtatacaaggttgtaatcgatcctccaacaggcgttaacgtggttgttacgccagcggaactagcgttcgactatacaactacaaagcgatctttcactgttcggttctcgactacacacaaagtaaacactggttactattttggaagcttgacttggactgatactctgcacaatgtagccatcccagtttctgtaagaacacaaatcttgcaacgatactacgacgaaaactga

SEQ ID NO: 184472 - DNA, 60 bp, Arabidopsis thaliana landsberg
gtgagttctgcgacccgagcaagctcaagtgcgttcttaaatggaatgagtatcggatcg

SEQ ID NO: 184473 - DNA, 67 bp, Arabidopsis thaliana landsberg
atggctaagctgttgcttgtgaactctgtggaattaaccatggcggatttaagcttctgtgggattg

SEQ ID NO: 184474 - DNA, 134 bp, Arabidopsis thaliana landsberg
aactcaaaacgggacgatgatggcgacgacactggcgttgtggtcgagccaccggagagtggagagggtgcctctgccgcatcatacaatgcaacatgttgctgctatgcaccgctgcaagctgttgcagtggg

SEQ ID NO: 184475 - DNA, 103 bp, Arabidopsis thaliana landsberg
atggttcgcataatacagcctgacaaaatgtttgaccgggctgatcaattgtctgccataagcacaatggttcatttaccggaatgtcaaacaaaaagcgtag

SEQ ID NO: 184476 - DNA, 2103 bp, Arabidopsis thaliana landsberg
  unsure (1)..(2103): unsure at all n locations
gattgcttcaggtgccttctcaaacacgtccggtggaacagaaggtaagtgatgtgtggtgtagacatttcccactaagaccttaagctgagacacgtgaaacacgggatggatttgagagtactctggcaacttcagcttgtatgcaacttctccacatttgtcaacaatctgataaggaccaaagtacttggggaaaaatttgtgattagaacgtagaaccactgactgttgtctatagggttgggcttgggatcaaaacccttttgaaactccctttatagaaaattcttctaaactctattctcttcttatgttctttattgatttttactttaaacatgttttgttcttctataatcatatatgagtagttctcttgttaggtttagggttccattagggattcagattatatagttgatcgccaacctgtcaagatcatctttagagttcttcatcctaaattttcttaatgctagttctagattgatcacctagaacttgatcataggtaataggtacactgcgaaagtctacttattactagaactatcatagatgagcctaagtatttaagaagccgaacctggtgggctattaaagggcctgaggttaaattcctaagggaacccatccaaccttgttttaatggcttgtttatgattagagatttgtgggctagcgtcgtaatccttagttattaggcatagttagtaatgtggactagtgttggttgctttactttagtgatctgagttctagaacggttcgataacaatcctaatcataattaaatctactagttatctaatttttgagaatatctctagacttgacgcttttctccctctgatttacaacttgatatttaatgctttcttgtctttttatctataatctcttggtttagcttaactcgaaacctttgtctattatgtgattgcactgcaagaaaacatgtgatattccaacaaatgctttcaataatcgtattttgttaaaagtttcttaccgatatcctataaaattgcaacaaatattttatttattgaatatttattgcaaatttgtaataaattttggttatgataaatttgtcacacacgccgtagaaaaattgttgaaattttccaacaaatatgatattgttgcaaattagcaataattattaaattgttggaaattattaacaaaatatttgttagaaactaatttgtttgtaggaatttatttgtaacaagttaatgacaaaatatttgttggaaaagaaaaggaaaaaaaaaacagaaataatgaaaaaaaacggaaaaccccaaaaaaaatttaggtaaaataagattcatcttcttgtacttttcttcttctccttctctcttttttttgtaaaaactgttttcaatgacaggaccaaaaaacaaaaatcgtgagtggatgtataattatatagatgaaggtactggagaattaacaaaggaatttaaagaaggtcttgttgattttatgcgttttgctgcaaatcaagagattccattggagtgtggtaagatgtattgtccttgttctacttgtggtaatgagaaatttcttccagtagattctatttggaagcatttatatagtagaggatttacgcctggatattacatatggttttctcatggggaagatttcgaaactttagcaaatagtaatgaagatgatgaaattcatgggttggaacctgaagataataatagtaatgaagaggaagagaatataattagagatccacccggtgtaatatagatggtaacaaatgcttttcgcgaaacaactgaaagtggaattgaagaaccaaacttagaagctaaaaagttttttgatatgttagatgcagcgaagaaaccgatttatgatggctgtaaagagggtcactctcgtttatcannnnnnnnnnnnnnnnngaatataaaaacagagtataacttgtcggaggattgtgttgacgcaatcgcagattttgtgaaggatttactgccagaaccaaacttggcacctggttcttactatgaaatacaaaaattggtgtcttcacttgggttaccctaccagatgatagat

SEQ ID NO: 184477 - DNA, 140 bp, Arabidopsis thaliana landsberg
aaaaagtccgcattttcactctcactcagatttcttccctcttctcacctgcaaaaacccttgtttcccgctgtttcgtttcttctccggttgaggaaccaaaacgggtcaaatacgcagctgaatcatcgaattcttag

SEQ ID NO: 184478 - DNA, 740 bp, Arabidopsis thaliana landsberg
atgagcagtcacaagaacgttttgaagctgttgggttgctgtgtggagttttataaaccggttctggtttgtgagttagcagagaaaggacctctaaaactcgaggacatggacggtactccgttaccttggagtgcaaggttaaagatcgggaaggatattgcaaatgcggtagcttatcttcacacagcttttcctcgagtcataatcaacagggatgtaagacctcaaaacatattcttcgacgaagatgggactgcgaagctctcttctttctgtttgagcatatcgattcctgagggagaatcatctgtgtatgatgataaagtagtttatggggtatccgttgatccggagtataatggaacaggtttagtttccgaaaagtttgatgtctatagctttggagttactgaagatgtttatagaagtgataatattattgattcacagaggaacatatatatacagaactatgagtctagggtattacattaagagttaatgttaaatatactactatacatatatagatgcatgatgtaaggaatcattgatatgagtatcaatcgatgatatgggtatatccttaatagttacaatgctgtttcttctaggcggagagcttggcctcacctggttatctgctatcattggggagtttggattcccatttcctggttgtggtgaagaattagcggatcagttcatgtatgtcatagattcaaacatatggaacg

SEQ ID NO: 184479 - DNA, 391 bp, Arabidopsis thaliana landsberg
atgaaaagcgaagttgaggtcgatggccttggtttgattgatgtcgctgttgaagacgatagccttctcttctccgagttttccggtgaattacaatatctctgcttattctccttcaattttggatttatgggttctgggtatttttgttaatttctctgaatctacttgattagtagaggattttgattttgcttcatttgattgatacttgaacttagatccattgtaattgagtttaaagttggaatttgtttgccttttgtattacatttcagagacagataaggatgataaatgtttgaaggaggataaagatctaaacttcatgagggatacacagtattgtgatgatgagatacttgcttcttctgttgaagagaaggaagag

SEQ ID NO: 184480 - DNA, 462 bp, Arabidopsis thaliana landsberg
gaagctgtcggtaaaatctataaagaaattggagcaaccaaagtaataattagatgcgagcagtttcctgctttgccggatatctacttcgaaattggaggaaaacatctacgcctcactaaacatgatgtacgatcaggtttttctatcatttgagttgttttttaaagcctttttcttgacctttttttcttttatgttttttttttcagtacgttgaggtgaagacaaatcccaaaaaaagctgcagacttcgtattgtgaagtctaaaaatcgtcgtaaagactggtaataggctctaaagttgttgtaataaaattttctctaacccatatgttaagaaaataaccattggatttaaatgtagggtcttgggtgaggctttcatgacgaagttccatacggtgtttgattatggagatgttaaaaccccaagtatcggctttgctgaagcaatataa

SEQ ID NO: 184481 - DNA, 471 bp, Arabidopsis thaliana landsberg
atggcaacagcgcacgactacatccatgaccggccgtacactagcaccaactccctcgccaagtcgaccagcacccccgccttcctccagcgagaaaccacgtgcatcttccacaaattcagcaaccaaatctgcccagaaacccgcaggtagtgcctcttcagtagcttccacaggtagaacaagagatgttctgtgttatcgatgcaagggctatggacacgtgcagcgtgattgtcctaatcagcgtgttttggtggtaaaagacgatggtgggtatcctctgctagtgatttggatgaagctacacttgctttgcttgcggctgatgatgcaggcactaaggaaccacccgaagaacagattggtgcagatgatgcagagcattatgagagcgtcattgtacagcgtgtgcttagtgcacaaatggagaaggcagacagaatcagcgacatacgttgttcaaacaaa

SEQ ID NO: 184482 - DNA, 467 bp, Arabidopsis thaliana landsberg
atggcagctaggcaccgtcgcgggcagaacgagcaggttcccccgccatctcctccagctcccatagtgcaggagctgatggcccagcagaatgagattttgcgacactcgttgcagcgtcagcccaccctcagcagcatggtggaggccagcatcagcgacctccggctatggcaacttaccaggagtttctgagcacgcagccgcccttgttcaccaaggcagaggattcattggacgccgacgtatggcttcatgtcgtcgagtccaagtttccccttctcacgggagactgccctgatgaggccaaggctcgcttcgccgcacagcagcttcacggccctgctcggacttggtgggaccacttccgtgctatgctccccgctgatcgtgaagtatcttgggaggaatcaagactgccttcagaggacaccacatcccagctggcattcttgatcggaagttga

SEQ ID NO: 184483 - DNA, 813 bp, Arabidopsis thaliana landsberg
atgaaaggctgcaagaagctgaaaacacttcctgacagtcttggcgaactaaaagctcttcaagaactgatactctctggctgttcaaagctcaaaagttttccacaagttggggaaaatatgaacagtctagagatcttacttctagatgaaacgggtatcaaagaaatgccatatatattatcattgcggcgcttatgcttaagcagaaatgaaaagatatgtcgcctcacagagaacatcagccaattctctcgactgaaatggcttgatatgaagtactgtaaaagccttacatatcttcctaagcttccaccaaaccttcaatgcttagatgcacatggatgtagctcactgaaaagcattgcgcaaccacttgctcatgttttggcgacagagaacattcattccacatttattttcacgaactgcgacaaattggaccaagctgcaaaggaggaaatttcatcctattctcaaaggaaatgtcagatactaccaagtgcacttaaactctgcaataaggtatgtcttccctgtttttctccctctctatctttcacaaaagatttactgatttaacttctctacaactttgcaggatcttgttcctgagattttgttcagcacctgctttcctggaggtgaaataccttcatggttttatcacgaagcatttggatctaagataaagtttgaatcgcctcaacattggaagtataataagctctctgggatagccttttgtgctgttgtctcattccaaacctgtcaagagcaaaccagaacagaacgagagcgtaccaactgctt

SEQ ID NO: 184484 - DNA, 609 bp, Arabidopsis thaliana landsberg
gtggttcggtatctgatatcgtctggacatcgagttcatgttgtctctgctgctccagagtttgttttcaccatggagattcattcaccaaatctctttatccggaaggtaagttcatagaaatatttgttgagtttcactctgatacatccaaagatggatctctaattgttttaaacaatgtatggaggtgatgttaggtactgttggactgtggatccgtacaagctgatgcgttaagtgtagatcgtcgtgcttctttggagaaggtctgttccagttatctctctgagatgtttcctccttacctttagaccattaggtgcttagcttgaatcattcttttttcgtcaaatttgcagtattgtgagattgcagtggaacctcgagactctattttagccacagaggctgagtggctaaagtccatcaaagccaaccttgtggtacttcagaaatgcttttaagataatgttctatgcttctgagtatttggcttctaaattaactaagaagatactggtcccatcaggtctcagatgttgtccccatcgcttgtcgtgctgcagcaaatgccggaatccgctctgtttgcgtcaccaacttcag

SEQ ID NO: 184485 - DNA, 1916 bp, Arabidopsis thaliana landsberg
gttggtcaatccagtagttgttgctccgacggtagctgcagttggactttccttttacagctatggtttcccgcttgttggtaaatgtcttgagatcggtgttgtgcagatactacttgtgatcatctttgctcttgtaagtttagtgaagttacttttatccgccctctttgcaaatggagtttgtttggatgctagttacaagttttgattttcttcttgaagttatgttacttcaaaaatttcatatcacatcaggttcatgtcaacaaaatttgatactttcccattctttctgcagtacctccggaaaatctcagttttaagccatcgtattttccttatttatgcggtaagtaggttcatgtctgcttttccttagctctttcggtatataggaaaagtaagactcgagtaatctttacctcaattgaatcaactctgataatgtggtaatcatctgacatttccaactctacatgtgactttgactgacctaatttaacttcttactgacaggttccattgagtcttgcaatcacttgggctgctgcattccttttaactgaaacaggagcttacacctacaaaggttgtgacccaaacgttcctgtctcaaatgttgtatcgacccactgcagaaaatacatgaccagaatgaagtactgtcgggttgatacttctcatgcgctgagttccgccccatggtttaggtttccttaccccttgcaatggggtgtaccgttattcaactggaaaatggcttttgttatgtgtgtggtctccgtaattgcttcagtagattcggttagtgtttcctatcatctttgattaaaccatcaaaattatgtgttggaagtcaaacttttgcacttttactaatcagtttacggtacggtatgcatatatggtaattttttattttactgtcaggttggttcgtaccatgcttcttctctattagtagcatcgaggcctccaactcgtggtgttgtgagtcgggcaatcggtcttgaaggtttcacaagtgtcttagccggtctttggggtacaggtactggttcaaccactctaaccgaaaacgttcacacaatcgctgtgaccaaaatgggaagccgcagagttgttgagttaggcgcgtgtgttttggttatattttcccttgttggtaagtaagtggcactgcttatttatggtcgggtttcaagttctctatttcataacttttctttttgaatgtaactctatttcataatttacatgacctctttagcaaatacaagtaactatacatcaatagcatctgaaaattagctcaactgtacaacaggtaccattttttactctctttgactaaaacagtttttgatgtcctcaggtaaggttggagggtttctcgcatcaattccgcaagtcatggttgcttctcttctgtgcttcatgtgggcaatgtttacggctttaggtctttccaacttacgttatagtgaagctggaagctcgcggaatatcataattgttgggttgtcgctgttcttttctctctctgtcccagcttacttccagcagtatggcatatctccaaactcgaatctctctgttccaagttattaccaaccttacattgtttcttcacatggacccttcaaaagccaatacaaaggggtacgttacgtttgcgctcactttcattttcacaggaccttcagttttcatatcttctagtgtatttgcagatgaactacgtgatgaacacgctcttgtcaatgagcatggtgattgcgttcatcatggctgtgattttggacaacacggtcccggggagcaagcaagaacgcggagtttatgtttggtctgacagtgagactgcaacaagagaaccagcacttgctaaagactatgaactgccgtttcgg

SEQ ID NO: 184486 - DNA, 135 bp, Arabidopsis thaliana landsberg
atggagaagcatgcagcgccaattagtttgggtagttttgatcttttaagaggcagagttatttgcggaagcttgttcggtggtctgaaatccaaacttgatattcccattctagtggatcattacctaaaaaag

SEQ ID NO: 184487 - DNA, 313 bp, Arabidopsis thaliana landsberg
atgtttcgggatactcagaagttcatatcacaatgtgacccttgtcagagaaggggaaagatcagcaagcgtaatgagatgcctcagaaatttatactcgaagtcgaagtcttcgattgttggggtatagatttcatgggaccattcccaccttccaacaagaatctctacatcctagtagctgtggattatgtctctaaatgggaagaagctatagctagtccgaagaacgattcagcggttgtcatgaaactcttcaaatatatcatcttccctcgttttggagtgccacgcatagtcattagggatggag

SEQ ID NO: 184488 - DNA, 2255 bp, Arabidopsis thaliana landsberg
attcttttgatttcaatgtggttatggataaacaaacttcgtgagtatttttcttattattattgtaaagcgatactgatcaaatcaaatgttctcttaaaatagttaaaaatattaagggatctcaaaataattgttaattatggagggaaaaaaaacaaacgtcttttaagaagcccatacctgcttcacgtatcacgatggaggcttactcagaccttccactgttgagaatttgaaatttcaatttgtttgattagacacaatgactaagatttttattacataaaaagaaaaaaaaatttgcagaagtataaacacatacatagcggtgaaagaagaaacccaacggtcactcaaaagcgcattgaagagtcaagcaagacttggatctgtctcgttcgtttctctatctctgtttcgcattcctaagagaaatggtggaatcggagctaagctatgaacagattcgtttgaatagggtggaagagaacaagaagagaatgggggagcttaatctcaacaagcttgctcaatctcttcgtgtctcttcttcttcttcttcttcttccaagccctcaccagtaacgtttcctttctcttctcttctcatttcttcttttctttttctgaaattaaccaattttttttatggaaatgtaggcaaagccaagaacgatgcgtattccagtggatttctcggaggtcaggagatcaagccgtgccaaaggtccacctccaagttataaagaggtcttttactaccatttatctttacttgagtttccttaaggatttcttaaggattttgtatgagatatgaaatttgtgggtttgatctttttgtgcaatttttcttagttataatttgcgtgagttgtttctcttttttttgaataaaaacgtgagttgtttctcattactcattatcagagttatctgatccttactcgcagtttgggctagaaccactggagaggaggccaagaaggttgaccaatccacactctctatgaatacattacttctcttacactatttgatgtttgttttcacttttcagtataagttatgtgttttgctttgcaggagctctcgaagaagagatttgctgaatcgggtatatgcttcggacgacgcaagaatgtacgcattcgacagggcagagaagctccagtcaagcttagattcagaatatgcaagctttaccaaaccaatgctccaatcacacgtgaccggaggattttggttggtaagtgaacaacttgaacattcaaagatgtctgaaactcagccatagtagtatgtaaaagtccactgatgtcatatgttttcgtaaccagggtttgccgcttcctttttgcaaggcacatatgccaaaacgtgatgtaataatgactttggttgacgaagaagaggaggaatctcaggcgaaataccttgctcagaagaacggtcttagtggaggctggcgaggtttcgccattgatcaccagttagtcgatggagatgctgtagtgtttcaccttatcgctcgaacaacgttcaaggtaaaggagttttacttagagatcttgaaatacaccctggtagagagactttggcattgatgttgaaacatattgcttgttccaggtgtatatcattagggtaaatgatgatgcaaacaatgattcagatgggaatgaggtaaatgatgatgattcagatgggaatgaagaagatcgagataatgataatgaatcaaacgagaaacagaaggaaactgtttcagaaggtagacagttgagaagcagtggtaagaggaaaagacgaggtaataatgtttcaaatctatttacctcttgactcttgtaataatatctgtgcgataagataaaactaaatttgttgattgatgtgtgcaggaagaaagtagggggtgctggtctaaatgggactggtatttctatggaaggagtgggaagatgaactagaacttaacgtaacagcttactgcgagtattatgactgaacaggaaagatgctcaatgaggggattgttctcatcacacatgttgtatgaattaaataagtgtgtttgggaatattctgatctggcaaagcaccaaaaaattgggatattcttgtcgtctgatgcttgcatggcatatacttcgtacatcagcaactcctgcatcagcaaaatacaaaattatccctccatagtccatactaacagaaccggaaattaccggcgaatgttcggtacatga

SEQ ID NO: 184489 - DNA, 300 bp, Arabidopsis thaliana landsberg
ctacttggcttctttgctggaattcatttggctattcttgctgcatatgtttgccgcagacatccaaatgctagtataaatactctgctgtctttgttctttgatatttttgttcactggccgtggcctcttccagtgagtttgcttgatccgccagttctttgtgggggtcctgatgggtgctctctcatgcccataatgttgccctgtattccaccagaattttgctcctctagtacaacagaaagtactttcagcaaaatcaaagaagaacttcggcgtggttatgctcttagcaag

SEQ ID NO: 184490 - DNA, 790 bp, Arabidopsis thaliana landsberg
atgcatctttggcaaagccgagaaggtgaccttatcgtgcgctttaatttcccaggtacgcacgacgtgatgtcatctaccaagagctgaaataccttccgatgtcgacacgtaccaagttcagtcgattattccggtggtgtataatttatttgcattccagaattggaaagagtcttatgttttagggttcaaataataaatagttttaacagaacaaatatacttttcccccgtttctttaaattttggtatcgtgggaaacttttgatttattggttgatcaaagatttagtgcttttgacagcagcaacagattttcttaaactatagacaagttcgaagtttatcataaatgtagtgtatatagaaccgtacgttttgtagtatatatataaattgaattgtcatatatgtaaaatcgtttcatatgtttctatgtatgttacggcgatttaaacatgtcgtaaatgataaaatgatcatgatttatactataattagaatatctaaagttgaaaagattcatccttttaaatataaatatatattcataatcatagcccgaattatcgtctaactgatcatgaccaatccataattttcgaaaccattttcacatctttttggacatgcacgctgatgggtctgcaaaagaatcaatgtctttttccctataagttaggttcatataggtggtacaaagatgtaggattttctttcttcaaattttattttatcaacgttatgtttttattttctttcttttacaactttaggtttattttga

SEQ ID NO: 184491 - DNA, 506 bp, Arabidopsis thaliana landsberg
atgaacccgaaaatatcagattttgggttggctcggatgtttcatggaaccgaatatcaggataaaactcgcagggttgtcggaactctgtaagaaccattcttcaataacatattaaactagattggtaagtcatatactaaaatgggtacaactatttgattttttgaacagaggttatatgtctcctgagtatgcatgggctggagtattctctgagaaatcagacatctacagcttcggagttctactgctagaaatcatcagcggagagaagatctcgaggttcagctatggcgaagaaggaaaaacacttcttgcatatgtaagtaagagtgtaagactttatgttttcatacacttgcagaggttttaaaaggttcgttgccctcgtattcttaagatctgaaactaacacaggcatgggaatgttggtgtggagcccgaggagttaatcttttggaccaagctcttggtgattcttgtcacccatatgaagttggaag

SEQ ID NO: 184492 - DNA, 408 bp, Arabidopsis thaliana landsberg
accggaaaatcctctgggctggtgaaccgctcccaccgtttgtgtcgcccccaaagttcgaccacaaagagtttgatcagccaccgtttttgatcggagaaacggacaatgtagaagagagaaagaagaaaacgattgtggtgatgctaccactgagcacatctcagctgcagaagctacgaagtaaagccaacggaagcaaacactctgacccggcgaaagggtttacaaggtacgagaccgtcaccggacacgtgtggaggtgcgcgtgtaaagcacgtggccactctccggagcaaccaacggctctaggaatctgtatagatactcgtagtcggatggagccacctctgccacgcggctacttcggcaatgctactcttgacgtggtcgcagcaagcacctcag

SEQ ID NO: 184493 - DNA, 141 bp, Arabidopsis thaliana landsberg
atgaaaaacacccaagagttagaacgaggagaactgaagaagctcgttgatccagtcggttccaggttcactacaacaattgccacagcgggaaccactttgatcctcgggtttgtttccggaaagactgttataggttga

SEQ ID NO: 184494 - DNA, 328 bp, Arabidopsis thaliana landsberg
atgacgcaaatggacgaatcaagtaaagagagcatccaagaagaagcaagaagaacgaaagcagttgctgtggagaagtataatgcgggtgatcttgttggagccaaagaatttgctgtcaaggcacacaatcttgatacagaacttggtggtcttcgctgtctcaatacaattcttgatgtgcatatggcttatgagaagaaaatcaatggtgaaggtaattggtatactgttttatcggcagacccaactgaggatcttggaaccatctcggtacgttataaaaacttagttaggaacatgatctatgaccgtgacgactctgttg

SEQ ID NO: 184495 - DNA, 321 bp, Arabidopsis thaliana landsberg
atgcggcggagaccggagaaagaaggaggggcagtgagagaggtagctgccatgtcgtcgggtttggcgtgtagtgagtggaaaaaggcaaagaggagagatagagacgagactgtgactctctcagcttaaggtagcagaggagatagaggcgatgagagggttggtggttctgctctctctcttactctcgagggtaattttgtctttctcgcactcacagatggtatcatcaagcctcgttctcacgcgcctatgtcacgtctcgttcccacgcgctgtagtccaatcctaagatcaggtgcccaaaatggtcgatga

SEQ ID NO: 184496 - DNA, 177 bp, Arabidopsis thaliana landsberg
atggcgcgtaaaaacggcctccggatcaacaaggtaattttacagattgaactgaaagatgaattgtacgccacaccacatggaaagctcctgaagcaaaaaggaatttatcttgttcagaaactggaccacctggccaatatttcgcacgatgaccattaccatgtggattttaag

SEQ ID NO: 184497 - DNA, 198 bp, Arabidopsis thaliana landsberg
caagtccatttggtgagaaaaaagatattgtagatacacaggaagatgaaatggacgaagaagctccagaggctagtcagacaactgaacttagtatgggaagttttggaggtttcgggcttgggtcaactccaaacccgggtgcccccaaaacaaatccatttggtggtccctttggtaatgctacaacaacaacaa

SEQ ID NO: 184498 - DNA, 210 bp, Arabidopsis thaliana landsberg
ggacaagatgttccagagtttaacgattggtcgtttttggatccacaggtaaacgatataatgtttacaagaacttacataaattatttgtatatagtttaactttgaagtttatgagtctttgaaacaagttttggtgaattgtttcttatataggaattggttgatgacgacttcatgaactctctgttcaacaatgacatgaattga

SEQ ID NO: 184499 - DNA, 186 bp, Arabidopsis thaliana landsberg
atagcaatttgggtcctagagtgcgaccttctgctgaagaggtccgttcgcttagtatgtcgctcggggagatacctgatgatgaacggcagatttattttgaagtgcccctgaaccctagtgacgcagacataaatgacatgctcgatctgctagctgaggattcatctgatactgctcctgatg

SEQ ID NO: 184500 - DNA, 360 bp, Arabidopsis thaliana landsberg
tctcaagcctttcctctccgtggcatcattagagatggtggaattttgtgctcatgctcctcatgtgatcgggctaacgtaagattttttttttccactctgcaacttagaatgtaggatgaatttgatgatctctagtgattctatcagacttactctcgtatataaacattctcctttttgtaggttatttcaactcccaaatttgagattcatgcttgtaaacaataccgaagagcatcacaatacatttgctttgagaatggtacgagcctgctagatgttctaaatataagtaggaacactcctgtacatgctcttgaagcaacatttctggatgctggtgattatgcatcttaa

SEQ ID NO: 184501 - DNA, 461 bp, Arabidopsis thaliana landsberg
atggaacaggaggaatacacaaaagaagcaatagattggagctacattgaatttgtggataaccaagatgttctcgatcttatcgaaaaggttatttctgatcaatatcacatttttgtctggtctttaaattgggactccgaaatgacaatgcaatctaaatatttcatctttctcactcaaaaagaaaaatttccatctgcagaagcctggtggaattgtggctctccttgatgaagcttggtaatattaacatcaatcaacttgagttgtgtatgtaacttgagttatgttcattttatcttattttgaacaatgtttcttggttcttcagcatgtttccgaagtcgacccatgaaacatttgcgaacaagctttatcaaacttttaagacacacaagaggttcatcaagccaaaactctctcgaacagattttgctgttgcccattatgctggagaa

SEQ ID NO: 184502 - DNA, 187 bp, Arabidopsis thaliana landsberg
attactttactactactcaagccttgggtaccttcacattaactgggaaacgaccttgcagagagtagcaatagtctcaatggtagccacggtggtcgagtcgctacccatcaccgatcaattagacgacaacgtttcggttcctctggctactattttaactgcttatttaagtttcggatattag

SEQ ID NO: 184503 - DNA, 138 bp, Arabidopsis thaliana landsberg
ggttcgtgtttggtggttttggacaagattcgaggcaggggagaagaaccagagataattggtcgatatgagagcaagttgaggacgagagatggagatcgccgaacaccattgtctccttttgagactagttattga

SEQ ID NO: 184504 - DNA, 82 bp, Arabidopsis thaliana landsberg
aacactaatgggacgacccattcttagccctgaaccaatctgcgacatgaaccggagttcaaaagaaccaaatcggtactaa

SEQ ID NO: 184505 - DNA, 683 bp, Arabidopsis thaliana landsberg
atgacctgcgaagaaggaagattggatggtgaaaacgaaaacggagaaaacagcgacgcagccgagaagttgaagaagcggaagtttgcggccagcttggtgagatctcattcttcaaccatgaaagagcgaatccaatccaatccaatccaagggaagagtaacgaagcaggtgagtgtgatgatccaagaaactccaaaactgatgccgccggaggatactcttagtacgacgccgtttacgagatctaaatcccaaggactaaatatgcaaaaaataaatcccacgtgacctttactgaaaatacaaaacaaatacatacttaagtaacatatttctatgtgaatatctaattcaataaatagagtttttatacatttactcgtatatctaatctcgcataacatgtgtttttttcgctattgtataccgcatttctattttatgtagatatttttcatatgtttcacataaatatatttttctgcaagataacaaatacaatcatagtgatgtattccttcaggttaagcacaaaggccagcatacaatgtagcatgagtacccgtcgactatgcatcgtgttcgtctaaggtacgaaaccagaagctatggcaccttgtgcgtggggcacagtcaaaccgaaatgcggatctcgatcgtgcacatcgtatctaataag

SEQ ID NO: 184506 - DNA, 659 bp, Arabidopsis thaliana landsberg
atgaactttgcccaccgtaagtaacatcaatcaagaactaagtcggaatagcctagtggtatttgttcgagtcttagtttattcttctttgtgggataccgctaggaaacgagtcccatcttctatgatcatcattaaagttcaaccttggtcactatagaaacttttaaccggcaagatttccgactttatgttacaaaaattggcagatgatgaaagaactctaaatacggtttttatatagtagatattgtatctcaaattattatcaataagatgttccaaaataagaaacaagataataatgatatacttacaacttgtttgcgtgtataggtgagaaggtggtgagtaatttagcgaggtttgtggtgttggtgtggtgcttcgtggtgcttgtgctgattcagagctatacagcgaatctcacatctttcttcacagtaaaactgttgcaaccaacggttacaaattggaaagatctcataaaatttaacaaaactattgggtaccaacggggcactttcgtgcgtgaacttttgaaaagtcaaggatttgatgaatcacagctcaaaccttttggttctgccgtagaatgtgacgagcttttttccaatgggacaatcacagcatcttttgacgaagtggcctacattaaa

SEQ ID NO: 184507 - DNA, 394 bp, Arabidopsis thaliana landsberg
agactgggatttgaatcagataagatcaatcattcttgaacatgaaactgatatccttaagctaaagatcagtaaaagaggaggattgggtaagtggatgtggttacctaatgcgtcgggggagtatagtacgagatctggttactatacttcttgtgcaggggacgaattgtttaatgagcctgacccttccctagttggtttcaaatggaaagaagagatttggaatcttaagagctcccccaagatgaaaatcctcctttggaaggctactaggaatgtcttgccagtgggagagaaccttaaacttagacatatcaatcctttggctatttctcctttctgtgcagagaatgagtcgcgtgtcacatctgttcttaatgtgttcttctga

SEQ ID NO: 184508 - DNA, 152 bp, Arabidopsis thaliana landsberg
atgaaaggaaataagaagaggaggcggcagaagcggtgtaaggtggtgaatgtcagaaggtggtttcggcaagaagctagagctagagaacgatcgaggaggaaggaaagtctagaaagagagatggaaattttttgtaatgatggagaaag

SEQ ID NO: 184509 - DNA, 544 bp, Arabidopsis thaliana landsberg
atgggcgacgtaagtgccctgctccacaattttgccctaaaaaactatcctttcatctgatcaattagttaaaattcatcagctacatttctcgacctctccatgagtgcaagtttgcatcttatgaagaaaaggttggagcattcaaggctgcagagaagttccagaggagccttaaatctccacatccttactttgtgaaatctatggttcgctcccatgtttacagttgcttttggctggtacgttcgttcacaacacttgtgtgtgtttcttcttcaaggatttcgtgttagtaccttacttgacctacatgggtttgcttgcaaatttcaaggggcttccttcaagattctgtgcagacaattttcctgaggaaactatggaaatagaactagaggatgaagaaggcgaagtgtatgaagcagtgtacattggtagaagagctggactcagtggtggttggaaaaggtttgctcttgatcataaattggatgatggtgatgctctactctttgaattggttgaaccaaagaagttcaaa

SEQ ID NO: 184510 - DNA, 488 bp, Arabidopsis thaliana landsberg
atggctaatcaattgagcccaggttcaaaagcagttaacggagccgtgactgcaaatgggcgtagctccaaggacgagaacagtggcttctccttcgtcaactgcacaatcggtggaactggtcacgtgtggctaggtcgtgcatggcggccttactcacgtgtggttttcgtttccactaccatgaccgatgttatcgcacccgaaggctggaacaacttcaacgatccctctagggacgcgtaagtacaaaacacaatttttctataaatttgtttttttgttataaggaaggttgattaatactaagtgacattgtttttgtttacaggactatattttatggagagtataattgttcgggtccaggagcagatatgtcaaagagagcaccatatgttcaaaaacttaatgagactcaagttgctctattaattaacacgtcttatattgatggagatcaatggttacagttttctgacctttaa

SEQ ID NO: 184511 - DNA, 147 bp, Arabidopsis thaliana landsberg
ctcgcaaccctcttcctacgtcgatacgatttagtaaccgcacatgccttcaaggagtgtgaaaatctgaagattctcaagcttgaggaaaaattagctgaagttgatgtgttcaacacagttattgcatcatgtccttctctcaag

SEQ ID NO: 184512 - DNA, 240 bp, Arabidopsis thaliana landsberg
atggacccaaactcaagaacaataaccaacaaaagtaagtaggtttccatgtttcctgggagcttttctttttgttaaccaaaacttcatttgtttgcaactcttaactcttaatcctttgccttaatcatcattcattttgtttctataaagtctaatcatacaatctatcaccatcgcatcctcttagtattaactttaattttatcaaatatttccgcttcagaactttcctattaa

SEQ ID NO: 184513 - DNA, 1057 bp, Arabidopsis thaliana landsberg
atgctctatttgcctaagaaactcttcttgttcttcttctcgtgcattgtggtgattgtcaactacaacaatagtgacttcgtaaacgcagcaaatagcattggcttcgtaaacgcagcaaatagcattggcttgaactacggtctcctcggagataacctcccatctccgtcaaaagttataaccctttacaagtccatagacatcactaaaatccgaatcttcgacccaaacactgaggttcttaacgctttacgtggccatcgtgatattgcggtcacagtaggagttagggaccaggacttggctgctctttccgctagcgaagaagctgttaagggctggtttgcgaccaacatcgagccttacttatccgacatcaacatcgcgttcattactgttggtaacgaagtcatccccggaccaatcggtcctcaagtgcttccagtcatgcagtctctcaccaacctcgtcaagtcaaggaatctcgaaaagcacggtggtggctatgtggaacctcgagcaatcatacccaccttccgcaggaatgttcacgtctcaagcgcgtgaacaacttgtccccgtgctgaaactattatcccaaacaaattcgcctattctcgtaaatatctacccttacttctcctatgcgtccgacccatctagcatccttttggactatgccaccttcaacactgaggccatcgtggtacaagatggatcactgggctattcaaacatgtttgatgcaatctttgatgcgttcgtgtgggcaatggagaaggaaggcgttaaagatttaccaatggtggtgtccgagaccggatggccatctgccgggaatggaaacattaccacgccggatatcgcgggtacctataacagaaatttcgtgaagcatatagcaagcggaaaaggtacacctaaaaggcctaacaaaggcatcgacgggtttttgtttgcaactttcaatgaaaatcaaaagccggtcgggactgaacaaaactttgggttatacaatccgaatgatatgaagcccatctacaatctattctaa

SEQ ID NO: 184514 - DNA, 130 bp, Arabidopsis thaliana landsberg
atggcgatggaaaagcgacggtcatcattgcagattgttgtgaacacaacgccgatactcggatactcgatatgctccgtctcgataccctacgttcttcccatggtcacgacgttttacccgatgctag

SEQ ID NO: 184515 - DNA, 899 bp, Arabidopsis thaliana landsberg
atggacttcacaagaaacagcaacaccaagctccgtccccaaactcagcttctgtttccccctaatatggtaaaagaacacaatgtcttttgattacataactcagaaagtatcttcttttcattgttctaattgagtctctctttgtttgtttgtttacaggagaaaaactcaaatgttagcgccaacccatttgcagaagactcacttacaagcagaatcaatctaaaggaaactacagatttcatcaagtcactgccaatttcatcaaaccaaagcagtagtagcagcaatgagatggtaaacgagagaagaccaagtttctcatcacaaaagagcattggagaaggaagaagcaatggacaaagaagattgatgttaatggagtctccttgtactccaggtagaggagtcttcagtttcagtagcaatgtctctggtagaagaagaaacttcccttctaaatggattgatgctgagaaatgggtcacttcctctggtcatgattctccagcacattctctcaaaaacacccaatttgatggctttaaacaccaggtttgcttctacaagaacccttatgaagtttgaatctttaaataagaatgtagcagtaaaattgaaatcaagaatgtgtttttgtaggtggaagttgtatactcagagaaatctagggttacggaagaatgtttccatggatctgtctcattatctccacaagatcttatccttaaaggtatataaaaagaagaaacttttctaatagaatcttgaaaagttttgatcattttgatgaattgaaagttctgtgttcttttagataagttagcaaacgaagttcctcagattcttccatcaacggaagggtttatattcaaagattccgacaagtttctccg

SEQ ID NO: 184516 - DNA, 384 bp, Arabidopsis thaliana landsberg
cgttcccttctccgatttcgatttacaacaatgactctgattctgggtcgaatgatgcatatcaaaactatgaatttggaacagaggcagaggaagcactaggcaaaatccctatcaaagcctattttctcagtactaggtatgtacatctttggtattgggactcactagtgaaagttttgaatttggaatctttacagtttgaaagttgaagtctgttatgtgtttttcatttataatttggtttctcagaactatggttttggcagtattgatttgaaggcaatgcaagctgagaacttatgcaatgttgttcctcctacttcacgttctactaattatattgccctcaaattttcggattttaccccttctggaatctat

SEQ ID NO: 184517 - DNA, 735 bp, Arabidopsis thaliana landsberg
caaacagaagaacgttgctcaatcaacgaccgaggcggagctcttaatcacatcaaggttcgaagttctacgagaagagctagacgtaacgatgaagccatgatcaaggaggagtgttggaagtgatcaagtcatcatcttattttagaagagatatattatatagtgaagtgactggtttatgtatattcgtatcacacatcgaagagatacgaatataattgttaactacaaaacagttacatgtgtgtatgtgtctctacattaggttgtcttctagagacgtgtcccttagtcaaagtgtgtcatgtaaacctataaatacagtttgtatatgtaataaaagtgtgtggttttcgttttataaaaacagagtgaaatatagagtaagacaaaacagagtaaaatctgtgttgtccgacccttaacaactttgagagttcaaagttctacatactcttgctacgtttatcgataggtttctgagatccaaccgtatcgtaaacaagtttaagttaagatgcgattcggatctcgttggggatgtggatgtgtttatctacatggttattaagcgaaaagttcagcatctcgatgttacatgccctttagtgcatatagatcgagaaatttacaactgtgagagcttggtttctttaaagctctctgaagtaactttgacaaagcccgagttcgtatcactaccgactctgaaagttttggttctagattggg

SEQ ID NO: 184518 - DNA, 146 bp, Arabidopsis thaliana landsberg
caaaagcgtgtggtggtgcgtgtatgatgactaacgatgtacgaggaaatttcttctggtacgtgtggaatgtgctcttcaatgatgagatcatggaaatcgtgacatatatcgaagtctgcatgatactgatggttgcaatgtag

SEQ ID NO: 184519 - DNA, 1926 bp, Arabidopsis thaliana landsberg
atgagtgacagtgtcgagttccaagaagtgatcctcgcaaccatagccagtgacctcgagctcgggtccaagcctgataacagcaccagcagcctttgcctcagcgatcgaagccttgatgttcttcatgttgctctcgaaatccatggcccattggttcaagttacacgtagcaaccttcaacagcctcatcttcgtcgcctaaagagaaagacaagtaaatttactgtacatcaagtagtgtaaaaaatctgacttatctaaggcacaaacttgttcatgagaacagaagctggttaaattagttaaaggaacaaactttgtattactttgctaatactaacaattcaaattcaattttaacagccataatacacaatatctgtaacgaagaactcgtcaacgcaacactattcgatgtgaatcaattgccaaaagaagagaaggaagaattggagcttacgtgaatgtgcaaagaaaccaagtatcaaagtcgtgaaattcggagatcgtgaaaattgaaaactatgggagtttgtatttctttcagatgtgaaattcacagactccaagtgattgtgcagtgctcgtgcagaacagattgtgaccgaccaagaagaacattcggtttgagaggaagaagaagaagaagagattgatactgaaacgacggcgttttacgattgtaaattacaaacaaaaccttaactgagaacaacttcgttttatcatgacacgacatcattttttttttttttttggtcaaaacacgacatcgtttaagttcccacttttgtctcttcttcgttcttttaagttttaatagacgacgacggcgactagaaggagaattagcgagatcggaaggagaaaaaatggatcaattctcaggaggaggaggtaattggtcgatgatcccaaacgtgcaggcgcaaggtaacttcggtacaccgacgaatcatgaccagcaactattcctccagcaacaacaattacaacaacaacaacaacaacaacaacaacagtttcatcttcaacaacaacaacagacgcagcagcaacaacaacaattccagccacaacaacaacaagagatgcaacaatatcagcaattccaacaacagcaacacttcatccaacaacagcaattccaacaacaacaacggttgttacaatctcctcctcttcagccacagtcgttacaatcacctccgccgcaacagacgatggttcacacgcctcaatctatgatgcatacaccgcagcaacaacaacagttggttcaaactccggtgcagactcctcaacagcatcagtctttagcttctcatttccatctctatccggtaagagaaacaaagaaaattgatgaaattggaatcgttgggggttctaatttcgtgttaatgacgcagatggtggagaaattagctgatgtgatcgaaaatggaacacgagatcagaattctgacgccctggtttgttaaaaatcaagtcttttaaagtggttttgagatttctagggtttcttattggatgatgttgaaattgtgggatttgcaggtgaatgaattgaatagccatttcgacaagtgtcaacagttgctgaattcgatttcaggatcactaggatctaaaactatggtaacattttggatctctgtattggttctgtttaatcttttgtttcttatggatctctctctctctctgtgttttatagactgttgatggccaaaagagaaatgttgaagaaagtgagcaattgcttcaacagagaaggttagctagattgttagtatcatgttttatctgatcagattgtgatcgtgctcttactcttttgttgttaaatgtcttctggtcagggatttgattgtggagtataggaaatctattgaagagattgtgacaatggagcattag

SEQ ID NO: 184520 - DNA, 415 bp, Arabidopsis thaliana landsberg
gaaagaagtttcgttggatatattgtccggttacctgccggaaggtacttacgaaaaagtgcagcgatatctcattcgttacaaagtgcaactaacgatcacccgtaaacgaaacagcgtactgggcgattatcgcctgcccgataaaaccgaagggcatagaattaccattaacggcgatctgaaccgctatgcttttttacttaccctgttgcatgagctggcacaccttatggcatatatttattatggcaggcgcataacgcctcatggtccggaatggaaacaaaccttccgcgaaatattaaggggatttatcggtaaaggatatatgccggatgatgtggaagaagctatcaaaatgtatatgccggacccggctgccagaagctgtgtagatgaagatttaatacgg

SEQ ID NO: 184521 - DNA, 357 bp, Arabidopsis thaliana landsberg
atgacctcttttgccttgttccgtctatggacccttgcatgttgcgtgttgctgtcgtcttgtacgctaagcgacagaatgaaggaaatatttgcccgatccgatgacgcccgcgccgtcattgctcagcggcacgacttgtttgcgcaggccattaccagcaccgaggcgcgccgggtcgcacaaaatgttgaccgtccctggatagccgggcacgccgttccgttggcacgcaatgtcagcctgccgctggcgctgcaggccaatgtcaataccaccctattttttgccggcgagccaaccgacctgagacaagcggcgcagcgcatcaccgccgtaacggacattccggtttat

SEQ ID NO: 184522 - DNA, 886 bp, Arabidopsis thaliana landsberg
atgtttagaatgtatcagcaaatctactgaagtgaaaaaaaaaacaagacgaaagatccgaccacaacttgccacgtggtaaccacaatttaacttgttgccggtacgtgtgtccacgcgctactatgtaaccgtgaccgtgacctagcttttttagtttttactccaactggaactggttatggatactttgtcacggacgttagttaataaatgttggcgtccgttaatcagaatttttgaagtaaataaaatatacaaaggtgttattaaaaatctgaatctaaaaatgaaaattaattgactaacactaaatgcctaattattttatttttctgatataatccttttaaaagtgaatgtatctggacaatatggtggtaacaattgagaatctaaaattaatccgccagcatatcccaaagctgtaattaatttaacgggatttagggtttctccgttacacaaaacgccgttaatcctttttcaccatcatgttgtcatattttacattttgtcgtttactccgtcaaaaagtcaaagtctctgtcaacataatgaaaacatatcactaaatataattaatactcgtgtatatatatcccacaagtcaccgagaagatgagaaatcaagaaaagggcataaaatggtagagataggaggacgatttatcagaacagcggcggcttttgatgtggcggcggcgcgtgcacgccctccgtgcgctagcagcagcggaagcgatcactctccggatgacacagaagatctttgggatctggtcgaatcttttatcgacagagaagtggaaactttacctgaggatgcttttcaggaagaagaagatgataaatcggatgaggattacgaagatgtgaaggagag

SEQ ID NO: 184523 - DNA, 525 bp, Arabidopsis thaliana landsberg
tctgtgttgggatacgaagtccaaaaggccggtgtttctcatcactgcgtacacgatgcagccgctgcgatgaaacttgcacttgctgttatagagaaaagagttgacacaacaatcacattaactaaagaggtgacaacaaatatttacctagctaacttgtttatgataaattacaattacaatgtttacaagttttttgaatagatggtggaggccgagaaatcaagactctttctacatcgaatccctcaccatctgtcatctgaagagctgaagaaagatcttgctctaaagttttttcccaaaaactttacaattgatgttaaggttgagtttaaaccatatatctatttcttttctctaaatcttaactttttttttttgatatacggttttttttttttttggcagccagcaaaaacacagggaggttattattgtgcagttgttatctttggaagctcagtagaagcaaatcaagcatttgagaacgttattggatacaaagagacggtattatag

SEQ ID NO: 184524 - DNA, 377 bp, Arabidopsis thaliana landsberg
atgcctctactcgaccagtggagcagtgtgcgacgctgcctggcaggaaacgtagcgctcgccgtttcccaagcacgccctgtcgcgctccacggaggtgcttcagctgctgcacggggacctctgtggtccaatctcgccgccgacgccgagtgggaaccggtattttcttctcatcgtcgatgactactcacgctatatgtggatcgcactgcttcctagcaaggtatggcgcggccgcggcgatcaagcgtatccaagccgaggcggagcggaagacaggcaagcgggtacgtgccgtccgcacagaccgcggtggggagtttctggcgggcgacttcgagcagtactgcgctgatactcgcatccgccgatga

SEQ ID NO: 184525 - DNA, 120 bp, Arabidopsis thaliana landsberg
gaggggccgttcatcatcgccaaagttctaaagcccggaacgtacaagctggccaacagtcaaggcgaggtctacagcaacgcttggaacatccaacagctacgtcgcttctacccttaa

SEQ ID NO: 184526 - DNA, 27 bp, Arabidopsis thaliana landsberg
atgttggatttgggaatgtatgaccag

SEQ ID NO: 184527 - DNA, 244 bp, Arabidopsis thaliana landsberg
acctatatcacaggcaccaacctctgcttcaccgggtttagacttgaatgaacctgctattgaacatcttccttcaagtgttccattagtaagtcctaaagctctctctgatgattccaccactcctactgctattaatgatcaatcaagatatgcatgtggtgagagttctaaacgcagaaaaggaaagcagattgaccttactcctgataaaaagaagaaacaatatcgcaaagattatgga

SEQ ID NO: 184528 - DNA, 69 bp, Arabidopsis thaliana landsberg
atggcgcctgtaccggttctggacgaagtgatacgattcgttcgttatccaccaaaccggacttatcag

SEQ ID NO: 184529 - DNA, 504 bp, Arabidopsis thaliana landsberg
atgactggcgtagggttaggacttggtacggaaggacttgggaccgaaggagttggtacggaaggacttgggaccgaaggagttggaacatatggacttgggaccgaaggagttgggaccttaggacttgggaccttaggatttgggagcggcctaggcttaggactcgggttgcatctacaattagtaccagcggttaaggtgaaaaaaaggatgttgagggcaaagaaaagagcaagagaggctgagttctttgaagccattggtattttctttagtgttttaaggattattgattgagtttgaagagagagatgaaaagaaatgaagagaagatgtgcttatttatagggttttagaatgacgtgaagaggatccaaattgtttgactttaattattatttgaatatttataattctacaaaatatctgattttttatttgctcatattcaaaatctgactttcttttcccattctgtagatacgtagaacctcaaagtaa

SEQ ID NO: 184530 - DNA, 288 bp, Arabidopsis thaliana landsberg
atgggcggcgagaagatgtcaaccaccggcgctggcgatgacatgctgcctgtaacatctgtgcataagccagcaggtacgtctgtttcaatggacatgcatcctgtagcgtctgcgatcgccccatacacagagggtgtctctgttactcctccggcggcattgagggcacctggacatatcgatgagcacacaaaaacggtagacgtggtcggcgcagagaagcacatccccatgagacatattgggccgcatgaacaggacacacctcatattcttcaaagccac

SEQ ID NO: 184531 - DNA, 1273 bp, Arabidopsis thaliana landsberg
atggcaaagagaggggaaagcttgagagacaaacctaaatggagtcttgaaggcatgactgctcttgttaccggtggatctaaaggcctcgggtcagtcccaatttttctaccttaattatatcttactagctactagctagttcaatgttttttttttttcattttaatgatatattttgtggatcttttgatggtatttggatgtttaattaatcagcacaaccctgacaagaaaaaagcttaaatgatggtattgcatgtctactttgcatagagaagctgtagtggaggaactagccatgttgggagcaagagttcacacatgtgccagagacgaaactcagcttcaagaacgcttacgtgaatggcaagccaaaggatttcaggtcaccacttctgtctgcgacgtctcttctcgtgagcaacgagagaaactcatggaaaccgtttcctctgtcttccaaggaaaactcaacatcctcgtaagttgatgtgtatatatatatatatataatagcatagaaaaaaatctagtgattttgttgtgtctggtttaagtatatatatacataatgtatataggtaaataatgcgggaacgggtataataaagccgagtacagagtatacagcagaagattactcgtttctgatggctacaaatctcgagtccgcttttcatctctcacagatcgcgcaccctttgttgaaagcctctggttcagggagcatcgtgttcatgtcctctgttgctggacttgtgcataccggtgcatcaatctatggagcatctaaaggtatatcatatatgtatacattcaaacaattaatgatgcatggcgttgttatgagacttaactagctaatgtatgttttaggagctatgaatcagctaggaagaagcttagcatgcgagtgggcaagtgacaacataagggtgaactctgtgtgtccatgggtcataacaactcctttaactagctttgtaaggaaatttgttatcataaataaatacaaagatctccttgatgaaaataagaaaaatatattactatatagttttaacttaattgaaaaatctctcagattttcagtgatgaaaagttaagaaaagcagtggaggataagacaccaatgggacgtgttggagaagcaaatgaagtatcatcgcttgtcgcatttctctgttttccggcagcttcttatattacaggtcagactatctgcgtcgacggaggtgcttcggtgaatggcttctctttcaagccttag

SEQ ID NO: 184532 - DNA, 355 bp, Arabidopsis thaliana landsberg
atgaggactagctatgttgtttgggttagtacagcagttgacaaaccagcgaggattgttctcgtcatcggaagtgagttgggccttttggctgaggagtcaaggcttcttgtcggatatgaagggttcataatttcatgagtagtagaaagaataaaaatattcgaatttttgtcttgaagagaaaaaaaacaaggtaaaaacatataagagaaagaagaataaatatataccttatacaaacttgtggctgagaatgaaaccgcctctagagtcgtgtgagaaagtggaagagggaattgatgtcatgcgtgtaaatatgggtagtccaaaaataaagggaattgatggctaa

SEQ ID NO: 184533 - DNA, 141 bp, Arabidopsis thaliana landsberg
gaagaagacgataagctcaaggaaaaagaaagggagatcgaatctaagagccttgcggaagcagaggtaattgcaatgaaagagaggtcacggaaggagcatgaccatactatgaatatggcacacgcagaagtaaattag

SEQ ID NO: 184534 - DNA, 1162 bp, Arabidopsis thaliana landsberg
atgacgaggattcgcctcttaaggctattgatttcgggttatctatgtttctcaagcctggtatgtttcttacaaaacagagttttttttttactctcacattagatagatgttatcctgagatatgtgtattgttgtttaaaggagaaaactttacggatgtggttggaagtccctactacattgcgcctgaagttctgaacaagaattacggtccagaagcagatatatggagcgcaggtgtgatgatttacgtgttactgtctggttcagctccgttttggggaggtaagattgttactttgaacacaaactatatatgtttttggaggtgttataatgtgttttgttgtatcaagcagaaacggaagaagaaatcttcaatgaggttctggagggtgagcttgatttgacatcagatccttggccacaagtctctgaaagcgcaaaagatttgatcagaaagatgcttgaaagaaatcccatacaaagactcactgctcaacaagtattatgtaagtccctagaatcatgaaactccatagtttaggcagttataaaacttaaatcattttattttcaggccatccatggattagggatgaaggaaatgcaccagatacaccacttgacacaactgtgttgagtcgcttgaagaagttttcagcaacagacaagcttaagaagatggctttaagggtaccacatacaataaaacctttttgatttgttttagatgattttgatgagagaatatctgattattagtgttggacttgcaggtgattgcagaaaggctttccgaagaagagattcacgagctcagagaaacattcaagactatagacagtggaaagagcgggcgagtaacttataaagaactcaaaaacggtcttgaaagatttaacacaaatcttgacaactctgacatcaatagtcttatgcaaataccagtaagtagacactagtactgtcttaatatatatggatttagtaattagtttgattcatagtttttcttacatactgggatcatttttagacggatgtgcacttggaagacacagtagactacaacgaattcatagaggcgattgtaagactgagacaaatacaagaagaggaagcaaatgatcgtttagaatcatcaacaaaagtgtaa

SEQ ID NO: 184535 - DNA, 59 bp, Arabidopsis thaliana landsberg
tgacaaagaacgattcaaattctggacgatatgacgacttctatattcaagaaaaataa

SEQ ID NO: 184536 - DNA, 85 bp, Arabidopsis thaliana landsberg
atggtctctactaagtttttcctactattggctggtatgccatgcctcctcctgagcgtcagcatgtctgttcccgatccgagtg

SEQ ID NO: 184537 - DNA, 138 bp, Arabidopsis thaliana landsberg
gttttcttagagtatgcggatgtggatggctcatcaaacgccagatcagggatgaatggaagaaaatttggaggaaaccaagtagtggctgtgtattaccccgaagacaagtatgcacaaggcgactacgaaaactga

SEQ ID NO: 184538 - DNA, 1080 bp, Arabidopsis thaliana landsberg
ggattttatgtgattctgttggggaggctttcacccagactgcacctgaattttatgataatcgagcctctgttattgattcaatcagacgggatgagtttgggttggatttaacttcttctggttctgagatgagtatgctgcagaaacaacatgctcggttaggaagagcacttcagtgtttgtcccaagaactgtattctcaagattcacacttcattcttgaacttgtgagcactcttaccttcttctttctttgttcataatcttcttacaaccatgttaattgggttcgcttgaataaatatcttgaataaatatctggtgcaaccttatgcatatgtgtgtatcataaggccgagttctactctgcctaagatgattagtagttcagcaatacctatatgctgtcaacttgtagatgaacctgttatcattgttcttgtaattgtaagggttaatgagtattaaaatgtttggtagccatgtaaggggcaatatcgtaggttgttagatgtctctttataccatttctgtgaacaggaggaggtttagtggacattccattttgtcatcctcttactctcttgctattgttgcttcaggttcaaaatgctgatgacaataaataccctgaacacgtggaacccacactcacattcattcttcaaaagaccgggattgttgttttaaacaacgagtgtggcttcatgcctgagaacattcgggccctgtgtgatgttggtcaatccacaaagaaaggatctggtggatacatagggaagaaaggaattggcttcaagtcagtgtttcgggtatgtacaacccaagctttaatgagtttaggattatagtatgttaagctaagaataggccttggaatttctttctattccaaaacattctctagagacatgccagcttgaaaggcttatatgaactttaagctcaattgttagacgaattatagcaaattctttctcaaataatcccttgtaacgcttttgcttgggtccactttccaggtttctgatgctcctgagatccactcaaatggtttccatttcaagtttgatataa

SEQ ID NO: 184539 - DNA, 282 bp, Arabidopsis thaliana landsberg
atgaaaagcgtatcggctgcaaccgtcactgtggacggtctgtccggcgatacgatcatattaattgccttaccggtaggatcgaattcatacacctgcccatgcgcagtataaacgttaccctggctgtccgccacatagctaaactcccctttttcagcaaataaatggggctccgacaaatgtccttgcgggcctacattgaaccgcacgggtcttattaaatactcgtcggcgccgtacaatactcttgcgggcgccccctccaccaacgcgttctaa

SEQ ID NO: 184540 - DNA, 421 bp, Arabidopsis thaliana landsberg
cgtcatttctcgagagacatccgattgaaaaaaacatgcgtcactcaatacgtcacaacgtcatgtctcgtaatttctttaatcataatccatcaaaccgaaacttcgatggttacatctataggacgatttcacgttagttagcaaaattgcttcaatcacacagaaacaaatccaaatttgatcatgatatcagcttctctctattttgtttgttttttaaaaatgttattcaaataataattgtgttaatatgatctctatatttcgtattgccgtagaccatcatcatgtatgaaatcaatacccattttcccgccattttgttttgccagttcttttgatcagtgaaaggaatatgtcagttagatttgccctttctccactaagacgtgaaacgttagcgtttcggggaaagtag

SEQ ID NO: 184541 - DNA, 153 bp, Arabidopsis thaliana landsberg
ggttttggtccttcatcccgttagttcgttttttgtggcactggcgggtgcctttatcttggtggcggacggcttgcttactcttcgcgcctccttccctcgggtttctgtcgtagatcgggccttcctctttgggttatctccgttgccttg

SEQ ID NO: 184542 - DNA, 531 bp, Arabidopsis thaliana landsberg
atgtacagaaaccctaagaagatgcgttcattggaaaaagaaggacagcagcaaaaggtagatgccatttcttgccgaccagaaaacaggggtggtaaatctcacgtgcaagcttccttaaacaatcacaaaactggttactgtcaaattgtcagggtaagatcaaaagggtttagtgagagtgttcgtgctgatgattgttctgatagcgatgtatgctcagttggtagttgtagtgctactagttatgatgagagtaacatgccaccttgtatgctagatggctctactcaacaggcagactcatgtagcagcgatgctgaatcttcttgtggcctgggggaagaaccaaggtggaaacattcatcagttggtgatggagcaagaaattcttgtaggtcggaactatattcttaccgcagtactctgggggaattattttcttctggtcccctaagttgggagcaagaagcatcattaactgatcttcgtctttctcttaatatatcagatgatgaacatttgatggag

SEQ ID NO: 184543 - DNA, 352 bp, Arabidopsis thaliana landsberg
atgctgggctgcggactttccttcgaaagccttcaggtgttccaaaatttggtcaatcgaggaaccactgtcttgttaaggacgaacaacaacgatctctttaatgtgcaaacatttcttaccagtgtggacggtgatatcgtacaagccatgaccgctgttcagaaatctctctttgtagccactggcgcccgagcgatgaatgatggagagcataacatggtgaaggatctctatcagtcatttatggactgctatgacacgataaagatgaaaatacaagatttcccctttgaaagaagcctagtctcaacggctgggattctcggcttatcccgacctgctcttccag

SEQ ID NO: 184544 - DNA, 607 bp, Arabidopsis thaliana landsberg
agcaatgtcgactcagctttcggtttaatatcctgttcgattgcagttttttttgtgtctggtagtttcaaagtcgatagcatagaagcaaagaagaaagaagaaaactttcgtgaaaccttgagggatatggcgaatagcaaatacgagtatgtgaaatcattcgaattggaggatgaagtcatgcttcctaacttgatggttgttcgaatcgatggtcgtgatttttctaggtaaattttacagattgtgtataatataatgatctatatgaaatttatcactactccaatgtcaatggtgatggtgtgtagattgtagtatctctggaataattgagggaaaataatgattaaaggctgcatctttgatggattttggaagcatgatttgacattgttcctgaaagaatgttttttttctttggcattttacttacacctgcttacctttgtttgataactacagattttctcaagttcatgagtttgagaagcctaatgatgaaacagccctcaatttgatgaattcatgttcagctgcggttttggaagagtttcctgacataatctttgcttatggatacagtgacgaatacaggtcctaa

SEQ ID NO: 184545 - DNA, 242 bp, Arabidopsis thaliana landsberg
tgcactgtcgtaacaggtctctttaaacacaagcctctggtccatgttggcgaactccaaggagacaagacatgtgaaccctacatgagagaacaagggggaggtaaacatctatatttctagtgtggcaagtaaaagaaggctttacaagagtgaaacggaaggtacaaccatttgcagacatgaccattacagagacacaaaacaaagtagaatttaggactttacagatctatgtctaa

SEQ ID NO: 184546 - DNA, 574 bp, Arabidopsis thaliana landsberg
gttcttgttatgactccacaaatacttctgcataacttacagcactgtttcatcaagatggagtgtatctcccttctaatatttgatgagtgtcaccatgctcaacaacaaagcaaccatccttatgcagaaatcatgaaggtatcttccttcacattattggtatatcgtgcttgaaacattattaacatataatcaacttttagttgctccactttgttgcaaatgcaggttttctataaatcggaaagtttacaacggcctcgaatatttggaatgactgcatctccagttgttggcaaaggtaggcccatttttctaatggtgactatggattgctggtccattactgtccaaagattttattatgatttagcttctgcattgagttccttttgttcgttctctttcggttgtgaggtttgtcgtgatcttgataatacatgtttacttttgatcatctcgttctatagatggtccacctcttgacagctttacctacttttcagggtcttttcaatcagagaatttatcgaaaagcattaatagccttgaaaatttgctcaatgccaag

SEQ ID NO: 184547 - DNA, 172 bp, Arabidopsis thaliana landsberg
atgggcgagttgaattacttccttgggtttcaagtgaagcaactcaaggacggcactttcatctcccaaacgaagtacatgcaagacttgatcaagcggtttgggatgaaggacgccaagcccgtaaagactccaatgggaactgacggacacgtcgacctcaacaaaggag

SEQ ID NO: 184548 - DNA, 825 bp, Arabidopsis thaliana landsberg
  unsure (1)..(825): unsure at all n locations
atgcagctcgatctctatgtgatgaagaaagacaaagatattctggtcgtgagtctgtacgttgatgatatcatagtcaccgacaacaatacgcaactcatcgacaaattcaaagaagaaatgaagatggagtttgagatgacagacatggaaatgttaaattactttctgggcatggagataattcaagatgaacaaggagtctttctttcacaagaaaaatgcgcatgtaaacttagtgagaagtttgatatgaaatgaagcaaaagtgtaagcacaccacttacaccacacgacaaggacgttgaagatagtgaagaatatggtgagccaacaaaatatcgaagcattattggtggattactatatctatgtgcatcaagaccagatctgatgtttgcaagttcgtatctctcacgatacatgtcgaggccgcttaataagcacaatcagaaagctaagagggttctaaggtacgtcaatggtacgtctcgctatggcgttcagttttcaagtgtnnnnnnnnnnnnnnnnnnnnnnnnnnnnnnnnnnnnttggggaggttcaaatgaagacaagaagagcacatccgagtacgtcttctctctaggatctacaatgttttgttggcaatcaagcaaacaacacacagtggtgcaatcaacagtggaagcagagtatatcgcaatttgtgcagcagcaaatcaagcaatttggttacaaagacttccggaggacattggttttgattctcaagaaggagttccaatttactgcgacaacaagtcgggaattgctattgggaagaatccagtacaacattga

SEQ ID NO: 184549 - DNA, 131 bp, Arabidopsis thaliana landsberg
tttgttgggcttttggagtaaagagttcaagtccaacaactaagtcgataaacagccaaatcctcgtagataaacaggatccagctacatatgtcgattcacatgcatcttttaatattcgtcctcggtga

SEQ ID NO: 184550 - DNA, 3096 bp, Arabidopsis thaliana landsberg
atgagtgagattattgcagtaaacaacaaatcaaaagatggaggaggatcatcgtctattcaatgtccgatgttgaataacacaaactatacggtatggtgtatgaggatggaggctgcactacgagtgcataaagtctggggaacaatcgatcctggattagagggcgaagagaaaaacgacctagcccgagcccatctcttccaatctattccggagtctcttattctcctagtcggagagctgaagtcttcaaaggcagtatgggataagattcaatctaggaatcttggagcagaacgagtcaaagaagcagagctacaagctcttatggcagagtttgacaaactctagatgaaggatagtgaaactattgatgagtttgcagggagactttcagaaatttcaactaagtcatcatctttgggagaagatatcgaagaaacaaaggttgttaagaaatttttgaaaagtctaccaaggaagaagtatattcatatcgttgcagctcttgagcaagttctagacctcaaaaacacaacattcgaagacatagtaggaagaataaagacttatgaggacagagtgtgggatgatgatgattcagtagaagaccaaggaaaactgatgtatgcagattcacaatctcagtatgtttctcacgatggaggtagaggacgaggacagacttgtggtcgtggtagaggcagaggacgaagtggttacaagcagagagacaactccaaagtgacatgttatcgatgcgatagacaaggtcattacgcctctaactgtccagataggctacttaagctaatcaagctccaagaaaaacaacaagagaatgaagatgatgataatgatgaagcggagtcactgatggtacatgaagtggtctatcttaatgaaagaaacatgaatccagagatccatgaggcatgttcagacaagtcttggtatctagacaatggtgccagttaccatatgacaggaaaccgtgactggctctgcaaacttgatgagttggttacaggaaaagtgaagttttgtgatgattcacgtattgacattagaggaaaaggatcaatcaagtttacaggcaagaacggcgagtctaagatactagctaatgtctactacataccggatcttaaaagcaatattataagcttgggacaagctactgaagccggttgtgatgttagattgagagaagactatttgactctacacgatcgtgatggaaacttactagtaaaagcgacaagatcaagaaaccgattatacaaggtagatttgaaggttgagagtactaagtgtctgcagcttgtggcactaagcaattcaacaaagtggcatgctcgtcttggacatattaatcttgaaaccataaaatcgatggtaacaaaggaactagtagttggaattccaagtgtaccaaaggagaaagaaatctgtgcatcatgcttactagggaagcaagcgaggcaagcgtttccaaaagcaacgagatatcgtgcttcacaaatactagagctaatccatgtagatctatgtggacctatctcaccatctacaactgcacaaagaaggtatattcttgtcctaattgatgattattctcgattcatgtagtcattcctttttaaggaaaagagtgagacatttggaaaattcaagggatttaagacactggttgagcaagaaaccagagagaagatcaagacattcaggacagatagaggtcgagagttcctatctcaagaattccaagcttattgtgaaaaagaaggtatcaatagacactataccgcgccatacacaccgcagcaaaacgacgtcgtagagagacgaaacaggacgctttagggaatgactagaagtatcatgaagcatatgaacatcccaaattacttacggggagaagcggtaagacatgcgacctatcttatcaacagagttggaacaagaagcttggaaaatcagacaccatatgaagcgcttaagaagaggaaaccaaatgttgagcatttgcgtgtctttggttgtgtgagttatgcaaaagtttaagcaccaaatctaagaaagcttgatgataggtcaagaatacttgtgtaccttgggacagaacccggttcaaaggcttatcgacttctagacccaacagcaagaaagatcactgtgagcagggatgtagcgtttgacgagagcaaaagttggaagtggaatgactcagacttactctgaaactcaaagagaaccaggaatgttcacaatctgtcacaattaagtcagaaacaatgaagaagcagagtaagaagtcattgatgaagaggttgaaaacagaagagatgacatagtgatgtagatgtctatgaagaagaagacaccaacgtcaccaataaccctctgcaaatttcagaccactctgctccagtagtgacacgatcgggaagacaagtcataaaacctgcatatttgaatgattatatactgatggttgaagctgaaggagaaagactgttggtagtactcaacgatgaaccatgggatttcaaggaggcaaataaattcagagaatggcgagatgcttgtgaggaggagattatgtcaataatcaagaacaaaacttggagtctagttgatctccctgctggaactaaaccaatcggtttaatttgggtgttcaagatcaaacgcaagccagatggaaccataaccaaatacaaagcaaggcttgtggcaaagggatatgtgtagaagcatgggatagacttcgatgaagtgtttgccccagtggctcgaatagaaacagttcgttttatcattgctttagcagcaactaatggttgggaagtacatcatttggacgtgaagactgcatttttacatggagaactaaaggagaacgtatatgtcacccaaccagagggatttgtaaccaagggaagtgaagaaaaggtatacaaattacacaaggcattatatggactgcgacaagctcctcgagcatggaacattaaactaaatgagattctgaagaaactatcctttgaaaaatgctccaaggaaccctctgtgtaccggaaacaatag

SEQ ID NO: 184551 - DNA, 633 bp, Arabidopsis thaliana landsberg
tttttaagggagaagaagttcgagcagaagattccgagagtggagataggagatgcggaaaatataacgtacaaagacgcaaagacggcactgagaagagggatactctatttcaaggcattgcaagctgaggatggacattggcctgctgaaaactctggttgcttgttcttcgaagctccctttgtgagctattcttcactctctctactaatactatactattcttttgttttctattcattaaatatatatgtaaagtgaatgatatggtacttttaggtcatatgcttgtacatcactggacatttggagaaaatcttgactttggaacatcgcaaagaactattgcgttacatgtacaaccatcaggtgaacttattatgtaacacatttgataacatatagcttctttttagtgataagcccctctctgatctttactatgatagttttctgacgttaactacgaggataattattttggtttatagaacgaagatggtgggtggggaatacacgtggaaggccaaagcgctatgttctgcacagtcatcaactacatttgcctacggattctgggagtagaagcagatcttgatgatattaaaggaagtggttgtgcaagggctc

SEQ ID NO: 184552 - DNA, 378 bp, Arabidopsis thaliana landsberg
atgctttgataacatatcggaaacacttactccaatcaataagtcaactataaatgagaaagttttacctgcttcttcattcgtttctccaccaatctcaagatcatccaaaacttcgaatgcaagcaatcatgacaacattttggaatctgcactagacagcgagaactatgatcaatactattgttcatcagaaggttagtttcattcatatacaatatggctttttgaacagctacacgcattaagtaatcagacaatttattaatatgtgttgcagaagaacaagacgaacaaatatatgattgttcaagtgctgaagaggatactgatggacagtcagatgttgaaattgatgatacaaaagttttagaagaa

SEQ ID NO: 184553 - DNA, 296 bp, Arabidopsis thaliana landsberg
ctagtttccatagctttctggactcggttctaaactctctgacaaagtctccgacaccggagattggagggatatcgacggcggtagaggagaaggagacaagagaagatgctctgcttccgactccaagatactccatcaatgctttttgggtcgccgggtcgagctcctcctcctcagttgacgccagaaacggatccttgaagtcattatctttctccattctccgacgacaagagaaagagaaagagagaaagagagtgcttaaagttaaagaagaagaaggagatcaatga

SEQ ID NO: 184554 - DNA, 410 bp, Arabidopsis thaliana landsberg
atggaacaggtatgggtgaaaacaccagaagtcttggcacgagaccgtcttcttggatctttctcggtaagctatccatcatgaagcatgtcaaaatccttgaatttggtctaatgtatgtatcatatttcaggggtctgctaaagtttctgtattcgttttgtgtgtgtgtgttgtttttccaggtaaagccagttcttgcgagactgaaaaacacgctagttattctcggattatcgctcattcttgttataaaccttggtgattctccaattgcaacgtcttatagaacatacagggatcctagggacagatcctcgctgccaatcccaggagcgtacaatgatgaaaccgcaagaactttcgaaccagaagctttctgcggtgaaccatcttccgatcttttttga

SEQ ID NO: 184555 - DNA, 771 bp, Arabidopsis thaliana landsberg
agcagattgtttctttaaggttggaatgtgggagagctcaatagaagattgtaaccatgcattgcttatactaccgagttacacaaagcctcgtcttcaaagagctgctttatataccaaggtaaaatatatatggtatgatgacttagttttgcatttcacttgcgctaagtttctttttgatgaaactgtagttggaaagatgggctgaagcagtgagtgattatgagatcttaagaaaggaactgccttatgacaaggaaattgctgaatctttatttcatgctcaagttgcattaaagaaatctcgcggcgaagtagttctaaacatggaatttggaggtgaagttgaggaaatatctagtcttgaagagttaaaagctgcattaactcgtcctggtaagtgatatcttaatcttctatgctcttatagtcagtgaactttcattattaacttgttgtacatatacttcattggcaggagtttcagttgtacacttttttagagcttctgatccacaatgcaaggagatatccactttcgtggacgcactatgtgttcgttacccatctttgcatttcctcaaggtgaaaaaacaaaaactttgaaacaactgtttatatgtaaaccaaagaacaagtaaacttacttgtgaaattgtctttcaacaggtggagattgtaaaatgtccagaagtgggtaatgcagaaagagtgagagttgtgccaacatttaagatatacaaacttgggattcggatgaaagagatt

SEQ ID NO: 184556 - DNA, 661 bp, Arabidopsis thaliana landsberg
atgcgtcagaggcttgaagcaagaaagttgttggtggacaagacatcagttgcttgcaaagttactgagcaggatgttaaaaagaaagaggagaatcttagtacagaagtgaggtctttgctagtaggcggaacaaccctttcgatcgctaaaagcaaattgcaggtattacctcattcagtgcagaattatcttattaggaagcaaggtgcatcagttttgcatatcctggtgtttggctatttcaaattagttgtttccccatgttctcttggtctcttctttggcaggagtacagtttattttacgacttacgttttcttcttctaactgtattttagttctagtatgaattatttgatagctgtttctttaaagaaggaaagctaattttcttcagtatattctccattctatgaacaatttgtgaatgattgaatcatagatacactgttttaacttatttttctcttttcataggaatcaaactgccaactagaaggagaaagtggttatgcacatttaaagattgtaacgaataagctgagaaagaggcagcagttcatggtatctcaagtttcatttatctatcccttgaagattgaggctggaccttcacaagaccaagaactggaatcatttcctggtggcagtagattag

SEQ ID NO: 184557 - DNA, 549 bp, Arabidopsis thaliana landsberg
ttgggactgcgacaacatcaaaacctaattctagtgatgtgaaaaaggcatctcgcaacgcccttaatttcttcgacaggtaattggaggattggatgtcatttttctcaactagaacttcattatatcccaagctattatcacccatagaaatggtggatgacttgcctcatcggaattaatttcaaccagacagctcagtgacagaaatcatgactaattgcattttgtctggtaaaaacaggtttaggaagtcaaggaaagattatgaagatccagaggatgtacaaaatcgagcaactgcaaaaagagattcacgtcctcttctcttcaagtttaacgaggtatgtcacaacctccgggatatagcaaccaaccaaaagctcctctaaaggatgattctaagataactatatacaaaccttatgagattcaaacttaaggccaaattcgaaatattgacactgatgttatgtgtatgctttatacgtacagggtttcacaaatgctgtgaagagacccgttagaatgcgggagtttctactatga

SEQ ID NO: 184558 - DNA, 54 bp, Arabidopsis thaliana landsberg
atgctgctggtggtggtcgtgaaggacctgttggtggttgttcttcacgtgcta

SEQ ID NO: 184559 - DNA, 371 bp, Arabidopsis thaliana landsberg
  unsure (1)..(371): unsure at all n locations
atgcaaggcaatgtaggctacattcgggtcttcatcgccttccacggcagccgggtcttccaccattctcactaccaggtcaaattcatcccataccggcagtatgaaaggatcgccgcagcggtcgcaattaacggttacatcccctgttacttcaaatttcagcaaaaagaacctgttctttttgtccagcttcagnnnnnnnnnnnnnnnnnnntcgctgaaatcgggggtgccgaaagcggcaaaaaacttgtcatcaatgtcgtaattaaactcatgctcacccgctttcagccctacaaatngcgatctcaaactgtctgtgtggtctcatgattcagctcccctccggaaattgagcggcaaag

SEQ ID NO: 184560 - DNA, 73 bp, Arabidopsis thaliana landsberg
atgcagctttctcttatgagtcttgttctagggttcctctttgtttcctgtgacgcgtttgcctctaaagaag

SEQ ID NO: 184561 - DNA, 387 bp, Arabidopsis thaliana landsberg
aaatgattacatatgatggcttggaaacttgtattatcaataatcaatcatatgaagaagagagtggaacaagtcgaggagatggatgtcttacagattcgttagatgatgatgcattttcaagctgttcatcaagcaaagatgcctctagctctttttcttcgaaatggttaccgatgaagaatgatgaacacagttgcgatggtttgaacttatctggaaggtctcaacattttgatgctaaggagaagaagaaacaaggctatggcagtagccaacattttgatgctaaggagaaaccagggtatgtgtactgtcatttggatgtggaagctatgaaggagaaattttctaagttattgctcggcgaagatgtcactgggggat

SEQ ID NO: 184562 - DNA, 179 bp, Arabidopsis thaliana landsberg
gttttcaaccagatgaagaaatgaatgaaatctgcaagactgaatttcaaatgcgattgctatggggcagcaaaggtgcacaagtcaatcgggcagagagatttgagaaattcaaccaggttttaactgccctctcgcgtaaattggaacctcctcctgtaaagcatgcagagctttga

SEQ ID NO: 184563 - DNA, 200 bp, Arabidopsis thaliana landsberg
atgatacagaccaggaagcgggaaaatcaggttgaaattgatcggctgaggttcatgctggtacattgattgctttctctcaatatgtggacccgataaattaaaatttgctaactaaatttgttgataattgattgcatggttaggatcaaaaagagcatgagttgtcaaggctgaaagagcagattgaaaaagaaaag

SEQ ID NO: 184564 - DNA, 130 bp, Arabidopsis thaliana landsberg
ggtttcgatcgagttgggaagtatcgacgacgaacgaggtaaaatcgatgaaggtacgtcggaattagccattaacatcgtcgtcaaagttcgatttctggagtgtgaaaaattagggtttcgtcgatag

SEQ ID NO: 184565 - DNA, 1528 bp, Arabidopsis thaliana landsberg
  unsure (1)..(1528): unsure at all n locations
atgtcaactttggatgctagtcaggatatgacaggatcattttcgccttcatcaccacctcattatcaaaaggatgtcttacaccggcgtcagatcctggtggaagacatcttacagatatcagcagattcttattcagtggcttcnnnnnnnnnnnnnnnnnnnnnnnnnnnaaattatgattctgagcaatcaaatcctgaacaggatacgttgaaggatcatcttagtggcaatagaggagaagacacaagcttgcttgactctcaaccagagaagagtagcatcataaagtcttggaagatagaggattcgttcaaagcgaagaccactaattttctttctgggctacataaaagtgagcttgcttctggtgttaaccagatttaccgttggtttgacaaaaagcaaagcaagaggaagcctaaaaaaagaaatgtttctccactggaggagaatagtttcataaagaaaggagaaacatctcatagaagtgatgcagatatcattgattcttgtgaagatgaatatatttctgatcattttcaagaaggttccttgactacaggttgtaatagtaagagaagtactagatttttggaaactgaaaaatcccttgaaggaatgggtggtctagtggaggaattttttacaacgacactgtcagattccagcaatgatgagacttgtaggatttacgttagttgtgattgcatactacagcaagaatccacctataagcaacggtaagttttgttccatctattattgtggtttaggtgaaagaaaaagtaacctgagtcccttctgtctttagttaaaaacttgatggaacatgctgagtaaaaaaaagaggttattgaggtcgcgtagtgcttctctagtttggtaggctttatgcaatttgaaaaggaataactggtcaatggaattagattgagatgttctcggttctcttgtaattcacatgtatgaataatatactctttactttataactacaaatttgtcttgagaagccatttacaaggatggcgctcttcttttccccctgacagtactctataaatgcagggaagtagtgttgctgctgagtagccaagaaaaactgtatgtgctgctcgtgggtgtttccactgatttacaaggttagactgctcttccctgtctttctcttattctttatgtccgaatgtgttatgttctgttgatactgatttacttttccttgatccctggtgtctgcagagagcagcttaagtttattgtgttcgcatacaatcggggatatacgagatgtctcagttggtctaggacttcaggttgtgaggttagtttttcatggctccgctttgaaaattgattatgtgcccatgtctcactttccttctggtttaggctacgttttagggaggatgcagagtacattttcatgacggcgagcattgaaaaaacaacagttttactcaatatcataaaattcttggattatcaggttacagaatcaaaattttctttgaagaggtga

SEQ ID NO: 184566 - DNA, 66 bp, Arabidopsis thaliana landsberg
atgcagtcctgggcggtaccaacggctccagtccggagccggagcatcaccattgtacggacgggg

SEQ ID NO: 184567 - DNA, 114 bp, Arabidopsis thaliana landsberg
gcggaggcggatcagggcctggaggagaaggaggaccaccagcgccggcccggcggcgtaaacggcggggactcgctagtaaaacgaagtttcgacggtgaaggtgatacggcg

SEQ ID NO: 184568 - DNA, 248 bp, Arabidopsis thaliana landsberg
atgggtccggacatccgcagagggacaccggacccctgtacgtatgagtccggagctcccaagagggcatgccaggtccctcgggtaagctccaggtccctccgagtaaggttcgggcctcggcaagatcccgatacgaggaggaccccggcaagagtaggggtccagtgccggcacgtgtccagaccatgccctaccttcccgctcaagcagagacccgctgctgccatgtggcttatggctcgtga

SEQ ID NO: 184569 - DNA, 198 bp, Arabidopsis thaliana landsberg
gagagaggaaaggagacgaagcaagaagaggaggaaggaagaagaggggaaagaaagaggaaggaagaagaaggtgaagagaaaaaaaagaggaagaatatgagaaaaaagaagataactagcttccagctcctccttgccatggatcctcgattcgcctctgcgattaatccatccccaaattcacaaaattggtag

SEQ ID NO: 184570 - DNA, 512 bp, Arabidopsis thaliana landsberg
attttgttgaatgatgcgaatttcgaggaggcactcaatctcttggaccaagcggcattagaagagatacatcttgatgtcttatcatacaacaccattttgcgtaaagcgtttgagaaggtaaagatatttgttgtaaaaacgcttaaagtaatgaaagtgaataaactgctttagtatacacataacttttgtctgcagggaatgattgatgtgattgagtacatagtggagcaaatgcaccgagagaaagtgaatccagatccaacgacatgtcattatgttttcagttgttatgtggagaaagggtatcatgcaacagctatagaagctttgaatgttctgagcttaaggatgctcaacgaagaagacaaggagagtcttcaggacaagaaaatagagctagaggaaaatttcgtcatgagcgaagaccctgaagctgaaacaaagataatcgaactgttcagaaaatctgaggagcatcttgctgcagcacttctgaatctaagatg

SEQ ID NO: 184571 - DNA, 608 bp, Arabidopsis thaliana landsberg
tccaccctccccttccaccgtcgccaccacaagcaggcaaccactcttacctcacaactctaggctttggctactccatagccatagctctcggttttctcgtccttctctcgaccgtccttttatcctcatacatctgttgccgtgactctcgccgccgcacaaccgccgtggaatccacaggcgatcgtggcggaagtgtaatcctcccccgcataatctttgtcgccgaggaagacaatgaagatctcgaagcaggtgatgtcgtggtgggacttgatcaagccgtcatcaactcataccctaagttccacttttccaaagatacctccgccgcgtcctcagatggctttggtggcggaggagacacaacgtgctcgatctgtttatgtgagtataaagaagcggagatgctgaggatgatgccggagtgtaaacactacttccatttgtgttgccttgatgcgtggcttaaactcaacggatcttgtcccgtgtgtcggaactcgccgcttccgacgccgacatcaacgcctctgtcaacgcctttgtcagaagttgtgcctctctcccagtacgcggccgatcggaggagagcaagaagatga

SEQ ID NO: 184572 - DNA, 1336 bp, Arabidopsis thaliana landsberg
atggtattggtcactgttttaatcattcttttcacgggtttcagaatctctcaagctacgtctcgtactgtcatctttcgcgagcagtcaatggttgataaacatgagcaatggatggctcgattttctcgtgaataccgtgatgagctcgagaaaaatatgagacgcgatgtgtttaagaagaacttgaagttcattgagaacttcaacaaaaaagggaacaaaagctacaagcttggtgtcaatgaattcgcggattggaccaacgaggagttcctagcaatacataccggactaaagggcctaactgaagtttccccatccaaggtggtcgccaaaacgatatcgtctaagacttggaacgtcagtgacatggtagtcgagagcaaggactggagagctgaaggagctgtcactcctgtcaagtaccaaggccaatgcggtaatattctttcattgattatcaagttaatttacaattttagtttttagaattaattttcaaatatggttaaattaattatgtttcattttggttcatagaagtaagaataacaatttagcatgtataatatctagaatcaaatacaatgcaaaggcgaaaacaattgggaggatacaaaatattaaacttgatgtccaagttagttatagggttatagtaagtagggttcagtgatgatttggtcattatattttgtctcgtttctattatgatcggcatccaacttaccaaatatccatatctacaggatgttgctgggcattttcggctgtagcagcagtggaaggtgtggctaagatcgccggcgggaaccttgtatctctgtccgaacaacagcttctagactgcgacagagagtacgaccgaggctgcgacggtgggataatgtcggacgctttcaactatgtagtccaaaatcgaggcatcgcatcagagaatgactactcttaccaaggatcagatgggggatgccggtccaatgcaagaccagctgcacgtatcagtggattccaaaccgtccctagcaacaacgagcgggccttgctcgaggctgtatcgaggcaaccagtctctgtgtcgatggacgcgactggggacgggttcatgcattactcgggaggagtatatgatgggccttgtgggaccagctcgaaccacgctgttacgtttgttgggtatggaacgagccaggatggaactaagtactggctggctaaaaactcttggggcgaaacttggggagaaaaaggttacattaggatccgaagagacgtggcttggcctcaaggcatgtgtggtgtagcacagtatgctttttatccggttgcgtaa

SEQ ID NO: 184573 - DNA, 1120 bp, Arabidopsis thaliana landsberg
  unsure (1)..(1120): unsure at all n locations
atatcagcgcaaaacttcagtgaacatcaaagacggtgcctctgatgaatgtgtcattgttgacacaagtcatcgatttggttttggaacaaagcgacctcatgcagaaaccagtagccttgcaaatgatggggaagtaaagaaagatggagctcctaatggatttgtatccgccaaaataaaactggtagatttattcatgacaattacttctcttagagtcatcttgactttgcagagtcttttctttcgaactgtgctttattaccctttgctaatgttgactactatatctgttgctttaggaaatggatgtaagacaaaaacgaggatcaactgagtcaccaagnnnnnnnnnnnnnnnnnnnnnnnnnnnnnnnnnnnnaggtaggggctatggttcaaggtcgggtggattaagacgtggataccgtagtaattttgtccctcctgttaaaactaatgggaataatgttggaaacttgacgtctcgtattggtggaaagactgacgatgcactggatgactcaaccagaacatggttagttgcgtaatttcttattttgattcaagatccttagcaaactggaaagcacatgcaccctttttatatcctcaccttcgacaataaataagcttatgtaatctgtttttcttgtcaatatttcttgatttnnnnnnnnnnnnnnnnngcctgtctctgcccttctctaactaagtttctatattaaacattgtttgaatttatttcacattgaaacactatgaaaagtaaataaaaaatagtatatgcatgtcaataggactagcaatttaagcgtctacactcatctggtggttagccagttaggccctcgttcttatttagaatgctacttcacataggtttctaattatccagtagccttctacgcctgtaagcctgaaaagattaattttatattatgagataacatgcatgcccatttacttactatcctgttctagtttggagatgctctgtggtcctgatggtgagcttcccgagaagttgagaaatttggaacctcgtcttatagagcatgtcagcaacgagattatggatcgagaccccaatgtccgctgggatgatattggtaca

SEQ ID NO: 184574 - DNA, 203 bp, Arabidopsis thaliana landsberg
ataggtcagaagaatttgatgatcatatatttgactgtagtagtcaagaagagtatgagtcggacaaagatttaccgagcgatcaggttgttggacctaaatatatgatcgacatgaaagatttgttaataaggaatttaaacaaggagtttggtgttgcagcttcaaacaaagatgatttgttaatatattatatatattag

SEQ ID NO: 184575 - DNA, 174 bp, Arabidopsis thaliana landsberg
catcgtcggcgaccggcctggtcgacaccaacacgttcccggaaagcctggtcaagcgcgttgaagtcgtgaccggtggcgcttcgtcgcagtacggttccgacgccgtcggcggcgtcgtcaacttcatcctcgacaaggaatattccggcgtcaaagggtcagtcgagtacg

SEQ ID NO: 184576 - DNA, 72 bp, Arabidopsis thaliana landsberg
cccatgaaagatatggcggcaaagattttaattgcgccgatactcaatccccttcctccgattgccgtgtga

SEQ ID NO: 184577 - DNA, 89 bp, Arabidopsis thaliana landsberg
atgacgcaccgtcggcatgccacttatggcttgcgcgtcacatgtgcgtacagtgtcctgggcggatggctccgatacagcgggggcgg

SEQ ID NO: 184578 - DNA, 666 bp, Arabidopsis thaliana landsberg
atggtgctgaagacaccgagtcttgtgtaccttgactactccagttatgtcgctggaaactattatgttgttttggattcgctagtcgaagctagactggatcttcgattatatgagccaatcatctatgatgaggatggtttgtggaatgcagaagtttttggcaatattacgaatctgattgaggcgatcagaaccattaagatccttcacttgtctcctagttctctcgaggtcagcttcttctcttgagtcttcacatgatgcaggagagagccagtctagtgctagctagcaaggtctttaacttatttatatatggcttacacatatcaggtgttttactattgttgtgatttgccggtgttggaagatctcgttaatttatctatcgaaagtgacaaggaaaaaggctgggaagtaatgccaaggctgctcaacaagtccccaaatctacaaactttagtcgtcaaggtattatcatcttttcaagaaaacacacataaattctgttccttcttgtcattatacatgtcaaatggtggtgtggtttcagggtcttgtgcacagagttacatattgttgtggagacgcgtgcgcttgcatccgtatgaaggacagggagatagtatcctgtttgtcgaggtgtcgagtgaaggtgcttaa

SEQ ID NO: 184579 - DNA, 167 bp, Arabidopsis thaliana landsberg
gtttgttgatttttggcgatgaatcttcacttatttatgagaagttggtcccttcgctttcacacttcaaaaagtccctgcttcggtgtagttcctatcggctcgatttgatggctgcagacaaaaagtcaaaacaactaactcattcaacgaactcgtttttttga

SEQ ID NO: 184580 - DNA, 289 bp, Arabidopsis thaliana landsberg
ctctgccattttttcgtctgcaataagagagaaaaaaatccagagagaacgacaaaattaggaagagatcatagacgaaacagtaaccaaaacgaagaagaaaccctaataagctttttctctttcttcttaatcccgaaaatggagtatgagaaatctcccactgctactactttgtctaggaagattagtaataatcgtagccatagtcttagctttagtgcaaatgccgtatacgacggatttttttcttcttcggagaatacgaaatctcctttagttgattacg

SEQ ID NO: 184581 - DNA, 66 bp, Arabidopsis thaliana landsberg
aatgcatttgtccatggggaactcgatcaaagttaccaagttgtcaaatcatatgtgcgcatttag

SEQ ID NO: 184582 - DNA, 362 bp, Arabidopsis thaliana landsberg
atgagtccgatcgtcataacccagttagctacaggactcagcgttttagccggtgcggtgtttatcaaatcggtcatggaccaaaagcctatggctggtcaattccctcgttgtccaacttgtaatggtacgggacgagtcacgtgtttctgttctcgatggtctgatggtgacgttggatgtcgtaggtgttctggttcaggtcgtgcggcttgtagcaattgtggtggttctggaactggtagacctttaccggctcagattacggttcagccaccgaatcgtccttattgatgattctcaagaaatttgtatactttgtaaacgattcttctctcttgaactctctcactctctgtctt

SEQ ID NO: 184583 - DNA, 1015 bp, Arabidopsis thaliana landsberg
  unsure (1)..(1015): unsure at all n locations
gatcgaaaaccgttccatgtttcttcctattcgctatcgccaagtggaaggtgtcagcgagtcttggcaatttcttcctcctaatgcggctgcttcgttttattgggaaaatcttggtagacgacatctatttgaacttcttgttgatggaaacgatccttctaattcagaaaagttcgatattgataagataggtgattatccaccacgaagtgaaagtggacctaccagacccatacgagttactattttaaaggaagacaaaaagaatattgtcagaatcagtgactggatgccagcaattgagcctacttcaagcataagcagaagacttccagcatcatccctgtcagaattatctggaaatgagtctcagcaatctcatcttttggcctcagaagattctgagtttcatgttattgatgagcttgctgaacttggaatctccgtaatcgaccatgctcctgaggaaatactgtacatgtcagtgcaaaacctctttgcggcatattcaaccggcttgggctctggacttagcaggtgagtttatcaggttcttaaggtgtagctctattttacaaatgtaagggccaccatatatcaccaattcgccatactgattttctatcaaattcgataaatctgggtactgtctctatgcattcattagtgtcaaaagttcaaaacatctaaaaatgcagaaagggatttgattgagacttgcagggaatttttttttgctaagatcatgaatttccagttgcgcttatcagattttgttggctgctatacgaacaaagtactttgggctattgctaaacgcttattgttttacaggttcaaactaaggatgcaaggaatacaagttgataaccaattgccattggctccaatgccagttctgttcagaccacagcgagccggagataaagctgattatattttgaagttttctgttnctttgcaatcaaatgctggacttgatctccgtgtctacccgtatatagatttccaa

SEQ ID NO: 184584 - DNA, 318 bp, Arabidopsis thaliana landsberg
atgacgatggatgaatccagccaacggaaaattcatgatgattgttggatttggtcgcttcacttatgtaccgtccagacaagatttggtcgtgtgtttttagtacttctctcacagcgtctcgtgaagctatgaccactgagtttaaacatccaagcttaagactcatgactggtccatatgtttttgagaggtccgtgaatgagtgatgtgggttctttccgaccagatgaatgtttccaattatgggtaaccgtggaggccccggaggtgacttggacaattgacaagggctacgtcgagatcttgcggttgtga

SEQ ID NO: 184585 - DNA, 153 bp, Arabidopsis thaliana landsberg
cttttggctaatggctactacattttcttcgacaaagttcgtccaccaacaacagatactagtagagcccgccacaaatcgcttttgctccattgtatatgggcctacttacggacccacaagccgtgcttcacaacactaacgttgagataa

SEQ ID NO: 184586 - DNA, 38 bp, Arabidopsis thaliana landsberg
atgaacgatgaggaaccatcgaatcggactaaacgagg

SEQ ID NO: 184587 - DNA, 278 bp, Arabidopsis thaliana landsberg
atggatgatgataatttcattgacgatactggtttggatccttctgagaggtatggaggtgacgctggagaccgttctacaactcattatcctcaggtatgagtagtgtatctacaattgtgatctttgagtctagcttttgattgacgatacaaaatgctattgttatgaatcaacaggcctatgagggtgaggatgaacatgaggcaaatatccttttcaaaatggggaagagaaagataatgactgaaagatatcctgcagaatttgcgcttttg

SEQ ID NO: 184588 - DNA, 532 bp, Arabidopsis thaliana landsberg
aatatgcaagagtaattggcaatttaatgtacttgacaaacagtacaagaccggatctaggcactctgtaaatgtacttagtcgctacacaagcaatccagaacataagcattggaaggctataactagatttttgaactacctacgttataccaaagatcatggcttacattattgtaaagaacccacagttttggaaggttacagtgatgccaactggatcgcagatttcaaaaactttaaatccacaagtggatacatctttacacttggaggtgtagcagtatcctggagatcttgcaaacaaactgtgttagccaaatcaactatggaatctgaattcatagcgttcgatacaactatagcggaagacgaattgctcagtaatttcttagaagacatcccaatgtgggggaaacctgtgcccacaatacgtgtgcactttgatagccaattagctataggcagggcacaaagtaccctatataatcgtaaatcttgtcacatcagacgacgacataaaactatttga

SEQ ID NO: 184589 - DNA, 79 bp, Arabidopsis thaliana landsberg
atgcggacatgtcctttgaatgctcccagggataggttaagtgatatccctggagaatccgatggaggagatgttggag

SEQ ID NO: 184590 - DNA, 378 bp, Arabidopsis thaliana landsberg
aatttgaagtttggtcgttttggttctggcgaagtacatatgattatgaacaatcaaagtttggctctcccatcacagttcttgaatgatcctgcagatgatttgtctttcagacacctgaacttaaggtaagcctttttttatctgctcttctagctttatcctttttaatgatctaatgatctcataaacattttcacagagatgaagaggaagaacaacaaccaagaatgaatgttgctaatgaaaaaatggcatatgaagtcaactcaaatgccgctcgtaattacaattcgtccccaaactgtgatcatacagaacctactcaagaaaatcagtacacgtcttcatctgctacagatgtcacattttataata

SEQ ID NO: 184591 - DNA, 403 bp, Arabidopsis thaliana landsberg
tatcttgagaaaaaggagtgagaatcctagtaagactgttcgtaagagaaagaagttgtcttcatcaaaactaggttttcggagacttgataaccagtcaaagaaggatcaacttttcaacgagcccttgtttactggtaaaactttccagtgactctttctttcagttttactttctgttgccctttgtttttaattgcctatctacatttatctgcaggcttctcaaatgttttactcagtgtctttaaaaaggattgtgtagcttcaaaatcatattttgctgctcctaaagaacctgcatctgtacctgtatcatctcctactcgagaagctgaaacagaaattaacccggcctctccagttacacaatctacagttcctgattctactaatcaagaga

SEQ ID NO: 184592 - DNA, 61 bp, Arabidopsis thaliana landsberg
gtattgtatggaactgatttgtaaaatcgagtctttggaagcggattttacaaaggagtag

SEQ ID NO: 184593 - DNA, 25 bp, Arabidopsis thaliana landsberg
atgacaaaaagcacacgacctgctg

SEQ ID NO: 184594 - DNA, 6 bp, Arabidopsis thaliana landsberg
atgctg

SEQ ID NO: 184595 - DNA, 130 bp, Arabidopsis thaliana landsberg
cgtcaccaaattaacgtcttatccggctattacccggttcacaatcggatttcgtgacgccacccgattaatcgcaaatgtttcaattaacattgccaaagaaaaacgaaaatatacaccaaaagtttga

SEQ ID NO: 184596 - DNA, 1111 bp, Arabidopsis thaliana landsberg
  unsure (1)..(1111): unsure at all n locations
acatgcacattatcatactggaaatactcctctggtgttgatatggaaggatgagagctgtagtcagtatgtcatcgatactgataacaatggagaagttccaaaccaacaacatgtaagtggattttgacagacttttacagctcatggtttttcatacaaagtgtttagtattacactcccatttacaaagtcttaacataaattctctctgtatcttgtaaaaacagattgtcttggagttgcaagaagaaggaaaacttgtaacatctgatgatccacctgtaccattcagttgcttaaatgcagattttgtaaaacaggtctgttcagaatataatagagtggtttatatatcctgatcagcctttaaaccaagattatatgatcagcatttggaaaaattgaaaattgaagaacatatctatatttgttatgatgaatgatgattatattagaaagtggacagatcttgtatcctttgttttatgattgttactgtataatatcactggttgcttcatactcagtggtagtatctatactgtgtctatgtttgttatagactctatgtactcgtaagttagtgatattgcttagtaatagcttctttgagttctttctaggaccaacagagccctctagcttagtactgctctgtttgttatagactccatgtacccataataacagattgtaaagatgatttcgcactgtgttaatttgctaaatgtgtggttcgtgccatgttggatattacagtcagggctgtcttcaggaagtcttattcgctttgccattggcgatggagggctgaaatgtgtggatggtagatttgagaaggcgtatttgcaatatatcggtgtatcaaatcgagcccgagcctttgctgatagctattccaaggtcggtactctctctccttgcatatggcatacgaattttgggagaatcatgcttatgaaattgactcaagcatttnnnnnnnnnnnnnnnnnnnnnnnnnnnnnnnnnnnnnnnncattctcccctgaaagtagaagatcttgcttctacgatttcacctgaggaccaacaggacaagccccctgaagtggagatgtccgattga

SEQ ID NO: 184597 - DNA, 625 bp, Arabidopsis thaliana landsberg
tttcatacttttctatgaagatcctgggagggtaagagtctctgtaagagttcgacctcgaaacggagaggagcttatctcggatgctgattttgctgatcttgttgagttacaaccagaagtgagttattagatgctcactaatcacatcttctctctttcaactctgtgttagttatattcttacaaagttctgttttgtttctgtgtgtacagataaagaggcttaagttgaggaagaacaactggaactctgagtcatacaaatttatgaagtctttacagacacagcttcgcaaaagcgtgtctatgaaggagtagcaaaacctgtcgtcgaggttagaaagtgtctgatgtttatataacttattggaatgttaagaagtaatacttttggttattgatatctactacattgaatttacagggtgttctgagtggatacaatggtaccattatggcttatggtcaaaccggcacaggtaaaacttacacggttggaaaaattggtaaagatgatgcagctgagcgtggtattatggttagagctctggaggttatacttctcagcgcttcttctgcttcgatttccgtcgagatctcctgtttgcgggtgtcgctctag

SEQ ID NO: 184598 - DNA, 344 bp, Arabidopsis thaliana landsberg
gtggcaatgagaatgatggttttggtattgactctggtaatggtaagtggtattctttccatttggaaaggctacattgggttaataacttgggttaattctaaaacatggctttctactagtgagtaataacctgaccaactaaaagcaactgcttgacttaactccacataaagctagtccactacagccaaacgagacattttgctgagtatgttgatgtgtactcacccttgctttacacaccaaaccccccaggttgtccgcgttgcaaccactgctcaaaagaagatgaagctgtggaaggagacttccaggagttccaagactacgacgagttctag

SEQ ID NO: 184599 - DNA, 100 bp, Arabidopsis thaliana landsberg
cctttggaccttatcgcgagcgagttgaccgaacacgagaagggcgcctttacctgggcccaaggtgcgaggcccggactgaacgaagacgcagaagaag

SEQ ID NO: 184600 - DNA, 507 bp, Arabidopsis thaliana landsberg
  unsure (1)..(507): unsure at all n locations
atgatgcttcgcgtggtgtttgatggctatgaatacgataaagacattgcgcttgccatacgctatgcagtggacaatggcgccagcgtgatcaatatgagcttcggtaaatatttttctccggagaagagatgggtagacagcgccgtaaaatatgcagagcaacatgatgtgctgatcgtgcatgcctcgggcaatgaaagcaatgaccttgacaataaggaaggctaccctaacccctggctgcgccagtggaatacaaaggctacgaattttattaccgtgggcgcgagcagcgatcccaaaatatcaggcagccttaccgcggggttcagcaattacggaaggaacaatgtagatgtatttgccccgggcgtgcgtatgtattccaccatacccggcacacataattacggaaacctgcagggcaccagtatggcggcgccggtggtaacgggactggcggcagtcatcagatcatactattccaaccttaccgcgcagcan

SEQ ID NO: 184601 - DNA, 117 bp, Arabidopsis thaliana landsberg
gtggtaaccggcgtcagcagagcccaagttccagcttctgtttcgttcgtgtgtcagcagcgagaccgccacatcaggcgctctgatgccctgcgtcccaccctcgatatgcttatc

SEQ ID NO: 184602 - DNA, 187 bp, Arabidopsis thaliana landsberg
atgaacaaggtaacttgtttgatcaaaatcccaagaaagaactctaaatgttaattgtagaaacatttcaaacctaatgatgccctttgtaatttactggcaggcttcactcaacgtaggtggcatagtcctcaacgctttggcgattgaacatttcgtcttgcggcatccttgtgaaccagaagat

SEQ ID NO: 184603 - DNA, 3082 bp, Arabidopsis thaliana landsberg
  unsure (1)..(3082): unsure at all n locations
ttgatatacatcaacatgctaacgccttatttctgcagatcgtggcatttcttcttcctcttttagatgataaattcccgctcatacggagcatatcttgctggacgctttctcgatttggcaagtatcttatccaggtatgacttgaacaggatatatcacactttaactgcttcaaacgatttttagatgattcactgtttttattttctaggaaagtggcaatccgaagggttatgaacaatttgagaaagttcttatgggtcttctccgccgactcttggatacgaacaagcgggttcaggaggctgcctgttcagcttttgcaactgttgaagaggtacctattggctttgcaatgtggtttttggtggcatttgtcaatgttggttgaccatgtaaatcttctatgaacgtgtaggatgctgctgaagagttagtgccacacctgggtgtaatactgcagcatctgatgtgcgcttttggaaagtatcaggtcattatattcccttaaagtaactggctttgccagactaaatctcagtggtggctattatctaccaaccattgtttctatatgtctacccaacatacaatttttatatccagagacggaatttaagaattgtttatgatgccattggaccctgggcagtttcagttaaagaagagttgaacaaggtataacaattgggtttgtacaaggttaatctgatcttgtaaatttagctccttgactagtgtttttcaaatccataaactggtggtagtataagtttttttctttgcctacttaagtttcctctctcatgcagcctgcttatcttgagattctgatgcctccactggttgcaaagtggcaaaaactaaaaaattcagataaagatctatttccattgctagagtgctttacatccatttctcaggtatgggctacttgtcaaggtcttaagaatatctataaggtcttgatacagttgaannnnnnnnnnnnnnnnnnnnnnnnnnnnnnnnnnnnnttatagtgttggtagttttaagatctctgaaaaagtatcctgggggtggttggtcagctaaatatccaaaacttcctgcattggatcaaagattagttttggaagcctgaaagggctattaatactaggatataacagttatgaatgtcggactagttcatcttgacctaaaattagactggttgcagcatgaaatctctatgtctaacaaattgtgttttcatgtttcaggctttaggtgtaggattcgctccatttgctcagcctgttttccagagatgcatggatatcatccaattgcagcagctggctaaggttccattcagaattctgcaatttcatctcatttaagatttagagtgacttttccagttttccttcgtcgcaggcttgcatgtacataactattgcatgcttttgttttccgtttgatcaaagttcgtttctgttgtttgtaggttaatcctgcttctgctggggctcagtatgacagagaatttattgtttgttctcttgatttgctttctggacttgctgaagggcttggcagtgggatagagtctctggtacttcctttttttgatgtcttgcacttactatttattactcataagttcaccaactgaataaattttataattgctctggccattgttgttcgtataacatgattgagttgatggttatgtgtctaatttatggcggataacacaattgagttgatttcctaaaccagatatattcttattttatcgctctatgcaggttcaacaaagtaacctaagggatctgcttctcaattgttgcattgatgaagctgctgatgtcagacaaagtgcttttgccttgatgggtgatctagcaagagtacgcttcatattcttttatacttattttctttaacataaagaaacagcaagggaagtgacaactcgtagttctgtgagattatatgttacaatttcgactcccttttgccagttatagtagtgaagtaatgtttttggctactaccgacaggttttcccagtctatctacaaccccgcctgcttgatttccttgaaattgcaagccagcaactggttcgtatccaagttttgttgatactataccaatttgcttcttctatggcactgatcatatatatgctttgtacagagtgcaaaccttaatagagaaaacctttctgtcgcaaataatgcttgttgggccattggagaattagcggtcaaggtaataccaaaatactatttcttctgttgtagcttgaagtttctggttaaaagcagactcgtgactggtaggaactcaatgtttcaggttcgtcaagaagtctcaccaattgtggccaaagttgtctcttccctaggcctgattcttcaacatggagaggtgatttcagcagcctataaaattgatctcttggccacgtctaagtctatcaaataactgcggtatttgacagagtattcctaattttattctcttgtgaagcagggtgtcaataaggcactagttgagaacagtgcaataacccttgggagactagcatggattcgtccagacctcgttgcaccacacatggaccactttatgaagccatggtgcatggcattgtcaatgttagtgaacctctttgttaaatttggagtcttttcccaacctctgctccagagaacaatttcttatcatactttcttttcagggtacgtgatgacattgagaaagaagatgcgtttagaggattatgtgcagtggtaattctctctactctttgctttgtgctcgaaacatgaaaaagtttgatatttataagtgttctccacaaattcaggttaaagtgaatccatcaggaggtgtcagctcacttgttttcatatgccaagccattgcgagttggcatgtaagtgaacagaaaccaaactgtgctaaattcaatattgttaccgagctttggaacaattgattgatacacaaataacaaccttttttttaatcacaggaaataagaagcgaggatgtccagaccgaagtctcccaagtactgaacggttataaacat

SEQ ID NO: 184604 - DNA, 1220 bp, Arabidopsis thaliana landsberg
  unsure (1)..(1220): unsure at all n locations
atggctggtatcggacaaggcctagtattggtatttctttgtggcttatgtacattcttgacgacaatatctttgagtgctattgcaacaaatggtgcaatgaaggtaattcttttttctgttatatcacctaaattttctttgaataaaactatgtaaccataattaaagatattcctccctctcttgggtctctgcctctctggtccataattgacaccccttattacttttctatttcttttgtgattgaacggtatttaagacatcaagtttattaataacttttgggttatctcagggtggaggaccatattacctcattggtcgcgctcttggtccggaagttgggattagcataggtttatgcttttttcttggcaatgcagttgctggagctctgtaagtgtaaatcctgtcaatgaatctacctaggaaatagtcttaagcttgacacgcattgcttgatgttgctggtgctctgttcagtttcacatggtcgccaagtgcttctatttactactttttctgctttcctccttatcattgtaggtatgttttgggtgctgtggagacttttctaaaagcattccctgctgctgggatttttagaggtattagttactgtggaacttgtaagaattgaaacctaaccattgaactaaagcaaagggcgactaggacttctgacaagagtaatttgactgttttttattttctctattactcttatctaagccaccactttatcatgctagttttgacacctgagatttgtttcattagttttttggaagtggcaaaatgtatatgcaacctgagttttttttcatcagtttgtaggataaacaccaaacaaaagactatattattgattaccaactactcaattttatttgacaaaaaagtttacttgttttccctgaggacataacctatatagcccacaagtcgcattcagtcatttagctgtgtttcatttttaattgcagaaactatcacaaaggttaacggaannnnnnnnnnnnnnnnnatacaaagcccgaactcacatgacttgcaggtttatggaattgttgtgacgatccttctttgcttcattgtgtttggtggcgtgaagatgatcaatcgggttgcacctgctttcctcgtacccgttttgctctctatcttctgcatattcatcgggatatttttggcaaagacagatgatcctgaca

SEQ ID NO: 184605 - DNA, 131 bp, Arabidopsis thaliana landsberg
gctcaaagaggtacgggttcaccagctggcatgctgaacttctgcaacaagaacgcctttgggtccatttgtcccggaggctttccaatgcccttgccattgttggatatgataataatatctccatttag

SEQ ID NO: 184606 - DNA, 434 bp, Arabidopsis thaliana landsberg
aacaaaaaggaactatctaaaatcaatgcatcgaaagagatattgcctcaatgctattcttcaattgacgattgtagaagaaatgtgatcttgtggatgattcatcgaatacgaaaccaggtattgaatgtacatagattgagaaattcctctgatctgcactctgcgaaaacacacaataacaatgagcaaatgttttcaaaattcaatgaataatcaaagttttttttaagaaccttgaagaatctgtcccagagaaaatcaagtggcaaatcacgtcgagcgaggaaaaggaaggcgagtttgggacgatcgccggagtatttaacgagagggatacgagatctcgcgacggagagagacgaagacagtgtcgtcgtcgtcgcagtggaattagactgacggttgatacagaagagagcgaggatgcataa

SEQ ID NO: 184607 - DNA, 605 bp, Arabidopsis thaliana landsberg
atgccagtgcacgccccggtgctcggccccgctcgcgtcgcaccgctcaacgctagacccctcgcccacgcctataaagctaaccatggccttgaccgtacacccccgctcgctctcagccccgcccaagcgcaagttcaccggagctcgctctgcgcacggcgtgccagcggccgcccaagccccgaccaccgtagaccggccactccagccctcctccaccccatccaatccctcggctagcctccccggagtcccatgaagcttcctgagccctcagaccgaacaccacatcgtctgaggtgccagattgacgtcgccggacttcaatcgaccaccgtcgcacgtagaccgagctccacggtaagccgtttgtcgattccttgcacctatagcgtccttagtacccctgtgaagcttcatgtgccacttgattgagcaataccaccgtgagtacgccggagtgcacgccgccgacgagcctgacctcctgcgcacgtggtcagaccgattccggccaacaccgtcgacgagccgcacctcgacgtcaccgctaggacctcccggacctaaccccacccttcaccggacctccctcgccgccg

SEQ ID NO: 184608 - DNA, 1434 bp, Arabidopsis thaliana landsberg
atggatggaagaagcgtgccattagaggtcactaaagatgatgaatactcacacctcggctctatagaggaagtatattatgacgaaccggaaaaaattaatcatattctccacctcatacgtgattattttaatcataggtatgtcttgatttcccccggttatgtctggttgttcttaaacaaatacagatgtgaaattgattctcatgtttcttattctcttgtgtagagacgatagagctagaatcactgcatgtatgggggaactcatgagagatcacttgaacctgcttgttcgtttctttgacttctttccagctgaggctagcgaagggttagcccaacttcaaaccattgctgcaacaagcgtatcaccgaattctactattgatgatgcggtttcatacatcaacactgtcaaggaagcatttcatgatgaacctgcaaagtattacgagtttttccagctcttttatgatatcaggtataggtatgtattgttgtgtccctcttcaattctgtttgcccttaatttcaagtctcaatctatacaacattgtgaagtgattctgtttgttatatactattctctttgtagattaattgatgttgctggtggcattacaagggtggaggaactcttgaaagctcacaagaatctgcttgtccgtttgaatgccttccttccacctgaggctcagagaatcctccatctcaagattgagcaacggtctgcatctgatattaacaagagctatcgtgtatcgagttttatcggcgagcttaaggtatagagtgctgaaatactaagtctgatccttaccatttaccattttgatgttccatctatgctaacagatccgtcgatgtacaggaaaggttccagggggatgatcgtcatgtatatgagtcgtttctcgagatattgacaatgtaccaagaaggaaacaagtccgtgaatgacttgtaccaggaggtagggttcttggttgggacactttggttggattacactttctcttagttctttggtttgatttgctttgttgtctttgcgggtcgttgcacttcttgagcatgaagatttagtcatggggtttgcagacgttttcaagagacccactgatccatcagggtcaaaatctgctagagatagctaagtacattagaagactgtctctgctttagtataggataagctctgttactagaataataggagggcttctgtttcacatttgtaatcctctctctttctctgaattgatgttgcaattgcttgtcatcagtatctgtatttctatagataactgaactcattaaagggcaaccgaagctgcttcgtggtttatgtttcttctttgtgggctattttgctttgcactttcacttgtttcttagttttggtttgatttttcatactgggccctga

SEQ ID NO: 184609 - DNA, 265 bp, Arabidopsis thaliana landsberg
acatgggttcccggaggagagaaatgtcggcgagaaattctccgttagtcccattggtggtggttcttcgagatttagtgtagcggtttgggagattagagtgttatcatcggaaacatgggtttccggtgaattgattggtttgatgatcggtgaattgccggcgacggaaggtggaccaagaaggatcgtagtggaagaagccattgaaacagaggaaaatgcgatggtgatggtctcaaaggttttgactttgaagctttag

SEQ ID NO: 184610 - DNA, 113 bp, Arabidopsis thaliana landsberg
atgtctcgtgcatgtcatgaattattggaagttactattgaactgatgattagccatgcacgagcgggtgatggtagcagacgtaaaatgatgaaaagaacaagggtacaaat

SEQ ID NO: 184611 - DNA, 282 bp, Arabidopsis thaliana landsberg
agtctttgaacaaaaatgtattgttgattcggataaaaacctctttctgcctcgaaccagtgtcgagcatatcaagacatgcgatgtcggttttgacaccgtatttctccataatctccggttccctaaactctgccaacggtatgagagctgcaagcaccaaattaaaccggattaaaccgacagatcatttcttttcagaatccataccataagaagaaagaaacttacgagaaccggatttgaaccagagggagttacgagattcatcgccagagagtg

SEQ ID NO: 184612 - DNA, 583 bp, Arabidopsis thaliana landsberg
atggagagcttgacgatgctccttatcatgggacacttcatacaactgggagtttcagttattccagtttctaccatttatgtaagtaataataaactttcgcttttatttattttaatctctattttttttgttacatagacaaatgcgattctgaaaaatataatttaattgttttaatttgctatttgtctgaaaaagagtcctgacggcgatttgattgattgtatctaccggacggatcaacgagccttcgaccacccactcttacgaaaccatattattcaggtttttattaattaagataagtttcttttatatgtatacttttgacaatatgtatatttttacaaacttaatcatttattgttttaaacaatttatgcaggaatatcctaccaacatgccacaaatagaaaaaagcgtacaagaaaattggcaaatttggcacgacaccggagaaaagtgtccggcagagacgattcgtatgcgtcgggaattgaatgcagtttttcaccaaaagcagcatgtacatgttgcaaaagagtatgaggtggccaacagagaaactttagggcacaag

SEQ ID NO: 184613 - DNA, 161 bp, Arabidopsis thaliana landsberg
aaaacaatgaacgatttaaagtcttcgattctaaaatctgttttgctgaattcatcgccaactacgcaacaaaggacgatgtaacctcttttcgcttcgataatagagtaacccaaactgtttttcattgtatctctgacgatagaaacacttggaactaa

SEQ ID NO: 184614 - DNA, 288 bp, Arabidopsis thaliana landsberg
atgcctttttacgaaggggagaattctcgtgtggcggaactgattactcagtatcctggaggcaagaatggattaataacagcgttgtcccataaggctgattcgttttccgtacttgacctggcccgaaaagacgaccggttgattcgggaaatcgcagataactatggctattcccccgatgccttgttggagcagctgcaaatcaatagattagaagggtctgattttatcatgattacgacgactacgacgcatgccggacttagtgctttagtcgccaatgag

SEQ ID NO: 184615 - DNA, 189 bp, Arabidopsis thaliana landsberg
atggacaaggagaggaagcgagcccatgagaagatggaggctcgcgacgagcttgagaagcatcatcgagcgcaggagaaggagggactaccgcgggaggcatccctagaattgtccgacggtaatgacgacaatgatggcgacgaagatgataacgggatggaggtctggctcagctttagcccaaag

SEQ ID NO: 184616 - DNA, 65 bp, Arabidopsis thaliana landsberg
tggtgttgtatgagtcaaaatcatcggccttccttttcggcgattttagtgcagtccagctacag

SEQ ID NO: 184617 - DNA, 262 bp, Arabidopsis thaliana landsberg
gatctggaccctcttgaagaaagaaagcgtgggaaatgccctcttacacctcatgaagtgggcttaatgctgcgcgctcttggttttacaaacgacacatatatctatgtcgcatctggagaaatatatggtggtgaaaagacactgaaaccactgagagagctgtttccaaacttttacaccaaggaaatgcttgccaacgatgagctcaagcctctgcttacctattcttcacgccttgctgccattgactacattgtta

SEQ ID NO: 184618 - DNA, 308 bp, Arabidopsis thaliana landsberg
atggatctggtcaacaagatggttttgttccatgtgatggcttcgtctagtgagaaggttcgatggaagcagaacgttttgtaagtgatagatgtagtgtggcatcgccaaaggtgtagctcgatgtgattattgatgcttagcaagattggagattagttcggcgatttgatgaggattactttgtagcttagtgaagaacgctcaatcgtttccttcggggatgggaatgctttgtagttcgctgaggactgaacgctccgtattttagagctagaaacacttgttggttctgcgatgaacgcttg

SEQ ID NO: 184619 - DNA, 2515 bp, Arabidopsis thaliana landsberg
aatcttaacctcggaaacaactacctctccggagatttcttaaacacggtcgtgagtaaaatcaccggaatcacttatctatacgttgcttacaacaacatctcaggctctgttccgatttctctcacaaactgttcaaatcttcgtgttcttgatctaagctcaaatggtttcaccggaaatgtaccgtctggtttctgctctctgcaaagctcgccggttcttgaaaagattctcatagctaacaattacctctcaggaacaattcctatggagcttggtaaatgcaagagcttgaagacaattgatcttagcttcaatgagcttactggtccgattccgaaagagatatggatgttaccgaatctctcggatttggttatgtgggcgaacaatctcactgggacgatcccggaaggtgtttgtgttaaaggaggaaatttggaaactcttatcctcaacaacaatcttttaaccggttcaatccctgagtcgatctcaagatgcaccaatatgatctggatttctctttctagtaaccgtctcaccggtaaaatcccgagcgggattggtaatctttccaagttagcaatcttgcagctagggaataactctctgtccgggaacgttcctcgccagcttgggaactgcaagagtctgatctggcttgatctgaacagcaacaatctaaccggggacctcccgggtgagctagctagccaagccgggttagtaatgcctgggagcgtttcaggtaaacagtttgcgtttgtgagaaacgaaggtggaacagactgcagaggtgcaggtgggttagtagagtttgaaggcattcgtgctgaacgattagagcggctaccaatggttcattcgtgtcccgcgacacggatatactcaggcatgacaatgtacacattctcagcaaatggaagcatgatctatttcgacatctcgtataatgctgtttcaggttttatacctcctggttatggtaacatgggctatctccaggtcttgaatttgggacataaccggataaccggaaccatcccggacagttttggaggattgaaagcgattggtgttctcgatctatctcacaacaatcttcaagggtacttacccgggtcgctggggtcgctttctttcctcagtgatcttgatgtctctaacaacaaccttactggtccaatcccatttggaggtcagcttacaacggttccctgtctcgagatacgcaaacaactcaggcctctgtggtgttcctttgcgtccctgcggttcagctcctcgacggcccattacctcccgcatccatgccaagaagcaaactgttgcaaccgctgtgatcgctggaattgcgttttctttcatgtgctttgtgatgctagtcatggcgctttacagggtgaggaaagttcagaagaaggaacagaagagggagaaatacattgagagccttccaacttccggaagctgcagctggaagctctctagcgttcctgaaccgcttagcatcaacgttgctacattcgagaaaccgctgagaaaactcactttcgctcatcttcttgaagctacaaacgggtttagcgcagagactatggtcgggtctggtgggtttggagaagtatacaaggcccaactcagagacggatctgttgtagcgatcaagaagttgattcgaatcacgggacaaggcgacagagagttcatggctgagatggaaacaatcggaaaaatcaaacacagaaaccttgttccacttttgggatattgcaaggttggtgaagagaggcttcttgtctacgaatacatgaaatggggaagcttagaaaccgttcttcacgagaaatcatcgaagaaaggcggaatatatctgaattgggccgcaaggaagaagatcgcgattggagctgcaagagggctagcgtttttgcaccatagctgcattcctcacattatccacagagacatgaaatcaagcaatgttcttctggacgaagatttcgaagcacgtgtctcggatttcggaatggcgaggctggtcagcgctctagacacacatctgagcgtgacgacgctcgcgggtactccaggatacgttccacccgaatattaccagagtttccggtgtacagctaaaggggatgtttacagctacggagttatacttcttgagcttctgtctggtaagaaaccaattgatccaggggagtttggagaagacaataaccttgtagggtgggcgaaacagctatacagagagaaaagaggagctgagattcttgatccggagcttgtaaccgataaatcaggcgatgttgagctgtttcattatttgaagatcgcgtctcaatgcttggatgatcgaccgtttaagcggccgacaatgattcaagtgatggcaatgttcaaagagatgaaggctgatacagaggaagacgaaagtctcgatgagttttcgctcaaggaaactccgttggtcgaagaatcgcgagataaggagccttaa

SEQ ID NO: 184620 - DNA, 1342 bp, Arabidopsis thaliana landsberg
atggcttttcttcggtctcttcaagttgaggaaatggccttgacatcattatctcgcaaggtatggctcgtctctttggtttagtatgttcattagtacttgttgtggacaatgcatataccctgtgatgttttaattgttctaaattatgttatgtttctatgttttcagtatggctttgttgcctggcttctgagcacatcagttggattgtcactctcgttcttgaggtactacgatttttttatcttcattggacagctaccaacttttcgcacaatggtcacaggattatgtcattcattggacagctaccaacttttctcacttggtcatttttatgttctcattacaaacatcatgcatgcttcaattttgcagtaaatcgtcagtacttctgggaatatccttgactgtgcccctcatggcagcatgcctgtctattgctgttcccatatggatgcataatgggtaccaattttgggttccacagttatcatgtggtgaccaggcaagagatttacgatctcccaggataaaggtctgtgtgttttccctgacctggttgcaagtatctctctttgtcaattaaatatctctaactaaactttctttccattttaggggtttattctttggatttgtgttgtgttgtttgcgggttctgtaatttctcttggtgcgattatatctgctaaacctttggatgatttaaagtataagctgtttagtgccagagacaacaacgtcacgtcaccatatacatcttctgtataccttggttgggcaatgtcatctggaattgctttagtagttaccgccattctaccaatagtttcatggtttgcaacttataggttttcccactcttctgctgtctgtctcatgatattctcaggtaatttgtgtttctgttagtttgctcacatttggttgggatttttttccttctcgaagtgatccttatatttcttttcctctactttctagttgttctcgtggcattttgtggaacttcatatttggaagttgtaaaatctagagatgatcagttgcccacaaagggtgatttccttgcgtgcttgcttccacttgcatgcattccggcgctgctttcactatgctgtgggatggttaaatggtggatgactatttcctcacgttgcctattaaatcttactctcagtttcaatgagatcgtccttttaaatgttttgtggttgttctttgcaggaaggacgattgttggatactctctcgaggtgtatatgttttcttttcaataggtcttcttcttctttttggtgcgatagcagctgtcattgcagtcaaaccatggacg

SEQ ID NO: 184621 - DNA, 306 bp, Arabidopsis thaliana landsberg
accgccctcgccacgggcgaaccccaggtcctgatccggggcgggcacctccacgccgcccgcctcacccggcacacccccaccgagagcgaccagcccgcagccgtcttcacccccgacagcaccgtcctggtcaccggagccaccggtgccctggggcgtaccgtcagccgccatctggtcaccgcgcacggcgtcacgcgtctggtgctggtgggccggcgcggcgccgaggcgccgggggccgtggagctgcgggacgaactcgccgcgctcggggcggacctgacgctcgcggcgagcgac

SEQ ID NO: 184622 - DNA, 620 bp, Arabidopsis thaliana landsberg
agaatacctggagcttgagatgaggattcccaacccaccatttgagattgatctagagcgcattgttgatgattttatcttcatatgtttctttgtgggcaatgacttcttaccacatatgcccacattagagattcgagaggtttgtgttcctgaatttggatttcattatgaattgttcgtttagagaaccttcaagggataccctagtatgattagatacgttagtattggtggtatcagttaaatgtctattgtctaaggcatatgtcaattccgttatctatcctatgttaaaaacttgagatatcttacaacgcattgtaatttttttgatgaaacgttgctgtaattcttcatttcttcagggtgctatcaacttgcttatggctgtttacaagaaggaatttcggtcttttgacggctacttaactgatgggtgcaaggtacttgttctctgttcatattggtttattcaatttacccttaggtgacatggttttgactttatcttttactattttcctctccagccaaatttaaagagggtggaacagtttattcaggctgttggatcgtttgaagataagatatttcagaaaagagccatgcaacatcag

SEQ ID NO: 184623 - DNA, 812 bp, Arabidopsis thaliana landsberg
acgtttttggcagcaaagacctccatgcttaaggccaatctgttgcagcattcgcggtacgcttcttgttttcggtcttttatctttccaatctcaagatggttgatcggtctttttattatgcaatcgaaacatatgacaggtgaccagagtgtcttagaaacagctgctaatgtggctacttcacttcctttcatcttcctcggaatgcaggcaccaaggtaaaatgttctctttgcaaatatcatttcaagtagagtttctctgacaagatactatcccatgtaggaagaatctgaacacaaaggtgtacgcaaactccctaattggagttggaattgcgtcgagtctgtatcatgcctctaggggaaagttgaggaagtacctgagatgggtagattacacaatgatagccacaacaacaatagtaagttccactcttcttaacccatctccaaattcttctttaaccaaatataaccgattaaatctggttatgtggacagtgtctctcaagggctctaaggaatgagaacccaaaatttctgatggctgcatcagctttagttctaccttttcaacctctcatggtctctgccgttcacactggaatgatggaggtcgcatttgctaaaagaagcttaaaggatccagatctcaaaacagctcataacgtacacaagatgtcttccttgctaggaggtgctctgttcatagctgatgatttcttccccgagacacctttccttcacgcaggctggcacctcgctgcagccattggagttggaacatgcaataaacttcttgagtag

SEQ ID NO: 184624 - DNA, 181 bp, Arabidopsis thaliana landsberg
atggaccaattacgaggttacaaaaccaactgtggattcttacttgggaaaccgagattcggatctattaaggttaaaatcccaaggatcaaacctgagatagaagaagaccaagtagaagaagatgatgaagctaaaaacatcggtctcgaggaagaggaaaatgatcatgaagctaaga

SEQ ID NO: 184625 - DNA, 2326 bp, Arabidopsis thaliana landsberg
atgtatgaagccaagaacaaggaccgtgaagctgatttattgtcggttaagtccgttgacaatagatccaaagaaattgaagttacctctggctcaagtgaagaaggatctgattcaaatgcttcattaagacaccaacaagatggtcaagctgagacttgggatgttcacaatgatcctagttcgaaaatgaatgttgttgattcgggtaataacgattctcaaccaggtttggatcagattaggaaaagaacaaccaagagatgcgatttagaaggtttcagattctccacttctaactattttacagattctctgtctactgatgaacccattgccccagacagagctggactggtaaaaaaatagaataagctaaaagaacagcttgttcaacctaaagaacagcagatcccgagttcgtcttcaggattccaaaaggctccattgcgggttttcagctccgggaggcgtattgcaggtccttcctactaccagtattattcagaacccgaacctccatgtctttataacaacaacagtgatgtttctctacatggtccgatgcataacccggctaatgttccagcatatggtgaccctcacgggttcccaatgcatgaaagaactctgcagccatctcatctgcacaactctagacagtatattggtaataatggtcatgatgcttttgatacacaccctcataatgggatgtttcatcaatcaacttgctcttgtacccattgctatgacccatatcatagagcttcaggctcagtgtttcctccctcagggttgcctgatgctctgcgtaatcccggtctttaccctcatgagagaagttttgggtttggtacttcattgcatagcccgagaacctttattcctcctggatctcaatctcctggaccacagctccgaggaagatgcacgagtggatttaaggatatgcgaatgaatgcagtttctcgtgttcacccctctaaacctgtatcatcttcaggtggttctcgcctaattcaacctgtggctggtggtgcaccatttataaactgtataaactgcttcaaacttctgaaattgccagagaaaatagattctgctacgagaaagaaacagagaatgcgctgcggagcatgctcttgtgtaatagattattcctttgttgataagaagctcattctctctacagatcctgcttcagcaagaaaaccagaaactcatagtaggctgcgttgggaaactactgctaacttctcttctgatgactatgataatgctgcttacgaattccatgcaatggatagaggatcagccgatgtatcaactgctctggttttgatctccaacacagctcaagaaatgcagattacggatgctacttctcctagcgtgtctgaagacgagttaagttcagacagttcaacagttaggaaagttaatcttgcttcacctcttcacaaacaatttgaatactcttcgatcaatgtaagggaccggtctgggccaaggagccaaagctctcgttcagaacaggacagggtcacactgagcaaaacagccatgagacagaactctatgaaagaagcttcagttgcaattgagatggacgttaatgactactctcacaacaatgaagtgtcacaagattctgcgaatgactgtacagatgatcagggaagaaccaagaagggtggatttgcgagtatcatgaagaatagcttcaaggatctgaagaaatccatacagaacgaaggcagaagtgatgtctcaataaatggtcatcctgtagctgaacgtctggtgaaaatggcagagaagcaggctggaccaatccgaccaggaaactactggtaccaggagatccttcaatctcataaattttcctcacctactagccctaatgattctcttctattctgttgcttgttaccaggtacgactacagagctggattctggggagtactgggaagtcactgccttggaatattaccggtaaacatcagctaacaaatcatatttgtcaatctcttttcgtttttttcagtatgtgtactaaaactggcgaaaggtgactccttcctttcttacagcctttcattgaagagctcaattacccaatgccagagaattgcgctggcggaaccacaagagtctttgtgaacggaagagagcttcaccagaaagacctgcgcttgctcactgccagaggtcttccacgggatagagatcgatcctacactgtttacatctcaggtagagtcatagacgaagataccggtgaagagctagatagtcttggtaaactcgccccaacgtaa

SEQ ID NO: 184626 - DNA, 418 bp, Arabidopsis thaliana landsberg
acagagattcagaagcttattgatgatcagaaagaggtattaggttccaaaatgctggaatttgaactggaatgtgaagaaataagaaaatctctggacaaggaactccaaagaaagatagaagagctcgaacgacagaaagttgaaattgatcatagcgaggagaagttggagaaaaggaatcaagcaatgaataagaagtttgaccgagtgaatgaaaaggagatggaccttgaagcaaagttaaaaactattaaagaaagagaaaagatcatacaagctgaggagaaaaggttgagtttggaaaaacaacagttgctttctgataaggagagtctggaagacctacaacaagagattgaaaaaatccgagctgagatgaccaaaaaggaagaaatgattgaagaagaatgcaaaa

SEQ ID NO: 184627 - DNA, 134 bp, Arabidopsis thaliana landsberg
gaccgactgttttgcacttcgtgagcacaaggacgaggattttctctctctgcgtgaacggggatgggaagtcattccgcgacgaggaatgtcctattgtgatatctaaactagaccatatgcatgaaatatga

SEQ ID NO: 184628 - DNA, 611 bp, Arabidopsis thaliana landsberg
atggattccaaagtgaaggcaatgattaaactcatcgaagaagatgcagattcttttgcaagaagggcagagatgtattacaagaaacgtccagagctgatgaaacttgtggaagaattctatagagcttatcgtgcattagcagagaggtatgatcatgccactgtggagctttgtcacgcgcataaaaccatggctgaggcgttccctaaccaagtgcctttcgacatgattgaggattctgcttcatcttcatgttctgagccacgtacgcctgagaaaatgccacctggaatccagccattttatgactctgacagtgccactagtaaaagaggtttgagtcagctgactgagtacttaggaaattctgaaacagaagttgaaagcttgaagagaacattggttgagcttggagctgagaaggaggccttgaatcttcagtatcagctaagcttgaacaaattttctagactggaaaaagaccttgaggttgctcaaaaggatgttagtggtctcgatgaacgtgctagcaaagctgagattgagactaagatacttgcagaagcacttgcaaagcttgaagctgagagggatgcagcgcttcttcg

SEQ ID NO: 184629 - DNA, 527 bp, Arabidopsis thaliana landsberg
atgctccccggagcggcggacttccctaatcccgacgacctggttctgaaagagggatatcagaagtttgccagatcatcacttgaggtacgcgcaggttatacgtcttcctgttgcctagtatctttgtattttggatttaaccatgattctttttccagaccgctgccctggccaacgatctgattgcgacatatgatcgcaagttgaagctgaagctcgccgacagagtggccttcgataacctgaagaagtgcgctgaccaggccaaagccatctatgccaaagacatgaaggaaatggcagcattgagagatgctgccgagattcataaggcagagctgagctcgttgaacgacgaggtgaagcggctcaacggtcgagaagctgatcttcagaaagagatcagcgatcttcaagtcgcgttggttgccgtgaaagagcatggggagagggagtgcaacaggctgcggaatgaccgagcttctaaagtcgcccgtacacaaagaaagccaagctcgtcttga

SEQ ID NO: 184630 - DNA, 462 bp, Arabidopsis thaliana landsberg
attctgcagcggctgcgcgcggcgggggaccaaacgggcgatgacctgcccgacacgcccacgctgaccgcgctgctcgaggcgaacgggcgcaatatcgaaacgtggtcgcccggcgagctggcgcgcatggtgcgcggcggccacgtcacgctgctgccgctggcgcagtaccggcgctggttcgagacgctgccgccggccttccgcgccgccgtgacgcaagcgtggggaccgcccgagcgcaacccgctgatgctggcgcgcgacgcgcagggcgagcccgccttcgtgatcccgggcctgcgcttcggcaatgtcttcgtcggcccccagccgctgcgctcgaccttcgcgcgcgcgatggacacctcgcacgacaccatcacgccgccgccgcattcctacctcgcggcctatctctggtaccgccatgccttcggcgccgatgccatggtgcac

SEQ ID NO: 184631 - DNA, 167 bp, Arabidopsis thaliana landsberg
gggtggctaatgaagtacacagccgttgtgaagacaagaaaaagaagtcggaccagaagcaaacaggaatcacaataagaaacactcagcaagaggagcatggcaaagacttgcgggaagataagatacgagatcatgagaaagacgacaagaatgttggagagatg

SEQ ID NO: 184632 - DNA, 520 bp, Arabidopsis thaliana landsberg
atggaaactggaaaacaggccggaaaaatcaaaatggatcgactcatgttgagcatcgaaagcagagagaccgaaaaccttagatccggcgaaagcaagaaccacaactttgttgctgcctcgaaagagctcgaacacggacgagagatttcggttctcgaccaccctcttcttctttcgatgcaccaagcccgccacagaactcccagaaagttagtccctccgacaatcggttctacgacgacgagtcccgacctagctacccgacgtatctggagctatccccaaaattctcgatccgaaccactccgaaaaccctgagcagatctacttcgatccgggtttgtggaagcccaaagcggtagatctagaagacggtggctcaaccggaccctctgaacctaagacccgcttcagccatctatgctctgagccaccgaaacaaccgttaaccaaaacgatgaactttggagccaagttattggaagatgcaagatattggaagatcaagatagactaa

SEQ ID NO: 184633 - DNA, 1065 bp, Arabidopsis thaliana landsberg
atggaagatggcaagcaaggatcggccgagttgctggaaacaaagatctctacttgggaacattcagtaagaataaatattaaccatgcttatatataattctctcaaatcatgtcttcctaaatgatatacaagaccgtttcaaactaaatagagatcactttttttttggtgagtactatatagagatcattagatataaatattaagtttaatctaatatcaaaaatataattcagttttattttatagaaaattatgtgaattaacaccacttacaagcttaaatagatatatggtcatgcttatattcatatattttgctcaggcacggaggaagaagcagcagaagcttatgacatagctgcgataaagtttcgaggtctaaacgcggttacaaactttgagataaatcggtatgatgtgaaagccatcctggagagcaacacacttcctataggaggtggtgcggctaaacggctcaaagaagctcaagctctagaatcatcaagaaaacgagaggaaatgatagccctcggatcaaatttccatcaatatggtgcagcgagcggctcgagctctgttgcttccagctctaggcttcagcttcaaccttaccctctaagcattcaacaaccttttgagcatcttcatcatcatcagcctttacttactctacagaacaacaacgatatctctcagtatcatgattcctttagttacattcagacgcagcttcatcttcaccaacaacaaaccaacaattacttgcagtcttctagtcacacttcacagctctacaatgcttatcttcagagtaaccctggtctgcttcatggatttgtctctgataataacaacacttcagggtttcttggaaacaatgggattggtattgggtcaagctctaccgttggatcatcggctgaggaagagtttccagccgtgaaagtcgattacgatatgcctccttccggtggagctacagggtatggaggatggaatagtggagagtctgctcaaggatcgaatccaggaggtgttttcacgatgtggaatgaataa

SEQ ID NO: 184634 - DNA, 240 bp, Arabidopsis thaliana landsberg
atgtttttccttggtgatgactccaccttttccgcttcaactgctgatattatacctcgctgcgtgggaactggaagcttcgtgttcttctacacgcatgaggaatccttggtggtgatggatgatcgaaacttgggagtgtttgatttcaggagtgggaaaacagagctggtaaacaaactccctgaatatgccaagttgttttggcctccacctccatggattactacttctcatgag

SEQ ID NO: 184635 - DNA, 182 bp, Arabidopsis thaliana landsberg
atggagttagtagacgaaaacggagacgtggacgacgtaggaagctcaattggaccatcttcttccacctccgccacatcggcgatttcttttacggcggataatcggattataccgggacggatcctggtaaaggaagagagcgaatggattggagagataagacgcgttggacggagacg

SEQ ID NO: 184636 - DNA, 101 bp, Arabidopsis thaliana landsberg
aaggtggtgtaagcgtagaaatcttcgtcatcgttaaagcacatgaaaagaagcgaagcagaggaaaacagagtttgtccgagacgaagaacaaagcttga

SEQ ID NO: 184637 - DNA, 119 bp, Arabidopsis thaliana landsberg
aatggctagaaagaagactgaaactgcaactgagtcctcaaaggagatcaaagcgaaaggaaaattcaccagagccaagaagtctatgaaaacaactactaagaatatccatcaatctg

SEQ ID NO: 184638 - DNA, 1133 bp, Arabidopsis thaliana landsberg
agcttggccacacttaagctgctgatggatgcccatcaaacacagaccctcctaagtatgaaaaggctcctcaagagaactcatgataatctcatatatactctggtgaatcttggcctctggggagcaatacaggtagaaatttcatactgaaccaatttatagatttgatatcaggttttcagtttttgctttcagatgtattgattaccttgtatttcctggtttcttcaatgttttaccaagcagctgatgcatgttttagggtacagttattaccataattgccaactatattaaacttttgcattagtagtgtactagatcgaagtcaaagactacaatgactggcaagattcacaatagctgtacaatagggaaaaagtggaaaacaaataagggtttctgttagatgcttgctgaattgtataaaaattcctagagattttttttggtaaatttatgtgcatgtttctataatttgttacaaccatctaacctcgatatgtaaacttacctctttgccaaattaaaattatgtatgttgtttcttgttggtgtcatatgtgtcttaatgcatgttgtagcgtgctaatgtttattgtcttcgttttttggaggctgctaaaatccaattgaatagtgaccataatgtacaagacgagcctgtgggaaagaatcctaagtcaaagatatgtgatacatatctttctatggctgctgaggccctctcttctggtgttgctaaaggtaagatgacatagtaccatagtgagtgttttttttcttctgaaccttaaattttcttccaatacggccatggcagaaactggaaacgtttttcattacatatatttttctggagttccaacttttaaaatatttaacaaattctgcactggatttgtttttttcatgtgaatgccctattaaactagccattgattgcctaattattttttctcatcttttctgtggttgtagatgagaatgcatctgacctcctcagcttagcggcgttgaaggaaccattattctctagaaagctagttcaattgattaagatcctttcggtattcaggttggtacttgatagaggtgacagagtcttagaatgcttttataccgaatag

SEQ ID NO: 184639 - DNA, 1381 bp, Arabidopsis thaliana landsberg
  unsure (1)..(1381): unsure at all n locations
agtgatggagtggagagtgatggaaattttactaaagtagccattgttactgatccacaggtgagctcttcaaatgattttcgatttttgttgtgtgttgttttaatggagtttgatcatctgattatgtgtttattgatgttgtttttatgcagctcatggataagacatcgtttcgtttgtcgtcaaagacacttgctttggagcttgctcagttttatactgatataaacatgcggagatcattctttcggtctgtcttgcctttcaaacccgatgttgttttgttttaggtgattatttcgatgtcggaccatttctttccgaggaagagtaagctctccttgttcttgtctttcacttgttcttctttctgctcaaaggggtcggggaaatgcttaacttcttattttatcagatggcaggagtctttaagccgattgaaacatgtatttggtttgaattcagaaggcagagttggggatatccctacattttacatccctgggaatcatgacattggctattctcgggttgcttcccataagcaaggcgtagtacatttatcacttttttttttctcaaatgtataacatatgtcagcgacctatatattgatataccttcacaattcaacaggtgattgatcgatacgaaaaagtatttggggtcagaaaccgcagatttatgattggaaatgttgagttcatcagtattgatgcccaagctatcgatggttgttacaaactttgctctgatcattaagatattggtttacatgcttagaatntctcctcaaagagaaaccaacgatctgttactgaaaagtgatgtatatgttgcaaggaattctaaaaaggatctggcctcagaagtttggaagtttgtacaaaatgtctccaccggtgtgtgtgttattcagctgcatcctcttctgtatatactatctttgtgaagcttatacataaaattttcttatcttttttagacgcacagtcacatcctagagttttattgacccacatcccattatatcggcctgatcaaaccccatgtggccctcatcgtggtagttctgtcattgatcaggtgatttgtcagctagaattgtatgtaactcaaaggattaacactttgtttatggtctaatgtatactgtttcatgtacagcggttttggcgccattctcaagatcaagaagtaatgtaaacttctacctttccatttcatcatacagaacttgagttagctttaaagatagccattttaacaggggacaactaattcaatgttgacctttttgtattttatattcctatgcagatatcaaaattatatcactccagaatcatctacgaagttactggagttgatcaaaccc

SEQ ID NO: 184640 - DNA, 231 bp, Arabidopsis thaliana landsberg
gatgcttgtggagatatccacgcgcctagaccaccacaagccgtactgcctcattcatcatcatcatcatcagaagaagatgaattgataagttggatagcagcatgtttaggttttgcacctggaatggtatttggtcttacgatgggatacataatgacttcacacaagcatgagtggttcatggatacttttggccgaagaaaaggccggagcacgagaactcgttag

SEQ ID NO: 184641 - DNA, 333 bp, Arabidopsis thaliana landsberg
gaccgggagaaccagccagcgcttgttcgcccagtgagccgggaactgatcgaggtgcgagaggagaaagcggcgcgggcgcggcaaaagcagatcgagaaggagaacaaagagaaagaagcgctgcagcggctggagaagggcaagctgagccatctagatatgttccgaaccaacgagtacagcgcgtgggacgaggaaggtattccgacacgggatgccgaggggggcgagatcaacaagagcaagacgaagaagctgcgcaaggactgggagcggcagaagaagctacacgaggcgtggctggggagccatatggggactaagagctga

SEQ ID NO: 184642 - DNA, 311 bp, Arabidopsis thaliana landsberg
atggtccaggacccggcagcatccagactgtttcgacgattaccagtaggccggcagcgatggcgagaagcctgggccacgccgttccgccacctggcggcgcaacgatcaggactgccgccaaaacccattcaactttattgaagatgtaaaacgtatatctgccaacatcaagcgcgacaggaagcgacagacttggcgccatgaatttgacgggagttgcaagaaacgcaactccgatcagcaagccgagccaaaatatagcgaccgtgaaatatgccgctgcccagcggcgcgccgcgagtgtttca

SEQ ID NO: 184643 - DNA, 1775 bp, Arabidopsis thaliana landsberg
ttcgtggatccatcggatcatgttcgtcatttgataaagtcgtcggtgaattttacgaaatggttagtggttattgatcattgtttaaccacaatttctaacactctcacttgtacgattaatgttaatggaattgtgtttttcttatccttttaaaatttgagacaatctttcaatagacccagaaaacaaaaggtggcgagaaaaggtaacttcgaaactccaagcgctaaaataatgttcggataatcatgattcatgagataagtcacactaattacattaacatagaaaaagtttctttaaaacttcttgattagttttaaagaagacactttaactaatttgagtaatttagggctttatctcatgatgtaatgacataaagtctctttattaaaattgaattttaattacaaatcatgtcaaagttgttagcccgtccattgcacttgtggcatagaactaaacatgtcacatcaaagtataaatagtaattaattatgataaaatacatttctaggggaattaatgaggttataccttacggacttagattgaagtcattatcaaagcagttaattgtctacgtactcaccaatattttactccacatagatctaaacaaagaagttagttattacattataaatagcttagtgtatgtaaaagtgttaatcagaataaacattagtcaaaagttgacggcagtgatcggcaactaatccacacccaactttaactcacagtgactcccacgttcaagagaacacaaatattattctctcctttttagtaccactgatgtttttattttcgtttctttcgtttatataaaaccagatttattagttaatttctatttcttaggttttgttatatattgtaattgtatatttagttctgaaaccaagaagtactaatacatataactattttagatccttgacatagcttttttctatacggtatgtaaaagtagtctatatcatctattattttcgaaagttgtaacatataaacttattaattacaagaaaaacaaaagttagaaattaaacaacgtatgtgaaatgaaatctctaaacattacttattacgaacatatctagaactataatcgaggtttttgttaagtaagcgaaaattcaataacgctgaataaatcttttaaagttatagcggctttaagtcaaaagaaatgtatgcatgcgtatgacattgtacaatgtacacttcaacttttcaagtcacgaaaattgatgtcaaatcgacgtgcaatttgataaaataccgaatctgcagactcctttttctattgtataaattgaagatttcaacataaaacttacgctaatctttaaaacatgtcttagattagattactgtcagttcgttactttggttgattccaatattagtacgaaaccatttactttttctttaagagacatcccatttgaatgaaatacattattcaccaaggttaccatacatccataatggcccgcccatgcagtagcacacagaattatggccctatgtgtgccaacatgggctaagttggtttctttatttcgcgacctaaggctttggcattgccttaacacatcagtgaaataagactcgccgacacaaatagaaccggcgacgcccagcgtcgattaacagctccaccagactcagcttcctattatcttctgatgctgctcctgtctttgtcctacgtggtcctaacaggagccgcatatgcaatctccgccgttatcaccggc

SEQ ID NO: 184644 - DNA, 548 bp, Arabidopsis thaliana landsberg
atgcgtggggacgtatttacggattttcaggtgaacgcgctgccccgtctggtctcggcgccacagcgcaagaatggccattttatctatcggagcgatgacagctcccgcttccggatcggccgcggagggccggagttccggttcgaaacgctcaacggaagcataaaaatcagaagccgggtgtagatgcgaggttaggaacaattatgaagcggtatgtaagtttctctctctttttgattgccggactggcgtacgggcaggatgccgatcgcgtgacggtgccgttcagcgacgcggcgcgtccgaagatggtgagcgtcaatttgatcaacgggggcattgacgtgaagggctacgccgggaaggacgtgattgtcgaagcccgatcgcgaggcggggaacggaatacgcacgttcccgagcgcgccaagggcatgcaccgcatcggcgcttcgggcaccggcctcagcgtggaggaggcggataacgtggtggaaatcaagaccacaagctggagttcaggctccgacgtctccgttcag

SEQ ID NO: 184645 - DNA, 391 bp, Arabidopsis thaliana landsberg
atggccaactccaaacgtttgtttggtgttgtaagaaggaaacttctccgacgatctcaaagcagaatcacaatcattcgctcttcagctccagaaacaactcgagaagagattgccgccgttaaaatccaagcctttttcagagggcacctggtaatttacattttctatctctgtagattttgaaaacctgaaaaaacaaaattggtaaaaccattaaagtgttttgcaggcaagaagagcgtttaaagcattgaagagtctggtgaagttacaggcggtggctagaggagtgcttgtgaggagacaagcacgaattgctttacattgtatgcatgctcttgctcgcttgcaggttagggttcgtgctcgtcagcttctctctcattaa

SEQ ID NO: 184646 - DNA, 1480 bp, Arabidopsis thaliana landsberg
atggaagattcagagaaaagaaaacagatgttaaaagcaatgcgaatggaagctgcagcgcagaatgatgatgatgctactacaggtactgaaacatctatgagcacaggtcacctctccaatccattggcagagacatccaatcaccagcaggattcatttgaaacgcaaaggtttgattattataccgatcccatggctgcttattctagtttcaagaaaaacaagacccctaagcaacaatacatctcatctcctagtcatcaaggaagctctcctgtaccacctcagtttccaccatcagttcctccaggtgcttgtttctgccttgatagtcaatgactctgtcttaatttttgttttgtctatattcttgtgaggccaaagaaagtagtccactgataaagaagattgcctaatatcatgagagtttaacttacagtatgttagttggtccttggtgagtataggtataggattgaacagaatcaggaattcactttggtatttggttgttgggctttcgtagagttaggtgatgattctcttctacaaatctatatgaaatttttgttctttgtttgggtttagtcatgtgttcttgattataatctacaaatcaagatcaatggaggaagaaatttgtctctcagtctcaggcttcaaacttattagctttagctactttaatttgatatatctctttaagtttcactttctaggaattgacagtatgaaaatcacatcaattatggaattcagttaggtttgtgtcctgtgccttgcaatgaacagtaatccagttctgatccttgcattataactttgaacaggatcattatgtagtgagtatcaggcacagaccaatcatggtggctttcatgcagctcattatgaaccaagagggatggcacatctttcaccctcacacggaggtccacccgccggttggaaaaacaactttaggcctccaccagttaaccattcaggtccacctcaatgggtacctcgcccttttccattctctcaagaaatgccgaacatggggaataatagatttggtggtcgaggcagctacaacaatactcctccacagttttccaattatggacgacaaaatgcaaactggggtggaaacacgtatcctaactcaggaagaggcagaagtcgaggacgcggtatgaacacaagctttgggagagatggaggaagaagacccatggaaccaggggcagaacgattttactccaactctatggctgaagatccatggaagcatcttaagccagtcttatggaagaattgctcagatgcttcgagcagcagctcaacaggtcaagcctggcttcccaagtctatagcaccaaaaaaatctgtgacctcagaagctacccacaaaactagcagtaatcagcagagccttgctgagtaccttgctgcttctctagatggtgctacatgcgatgagtcaagcaattaa

SEQ ID NO: 184647 - DNA, 402 bp, Arabidopsis thaliana landsberg
atgtgccctgaaaacatcacagaagtctttggcatggttccggtcggctcgacggtgacggttgtcaatcaggcggtcaaggtgggctggatcggcaataaactttatctcgaggcgcacccgacgacggaacaggtcgacaagatggaaatcgatggcggcctgcccggttatgttttccctgaagaggatatgggcttgatcgtcgcatcggccggggaatatgcccgtgatctcagctggcccctgatccgccagatcatccgcgaacgccgcggctacccggttgaaattttccgcaagggggctgtcgccgccgctccagcagtagccacactggccgaggccaagcccgtggtgaaggaagaatcgaaagtggtggaagagaaagtttctagaaag

SEQ ID NO: 184648 - DNA, 222 bp, Arabidopsis thaliana landsberg
atgcaggagacagcgcgtattttaaaacaataccacaatgccacgccctttgagacagcttctgcacatgatgatttccaggctaagttccggcatgagaaaactatgggccagttgcccgcctttttacccttggcggctattttcttcagctgtttaggaatgaatgctctgaccgcatatatagctgatctgcgcacccggaaaataggcgtgcgcgag

SEQ ID NO: 184649 - DNA, 706 bp, Arabidopsis thaliana landsberg
atgtatgctgaagatgatcgtgatggtttagaagaaatctctgatgaggaggacgaatattgtcttgatgatttaaaagtgacctctgatgaggaggaggaagcagatgaacccgaagcagctcgtcagagaaagccgagatcggttacaaggccttacagaaaaagggctcgcggtactatacttttccaaatattgcattgaagatgacatcttgttggtttcagaggtttacaagttaagtaactttgaaaatctattttgctgtaagataattcggaggaaatacctttgatggaaggcgaagggagatatctcatggtgctgggatttaacgagactgagagggatatatttttacgtacgtttaagaggtatatcttctttctaataatgttgtctaaattgtggtttggcgtctctcaaagcatcatagtatatcataagtgtctcaaaacaacttttgtaggtatggagctggaaactttgattggaaggagtttgttaatcccttatacatgaagacctatgacgagataaataagtattgacgacttaaagccatttatgctcttattttcagctgctttacaaaaaccaacagttgttcattgacacttgttaaatttgttgtttctcaggtatggaatcttatttttgaaacacattgccgaaaaccctaccgataattctacaaattttaaag

SEQ ID NO: 184650 - DNA, 168 bp, Arabidopsis thaliana landsberg
atgcacgtggatgcgtccaaaatgtccatctttcgactcggtgcctgcgtgaacaaagtctccacgaaacaagatgatatcgcctcggtcgaagaaaaccttttcttcaataccgcgaccagtacagacataaaggcatgcgttgtctgtgatacttgcgatacctag

SEQ ID NO: 184651 - DNA, 1043 bp, Arabidopsis thaliana landsberg
atggccaacgatcgacgcgcttcttctgtcaatccgtcgacggagcaagacaatgctatgtaagctcattgatttacaaagcttcgtgatttcgatcgtttgtttctgagctctggatttttcgagttttgttcttatttcaaagtttgttccttttggtccctaatctctataatcacttgtttcaaggttgaataatgcagctcctacattcttgtatttgtagatttcactatattctttattggctcctcatctagtttcaccactgtttttgtgattgtaggtttcttgatatattgcatgaagctcctctctttggtcatcgtgaatcgagaagtcttgttggaagctgcatttatcttatcatattggcaagtgattccaaacgacagagttttgtaacatcccttttcaaggataataagaaacatgtatgtatgcctaactttctatttactgtttgttcaatataggcagcttatgctattttagcagcaggggcaccgtggatacttcagtctgtagagtatcttatcccatcgctgctttgcagctgcaatgttgctctattgatgttaacaggtaaccacaatacccaccttcagcttattactacaatctttgtttagaagcaagtcagactaaatgtggcaaactactgcctagtaaatttgtagttagaacaacaatttcttgctttattgttattatgtccaatttcagctataaaatattctgccggatatgtataaattatcgtaagtactttctgcaacaggtatgtttcagcaatattttgtcaatcaggtccagaaaatacgcttgcaggtaacatttactctaacaagacggatcctgcttatttcatatcttttgtaatctatatagaaataggttgatattctctagtgtagttgtaatcattccatctgaagaccttctgaaagaaccttccattgcagggttattacagtttcagtcagaaactgaaacatgtagttcgtctgccatttgcaatcatggcctatggtaatctttaa

SEQ ID NO: 184652 - DNA, 116 bp, Arabidopsis thaliana landsberg
atatcagtatgcaaggtcgtgttatggtccatgatgatagaagtaatctagtgattgcctctatatcagcagcagggcctttgcttgaccatcgcctaagtagaaaacagagattg

SEQ ID NO: 184653 - DNA, 149 bp, Arabidopsis thaliana landsberg
atgcagcgtatcgaaggcatcacgcccaactactcgttaagttgcaagacatggagagaggaaatgaggcgaatggaggctcatccgaaagattgggtttgttacggattcgacaaagtagctaacatccctctgcctctaaggaaatg

SEQ ID NO: 184654 - DNA, 1159 bp, Arabidopsis thaliana landsberg
atgaagattttggatgctccttctgtgagactgagaagttatgaaaaaaagtttcttcctgagaaaatgtatggaccttactcttttatcaacatagcttatggaagagaacagtttggtgaaggatatagttcgaaaaacctagtggaagtctctgttgtggctgagatagtctcaaagctttactcaggtaaacaaaatgttgattcagatcagtctttaaagtaaagtttgatggtgatttttgttttggtatgtaatctttagtatcaagaaagaccgggagaacgataagcgtaggggtgatttcaccttacaaagctcaagtgtttgcgatccaagaaaggataggctaaaagtataataccgaagggacatttacagtgagtgttaggtctgtagatgggtttcaaggtggtgaagaagatatcattataatctcaacagtcaggtctaacggtaatggagctatcggttttttatctaaccaacaaagaactaatgtagcactcactcgtgcgaggtatgtaaacattttctctgtttcttgatttagctatgctcagtttcttgatttagctctttttgtttgtaggtattgcttatggattcttggaaacgaagcgactttaacgaacaatagatcagtgtggagacagttggtagatgatgcgaaagcacgaaactgtttccataatgcagaagaagatgaatcattagctcagtgtattgaaagatcaacaacagcacttgatgatcttaataagcttcaaaacaagaagcttatttcttttgagaattcgatatggaaggtttggctcagctacgagttcttgaaatctctggaaacgatcgtagactcggaaattaataaaagagttatgagctttttggagaagttatctaatgggaaagagcttcatcaagaggttgagtttgaaagtgagaatttgttgagacaacatgagtttgatgatggcttaagtcttatttgggcgatagatattttcaagaataataatcaacatgtacaagttttgaagatctggcaggttttgccatcattagatgttatacgtgtaacagaacatctagagaggcattatttgcgatattttaacggcaagataagtcggcccccatacatatgctctcaagg

SEQ ID NO: 184655 - DNA, 435 bp, Arabidopsis thaliana landsberg
atgcggatctcctccacactctggctgtatggtggtagcccaagccttggaccagggagtcgctttagagggcaggtccccgctgaccgagtgtttggctctgttgaaggcaccgagctgattcctactggtttgttgcaagctgcttcgggtggtggccttacgcctggttatcaactgatctctcctgatttggggatcccttcgttcttttccaacctccaggtactgtgatgtattttagcttgatttttacattgcatgaaccgctgtcattacactcatctgttctcctcatcaggctttggtggatgggatggctagccagctgaggttacaaggtgcttctgtcccggaagtatcttcgtctcttgcacgttggaatccagtgtcacttcaacatcgcgtctctgaattggaggcaacccaacgctg

SEQ ID NO: 184656 - DNA, 234 bp, Arabidopsis thaliana landsberg
aagcctgtcagtgttcgcccaagacgcccttcccgagccaatcaacttgatcctcctgctgacgagcagaaaaagaaaaagagacgtctccggcgagtatctagtttggatcgggatgttggtcttcggttcctgctgctgaagaagtgtctgttcctgaatttactgacgctgacctcaatgggggtgctccacctgctgctgacccaatgggggtgctccacctactactga

SEQ ID NO: 184657 - DNA, 595 bp, Arabidopsis thaliana landsberg
atggctagaggggaaccacagaagctttcttttaccgtaccgatatttgaaccacacccaccacaatactatgttcatgcggtttctgattcttggttgcatgcagagacttacttcacaatctcttttcacaatcttgcactaccagaggtatatatcttctagaggttgctatttccgaaatagttacaagatcatttctacgcttaaattatcggtaaggtaggtcctaacagtcttctttattcaggcgcggacgtctcacacagagcttttagacttaaaacctcttcctgtgacttctcttgggaataagttgtatgaatcgctttacaaattttcacatttcaatccaatacagactcaggtttgagcatatttaccctgttactctcctaattttatattaaaaatgtttttcttcatcactccttttttagttaactgaaaattgtatggtttggtgttgcagatttttcatgtgttatatcacacaaacaacaatgttcttgtaggagctccaactggaagtgggaaaactatatctgctgaacttgcaatgttgcgtctcttcagtacccagcctgatatgaag

SEQ ID NO: 184658 - DNA, 935 bp, Arabidopsis thaliana landsberg
gttcaaaggaagcatgtctatgacttaaggcaactgctgttgacgggtgaaaacgaaagttgctctcagcatatattccagtaagccctacgcttgtagtagcatttgttatgcccatgtgaaagaagccatggtacttcaaccgctgactattgaatatgaatttaacacacaattatttcctaggtacatgcaagctgttgtagatgaaatcgttgttgggaattctaatccgcagaaggtaaagaaatctgtcaagtagatcttcacgatgctccattctctaaaacaaatattttcaggttttgctgttatgttcattttccaatatcttatttcttgttgtagcatccaagatactggagcttggccaagttattgaaagagttcatggctatttcgggaaacctactggatggtaagcttctttctttgttttccatttatgatagtaacaatatcttgctttgtgaggacacaacacctctcttctcacatgaatctaacaacaagcactgtcagagtcattttctgggatcacagaagagaccatgttacagtcccttgaaaacctgcatgagggaagttcaatagatatggaagacttgtcccttccgcacctgccaaaacctccaaacgctttcagaggaattcgcaggaagaattcttcactaagacgttggcttgatatctgctccgataatttgacggggtgagtactaaagttaatagaatctttgtatatgctgactggacgtgcgtcccattgagaaagaccttgagctttactctttaagaatatcgtctgtaggagtgggagttaccgaacattgattaatcttctccggaagttcctaggtgattatctgattgcttcatacttaaatgttgttcaagaatctggctttgatgatggatacataaaagaaatagag

SEQ ID NO: 184659 - DNA, 54 bp, Arabidopsis thaliana landsberg
cgcggttgtggttcaccatcccgaatatggtactggtaaagttttagagccgag

SEQ ID NO: 184660 - DNA, 530 bp, Arabidopsis thaliana landsberg
acaaagagctatcgatatacctaaggatgatgttagaaaagacctcttcaaagctcggcctcttaacaataaggtatagtgtttactttctcatgttgcatatgcttacctaagtttttcacactaatagatacactcatagagggttcatttctattaaacagatactttcaagtggacgagagattggcatgttcacaaaaagcaagcgagaaactacagctcccttggtatgtcagtctatgaattatttctttactctatatatgtctctgtagatgtttcctacaatagactcaaactgttcttacactcaaacacaggggtttagttttcactcggaaaggaaggctcaaccagatttgccaaccgaccttttcagtaaggttcgttttgcgcttccctaacattctattttcctcaatggttttaacttgtgattgtttctctttgtaccctagttatctgatgaacccttttacagctctctttatcatccgaactccggccaaacaatggttctcgcttaa

SEQ ID NO: 184661 - DNA, 61 bp, Arabidopsis thaliana landsberg
atggaagaagctaaggtttctattcgtgaaagcaaaggaagccaaatgttggaagtaacta

SEQ ID NO: 184662 - DNA, 2371 bp, Arabidopsis thaliana landsberg
gctcatcctgaagcgcgtgtttataagacaaaaccggtgttgaattttagtgatttgtgtttgatttacgggtatactgttgctgatgggagatatagtatgtcaagtcatgatttagagattgaagatgagatcaatggtgtgtttttaccaaaactattgtttaatgcttacttagtttttggattggttggtaacaatgaaagttttttttgtaggtgaaagtgttgttttatcgggtaaaaaaagctcgaaaactgagtggactttggaaatggatcaatactttgttgagattatggttgatcaaatcggtagaggtaacaagactggtaatgcttttagtaaacaagcatggatagatatgcttgttttgttcaatgctagatttagtggtcagtatgggaaaagggtgttgaggcaccggtacaataagttgttgaagtactataaagatatggaagctattttgaaagaagacgggttttcgtgggatgaaactcggctaatgatatctgcggatgatgccgtttgggattcttacatcaaggttaggctaatatatctcttcttcaagaagttttgatcttcactaaattagttttaatctagatgtggtgatgcaggatcacccgcttgcgagaacttataggatgaaatctttaccgagctacaacgatttggacacaatatttgcctgtcaagctgagcaagggacagatcacagagatgatggttcggctgcacaaacaagtgagactaaggccagccaagagcagaattctgaccgtacaaggacattttggacaccgccaatggactaccatctaattgacttattagtggagcaagtgaacaatgggaatagagtagggcagactttcataacgagtgcttggaatgaaatggttacagctttcaatgccaaattcggatctcaacacaacaaagacgttttgaagaatcggtacaaacatttgaggaggttatacaacgacataaagtttcttcttgagcaaaatgggttctcatgggatgcaaggagagatatggttattgcagatgatgacatttggaatacttatatacaggcatgccactttctttttctttttaagatatcagttatatgtttatgcttacaaatgaagcatgtgcaggcacatccagaagctagatcatatcgagttaaaactattccaagttatccaaatctttgcttcatatttgggaaggaaacgtcggatggaagatacacacgtttggctcaagcttttgatcctagtcccgcagaaactgtgcgaatgaacggtaagcttctcttttgcattgtctttgagatatgatatttttgtatgtaactctatttatatgaatccttctcagaaagtggaagcacagatggatttaaagatactcgcagtttccagaaggtggtctataccagcaatgagaaaaatgattacccgtgtagtaatatcggtcctccttgtatagaatggacacgggttatggaccactgtcttattgatcttatgctagagcaggtgagtagagggaataagattggtgagacattcacagagcaagcttgggctgacatggcagaatccttcaatgcaaagttcgggttgcagactgacatgttcatgctggagaatcgttatatattgttgatgaaagagcgtgacgacattaacaatattctcaaccttgatggctttacttgggatgtggagaagcaaaccattgttgcagaagatgaatattgggaagcatatatcaaggtaaagatgttacaccgaacattatagggatgttttgttatgaagtcattttaagtgattagtgtctgatgttgcaggagcatccagatgcaaccatatataaaggtaagaccttggatagttatggcaatttgtgcaagctaaatgaacatctctcccaagaaagtttcaattgtgagaatcttatgatcgagttggaaaattatggcaatgagatggaaatagttgatgactttagttcaccccacaagcagcagaataagcgacccaacccaataactccgccgttggggatagtagtatgcaaggctcagaaaaccggagtagagacgaggaagcctttgtgtgaaacagaaggtgatgatgatgattgcaccaaacccatgcctcagatcgaaatttactcgagaataggaaatgcccttgatgcattgcaagctttgcctgacatggatgatgagcttctgctggatgcttgtgatcttttggaagatgagaggaaagcaaagacgttcttggccttggatgtctcgttacgtaggaaatggcttgtaagaaagcttcgtccttcggctaacgtttga

SEQ ID NO: 184663 - DNA, 173 bp, Arabidopsis thaliana landsberg
cgccttggttatccttcacggcaagcttcagtacgtatgtaccggggtgcatatttgttaaggtaacttttgatgttgtcgaatttttcattgacagaatcgatgggccggagtactttgaccatcgccatgaaacaatggttccgtctgagtcgctgcctgttgcagacaac

SEQ ID NO: 184664 - DNA, 79 bp, Arabidopsis thaliana landsberg
attacttgaggtatcacactcagataaaaagggggagattgaagaaacagagtgtctgaagttctacaggcgtgtctga

SEQ ID NO: 184665 - DNA, 821 bp, Arabidopsis thaliana landsberg
cgggataaaggcgtaaacggtaagggaaagcaagcgctcgacgcaagattgattgataacgttctagaggacaggggatgtggtaatgttgatgatgatgaaatgaatgattcagactgggaagactgtccaatccctagtcttgatagtacggttgatgataataatgttgatgacaccagagagctaaccatagaatttgatgatgatgttcctgatgctaagaagcagaagaatgcataccgtgcaacagcagaagacaaggtatactgtgcttaggaaacacaatatgcttacttttgtttattctttaaaatgtgtggttgctttagagatttgtgctttgtctcaaaggtacgggcggaacttgtccataaggtgcacttgctctgtctgcttgcaagagggaggatagttgacagtgcttgtaatgatcccttgattcaggtgaataaattgaatacaacagtgttagcagttgcttcaaagtttaatttttcatattgcaacctgcgatataaagtttagtttttacatttaacgtgcaggctgccttgctttcacttctaccatcatacttgacaaaagtatcaaatctcgagaaagttactgtcaaggatatagcccctcttcttcgttgggtatggatttactggcatgtagcttttgttttgttctaatggaaaggttaaacaaatgttccctggtttaaattgtaggttcgtgaaaacttttctgttagttgttctcccagttctgagaaatcttttcgtacttccctagcatttgctcttgaatctcgtaaaggcacagcggaagag

SEQ ID NO: 184666 - DNA, 333 bp, Arabidopsis thaliana landsberg
atggcgaggataacatctgtggggagatggtcagtatttggggaagtgattgagacatttagctctgcaaatagagaaacaaaatcccgagaggaaacaaagctgccttgttcgtcgaatgttagcacttgtgagacttgcacttgctctgctgagagctgtggagaagagagatcaggagaggcgtgtaacatttctggaaatatctcaggacaagatgataacaagggaaagtcaaagaaagaagagaaggaggtacaagaggtcgtcgtacagggaagcagcgtagcaaattggggtttcattgataaggcacttgtctgtggagtgttc

SEQ ID NO: 184667 - DNA, 653 bp, Arabidopsis thaliana landsberg
gcaaacggataatatctctggattcggagtttgaagatagtcctcgacctgaaacttcgaagaagaatgaatccgtgcttgctggtttaagggagcctcggtttggattggaagccgaaaccagtgaggcatactataagaatactagaatacctgagacaaatttaggtatgcttaccccaaaaccaaattattgtgcatatatatcagagtatacatgatgaacttcatttgtagtgtccacatacaaatgctgattgctgtattttttcagacgatgatactagttggatgcatgaagtcagttttcgctcttcgccaactaatgatactattgaggtacttatctgcaaggaactagtaccatattgttcatcattggtacaggattaagggattgttgactttattcgttgtatgattttgcaaagctgtctttttgagaatgtgacaattctggattcccataacgtctcatttgtttgtattttcagagttcacgttgtgctgatgtttttttcttttattttgtttctctcttactcttatttctaaatggtatcaggttgtttctgaccaagacaaagaggatataagcgttgagaaaattggtcgaaaaaagaagatcagaactacaactcttccagttccag

SEQ ID NO: 184668 - DNA, 270 bp, Arabidopsis thaliana landsberg
aatccccagattttactgtatcgactttgggaatttaactggagaaccatttccactcaaactgggaaacaaaaacctgttattgaacaatggccactcattcatcgagatcggagaataaagacgccggagaagaagatgagctccgacgaaggaacccttatgaagtccttggcatccccagcaattcgactgatcaagagatcaaaagtgcttatcggagaatggctatcaggtttttcaaaaagattgaaactttgcgttgattaa

SEQ ID NO: 184669 - DNA, 124 bp, Arabidopsis thaliana landsberg
aaattataattcatcgaagcaagcacaagcaatcgatttccacaaaaagcaaaaaagtgaatctgaaacgaaccgtcgggtaattcgtcggaggaagccaaaggaaatgagcgacggatcttag

SEQ ID NO: 184670 - DNA, 145 bp, Arabidopsis thaliana landsberg
atgaaaggacaattgttgactgttgtgggaagggatcctaatgatgcaatgtttatcatcgcatgggctattgtaccagtggagaacaaggtctactggcagtggtttatggagttattaggagaagacttacttttggagcttg

SEQ ID NO: 184671 - DNA, 7 bp, Arabidopsis thaliana landsberg
atgcaag

SEQ ID NO: 184672 - DNA, 300 bp, Arabidopsis thaliana landsberg
ccgcatcaagtctgagtccttattctgctggacccttgacgagaataaatgagagcagaagcgactcagataaatcattgtcttctcttcgaacaccaaaaacaacaaactctgagtcaaaccaagatgcaatgatgataggaaacctttcggtagtacaaatctcgtcagatagccggaaaaggaaatttagcttatgcaactcggcgaatgcccccgtgattaacttagaaagcaagtttgcagctcatgcacaagccacggagaaggaaagccatgaaggcgtgagaagcaatgcag

SEQ ID NO: 184673 - DNA, 554 bp, Arabidopsis thaliana landsberg
atgtacttcagagagagctctcctttaaatctttctttgctccatccctttgaagaagttcgaagtctgaacttatctacggaaggatacaacgaattcaatggcttctttgatgacgtagaaggtataccacacttaacatcacaaattcatgaatttcatttgcatgtagtgtgagctatcttatttttttgtatacttatgatttttcgtttgcaggttatagaagtttaagtggattacgaaacttgaagatcatggatctctcaacgaattatttcaactacagcacatttccttttcttaatgccgctacatcacttacaactcttattctcacgtataacgaaatgggtggcccttttcctatcaaaggtgtatttttcgattcctaacgagaggcctatggagcacaacaaagttttagttccaattagtcttatattctattggattatctttcaggactaaaagacttgacaaacttggaactgctggatttgagagcaaacaaactaaacggctccatgcaaggtagcgtctacgtcaattaa

SEQ ID NO: 184674 - DNA, 428 bp, Arabidopsis thaliana landsberg
atggggcagccttcaccatctgatcaagtattacgcacttcaagggatactcgatcaattactcgagcgggaatgattcgacgaccaaggagtgaggtcgagtgacccatatgttccccttcacttcattactcggtggacaaaccaattacccatgcttctcactatttccaattgactttcctatccatccaaaagagagaaccaaagaccatcctcctccacccattgaaaacgccaaaccatccttgaaactctctctttcatcatctcattttcgcgaattctccatctttcacaaagcttcaagagtttcattccaaactctccctattacccctcaagaatccgttctcacattcaccatacttcaccaaagttactcgatcattcccaatcccatcctcaaattttcaaccggtttttaa

SEQ ID NO: 184675 - DNA, 1000 bp, Arabidopsis thaliana landsberg
atggctgaatggcgtaagtttgtcaaagagaagactagtaatgaatttaaggtagtaagtgactcatataagaaaagaaggaagaagcagattcttcatacttgtggccgtaaaggaattgtcagattgagagaagaattagtctagaaaagtgatgaaccatccaaggtgaaaaggctaaaagtgtgggacgagtcacgtactaaaaaggatggtactcctgtaaacatcgatgcgactgaaatgattgtatgttatgtttgttccttttaaattatgcttataaattaatgtatgttgtggatttatttggtatttgtttgcagaaaaaggcaaccgagatagatattgaaggaacccaggattcagcaacaactaatacacaaaggaagatgtgcttagtcagatattgggatctgataatccagaaagactgcgtgcaatgggcagaggcatgagcttgtcaaaactggcttgtttccaggtcaacagccactctatggctgcaatggaaaacaatcagattcaaatgaagaatagaattcaggatctagagcagattattgaaaaactttatgaccaggttagtaaatactagatcacttcctaagtgtactaattaaggaatattagatgtcttgatctgtttctgaaattatacagacaagaggctgatgttggtgaaaactctatacataggagtgtaaataccagatcacttcctaagtgtaatttggttgactggacttcttctgatgataatgttgttgagggccgtgttgtgtcatatgatgctgatgaattagtacatgggatacccctagggcctaatgtagtttagtttttaattgaatctgctaccaagccagaagctccactatggagacctgtacctgagatgtctactattgaggatgtagttggagaaatgattgcatgggatgccgatttatgtattgttccacctgaaggtgtcattgtagaagacattgcacataag

SEQ ID NO: 184676 - DNA, 142 bp, Arabidopsis thaliana landsberg
atgagcggaagcttcactgagagtttcgccgatgatggcaagcttcttctttgtgtggctgagaatggccactcgtttgaatttcaatgcagcgagactacttcaattgaatctgtgatgcgtttcgttgaatctgtttctg

SEQ ID NO: 184677 - DNA, 1140 bp, Arabidopsis thaliana landsberg
tccaactaaaggtagaagacgaccagaacggtttaattaatcatcggcgatcaatcttaaccgatcaaaattttcctagaccggttaaatttgtcataaccggtcgaatagaccaatttatgttttcttatacggtacggcgtcgtgttcgtgtattcctttaaaacgctttattttagccgccgggaaaaaaattggtgacaagagcagagagagtcgccatggacgcagcagattgctatctcgaaggaaacgccgacgccgtagaattctgtcctcacgagtcttacgcaaactttctcgcagcttcgacttatacacttcaagaaggagattgtccctctcgatccgggtcagtgtatctatttgatgtcggagatgtggaagatgttggcttgaatcttatccagaaaattgacactgctggagttttcgatatccggtggagtcgtggtggcgatggaggagacgtggcgcttgctcaggctgatgctgatggatgcttgatagtttacaagatagatgagactgaaagtaaaggtactaaccttttgatctttgtaatggaaacatccgaatcaatggactcagtgattgagtgaaataaaaattggaactttggtgtaatctgaagagagatctgtaaaggatcaattgatgggttgttcttaatatgcagctaagttttgttttgttagcttgttggtgatctgagtaaagttttatgcttgaaacaggtactttgagagaagtctccgggaaaagaatcagctcatcaatgtgtctttgtttggattgggatccatcatcaacatcaatcgttgttggtttatcagatggctctgcttcagttgtttcattcacggattctaatctagaaacagttcaagaatggaaagggcatgactttgagctttggacggcgtcattcgatctcaacaatcctaatttggtctatactggatcagatgattgcaagttcagctgttgggatatcagagatagtccggctgacaatcgggtttttcagaattccaaagttcatacaatgggtgtttgctgtatttcaccaaacccaagtgatccttactctatattcaccggaagttatgatgaaaccttaagagtttgggacacgag

SEQ ID NO: 184678 - DNA, 309 bp, Arabidopsis thaliana landsberg
ggccagcgccaaagatgctgccatcgacagcagcgcgcttttcattcgagtcatcgtctctccttctgatttccggctgcgaccggatcggtcgcgaacctttgcgttggcgggcgtcacggcgcagtccgccgcgtgccgccttatcgtcacggtgcgccccccaaccacgacgccttcgcacgcgtcgcgaagagtgcgcgtttagctaaagaaatagccggagaaatcggacgagttcccgtcagcaatggcggacgagcgaagcgggtcgatccgcttgcgatccccaaaactgccgccgactag

SEQ ID NO: 184679 - DNA, 362 bp, Arabidopsis thaliana landsberg
atgccgcaaggcggcatagcgggtctgcgtttcctgcaggctggcacgcagcacaaactgacgcgaacgcgcggaagcggcggctgcatcggcttccgcgcgggcggcatccacttcggcacggccggtgttgagtaccggcaagggaatggaaacactcaagccgatcacctgatcggtgcgcggcccgctgcgcacctgtccgccggtcaggctgagcgtggggtcggggatgcgtgcccggcgggcgacttgcacgcctgcttcggcgctcgcttgttgggcacgggactgccgcagttcgggcagctcatcgaccggcaacggcgtaacactgcccgccgcaggcgacaggccaatag

SEQ ID NO: 184680 - DNA, 2193 bp, Arabidopsis thaliana landsberg
atgagcgggtctgttcactggtaggtttcatcaggtaaatggccgaattggctctcccagctatggagacttttgtagagggataaaagttcttacttccagcagaacttcatgatttttggttgagtagtttgtgagatatcgaattttgaatgttaactatgctgctgtctaaaacagattcagtcagttatcttatcagatgttttagaacatatagatggcagaactaaattatccattgaataccgaagttgtagagtattttgtgtagatactgctagagtatttgtttgatatcaccacttttataattttaaagatacaaaattaacaaacagtgctgctgctgtttggcatgtggttaagagtgggaggtttccactaggtcttggttcatgtgtaggacgatttgttgattgtggcaaatgtttggaaatatttgtactaagtttatgcccactagcaggtggtacactccagatcatgtctagtacatttcttcttcttcgatgaaggcaagtgaatgtagcggtggttgcttccgttctgacctgttatttctatcgcctacactctaatattcagaagtatcagattctttcataattggactctatggtgatgctttacttgcttgcattatattgatgctcaatcatatattgatgatgattatgatttgagtatgactcatgagattaattcacacccctgaaggtaaatgaagtattatttgaggttggtattgtatctgaaggtaaatgaagtattatttgaagtttgtgttgtatctgaaggaagtgaagtttattgataaatgtagcatgccatatacattgcatgactcatttgcatatgaagttttgtcgtgacctatggtccgaccgtaccggtacaacttagtatcgtacgttgcccgagaaggggtacgatgcggcttcatacccttagaagttattgaaggcagaggacatatgcattgcattcatatgcattcattgaagtgatatttgcagatgatgtggttttatacccatagaggtatgaagatagagtacctacacattgcattcctatgcatacattgaagtgatatttgcaggtattgttgacgcagggaagtgttatagaacctattgtggttgttcgaggaaatgagatggtattggttatagtgggactactgagttctatatctacaagcatttctgatttttaattgtgactcttttaaaatgttgatgaattcaatttgtggtttaaatatctcgtcagaacaattagcttgctgagatgtttcatctcactcttgcattactcaatgcaggtgcttgttgctcatcaaggggagtgggaagtagcagcacatccaccttcactctcataataatgctgcccagacacagtcatgatttaattataaacttcttgtcaaaggatgtttgtttttaactagtcgtgcacactgattaattcagttcatgttgttatggttgtcttcccattgctagcagattattaatgtcttttatgttttcttatcatgatatctatttatactttgttgcatccccgtttatgcaattttcaaaggagatgatgtcgaaattttatatatgaatgttagatgtgtagtttagtagcattctggggtgtttgtggatcccggggtgttacagtacaagacaccggatcggttttgggccgaggcggtcaacaccgctttacgccatcaaccggttatatctacaccgaatcctcaagaagacatcatatgaactcctaaccggtaaaaagcccaacatttcatattttagagtctttggtagcaaatgctttattcttgttaagagaggtagaaaatctaaatttgctcctaagactgtagaaggctttttactaggatatgattcaaacacaagggcatatagagtctttaacaagtccactggacaagttgaagtttcttgtgacattgtgtttgatgagactaatggctctcaagtagagcaagttgatcttgatgagataggtattgaagaggctccgtgcatcgcgctaaggaacatgtccattggggatgtgtgtcctaaggaatccgaagagtctccaaatgcagaagatcaaccatcctcctccacgcaagtatctccactgactcaaaatgaggatgaagctcaagttgatgaa

SEQ ID NO: 184681 - DNA, 83 bp, Arabidopsis thaliana landsberg
ctttgactgaaaaattgcacgtggaaattgaaaggctaaaagtaataactattttgaacgaaaaagggagtgtagaattctaa

SEQ ID NO: 184682 - DNA, 425 bp, Arabidopsis thaliana landsberg
atgggtccttcaaaatcaaccggaactgcttctcctctcttcaccaacaaatcctcgccattacccatttcctgtaacgcccttccgactcttccgccacccacaatcacagcaggcgctagttttttagcggtggcagctgacgcggcggccatagccattggaacggcgaatctcgctcttgaaactgagggtttaagagattcagagcgtcggaggaaagagaaacgagctgaagcggagcaggaaacagcaaacagagtactactggctttagccatggtgataataatgggcttcgacgatgttgtggcctctcatggttttggttggactaatttgaacagtatggtttaacagccactcgatggtttgaggctctggcttatcggttttggatgactcacgaagataaaacggcatga

SEQ ID NO: 184683 - DNA, 277 bp, Arabidopsis thaliana landsberg
atggagtttgttgttcgagaagtagattggcttgtaaacttgttaaaggagtttcatgcgcctcaaacgaaatatgtggctttcttttgcgactcaacggctgcgattcacatcactaataatgatattttccatgaacgcacaaagcacgttgagctagactgccacattgttcgtgacaaagtaataagcggtttgatcaagaccttacatgtcaagattgatcaacagcttattcatgtcttcacaaaacttttattccctactcagtttatta

SEQ ID NO: 184684 - DNA, 301 bp, Arabidopsis thaliana landsberg
atggcagttgatgtgacggagtttgttgatctgcttccgcctgtgagttttggacactcgtactaacggttccctgaaagtcgagctgtgcttagactcctgcggtacgcagcgttcctgtagagagagtgtcaactcgatctacatacgcgttgtgagcttccttgatttcggaatgactggtggtgaacgctgcgagctggccactacattcttcttttcgaacaaagacgtttcggtggactgttgccgctctgttatgtcggaaagctccttaagcagcttcttgatatcgacaagg

SEQ ID NO: 184685 - DNA, 364 bp, Arabidopsis thaliana landsberg
atggctcgcgatttccagcacggctatccctacgggatgctgatcaccctcggcgcatggtggcaggatcattcctacatggaatcggccacggcaagcctcagggatttcaagtttcatgcccgtcaaaaaacagccatccggcaacgccagatatacgtgctcgtgattggtgaaagcagccgccgcaaccattggcagctgttcggctacccgcgggccaccaaccccgagttgtcccacatggaccatctcgtcccgatcacccacatgatctcggcatggccattgaccgctggagcggtccccgacatgctcacgcgcaaaccggccgcgatgccgatgtccgagatcttccagaagc

SEQ ID NO: 184686 - DNA, 115 bp, Arabidopsis thaliana landsberg
accttctcaaagatatcggtattgcctccggacgcccttatgcatcgaaggacggccaactgatgcagcaaaggatgtccgttatgcttcatccttctctgagggcttcccttga

SEQ ID NO: 184687 - DNA, 277 bp, Arabidopsis thaliana landsberg
atgggtgcaaggaattggtcggagactcactggttagctcggtccacgcgcggcggcggaagaccgaagtccggtgaggttgatctcgggcctccggtgaagtccggcctggtccgagggcttggcgagcttcacgggctactggcggagctagccgaagcactggctcgactcgagggtggctggagtgggctggccacggtggccgaagctctggcggcaatggcgggcggaattgagctcgccggagctaagggaaggtggccggccggtgctg

SEQ ID NO: 184688 - DNA, 120 bp, Arabidopsis thaliana landsberg
aatctcggcgcgcagcctgcgaggtcgcgcgatacagttcaggaaaacgaacgtcatagcagacggaaagtccgacgcgtccgaccggcgtgtcgacgaccaccggatgcaaagaacccg

SEQ ID NO: 184689 - DNA, 363 bp, Arabidopsis thaliana landsberg
gtgatcaaaccagagctattgaaaaaaggtttcgagcttgtgaaaaggtttgtgaaccttcaaatgattttctgaagtgtggattagaatagaaaaagactgattactatttgtgttctatatctaaaacagtgaaggtctagaggtaacaaatgacgtttcgaatgtagaatacctcaagcatccagtatatgtctctcaaggatcttatacaaacatcaaggtaacaaaacactaatatttggttatgtttttgcagttatacatacaatatgtattgctaataatgtctctcatccattgcaggttacaacacctgatgatttactacttgctgagagaatcttgagcgaggactcatga

SEQ ID NO: 184690 - DNA, 321 bp, Arabidopsis thaliana landsberg
caaccacaactcaaggcatctttgaatgcgatcaaaaaagtaggggataacctcgtagaaaaggtggtcataaacgtggagcacctggatcaacttgtcagcattggggctagtctaagtgagagcttccgaagcgaagtgattcaatttctcaaaaataataagggcacctttgcatggactatcaaagagatgactggaattagtatgaaggtcatttcacacgagctgaacgtagacccaacattcaaactggtcaagcaaaagcgtcgaaagcttggtttggatagcgcaaaaccggtgaacaccgaagtcgtctga

SEQ ID NO: 184691 - DNA, 171 bp, Arabidopsis thaliana landsberg
ccggtcggcaaagagcaccagcgtgaaattcgtcttctgcaccttcttcgtgccttgatggccgttggatccgaatcagacggccgatacacgatctcccttgatcttacatgtgaacttgtcatttgcgttaagtcaagtaccaaatcatttgtaaatatgtcggacgag

SEQ ID NO: 184692 - DNA, 105 bp, Arabidopsis thaliana landsberg
atgcgtgcaaaacaatacaagaagaagcagttacttaaaaaagccttctatgaaagtggagaatacaaatggaaactggcaagtgtaggatctttaacaaactaa

SEQ ID NO: 184693 - DNA, 389 bp, Arabidopsis thaliana landsberg
atgtacgaatcacagaagcatcgcacctatgcgaatgaagagttcatccgcagcctggccatgatgcgcggcgtgcagatcggcacccgctacgccgaggccatcgaagtcgtaagatgggttcaaaaataacgtcccgatcaagggcgtcgtgacgcggccacggcgccgccacgccagatacgctggtcaatgccggcgcggcaggtcccccgccggaaagtcgtcgacctcgatgacactggccgcggcagcctcggcgtcttcgagcagttgcgcctggctgccgtcaatggcaccatgttcatgcgcaacgcgccaataaaacacaaagctgtgcctgaggcgatcgagcagcggctgggccagtaccgccagctcgaacgccc

SEQ ID NO: 184694 - DNA, 1091 bp, Arabidopsis thaliana landsberg
atacttcttcttgtagcaaaggaatttcttgaatctgttgagaaaattataacatctcaacgtccttcttggcgagctgatgtagctagtgtggatactaaccgcagttctgtgcttctcatggatgatttgacgcttttcgcccacggtaaatctatttcgtgtaataaaactattgatcaggcttttcctttcattgttctcacttgcaagtaaagtttgatgtgagcttgtgagttgtctcttggttaaagtaaattcaatgatggatttaagcattgcttttggtttatatacatgttgtcgtgttaatgatgatgatctcctctgctttcaggtcatgttgaggataaaccatgcttaagtgttgaaaaaaggtgttcgtcattatcttgtgcttacttacttttatgctagccattgaatgctcttagtggctaatatatgtttgctctgatgaagtagcccaaatgtggattccttccatcttcaagtttcatagcagaagaaaactttattattaagagtataactcggttcgaaatgcaccgggttcttaagcttacggaaaacgaggtaccttttctcctacatctgtcaaagtaacaattaatccaatctttgaacctaacactttaaagctatgtattttgcagatctcagaaatcagtgaatatgatcctttagaccttttctctggatccaaagaaagaatactcgaagctataaaagcgctctacacgactcctcagaacaattttcgtgtgtttttgaatggttctctagtatttggaggcttaggtggtggcatatgcaaaacaacctcaaaggttgaactagcttttgagcatatactcaaagatatcatcaagaccgatgatggtttacgtgcagatcgtttcatagagcttgtagcagaaactgtttacacatccggagttctagatcagcttctagacgtacaaaagctcgatagatataacatcgagggagcgattcacgtgtactatgacttcattgaccagccatgtaaagtgtgcagagagttgaatcaatttagctccatgcactcaattccaatggacgaaaaa

SEQ ID NO: 184695 - DNA, 391 bp, Arabidopsis thaliana landsberg
tcggccgagcgtgtcgtaatcgggggcgggatcgggctggcgagctcggactggcagccgctcgcactaccagtgagcgcgcgcaacatcagcggcctcgtgttcgagcgtggcgcgttcaccgccgatggcgccagcggcgtgatcctcggttccgccgacggtgcgcaatggtcggcgcaacccttgggctcgagcgccaacctacaggcgatcgcggcgttcaacaacacgctcgtggcggtcggggatggaggcacgattctcgcgcaggatggacttcacctgtgggagcaggcagtgagccccacgcgcgagctgctgctcggcatcgccgcaagcgacaccgaggaggtgatcgatggcggcggtggctcgattctccgtgccc

SEQ ID NO: 184696 - DNA, 114 bp, Arabidopsis thaliana landsberg
gacaaccgaaaaccaaaccaagcagacacaaagacgtaccactccagagactaccgaaccaggcacagccgggaagatcagcggaccgtgccctacaaaaacacaaggatataa

SEQ ID NO: 184697 - DNA, 395 bp, Arabidopsis thaliana landsberg
atgatcaacgttttaaatatttcaatatttgattatggtgttaaatggtgtttgattcgtgagaggtaaagttaacagacgttaataagggcagcgtttacgtgaaggaagaagagtgaaaaacttttggaaacacacgagtggtaaaaattgcatgagaaggcacacgtgtaagtgataatcagaagaacttaaaaataataaagaggagaggagcaccatctggcacacgtgtcgagaggaatcctttaaatcctcgacagccgtttctcttttgcaatcttggtaggttggtgagagcattgctaaatccaaagacaatagaaatagtttgcaaatgtcatttccataatttatattttagtcgtaataaatttgatcgaagtaggaaatga

SEQ ID NO: 184698 - DNA, 450 bp, Arabidopsis thaliana landsberg
atgtctttcattcggtatcactccaagaagggcacggtcgatctggccgaagccgacaaggagttttgtgaagcccaagagcgggcacgacagaggatgcggcgcattacgacgcgctgggttccggctctacaattcatcaccgaacgccgcccggaaatgcactggtgttcttacgaagacggccgggtcgtggctttcgtcgatctacggcgtgatgagagcttcgcggaccttcaggagatttacgattttgtcgcttcccaggtgcgccatttgaaatcgctcggcaactacaagggcgagttcatcgacgagccaaatccggaagacgatcaggatattcactggcgcaagtggcactttaaagccggcgacagcaccctcgtcctgaattgcagaaaaatgctttccaaccactgcaagtttgtcgatgacggcgaagaaacg

SEQ ID NO: 184699 - DNA, 89 bp, Arabidopsis thaliana landsberg
atggtaattacgcgcacgtcgccgagcagcggcgtgcaggtgttcagcggatgcgtgctgatgatgccggacagcggcgtgtcgacgac

SEQ ID NO: 184700 - DNA, 1256 bp, Arabidopsis thaliana landsberg
atggagacactgagttcaacagaacctcactatatcagatgtgtgaagccaaataatgtacttaagcctgctatcttcgagaatgtgaacgtaattcaacaattacggtgtggtgtaagtacaattggaaccttccgtataatttttgtctgttcagtggtattataattgaggctcttcaacctaaatgtttggttatgaaacttacaagcttactatttgtctttcttttgttaagggtgttctggaagctattagaatcagctgtgcaggttatcctacaaagcggacgttttatgagtttctcaatcgttttggtgtacttgctccagaagttctggaaggaaagtaagtcccaattgatatcaactgttttttcgctcgtagttatgtataatccaaaaatggccttggttttgaaaagacaactgatctattttgtttcttgcagttttttctttctttgaaacaagctaatggtttctattttctttgcagttatgatgacaaagttgcatgcaaaatgcttctggataagataggcttacagggttatgaagtaagccatttgtaattgcattatgtaatggttcctttgatgttttaggaactatttctaatttatccaacatgctgccatttccagttagggaaaacaaaagtattccttagggctgggcagatggctgagttggatgcaagaagagctgaggttcttggaaatgcagctaggagaattcaaaggcaaagccgtacttttattgcgtgcaaagaattccgtgctctacgaggagctgctatcgtgttacagtctaactgccgaggtatcttgttccgtaatttattgcaaaattttgatcttctcttatgttgctattgttgtagttgtccagcatattggattcagaattttcttgcttctgtgtgtaaacatgaaattagtggcttgttatggtccgttgtttcatttttccatgcagatgtgaaatatattagtggattgtattatttttggagttgagcttctcaaacgtttttgttgcatgcaaggcaaattggcatgcaacctttatgaggaaatgcgacgccaggcagcagcggtgaagattcagaagattttcagaagacatattgccagagaatcttatttaagaattagacattcaacaataacagttcaaacagcgctaaggggaatggttgctcgcaatgagttcaggtttagaaagcaaatgaaggctgctactattatccag

SEQ ID NO: 184701 - DNA, 426 bp, Arabidopsis thaliana landsberg
atgatcgaagtaacggaagctgtagaacaagccgttattgacacaagagaatggattgaaaacattgctacttcggaacaaggtcataacgacattcaccatcaccgatctcttagagtgaaatgaaaaacaccacaaagaggctgggtaaaatgtaactatgattcgtctcaccataaaggaaccagtgggtctggattagggtggataatccgcaactcacatgggactttcatggaatgcggtatgagtaaattccaaggtagggcaccggttgaagaatcggaatgtacggctctgatatgggcactccaatcattatggaacctaggttacataaagatcgagtttgatggggacaacctctctatcatccggctaatcaacggcaaagctgtaaatccacgacttcgacattacctttga

SEQ ID NO: 184702 - DNA, 377 bp, Arabidopsis thaliana landsberg
atgcaagaccattcagccggagcgtttgcctgcacgtccgatggtcaaaacgacgccgggtctcggacgatagcgcacatgcaggtgcccagcatgccagttaccaggtgctcgaacatataaacatccgtgaagaattaatagacggatatactagcaactaaggaaggcaagatagaaaaacaaatcgcaattagtatatctggttttgcatctttattttattgccatccgaccaacatagattttattttttagatggacataactattctctcttcatttttagatggaaccacagttccatttatcaacaaacaccgtccaaatcattcgctaaatacggaaacacaaaggccattgcatccgtgtggtaa

SEQ ID NO: 184703 - DNA, 98 bp, Arabidopsis thaliana landsberg
cattatctccccaaggatttaatgaacttcggacgaagaccatgatcaaaatatcacgaaggtcataccttcgtgatcggacttataagacaatataa

SEQ ID NO: 184704 - DNA, 87 bp, Arabidopsis thaliana landsberg
atgtcttgttctcttcgtgttcacgatcgagacagatcgatgtcggagagagttacaatcgtcgatgaagaaaatgaaaccaaacag

SEQ ID NO: 184705 - DNA, 1169 bp, Arabidopsis thaliana landsberg
atgttggattctacgcttaacagcgtcttcgatccacggtatgattgtccacatatcaacagcttccatctgaaaagaaatcttgagcttgtgtaagcatgaatctttagagaaatcaagaaaccgagtggcgaaactgatgaatgtagtggcatcatcgaaagcatcaatgtctatatccaagacaggggttgaaagccagagatctttccatctggtggacaaaatgctagtagtaacagcattctctgtaggaagattagagagtatctgacttagcaaatgatcaggtaagctacttatcctatcttctccagatctacgaattgctccttggttactcatttgctatcttcaccaaaatggtcgattcttagctgccgaagaaaccaataaccaaacaaaccaatagctctgccttcgcagatccgctacaaagagtctttagtttctctctaagacttcttaggaaagcttcgtttacaatggctttggatggaaagataaaataaaaatctaaactagagatgagagttgactatgatgaggattggtgagagattaataaaatgaaatctaatgaataaaaaaacctacaagtgttctcaaaaaaggaactttccttaaaaaggaaggaaactgcaaatttaagtgttacagaaacttgtgtatataaagtcctttcaaacttcaacaacaacttcacaagaagcagaacatctcctaaatctcaagagttccttgaagatgatagactcttcgtccattctcttacaacccaattgcaatgtaaacttctttactagttacatttccgccctaactccgcttatctatcttttcacaaccaatacaactcacagtcacacaacactgcaactctcttagctttctcagccacatatcaacaagataaaacctaattctttctctcaagctgcacagaatcagctgcttcttacttcgcgtctcatatggtcggagtcccgtacaacacagccagaaacaacggaacaggggatgctctgtttttgagcaacaatgagtataactactttaacaacttgaccggagcgttgactcatgaggttccgaatgaaagatcaatggtgatggaggagactacggggagtgagatgtcagcgacgtcgtattccactaacaattaa

SEQ ID NO: 184706 - DNA, 125 bp, Arabidopsis thaliana landsberg
tgcttcattgatctggctggacgagaacgtgcttttcaaactttatgtgctggtacaagattgaaagaaggctgtcatataaacaggagtttacttactcttggaacgggcatccgcaaactaag

SEQ ID NO: 184707 - DNA, 710 bp, Arabidopsis thaliana landsberg
atgtacaaagcacctgtttttcctcataggttgcaatcaacagattatttgttggtccggtctgctaaaggaaagctctctctaaggcgtattaacaagatagttgctgttggacaacaggtttgtgttttgcaagatttctctcttagaatttctgttcagagaaagtattactgcttatatatacagtattgaagaatgagtcttttgctcaacaaaaaaaattgaagaatgagtctatatgtccatgcttgtgatttagtaatgcatccacatcttatttttctttcatttttaactgtcacactgccggcatactgagtatgtattttccgtaggaacctcgaatggaaataatgtctcctgcatcaaagaatcttcatgcttatttggtgaacagaatgatggcctatgtgtatcgagagtttaagcatcgcgaccgtattgctgccgatgagctgtctttctcattttctaacatatcagatgcaactgtcagaaaatacatgcaagtttgttccgatttagaggtacaaattctcacctgctcataagcggcacctagagttgcatgcgtactctttctctttgtttttcatcatcagttcatcatcatttcatcatgcaagcttctgtatcatattatcattctgacatggacataaaaatgcagagagatgaaaatggcaaggcttgctggtccaagaaac

SEQ ID NO: 184708 - DNA, 350 bp, Arabidopsis thaliana landsberg
gaatcaatggttaaatgaaggtgatcgtaacactcgattttttcatgcttcaacgaaaaatcgaattgttaggaatcgtttaaactccattcaagacataaatgggatgacagtttatggaaacaatgacataggctcagaagtagtgcgttatttcagtgacttattttctgaatctgtagagtgccctaaggaatatacatccagtagtgacccatgagatgaatgaagggttattaaaggagatcacagtggaggaaatacgtgaagctctcttctccatagaagcaacacgagcaccaggaccggatggttttaacgcagttttttccaacgctattgggagatag

SEQ ID NO: 184709 - DNA, 960 bp, Arabidopsis thaliana landsberg
atggaagaggtaaaggaagcaaccgaggactccaaaacatcagaagttttgagtcctgtggcaatcattgaaacagtaagtaatcaaaaagtgccagcagtgactccgaaaagaaggagaatggctaatgtgctagatgtgctggaaacgatcaaatcttcaagcacccctccgaagaaggctgccgtcactcctgaaacaacagtcgaagcttcgggttctaaagctccagagcaagatactgaagtcgaagctgggccctcagagccctcaaaggcaaagaccttggaaagtgaggcagaaaaaataacaaagccaacccttgcaaaagaaactggagttgttacccccgaagcatcccccaaaattcgtgattctatttttcgtcatgcttcggggaagaaattatcagaaaaagaagaacaagaggcccagcactatgcccaaaagttgaaatatccgaagggggcgttgatatttaatggcagtggagaggaagatttcttgtattgtctccccgacaacaaggaaatttctgtctgtcgggagatgagcaaaagcttcggattcccaactttagaagacggactttcggtgctgtcaaaagatgaattggccgacagcttagtgtacaacaacttaaaggtggaaaataaactttttgcgtggttaaaaattcgtgtgtttatttcttaataccacattcctattgcagggccttatttttagcaatgccctcagagcgcagaaaagcgctgaagacgaaggatgtaccatggcattaaataaccttcgttccgaagtgattgagctaaggagcgaaggtcttgagaaagataaaatattaaattcattgcttaacaaaatacaagaagacgaagctacttccaaggcccaagctgaagcccagaagtgcgaaattgaaaatcttcagaaacagctggctgaagcgaaattgaa

SEQ ID NO: 184710 - DNA, 258 bp, Arabidopsis thaliana landsberg
tttggcttcctgcaccaacctttgtcttttctttcatatgctgatgagaccactggaccagacagcatagacgccctgagaggcctcctaggatccatacctgataacgcatttcaaaaaagtcttgctggaagagagtggaacctgaatcttagaattgcttcagttattgttggtggcttgaagcttgctggtgttggagttgtttccagttttgcagctgtgggagcttcaaatgcattgaatctagcacgaaag

SEQ ID NO: 184711 - DNA, 74 bp, Arabidopsis thaliana landsberg
gcctaatgttacttagcacaagttacgaccaattccaggagcgtaccagaaacttcgagcaacatgctcactaa

SEQ ID NO: 184712 - DNA, 648 bp, Arabidopsis thaliana landsberg
cgatatcaacgatccgatgatagttgctgtggaatctctagacacaagcaaaaagagaaaacggcgtgctgaagaatcatacttgttacccttaccaaaacacttttgttctgagcaacaagcttctcttgttgattcttcacgtccatcatcagttatagattatgcagaatgctcttatgccatggagaacacaaaaaccagctatgaggcctcctcttctgtatcttttacaggcccttctttgtatatgtttaaagactctatttattcaaccggaagttctagttctggttatgctgctacatcaagcatagaacaatgcttttccaaagttgatcacaaaacacaagaagatactcaagactttactcacatggaattcatttatcacgactccgaatttgcggtcgaagatcttcaagaggttctgaatccagttgagtcttatattctttcttctgcaaggtggagtgtcagcaaccaaggtaatcaatgaaaagctaaatgctttagtgtcacgcattgtgtatgggaattatttgtgattattctttcaccatttggattgcagattccaaagaagctaccacgaaaccaaccattgatcaagagtttgagcagtacttttctacactcatgatgtaa

SEQ ID NO: 184713 - DNA, 1093 bp, Arabidopsis thaliana landsberg
atgggtgtaaagtctggattcactcagcgtgtgatcaaatatcacataagcattttaaggtacatgttcatgttgctctttgtcaaagttatcgttcccacttactttcatgtattgagatcaatttcatttgttatctgaaggatttgggggaaacagattactattgtcccacatgcagaacaaaatttgattttgagctatcagattcagaaaaacaagactcaaaatccaagtagattttctttcctccaactgttattgtttattctcactaacaattgaattgtgaatactgaataccaaactctaaatttgagagttttattatagacttggcaaaaacaatgccccgatggtgcttcctgataaagttattgttgtatgctctggagtagaaggcatatatattccaagccttcatttgtaagctgtcaccctgtgatctctatttcacattgtctaactttcctgcctagtaattactctagaactggccaaagcaaagaccttttttgattgattgatagagttttcttacttcgtttggtttatttacagagtcgtatgtaagtgtggatcttgtggacctgaaaggaaagcacttagtgaatgggagaggcatactggttcaaaagcaaaaaattggagaactagtgttaaagttaaaagctccaagctgcctctagaagaatgggtttgtacaaattttcttattttttaggaatatgatctcattcttttaaatttttccatcagttacaaaaagtttgaatgacatattccttcacattgtagatgatgaaattagcagagttccacgcaaatgctactgcagcaaaacctcctaaacgaccctctataaagcagagaaagcagaggttgctttcctttcttagaggtattaagcaatttcggatctctgaacatatccaaaagtttctgctgcgttgcgcgctgcttatgctggcttgtttttttcactattggcagaaaagtatgagccggtcaacgtgaagtggacaaccgagcgatgtgcagtttgcagatgggtggaagattgggactacaacaagatcattatctgcaacag

SEQ ID NO: 184714 - DNA, 339 bp, Arabidopsis thaliana landsberg
gtgttatagttcaatacaacaccggtcaccgagaacaccgaaggagagcatcatgtacacacgcacgctggtttccatcgccgcctccatcctcatcacggccggcatcaccacttccctggccttggccatccacgggtcacccacccacttcgccgtcaacgcgcagaacgtgaccacgctgccctccgtcaacgtgatcgccacgccgctgccgaccaccgtcagcacggattcggccgaacatgtcaccgtcgccacggccactgacggcagcttcctcgacaccctggccacggacgccagcgtgcaagtggacagctcgcacctggccatgcc

SEQ ID NO: 184715 - DNA, 256 bp, Arabidopsis thaliana landsberg
tgttcttacaaaagtggtttcgacatgtgaagggaaataaagaggatgacgacaaaacgagaacgacagctgcaaatggtgctgctcgtgctgctgacggaggagatgattccctcttaaaatggcaatcaatggctgaagctcgacataaatctgtatctgaagctggcaaagatggctatcagaaaactacttcaggtggcggaaagaactccaaagacagacaaaaagtgggactaccgttttctggtactgg

SEQ ID NO: 184716 - DNA, 721 bp, Arabidopsis thaliana landsberg
ggtcgtcggtggttggtctatccagcccaaaatccagcaatccgctatgtaaaaaggtaatctcttatttaagtgaacagtttatattactatgttcgtacgtattaaattctaaagaatgaaagcgtagaaactgtaaaatgcgaataaaaacccgttgcctgttgggatatgcctttgtttgcctaacccatcgggccaaaagtcgtcatgatcattagtaaccaagaagtggtatatcctccggttctacttttccccattattacgtgtctttttataatatgtacttacattcgagatttatttaattattttattcatattaacaatataaataacttaagcttctcttcgaatattcggagcccaactcctctctcttcacgcatttctcgttgtcaaagacaaagttctctccttttataaacacccatctccacctcctctctcttattcaaacttctttgagaaaattcgagttaagtgtttttataatatatacattctctgatatgggtttctctagagcaaaacgtgtcactgatccacttgcagaagaggttagggctcgtctcgttggatgcagctttagcagcggcagcgaacataccggcgacggaattgaagactacgaagacgacgactcgccttgtctctctgatctagtacaagggttcttggaagatgaagttgatacagttgatgatgagtcatgctg

SEQ ID NO: 184717 - DNA, 91 bp, Arabidopsis thaliana landsberg
atgaaaaaaagagtttggatcttaccaaaaagagtgatagattatgatcggggtcgggatgatgaggtagttgtgatgagaagaagaggaa

SEQ ID NO: 184718 - DNA, 953 bp, Arabidopsis thaliana landsberg
gtgccgaagctgaagaagactgctttgatgatctcattggtacctgatgatgttgggaagccaacatttaagcttgagaaatctgaggttaaagaagggatctgttcatgggagaatccaatttatgtgtcagtgaagctaatcaaagaaccaaaaactgggattgttcgtgagaagatttaccatttcgttgttgcaacagtgagtcaaaacaaacaatctctgtgactatgtcttttgagtcattctggaaaaagaaaggctcaattttttccaaaatctgtttcagggttcttcgaaatcgggttttctaggagaagcttccattgattttgcagattttctgacagaagcagatccattaactgtctccttacctctcaaatttgccaactctggtgctgtcttaaatgtaatctcttttcttctcctttttgaaacctgagttagaaattgcatcaaatatgtaagaaatgtatgagatgttatataaactgtttggttgttggtgcaggtgacaatccataagatacaaggagcgagtgatttaaagtaagagtagtttttttttctgtggttgctgtctcctgttttctttgtaagagatttttaacatcaaattttgtagatttattgaggaaaataaagatcaaacacttagcaaagaaggcagcttcaaaagtctacaaagcaatgatgacttagaaggatataaccaagatgtaaggttccttgttcagagagttaaataaactgtgttgtctattgagaaagatcgtgatagttatcgatcttttggtatgtaggaaaggagcttagatgtgaacacggctaagaaggttggcataggaggtgctttagattccattggtgaatttggatggatagatgatgggaatgcacggttacctcaacgacataactcagttcctgcgacaagaaacgggcattga

SEQ ID NO: 184719 - DNA, 43 bp, Arabidopsis thaliana landsberg
atggccgctattgcgaatgacctcgcccaactaaaccgccccg

SEQ ID NO: 184720 - DNA, 1047 bp, Arabidopsis thaliana landsberg
atggagagagaagacttgtacgctgtcttggatttgaacaacgaatgtacacaaggagatctcagactttcttacaagaaccttgttctggttcgttttcacatctcttctcttcttcttctttttttgtctgaatgtgatccgatcttcttgaataattttgtgtgtttttttttgtatgtttggtggtgtagaaatggcatccagatcggtttcttgaagaaatagagaaagatgaagctaagatgaaatttcagtccattcaacgagcctattctggtaaaatttacacggttttcttttaaaccgggtctggttctttatccgtcttctccagtttattaatctattgtattcacaacagttttgtcggattccaacaagaggcttttgtatgacgtcggtgcttatgatagtgatgacgacgaaactgtatgttcttcttgtagatatttctcttttaattgagtcagaatgttgatttatttaaatcaccgatatgtctaaatcaatgtcaacttattgcgttgtagggaatggctgatttcataaatgaaatggtgacgcttatggctcaaactcaatctacggtaacaaactactttgcttcatctatactagtcattactattatatctgattatgctaatggtaatggtaattgcatatcttggagcagggggacgaaagtttagaggaatttgaagagttatttcaagaattgttgaaggatgatgtgaatcaattcaaaactcgttcatcttcgtcttcatgttcgcaatttagtggcacgtcgactttggtccattgcgatgatttatcaaattcaaatgatattcccaacaaaattaacggtcatgacaactattgttgtataagttctagtaaggtatttagttttatactctttctgcttgattttttttccttttcttataacttctttgtggttctatatatgtatataacaaaaataaacttttgaaatgaaaatgtatgttgtagaatttaattcagaattatcatgaaaccgatgttgaccattga

SEQ ID NO: 184721 - DNA, 365 bp, Arabidopsis thaliana landsberg
gtcaagctcgacatttgcgtttcggacggcggcatcgtcggcacacgcgatcaggacattgccttgatcgcaactcagcccggccgctaccaattgccggaactgcgtgtgccgtggtgggacagcaaggccggcgtacagcgcgagatcgtattaccggcgatgagcttcgaggtaacggccgccagccgtgccgccgcaacgaccaagccatcgtccgcaacgccggtcgcgagcccgtcactgacgaggccgtccgaccaacccccgagcgccgcgctgcatatcgacggacgccgcgcaatgttctggccatggctcagtgccgcgctggcattgctttggctcgcaaccctgtgtgcgtg

SEQ ID NO: 184722 - DNA, 54 bp, Arabidopsis thaliana landsberg
atggttgtcttccatgaatcctgcattaacaccaattccatgatcaagaaccag

SEQ ID NO: 184723 - DNA, 326 bp, Arabidopsis thaliana landsberg
gatcttcggctacgaagcatacccccaacagctagtaaaatgttcgtcttcctctaccttggttcggcgacgaggatggatttatagcgacaataaggagggcatcagcaggggagttgatgatgcggtcaagtcacagcgtaacgagcgtggtcgttgggcggtgacgaaatccgttgaacgacgaatggcgacgatgtcgggcgagcagttacaacaaaccaggtggctgacttctcgatgcatgcagcaggagttttgtcgaggtactgcgcacgatggcggcgagcagcacagcagcaatggcgcatggcgagagaattccg

SEQ ID NO: 184724 - DNA, 14 bp, Arabidopsis thaliana landsberg
atggccgcgcgccg

SEQ ID NO: 184725 - DNA, 854 bp, Arabidopsis thaliana landsberg
atggacatgtttgagaaggcttcatttgtaaagcagcgtgataactttaccttaatcgaaattcaagaattgacggctggagttggatccttggaagcaatggaaacaatatatgagctttggagaacaaagaggcagaggaagggaatgccattgatcaggcatcttcaggtacaatctctgatgccttttcatcttttattatttatttggttttcatgtttttcttgagatttaaaaatctgcatgactaggctcaacatagatctttttggaatcgggggaaatgcagaattgtggacaataaggctatgtctagtagtaggtattacttagtgttcttttcaggatattgaatgatgtgggtgttttatgcaaatggaacgtctattagggggaaaattgcatctttttgcattccagtttgttgtgcacgaagatgtctggaagtccataactgtagcatcttctatagtctgttgattttactccttgttgattagtcttacttgctagctcaacaataatgtagttactctgctgcaatatttttaattttgcctaacgtaaacacttgttttctacccttgcaattcagccacctctatgggaaaaatatcaaagggagctcaaagactgggagttggttatgagcaaagcaaacactccaaattcctgtgggtcgcagaagaaacagtcacctactgagaagccagcgatgtttgctttctgttttaagcctcgaggtttggaagtcaaacacaggggaacaaaacacaggtcacagaagaaactctcagtttatgctcaacatagttctgctttgggagattatgatggctgtaattcatcag

SEQ ID NO: 184726 - DNA, 406 bp, Arabidopsis thaliana landsberg
atgcgaggtaaaatgggtgtacagctacggagaagcgttggaagaaatatgccgcaataactatacccttggcttttcagactaccgcctcggggccaggaatggtatagacctgatcagggatatacagggccgcagctgcaatacccccgtaatattgcttacaggccggggtaactacgaaatagatatcgaagccaccaaagccggtgcatttgattacctcatcaaggcagacctggacattgacaagctcgagagaacggtgcggtacacactcgagcgaatgcataacctgcagaagcttcgcgacagtgaacgcaaataccggaacatttttgaaaaatcgaaagacattgttttcctcgccaccgcagataccaccatcttcaatatcaacagggcg

SEQ ID NO: 184727 - DNA, 470 bp, Arabidopsis thaliana landsberg
actacgcgcgtcgcccttatgaagtgggtacggccgaaagcttcgaccgagtgtccggcattgcggataatgttttgattgcagacgtgcttgcttcttacggagttttggattggatgaacgtgggttttagactgcctgtatttttgtgggaaaatattaatgctccagctttagggcgtttggatgagaacaatatcgatttaggggatgcggagatttttgtaaaacttcgagtactagaccgaaaaaagtacaaagtgggagtaagtttctgccttatatctctgtgcccacagcaacgagtccaacactaatttcacgggcaatgcggggtgagcgaggaggaaagttgattgtcgattataaaccgcataagcgagtgtcattggcagcaacgtgggctatgaagcgcgcaaagactgccgatgtagcgggtcattcctcgatgacaaaatcagcgggattag

SEQ ID NO: 184728 - DNA, 113 bp, Arabidopsis thaliana landsberg
gaagctgcatcgaggcggatgatgtggagagccaaggatggaagctgacttggcatggtatcaaagacacgattcaacgagaagatatggaagatatcgtttcgaagatttag

SEQ ID NO: 184729 - DNA, 1413 bp, Arabidopsis thaliana landsberg
ttaccagaatgtctccgcattattggatacttacgccgaataggtgtctttggcgagtatgaaatgcgattacaggtgaaatattttgacatataacatttgaggttatccttccattacattgtattcctttgtctatggaattgttcattctgtaagctctgtcttcacttgttaatggatcttcttgtctatgcagttcttaagatgccgagaggcatggctcactggaattcttgaggatttagatcagaaaaatgcctatgagtatttaaaaggcatgataaactgtcacagaatgcacctatttgacgtggttaaccaatatcgagctatattttctgatgatacatctgggagcgaagaaaattatgatggtggacttttgtttagctgggccatgcatcaaataacatcacacctgaagactctaaaaatcatgcttccaaagattactgaaggaggatctctatcaaatattttggatcagtgcatggttgagttcttctgcatcttgtgtattcctttttgaattcactgtttaactccgatgattgacattttaccttcttctcatgtccacccagtactgtgcgatggggcttggtggggttgggctagacttccggggtctgcttcctccactttttgaagagtaacaattctttcaatctaattttaactgctgtcataaccttcgcttatttctgtaaaagttcagtatctaactcgcatacttactacagggcggttctaaacttattctccaagaacatgagtacagcagttgagaattttcaggtgcaatatttgaacttttgttctggcatggaactcaactcaaacagtgtttggtatccaattatccacatgtcacactcttgaattcttcagaatgttttacttccagttagttttggattcacatcgatgggttccattaccatctgttggctttccttcaagtggtattaatgaagatagcaaggatgacgtcacacctccatcatacttgatggagcacccgccacttgcagttttcataaatggtgagataattatatactatcaatttttaacattatggatgatataaccaaaatgagtgtcctaactcccaactatgtcaaatgttgcaaaatgaaagttgttatctctcttatggatgtttttttcacagtctgattgtgattgataatcccggctatgtcaacaggggtatcttctgctttgaacgaattacgtccttgtgccccgctaagtctaaagaatgttgttgctcatgaactgatcaaaggactccaggccgtgtctgactccttactaagatacaatacaactcggatgcttcgactcagtgaatccaatctattcctttcactttgccgagcttttgtcgaggtcgagttttga

SEQ ID NO: 184730 - DNA, 898 bp, Arabidopsis thaliana landsberg
atctgaagagtatggtttcagttggattgacttctcttgcagcttctaaatttgatatgaggagtgtagctattggggacaaacaaatgcgtgtgttatgtatcggtcacggtggaggaagtttaccgttgtttatagctaaacacattcttggtaggaactttcaatgtacatgtatatcagtatttagaacttccatctgtaattcttatgttagttgatgtgtcttctaggtgctgttgttgacatagttgagctagacccacttgttatctcagagtcggttcgagcaatgggctttcctgcattctctgtgatgacagcaactgggaaacgtgtgttaccaactcctgaaattattgaccaagtgatgtggggagggatccgtgagagactctccttatacgaatcaaaagctgaggatttcattctcaggaaccaaagtaatacttatgacttgatcttcatggatgcttatgatggagcagacatctttccccatagtctgtgggattccagttctgtgtttatgaaagctctgagcaaaacacttcaccatgagcatggaactctggtggtgaaccttcactctgatgcagacatctctgatatagacagatcaaatgaaggtgtaacaacggggaagtatgtacggaaagttggtaaagcctataaaaagggtttattagagaatgagaggaatggtctggtgtttgcttgtgaagtgccatggctatgtaatgtatcgctggtggtgagcagagggatggggtcagagggaagagatagagagaaaaccaagagtaatctaatgaagacttcactagaagtggaccgagtcctgcgtctgcctttctcttgcttggattatctgaaaactggtcttgccatcatataa

SEQ ID NO: 184731 - DNA, 1087 bp, Arabidopsis thaliana landsberg
atgactggtcatctaggaagtgttatatcctccatgggaagatggagaatgagacttgaagtgcctaaggcagaggttgctgagatgcttcctcttgcaaggcttctttcaagaagtacagatccagctgttcactcaagatcaaaggttattgctaaatcatatgcttatattgtgattagccatgttctaaaatgttggttcaagaaaaacacctgctagagcattttcatgttcgtgtactccaaaaatatgttctcatctcctctttgagctggatgcctctgactgtttgggtttcttggttggtatggcaggatcttttcatccaaagcgttcaaaatctctgtctacaagctgaaaatcttcgagacttgcttgaggtaatgtattaaatattatgccttctgtcctttcgaagtagctaacaggcttctaatacagaaagcagattctataataagaacaaaaaaacctgtgtagacaccattaagctcgcctttagttctttcctatgctaaattatatggttccttaaaatcaggagatacgtgggtattatactccaccaagtgaagtcgttcttgaagatctaagtcttccaggtttagctgagctcaagggtcattggcatggttcgcttgatgctagtggtggaggcaatggagacactttggtataaaaataaccctgtcatctcgtttttaaaataaagggttaaggttgtcatcatctaaaggacactccaaattggttttcataagctttcgtgtccaaggagacgggtgcaattgtctttagaaaaaactttttatgagtgagatatttaagtgagaatttctagtgatgtcttgtttaaatgttttcctcttacatctaataccaggccgaatttgacttccatggagatgattgggagtgggggacttacaaaacacagcgtgttctggctactggttcgtataacaatgatgatggtttacgtcttaaggagatgctcattcaaaaaggaaacgctacactgcacgcagatgggaccttattggggccaaaaacaaatcttcattttgctgttctgaatttccct

SEQ ID NO: 184732 - DNA, 147 bp, Arabidopsis thaliana landsberg
gagaagtcggattcacgaatagatcttgctaaaacgtcaaaacttgacgaagaagcaataaatgataagatcgagatcgattctaagggatcgatatcgacaaggttttgcaagtcctccttacagggcttgaacacaagctcttag

SEQ ID NO: 184733 - DNA, 778 bp, Arabidopsis thaliana landsberg
gttcgtacttctggtttgatcgaggatcaaagcgtagaagctcttgaagttgactttgccaacaagaacttaggaggtggcgctcttcgcaagggatgtgtccaggtatataaaaccctaaacctaaactccttttgatcttgtgaagtttttctgatgtgaatagtttcttgataaacacaggaagagattagattcatgatcaatccagaattgatcgttggtatgctctttttaccaaccatggaagtcactgaagccattgaagttgttggtgcagaaagattctctctttacacagggtacatggttcgatctgtacttttgagttatacaatgtgtgattctgaaaaaatgttgttaaaatggtgttctatacactctgtagatattcatcttcgtttcggttttccggtgactacattgatacaaaggaaacagatgttttcggaaggcgaaaaacgagaatagtagccatagatgctctgcgacacccaggagtctcccaatacaaacttgaatccctcctcaggtaaagttgaatcataacttcttacaattgtcaacactcttattataaaagtgttctaatcctttcttcttcagggagaccaataaggctctatgtggtttccttcacgtctgcaagaatcagagcaacgggcagtgtatagatcatgaagatggggtcggtgtcgttacagggaattggggatgtggtgcttatggtggagatcctgagctcaagtctcttcttcaatggcttgcggtttcacag

SEQ ID NO: 184734 - DNA, 66 bp, Arabidopsis thaliana landsberg
atggagataagaaaacgtaaatgtaaccattccacatttcgaaatcaacttctacagatgtacgag

SEQ ID NO: 184735 - DNA, 162 bp, Arabidopsis thaliana landsberg
ttttggaaagaaagaaaaaaaaatcgaaccggttaatcaattcaataccggtcggtcaagtgtctctcagaatttgaccccaatcgatccgatattctggaaacgacagcgtttagcatttcgccatttagaacacgaaacagattccgtgcaaaagctccg

SEQ ID NO: 184736 - DNA, 307 bp, Arabidopsis thaliana landsberg
cttcagagttgtatgttcagtaatagctgagagaaataccaagaatggagaagaagatcatgaatccagctgctacttgaattacacgtctactaccaacgcgtgttacagccaaaaagccggcattctctctacaaaggatcatcaagaaacggtttcaacatctgacaaagattgttgttcatttcgaataagagaatcttttctgcttttgttggagattagagatgaaactgtctttacacagacacggatgttgcatttcctgctccaaataatccacagagaagaattccaaatcccttaa

SEQ ID NO: 184737 - DNA, 97 bp, Arabidopsis thaliana landsberg
atgctggatggtgaagccaatcagactgcagttcgtaaattaatggacaggatgacccaagagggctacgtggaagcttcgagcaaccgcaggctag

SEQ ID NO: 184738 - DNA, 226 bp, Arabidopsis thaliana landsberg
atggcacagtggtttatcccgtggttcggccaagtccaacacttgcctactccacgttgtggcatctcaacggacgagggttgcactcaacccctttcaagcggtccaaagacccacttggaataccacggtgttttgctttcactatactatatcccgcttgcgaggaatctccacaacttggagcctctcgcccttacaaagatgttcacaaagaagcacggga

SEQ ID NO: 184739 - DNA, 106 bp, Arabidopsis thaliana landsberg
ttgcttcatcttcaccgtggtgactccattgcactttacacatctttatcaccttatttctcgtaacccgagtcaaagtatccaaaatcttgatcgggtactccgt

SEQ ID NO: 184740 - DNA, 125 bp, Arabidopsis thaliana landsberg
agcttgatcttcgccggagacaaaccgccatgcagaaaagctccgaacgcttttctacggcgccgaacaatcgcaaacacaaacggaatattggaaaaaatgtaatttggaagcaaaaaatttga

SEQ ID NO: 184741 - DNA, 118 bp, Arabidopsis thaliana landsberg
atggttatcatgcgtgacaagattggcatattgaagagaagaatcgtgatttggaagaacagatccgtgtatctaaatggaatcagtagtatcatccgaaggaatcatgtgaagccag

SEQ ID NO: 184742 - DNA, 168 bp, Arabidopsis thaliana landsberg
atgtctatggttcgttatctcaacgttgacaatattttcgttagggcaacttcacctccttcatttgcgttggaagtgttcgttcgatgtgaaggagaatcaaagtttaagcgactttgtaatccttttctttacactccttcagcgccctaccctttggaagtggag

SEQ ID NO: 184743 - DNA, 215 bp, Arabidopsis thaliana landsberg
ctttgacggtgcaggtctcttcaagtgtgaaagacaagctctcagcagccagtgaagaggtcaaggagtcattcaagctcgggaaggaggagaatgcagagtcagcgagttcatcaggcacaagagcctctcaaggagaaaaacagcaatcaggttctacggaggaactacatacattttttgcaaaattcaagtcaagtctttcttcaccaaag

SEQ ID NO: 184744 - DNA, 264 bp, Arabidopsis thaliana landsberg
gttgcatgaaacagttgtgaatgatgccggtgagtggatagttcgtatacctgcgcagcaggtaaacacagaaccacagtgtatggagattgtttcaggaaatgaaaggatcgtattgaccaacctgctggttggcgatgtatggatatgctccgggcagtccaatatggaatggcctcttgccaaagaaatgcactggcctgccgaaaaagagcaggccatgcagccgctgatcaggtttgccaaccccgcgcccgcaggcag

SEQ ID NO: 184745 - DNA, 573 bp, Arabidopsis thaliana landsberg
atgctggtggaacgaacctcaatacaaggtaaagacaggggagccgcctcaataagaggtagagttgtaggtatgcaacgtttaggagccttacaagtcagcttcgcaactcagagagccttagacaaagtgttagcttcagtgatactcctattttcaaaaaccaataagtttcgggcagctggccggttaaactgaaacaaataactatgtctaagctaccatgagacaatttcaagccgagccaaatcaagacagaatctgcatactgcagtaagctatcgcaacaaagcgataagggtgctagaagagagcaaaaacatagacacaaaagtatctaaacccatcaaaattgattgagttaaccccgagttccaccaaaccagaaccgcacattcaagaaacaaattccttcccatattagaagaattagagaacgagagggacaagcaaacctgggggaacatctctccaaaccagtgtggaaagaaggactcgtcgagacgcagcactccaaagctattgagtgactttgcagaaaggagacggtttctcgtcgtcgagggtgactga

SEQ ID NO: 184746 - DNA, 153 bp, Arabidopsis thaliana landsberg
atgagatgtagcgcgctaagtcatatgagatttagcggttttagcgggataatatcggatattagcgtatttgaccgtttagcgataaaatgtgattatataaaccccatccttctccagctattatctgcagatatgtggtcctatatccgg

SEQ ID NO: 184747 - DNA, 462 bp, Arabidopsis thaliana landsberg
  unsure (1)..(462): unsure at all n locations
ggcattccgtcggcgttagagaaattcgagcatcaaaagacaggaacggtcgctttcctgggcggctccatcacctataatcccggatggcggaacctggtgatcgggtatttacnnnnnnnnnnnnnnnnnnnnnnnnnnnnctttatctcagccggtattccctctcttgggagcctgccgcatgcctttcgcgtgcaaagggacgtgcttgattccggtaaagtggatgtgatgtttgtagaggccgccgtcaatgaccgcgtcaacggcacggacagcctcacccaactgcggtctcttgaagggatcgtgcgccacgcaagagcgagcaatccaaggatggatgtcgtgctgatgtcgttcgccgatccggataaactgaaggactatggcgagggaaagacacctgtggagatcgcgaatcccgagctggccgcatcgcactatcatctgccctag

SEQ ID NO: 184748 - DNA, 125 bp, Arabidopsis thaliana landsberg
cgtcgtcgctgctccgaggtaccaaatgcttccgatggagacagatcttaatcttcctcctttattaactgattttcccgataacgttttacctctcgccgccgtcaagtctaggatcaccggag

SEQ ID NO: 184749 - DNA, 200 bp, Arabidopsis thaliana landsberg
atgaagcggctgagtggtgcggcttggacggaggagaaggtggtgaagcggtcgagtgcgtttgttgaatcgagtgactcggttatgaagatggtggtgaagagatcgagtgaagcttgtgagaatgacaatggtgatgagaactcgagtgatgttgaactctcggaagaagagaagacggtggtggctttggtgaagaa

SEQ ID NO: 184750 - DNA, 4568 bp, Arabidopsis thaliana landsberg
ttcattcagataaaatcccaattacagctgaagcaaaatcagcaaatcgaagtattcctttttctaaggatcctaagaaggcaagaaaagctttagatgatgttagatgcaaggctatgattgacaaactgacttttgaaatgcctcttgtggaagctattctaatctctcttacgatacaaaaatatatcaagacattggtcaccaagaatctgaagaatgaatgcagcgttatgatgatctcagaaccggactccaagaatgctacaagatcttggtacctttttactcggagcaactattgagtttagggtttagggtttagggtaccagctaccttcccaagagctctatgcgatcttggttctagtgtaaaccttatgcctcgttctgtagcaacacatattgggtatttcaatcttgggcctacttatatcactcttgtattagcacattgttcaacccgtattccagatggtgtcctatatgatgttcttgtgatgattgagaatagcatgattcccacatattatgtgattttatcttatgaaagagaacttaaggatcctttaatccttggtagacctttcttgcacacagctaaagctatcatagacattcagaagggaagaatagggctgaatgttggtgatcttactgagcaatttgatatgaacaagttggttaagaagccgattatagaaggtaaaacgtttctgatagattctttcgcaccaatagctgtaaaaagtattttatagatagagactgggattatcaatagaggatatctcagaattggacaacaaagctgctagatgaaacccaacatgtgatgcaactaatagtccaagaagatctttcatctacgaccccaaaactgatttctaacgccgataggggtctagataaagcccctaagattgagctaaaaccacttcctacaaggctaaggtacgcatttcttggtgaaaattctacttccatgtcattgttaatccttctttaaacaacacagagctcacttaattgctaagcaagctgcgcaagtatcgcaaagctcttggcttttctcttgatgatattacaggtatctctcccgacttgtgtatgcataggattcaccgtaaggattaatctaaaccctcagttgagcatcagagaagactaaacccaaatatcaaggatgttgtaaagaaggagatcatgaaattgtttgaagcaggaatcatctatcctatttcaaatagtgattgggttagtccactccatgtggttcctaagaaaggaggtgttacagatgttaagaatgataagaatgagttgattcatacacggactgttactggccacaggatgtgtattgactacacgaagctgaatggctgcaacaaggaaggatcattttcctctaccattcattgatcaaatgctggaaaggttagctaatcacaagtactattgctttcttgatgggtactcaggattctttcagataccaatccatccagatgatcaggagaagaccacgttcacgtgtctgtatggtatttttgcttatcatagaatgccatttggtttatgcaatgctcctgcaatatttcagaggtgtatgacctctatattttcagatttaatcgaggagatggtggaggttttcatggacgatttttcggtctatggcccctctttctcctcatgtttgttgaatcttggcagggtattgaccaggtgcgaagagacgaatcttgttctcaattgggaaaaatgtcatttcatggtgtaggaaggcatagtgttgggtcacaagatatcagagaagggtatagaggttgacaaaggaaaaattgaagtgatgatgcagttgcagccaccaaaaacggtgaaggacatcagaagtttccttggtcatgctgggttctacagaagatttattaaagacttctccaagatagccaggccgttaaccagactattgtgcaaggaaaccaaatttgaattcgatgaggactgcctaaaatcatttcacaccatcaaagatgctttggtatatgctcccgttgttcgagcgcctaattgggactacccatttgagatcatgtgtgatgcattagattacgcagtaggagctgttttaggccagaaaatagataagaagcttcatgtcatatattacgccagccgaacgttggatgatgcacaagtaaggtatgccactacggagaaagaactattgcccgtggtctttgcattcgaaaagtttaggagctacctggaatgctctaaagtgacagtttacactgatcatgctgctctaaggcacatctatgtaaagaaagataccaagccaaggttgctgagatggattttgctgctccaagaattcgatatggagatagtggataaaaaggggattgaaaatggtgtagctgatcacttatcgcgaatgagaattgaagatgcagtccccattgacgacaccatgcctgaggaacagcttatggccatccgggaagtgaacaaaaaattcaaaagcagccagttttgggatgagatgcttgcagtagaggagaaacttccgtggtacgctgattatgtcaactacttggcatgtggtgaagagcctccgaatctgtcagggtacgaaagaaagaagttcttcgaagacataaatcgcttctactgggatgagcgggcctctacactctctgcaaagataaaatctataggaggtgtgtctcagaagatgaaataaacggtatcttgcagcactgtcatggttctagctatggcggccattttgcaacgttcaagacagtatctaaaatcctacaagcaggattttggtggccaaccatgttcaaagacgctcaagagttcatttcaaagtgtgattcatgtcaaagaaggggaaacatcagcagaagaaatgagatgccccagaacccgattttggaggttgagattttcgacgtatggggaattgatttcatgggtccgtttccgtcctcgtatgggaataattatatattggttgcagtagactatgtgtcaaaatgggtggaagcaatagccagtcctacgaatgatgctagagtcgtcctgaagttattcaagagcatcatcttcccaagatttggagtttctagaatagtcattagcgatggaggcacgcactttgtcaacaaagttttcgagagtctactgagaaagaatggggttaaacacaaagtagcgactccttaccatccatagacaagtggccaggtgaaaatctctaacagggagataaaatcaattctagagaaaactgtcgggatcaccaggagagattggtctgtaaagctcgacgatgcgttatgggcatacagaacagctttcaagacccccattggtacaaccccgttcaatcttctttatggtaaatcctgtcacttacctattgaactggagtacaaagctatatgggcagtgaaacttttaaatttcgacatcaagactgctgaagagaaaagattgatacagctgaacgaccttgatgagctccgtctaaaagcatatgagagctctaaaatttacaaggaaaggacaaagtcgtttcatgacaagaaaataacttcaaaagattttaaagttggtgatcaagtcttgctattcaattctcgcttgaagctttttccttgaaaactcaagtctaggtggtctggccccttcagtgtcactacagtaagaccatatgaagctatcacattatctggaaaaggtgacgacttcgcggttaacggcctaagactaaagaaatatatggcagaccaaacaattccagaaggaacttctgttccactggaagagccgcccaacgcccaataagtgtgaggagtcaagctagagactttaaacaagctcacttgggagaaagttccatgattatccatgtaaataattttttgttatttctgatttgttttagttgtgtttttggttctcagaaaaaaaaaggggagaagtaacgtgaaagtagagtaaaaattcaaaacttttactctactgatggtctagagatcgagtacattggtcgagtatgagtgatgtttaaaacccaaaaaaaattaaaacatcgttttactcgaccaacagaagctacagagtcttccggggagtttatcaagtttacagaagattgtgggatttcctggaggttttctagtgaacaaagtagagacaagaagacactgtgggatccgccgctgacgcccatgtcctccatgcaacagacaaacgaacaaggaatcccccccccctcatctcttctcctccactcgacgtctaccacatcactcgacctccatccatctgtactcgaccttatcacctcttcatctcctccatccccattaaactcgacctccacctctcatccaaactcaaccaaactttcatcactttactctcgacaactcgacctctccatctctcttcaatctcgtctccactcgacgtcccctcaatcactcgactttagcgccatcatcttccgtccaaagcaccactcgaccgcttctctctag

SEQ ID NO: 184751 - DNA, 158 bp, Arabidopsis thaliana landsberg
acataccccccttgcattcgaggcatgtctcagtcccgatcaagttgtcgtatgttgttctagtgatgcacaatgctgcatcggtcgatccattgcctttaatgaatatggatacattgacacagcagcaagaaatgatattcaatcccctgtatatg

SEQ ID NO: 184752 - DNA, 121 bp, Arabidopsis thaliana landsberg
ttgtgttgctcgtaaccgcatcagcggcatatcacccttcaaagtatgcatggagaaatataataaaacagaaaagggatcaacttgtaaggaacccatgatctatagtttgatgttttaa

SEQ ID NO: 184753 - DNA, 3181 bp, Arabidopsis thaliana landsberg
  unsure (1)..(3181): unsure at all n locations
gcattgattacattgaagaagggtactcaacttttgaaatatggtcgcaaagggaagcccaagttttatcctttcagactgtctagtgtgagttgctttctgctccaaccacttgttttttgcttgtttgttggattattgcttcatctgataaacctgtgttgtgttgtgcaggatgaaaaatctttgatctggatatcaagtagtggtgaaaagcgactgaagttagcatctgtatctaaaattgtacctgggcagagaactgtaagatatcttcattttatctacagtctttataatgaatattccatatagtatggcgaattctgcttcctttcaagcttgtatataattaacctgtttcattttttgcatctcaggctgttttccagcnnnnnnnnnnnnnnnnnnnnnnntacttatccttttctctcttatacaacggaaaaaagaagtctcttgacttggttagtcatcgtgaaactgatatatttggacaataatttcaacaacacttgacaataactccaggcataacagttcacttcttaatagatttgtaaggacaaggttgaggctgagatttggattggaggcctgaaaacattaatatccactgggcaaggcgggcgctcaaaaatcgatggctggagtggcggaggcctttcagttgatgtaagtactctggaaaggactcctttttgccaaatatatgttggtttatcaaatgggatactgacgacgtcgtggtctgttgaactcatcggttgatcctgttgatattccattttggtgtttaatgcgtttgtttgttttctatatatttcaggccagcagagaattgacatcaagcagtccaagtagcagttctgccagtgcttcacggggtcacagctctcctgggactccctttaacatcgatccaattacttctcctaagagtgctgagcctgaggttcctccaactgattcagagaaatcacatgttgctttggacaacaaaaatatgcaaacaaaggtatctggttcagatggttttcgagttagtgtctctagtgcccaaagtagttctagtcatggttctgcagcagatgactcagatgctctaggtgatgtttacatctggggtgaggttatatgtgacaatgttgttaaggttgggattgataagaatgcaagttatctgactacaagaacggatgtccttgtgccaaagccattggagtcgaatattgtcttggatgttcatcaaattgcatgtggtgtcaggcatgctgcatttgtgacaaggcaaggtgaaatttttacttggggtgaagaatctggaggaagactgggtcatggtattgggaaagatgtttttcatccccgtcttgttgaatctctcacagctacttcatctgttgactttgttgcttgtggagaattccacacttgtgctgttacactggctggagagctctatacctggggtgacggcacacataatgttgggcttcttgggcatggctctgatatcagtcactggataccaaagagaattgccggttctctcgaggggcttcatgtggcttcagtaagttgtggaccctggcacaccgctttgataacatcatatgggaggctttttacatttggagatggaacatttggtgtcttagggcacggggacaaggaaacagttcagtatccaagagaagttgaatctctatcaggattgagaacgattgcggtttcatgtggggtttggcacactgctgctgttgttgagatcattgtcacacagtcaaactcaagttctgtatcatctggaaaattgttcacatggggcgatggagacaaaaaccgtctcggacatggtgacaaggatcctcggcttaaaccaacgtgtgtgcctgcattaattgattacaactttcacaaaattgcatgtggacacagtttgacagttggtttgaccacgtctggacaagtgttcacaatggggagtacagtttatggtcaacttgggaatttacagactgacggaaaattaccgtgtttggtggaagacaagcttgcaagtgaatttgtcgaggagatctcctgcggggcatatcacgtggcagccttaacatctagaaatgaagtttacacatggggtaaaggagccaatgggagattagggcatggtgatctggaggatcgaaaagtacctactattgtggaagctttgaaggatagacacgtaaaatacattgcttgcggatcgaattacactgcagccatatgtcttcacaaatgggtgtctggtgctgagcagtctcagtgttcaacctgtagactggcttttgggtttacacggaaaagacataactgttacaattgtggacttgtgcactgtcattcatgcagttcaaaaaaagcattccgagctgcactagccccaagcgcgggaagactatatcgtgtctgcgattcttgttatgttaagctcagcaaagtgtctgagataaacgatactaacagaaggaacagtgctgtgcctcgtctttcaggggagaatagagacagattagataaatctgaaataagattagctaaatttggtacatccaatatggacctaattaagcaattggatagcaaagcggccaaacaaggaaagaaaactgacactttttcactcggtcgcaactctcagctgccttctttgttgcagctgaaagatgctgtgcagtctaatataggcgatatgcgaagagctactccaaagttagctcaggctccatcaggcattagctctcggtcagtgtcacctttctctaggagatctagtcctcctcgctctgccactcctatgccttcaacttctgggctctatttcccggtgggtatagcagataatatgaaaaaaaccaatgaaattctgaaccaggagatcgttaagttacgaacacaggtatacattctcggagaagggactcatgcttcttagttcgttcgtccatctacattaatgtgtagtctaattaaaatcatggatttggtttaggttgacagtctaactcaaaaatgtgaattccaagaagtagagcttcagaactctgtaaagaagactcaggaagccttagcattagcagaggaggaatctgccaaatcaagagccgcgaaagaggcaatcaagtcgctcatagcgcag

SEQ ID NO: 184754 - DNA, 314 bp, Arabidopsis thaliana landsberg
agaagactttctctctctagtttcttgcattttccggtattccttacgatcgcaagtgatatttaaggccgatcaaagaaacatgggaagtactttctttggtagtccagacgtggtgggatattggccgcattcatcgtctccgacgtcatcctcttcttctccagcgacaagaagagggaagaagaatggctccgagcaagccgaagcagccacagagaggtcttggagtagcacaattggagaagattagattacatggcgaaatgagttgcaatagcttcaacagttataacccttctttgtatcctcag

SEQ ID NO: 184755 - DNA, 415 bp, Arabidopsis thaliana landsberg
tgcaccggcggcgacggcgttcaattccaccggcctcttcttccctccgctgccagccccggctccggctccgtcgccgatgatcaacttcttcctccgccaccaccatccgtgggcaccactgccgccacggcctgtgacgtcgtcgtcgacgcgctgtgcattgcatgcatggtcgctagcgtgcgcctctgtcacgtacggccgattactccctgtcgagtttgctccacagtagttttagctagttatatatcttggtcatcagcacgcagcaaaggtgcaagttaattagctactagcctgattagtaaaagttgtgtgtcgtcaaatgccctgttgtacgttcatcagataaaagagatcgaggtacacgtggatgagagtctggacgtacgtacggtcataaggctag

SEQ ID NO: 184756 - DNA, 227 bp, Arabidopsis thaliana landsberg
atggttagagaaggtgaagaagaagaagagatgatgatgatgatggcaacgaaacctgcatggcttgaaggtttaatggcggagactttcttctcaagctgtggaatccacgaaactcgccgtaaaagtgaaaagaacgttttttgcttactctgttgtctcagtgtttgtcctcactgtctcccttctcatcgctctcatcctcttcttcaggtaaccaaacttaa

SEQ ID NO: 184757 - DNA, 41 bp, Arabidopsis thaliana landsberg
atttttcagtcttcaaaatagtgaatgcaagtgcaaagtga

SEQ ID NO: 184758 - DNA, 5124 bp, Arabidopsis thaliana landsberg
gaaatgaagacgtaaaactttcaattttgtctgctgtagcttcatgggcatcacgatcttctgatgccatccaaccaaacttagtatctttcattgctgccggccttaaggagaaagaagctctaaggagggggcatctccgctgtgtacgaatcatatgcagaaatcccgataccatatcacaggtctccttgcaaacatcttttctggcgtctattatattaaccctctcattagctaaataagctactgaatatataccacagatatcagacttgctatcccctttaattcaacttgtaaagacgggatttacaaaggcagtacaacgtctggatgggatatatgcgctactgatcgtttccaaaattgctgcctgtgacatcaaagcaggttcaaaccagcagcttatgtttcacattcctcttattcagtataatctgaaggtccttcattgctttatccttattcgtatttttcttctttttgaaatccagaggatactatggtgaaggagaaattatggactttgatatctcaaaatgagccttcacttgtgcaaattactttggtaatattttctaaagttttcttctggtacttattctgtggtctgctcttgtcatggcagggtacttactttttgttttgcggcatttttcttcgttttctttcttatctttgcatgtctcaactgaaaggcctcaaaactttcaagtgatgattgtgtagtatgtgtagaccttcttgaggtgctccttgtggaacactcctccaggtaaacctcctgcctaatgtgtgagattcggtgtttgactgtttgtagaggttttaactatctctcctgcctggtttcagggttttggaagcattttcattgaaatcactatcacaggtagcctaagcgagttcatgttttctgaaccgtttctccctgttctggacttatgtttcatttattttccatgcagttgcttctctttctgctttgccatccaagctggaatgttcgtaaaacagcttacaattctgttacgaagatcttcctcgtgacttcacagctagccactactcttttagacgagttctcggattttctttccataactggggaccaaatcgtttcttctagaaccaggtacaaatgataagctctttttgtattcatatttcataccaccaagccactaagtatactgctgcctgtttagtgtttagttagctctgatgttatctcctaatatttcttgactttttttaacagtttgattcatttgacattttgaaaggtttggacctaaatgccaacaccgacttattcatttaggaactaacttggcacctctgtagtgacgcagataatcccgcggatcatcaagctcctttcgtcccctctgtagaggtgttagtgaaggctttgattgtcatttcatcggcagcagttgctggacctccaagctcatggattgttcgtgccatattctgctcacatcatcccagcatagttggtactggaaaaagacatgctgtttggaaggtaatcttgacattagtcattcgacatggttaattctacttactcatatctcttttctttgcacttttaaaaagtgatttacaccacctgatatacacagagattgcaaaagtgtctcaaaacttgtggttttgatgttgctacttttttgtctaccaatggggaaagtgtttgcaaggtaatctcatgactgtcaatgacttctatgtgccgaaacttgtggtttcttggcattactaatcaactattgatataaatgattgtttcagagtctacttggaccaatgggtttaacgagtgctaaaactccggagcagcaagcggccgtatattccttgtccaccatgatgtctctggcaccagaggatacattcacagtgttcaagatggtatatgtattttaaggaaattattttactaatcaaagatattgtccggtttaacttgtttcctgatgtcttatgtttaatttttctagcatctacaagaccttccagatcgactgtctcatgatatgctctcagagactgacattaaggtaaatctcctgacttttaccatatgtattctttttagtagattatgatgttagcatttccctcctctctctgtagacacttgttgagttctagatttaactctgacatttcatacagagtgcaatgggttgtaataacttttcagctgcaagttttgagtagtgaatattaatatttttgtatatttcttattcagatctttcatacacctgaggggatgcttttaagtgagcaaggtgtctatgttgctcagacaattggtgccaagtatacaaagcaggagccggtactgacatgggtttattctatttattatgttataaacttgaaacatgattccacttttagcatattgaatctaataacatcttcttcttattgcttgttgtagagttctaatcattctctaaagaaaggattggctagtagagaaactgcaaactcagggagaagggacactgcaaagttgacaaagaaagctggtacatatctaacgaagcactctatagttttaagttttaacgttatgcccccagcatatatatattattcagcgaattattaattgcagacaaaggaaaaacggcaaaggaagaggcacgggaactgatgctcaaagaggaggcctcaacacgggaaaatgttcacaggatacaaaaaagtctttcgttggtgcttcatgcccttggggagatgggtcttgctaatcctgtgttttgtcacagccagttaccttttttggtatgtaaaagctttgttacttttccatatgctatatagtcaatgaatcgatttcagaaataattattttcattcctctgccactggcactgttactcattgttatatacatgaatattattcctttgacatatcaggctcctgtaattctaagattaacctatgacactcaccttatcactttatcaggctacttttttggatccattgctgcgatcacctattgtaagtgctgcagcctttgaaaacttggtgaagcttgcacgttgtacagttcagccactgtgtaactgggctctagaaatttcaactgctctgcgtttgatcgcgattgatgaagttgatacttcatttgattttcgtccatcagttgacaaggctgggaaaacatatgagggtctttttgagaggattgtaaatgggttatcgatatcttgtaaatcaggaccacttcctgtagatacattcacgttcattttcccggtgtgtttcttaccattcctgttgacagtattctaacttatacctccttttactcaacgaactatatttgtcttcccagatactggagcgaattttactgtcatcaaagcggacaaaactccatgatgatgtgctgcagattttatacatgcatctagatccgatgctgccacttccaagactcaggatgatatcagtttggtgacttgaaccctgtctgtttttatactatacatttgttgaattttggtggcaattacattgtgcacatttctttccattttttatttatgtcgagtgatattgttaatatagccagcttccctttctcaaatataacatctaaactaaatttgtttcaggttctatatcatgtgctaggtgttgttcccgcgtatcaagcatcagttggacctgcactgaatgaattgtgtcttggattgcaagcagatgatgtcgcaaatgtatttcttgtaactatgtattgtgagcaaaatttccggttcgagagagttgtatttcatattttgttttgtttacaggcgctctatggagtctattcaaaagatgttcatgtcagactcgcctgcttaaacgctgtgaagtgtattccagctgtttccaaatgctcccttcctcagaatgttaaaatagcaacaaacatttggatagctctacatgaccctgaaaaggttaacctcctgaatttgatgtgatatctagttatgttatctttttgtattgtacataatacaggttttctaattttttgctgcgtcaactataataaattgataaattgatgtacttgactgaggctaacaaagttattgtcctcctatgtttttcgctgttgcacaatctgatgctctgtgatctttatgcttgcagtcagtggctgaatcagcagatgatttatgggcccgctatggtcatgatttggggactgattattcaggaatctttaaagcactttctcatataaatctcaacgtccgtttagctgcagcagaagcactggctgatgctcttcatgaaagcccgtcatcaatccaggtctttgcattttttgaattactactttttgtggcataagtatgggttttaaacattaattggttttgcagttatccctttcaactttattttctctgtacatccgtgatgctacgtctggtgaggatgtctttgatgctggttggataggaaggcaaggaattgccttagcactgcaatctgctgctgacgtattgacaacaaaggaccttcctgctgttatgacctttttgatatcccgcgcactggtatatcttctcatcttgtcagatgaatgcttgtcaaataaaagaaccctccccctctgagccatgttgcaaaggatttgggtttcacaatttatcacctagaaacccacattttatgttgttttcagaaactatagcttgaatcttttgactttcagaaaatatatgaaactgagtgtttttctcatgtgcaggctgatcccaacacagatgttcgtggaaagatgatcaatgctggtatcatgattattgataagcatggcaaagaaaacgtttcattgctgttccccatctttgagaattatttaaataaagaggtttgttctacaagcaactgaaaacctgctggatacattgtttgtttcatgattacaacaaataccttcggagcttcatcaaatctcttatcatgtaggcatctgatgaagaggaatatgacttggttcgtgagggtgttgttatattcactggagcactagcaaagcacttagcaagagtgataactctaccttttgcttaa

SEQ ID NO: 184759 - DNA, 815 bp, Arabidopsis thaliana landsberg
  unsure (1)..(815): unsure at all n locations
cttcccgtcgaccatcggaattactgccacgacattgcacacgtattcaccgcacccgcgttcgtcttcacctccggccgccgcacgnnnnnnnnnnnnnnnnnnnnnnnnnnnnnnnnnnnnnnnaaattaagcccactgttagcttcgcaatatcatcacacactacatcagccagtattgcctccagtcttgcaaccgagagctcgaatttgggatttcccccaaaccagtcgaagaacaccgtgaaacaaacctccccgtggccagcccctttccaggtcagttcatcgctttctctcccttgtttgagcactctggatactcggtgatgcttactgagccttcaattgagactaggagacccccactcgtcgggaacacgatcaaacgatcatggtcttcgcggttctcgtgggcaggcttgtatagggcaccaattgtgtaattaacttgggggaattactcggggtagcttggatttggtgtccgccgctcgggtgcgccggtcatcacctcaatcggccggtgcagtggctcgccggagttcctccgtgcgctgccgtcgtcgaggacgtatcgggtaaagaaatagaaggggaagggtctttctgtgatttgtcagtgacttgcgaaaacagtgaacgaccctgttctggtttagtcaaaacgccgagggcctctgcgcaaaatctccctcgcacggcgggcgcgccccgttttctctgaggcttgggccgtctgggccagaatcggcccagttctgtttatccctttttctttttctttttcaggaaaactttagaaatgtgtag

SEQ ID NO: 184760 - DNA, 74 bp, Arabidopsis thaliana landsberg
atggagtatcaggttaagaccttgatgtatactgttatttccatacatgaggagatgtattatcttcgtgaaag

SEQ ID NO: 184761 - DNA, 555 bp, Arabidopsis thaliana landsberg
gcttgcaaaaagatgggtttctgcgcatctcttttctggttgtctggcagaagaggccattgaacttttggttgcttatctcttcctcacacctctcccactcggtgttccttcctcccggattaatggattcttaaggtacatttccgcgcttccatacttatgaattttatggaaaacaaccaggcaatgctgttgccaacaatcaaaacatcacatctttccgctggaccgtgtaacaggttcttgcgattactagcagactatgaatggatgttctacccgttgattgttgacataaacaatgactttggtagaaatgacgagaaagagatcaatgtgagtcccaactttaataatgggtctagtgttgggttagatttgttagaacggccgtatgtcattgtaaataatttctggtatttttaggataacttcatgtcaagtagaaaaggctacgaagaggacaaacaaaacataagttcagctatgttcttggctgctccttacgacaaggcatcagaggcatggacatcaacttcaccaaatttattg

SEQ ID NO: 184762 - DNA, 1022 bp, Arabidopsis thaliana landsberg
gatcctgcgtgggaacattctaatggggacaataccaaaggagataggaaagttaaagaaactcaagatcttagacctgggaaacaatcatttgacaggaccgattccagcagagatcgggaaattgtcaaggattaagacaatgtaagaaaatctttaagagaatgtcatctatccgataatgtgctgagataaccattttgtgtctctttaacaccacagaaaccttcagtccaatggtttaataggaaagttacctccagagattggaaacttgaagcaccttaaagaacttcttattggcaggaataggcttcgaggaagtattcctattgcagcgaaaacatcaaaaaagtgagtttagcccattgtccaaggtggcataagatggacacttattgtttatgattgcaatgttaatgtatcttctttttgggttggtcaggtatgcttcaaatccaagtgcaaacatcagtggtttgtgcaagtcttctctatttaaagtggcagatttctcttacaactttttcgagggaagagttccgagttgcttggattacctcccaatgtatttcttataagaccctttttctctagctttcctttatttttctcatttgataatatctctctgtgtcattgaaaatcattgtagaacgagctttcaaggaaactgcatgaaaaccatggatgttaagcagagacctctttcagaatgtggtttgtagaatatgagtttcactttcttgatgttgataatcgtttctttatcttgcttttcattttgaaattatttcaattggttagctcgcttagctgcaacagtggccaagaagaagcaccgagcatcgagacaaacttggctttggaattttgagatagtcacgggatcatcgattggtttgctctttctagtcgtaatgttctctgcatgtagcttgtgcaaaataaagcgctctctcatcgttccctggaagaaatctgcaagtgaaaaggacaagttcacggtctacgttggttag

SEQ ID NO: 184763 - DNA, 480 bp, Arabidopsis thaliana landsberg
cggcacggccgccccttcgacgcgcccgacaaggacgagacccccgacagcgagggcacccccaccacccggatcgacctcgacggactcgccgaccggatcgtgcccttccccgtcgaggcggcccgctactccaccctgcgggccgcgaaggacggcgtcctgtggctgcgccaccccctccagggtgtcctcggcgcctcgcgcgccacctccgaggaccccggtcccaagaccgacctggagcgctacgacctggtccagcagcgcgtcgagcatctcgcgggcgacgccgaccactacgccgtcaccggtgacggcaagcgggtcctgctgtggaccgacagccggctcaaggtcgtgcccagcgaccgccgtgcctcctccgacgaggacagcgacagcaacataaccgtcgacctcacccggatccggcagaccgtcgacccggccgccgagtggcggcagatgtacgacgag

SEQ ID NO: 184764 - DNA, 2659 bp, Arabidopsis thaliana landsberg
atgggatgctttgcatcaaggccgaatgatactggtggaaacagaagaaagccaacgagcatcggagatgtttcagtatatgtacctggtttaaggatacctaagcccgtggagttttctcagtcactgggtgatcaattgccaaagactctggtggagcgcttgacagctttaagaacgagaatagttgtgatggcaaatcaagaaggaccaactataacaagaaccaggaggaagacacagcatggtatagaagaatatcgtctgtttcttgtttctctttgccctgctttccccccttgtaacttaacggaatggtttcttgcaggaggttctacgctcgcagatctccatcacgctttagaagattatctaccggttctcttaggattaactaaagatggtaatatactatgtatgtgctataataatcgacatttgcttggtagtagataccctaacatatattgttctatatgttcaggtagccatttacaattcaaagtacagtttaattgggtaaatcaggaagatgaagaagaggtgcggtagtcaaagctgtttatcccttattgtgctgttttgctctttccttcactttaagatttagacttttacattagtggttgtgagtatatgacaagattatttacatctaccaggaaacagccatgtcaaatgtttggtatgaaatattgtcggttttgcatctaatggcaatgttacaaatgtcacaagccaatttactgcttcttcctagaggttccagtgatggctatcatccaaaaatatcagaaggtaagacctgccaaattgctcacacttcttcagtttcgtaagagaagtaccatacatgctagtttttttttttttccttcacaatttcttgaaatttcataagcaccacttctctaaaaactagcatgtatggaactgtcagatgtattgacccctctttagtaatccaacaatagattagaatgttccttttgatgctcttaagaaggcaattgatagctagtttatagaaagatccatgtttctaggattatctagatggatggataaggcaggcaggtagaaagtaggaggaatgtaatgtccatgttttctactgtctcaattagtataactgtaagatgtaatggttatgtccttcagtcttaacgatatgcttgtttcaatcttttctagaaaataggcgagcttcaatcgatatcttcttaaaagcagctggatacctggactgtgctgtgaagcatgttcttcctcatttttcaaccgagcagaggttcatatatgacagttttcttatgtcaaccattgcagtttttaatagctctgatcgactctactgacacgacggttgtttttctttgccttttccacaggagaagtttaccaattgacctagcagaaggagctttacgtgcactttgcttgcaagcattaggccaggtagaatcactttcaatgtttgggatatattaactaattatgatttgctacatgtgttgcctagtttatttgtgaatatcgtcatcatgttcaactacttagaaactcagcctaggttagaagtagtgatggttagagtattttaatagacatttgtagcttctatttaagttataaattttctaatttagggtgttgatatccaacttgggatggcgattgatagtgcaaaagccactcttgccgtgaagcgaagactttcatgtgaaatggtgaaatactggcagcaggtgatccttaccttactaaattttgttatcttgtgtaacttttgtggtcatcactttattataataatgaattgaaacgtagaaagattaggtgtcttaatgggagtagtgtgtattatccactttagaataatgggacaaaaaaccaaaaccaaaatgaaagagcaaaaagaagaaagtggttatttcaccatcacaaaagtgtcactaactcgtgtctgctgatcacttatgttgaggaggataatgggactaatattgcttaattagttgaaccttaaattaagaaatatcatctttaaaagtgtctactaactttatactcttagtactcgtttacgtgccaaaaaataaaaaagagaaaacaacaagaaagtagaaaccttccttgagctagttactattttcctcttttctgaggctcaaggaagaattgacagactctcttttgtatttctggttgttaattttgtaatgtttttcttgcgataaaagctctctaatagtatattgatggacattgattaggcacaagataacttaatgaatcttccattagcaaacgggtggggcgaaaagcatatgctctttgttaagtggaagtatgttgaagctaaggtactgtttggacgtctttctcacatcattggatcttaagaaattcacatagatgagtgagaaactctgttctgtacaaggctctaatttttgtctaacactaagacacttggtttctctgtgtatttgtaatactaggctgcagcttactactaccacggtctgattcttgatgaaggaaacacagagaaatcacatggcatggcggttgctgctttacaggctgcagatgagtgtttgaaagaaagtaagaaagcaagtgaggcgtttaacacctcttcacccacgtcaag

SEQ ID NO: 184765 - DNA, 506 bp, Arabidopsis thaliana landsberg
  unsure (1)..(506): unsure at all n locations
atgggtgtgnatgttctgcagtcagcgatcgcgaattacactgtgccgggtatcaactcattgttgctggtccgcgccgccattgatgtagcaacttcctccgaaacggcgacgcaatacgtggctcatgctcaacgcggaacttcattcctgtatccgctgtccgactcttcgggtgatggccgcatcatagaagctgcagcaactatctacaacgactctttcctgccggattaccgagtatatgtctacaacgatactattcgtggattgatgccggatccggagtatctggagcaacatattgcaccactactggattaccggtatggcatatttgtacgacacatgaacagcacgagcacggattccctcattgtgcctcaatttaatccgagtttgtttcaggcatcgggacaaccgtatccgaatgagtcatcatggggtccgtctggctttgtttggcagacatggcccgaagagcagaatacctttgatgcagtcag

SEQ ID NO: 184766 - DNA, 810 bp, Arabidopsis thaliana landsberg
atggaccggtttccattccagacggaatcttcaaggatcttggaaaggtaaggagagatatcggttgttgattcaacatcaatggctttggtctggacccaagaattatcaaccatcataaacccttgcccatcgaatgaggccattgtggtctgaaatcactggaaacatattcacattacacattagacacaacatcatatagatccattagcttggagagacactcagaatcaatacaattctaataatcagtgatctgtttttgttgtgaatgtgctcagcgatgaatcgaatgaaaaactgataaagcagcaaagattttcaatatgttttccaattcacaaagacattgaaatatcgattttgagtgtgtagcagcaatagaatgaccgattcaagaaatgtgtagacgcattcagagctaattgggttttttgccagaacaacaaatttactctaatcagcgtttgggttctatgaacacaatacaaaggtacgatttttataaagtgtggattagacagaggaaagtccccaaataagttcatcggatggaacatgcttttgttgatttggattgaagatttatatataaacatgagaaaaatctttcaatccaaaaagacagaaaagaggaacacgaaccttgagatttcggtgcgagaaggctgatctagtaaacggagtcggaagagagaaagactgtttctgggtttgttgtcggaagaagaaggaaaagtacgcaagtgaaagtacggtcctgcccattgaaggaatgacacgtgtctttacctacgggtatcgcac

SEQ ID NO: 184767 - DNA, 196 bp, Arabidopsis thaliana landsberg
attcgacaaaattagcagcgtccccttcaagattggctcctcttctccacatacgtgtacctgggatgccaattccaataagactgtcaaacaaacatggatgccactgaattttctggcagaactaattaaaccctacctagacgtcgtgtacagcgcctggacattatcgataccacagcaggagaattcttga

SEQ ID NO: 184768 - DNA, 496 bp, Arabidopsis thaliana landsberg
gagtattggtacgtcaattgaaactttgttaaagacaggagcgttgaaaacacagtctggtttggatttacagcaggtaagagttggtcgcttgtttgggaagcttttaatcttagtagctaaagtccattaagtatgatgtagtttgagagaacaatactaatatatattttctcaattctttaccagagagcaggttacactgttcaggctgagagattgaactttctccgtttcctttcatttttccgggcggttcatcgaggtgcttcttttgctggacttcgtacaacaactgtgaggaagctgcttcctgagtaggttctttcactttttacctgtcaaacactacatgtgctgatgctgtcccaaaattgtagtcttcacatttttcctgttttattgttatcttgtagatcttggggttttctttgccctgttcacactcctgatggaacaccttgtggattactgaatcatatgactcgtactagcc

SEQ ID NO: 184769 - DNA, 273 bp, Arabidopsis thaliana landsberg
atggcgtacccggaaatcccggcggacctccgattccaggaaaccccggtggacccatgcttctcgggttacccgacccgggattacctggaaaaaccggtggatttgggtttctcggaatcaccggagcacctggatttctcggtggatttattggaaattccggcgagcctggatttctcggtatactcggagctcctgggtttcctggaaactccggcgagcctggatttctcgggaaactcggaggacccggattcccagaaaaatccg

SEQ ID NO: 184770 - DNA, 113 bp, Arabidopsis thaliana landsberg
ttttctcatatctcacgtccgatcaaagtcactgcgagaagcgtaatgaagacgtcggcggagacaatttccagcggtgttcccaacaatacgatgaagctattgttcgttga

SEQ ID NO: 184771 - DNA, 493 bp, Arabidopsis thaliana landsberg
gttttctccgtgaatttctctcctaatggttatcacttggcatctggtggggaggataatcaatgccgtatttgggatctaagaatgagaaagtcattgtacattataccagctcatgctaaccttgtgtctcaagtgaagtatgagccacaagaaggctactttctggccactgcctcatacgacatgaaagtcaatgtaactacttctataatcccttgccttagtatttttttttttttcagtcttctgtttcattggcttatagtttgattccaatttcttatattttgtctaccagatatggtcaggaagagatttctcgctcgttaaaagcttagcagggcatgagtcaaaagtcgcctctctagatatcacagcagatagctcgtgtatcgctactgtatcacatgatcgcaccatcaagctatggacaagcagtggaaatgatgatgaagacgaagagaaagaaacaatggacatagatctctag

SEQ ID NO: 184772 - DNA, 210 bp, Arabidopsis thaliana landsberg
atgaatctaaagtcaacattttcaggaaaacatctccaagacagaccgttgcaattgccgaacaaggcaataaatattggtcatggtggaagaggaagaggaagacgaggtcgaggaaatcgtggtcgacgaggtgggtttggttaaacccatatagtcgaatttggtttcaaaacgttttctttttcctccctagttgtcatgctttga

SEQ ID NO: 184773 - DNA, 258 bp, Arabidopsis thaliana landsberg
atggacatggagatcatccacaccggcaacgagatccgatggttcaaggccgcgcaggacaccaaaagcccgtaccacgagtggtacacctgggagaacaagtacaccgacctggccagcgacagcgttaccggcagcacggcatggcacgcgacggacaaatcgtccgcggcgcaaacgcattacctaggcatcttcgcgccgaccatgcccgacctgaactacgacaacccggccgtgcgcgccgagatggtcaag

SEQ ID NO: 184774 - DNA, 756 bp, Arabidopsis thaliana landsberg
aaacggaatatatggagcaatgttcgacttattatgattcctttctacctctgcatagttcttgtgtttattcaagctttgtttgattcacaagtcaataactctttagataatcaatgtggttgtcaatgcattgacaaactcggagatggtaaatgccaaatgacctgtggtttagaatattcgactcgggatcaaggattcttttgtgctatcccaaaaccacaaccatggcctccattgattctaattccacgtcctgagtatcgtgctcttgatgctaatttcactaatgactcgtgcagacgaaaaaactcttgccctgtaactatacttttcactgggaataatcattctcttggagcaggtatttttctctttatcatgaagcatataattctacattgttttctcattggaactaatgtttatgttttctctagttttatcaagaaatcttctaaggaggccttttgcaatgaactcctctgaccttttgtttagtttagcgaataatgttttggtaagtttcatgttctagttcaatgtctgcattatgaaagtgtgtgaaatctctctgtcttatacttttttaacttgtattttttcaggctacaacatttaagggaagtgcaacaaattatcttgatgcagggattgtctcagatggtagcatatacaatattcaacctcggtgtcctccaaattctaacttttcaatctcaatcggacaatcacctctcaattttacgaaag

SEQ ID NO: 184775 - DNA, 152 bp, Arabidopsis thaliana landsberg
atggaggctgaagaagagggagaggaaccacctttcgatcgggatgatttctcgcctgaagaaccaaccttgagacgcttttgcttccccatggggaggggaaggcccggagagacggaggcgaggagccggcgccgttggagacgccggag

SEQ ID NO: 184776 - DNA, 412 bp, Arabidopsis thaliana landsberg
atggacgattatacaagagagatgatggatctcaagactttggtcactcgaaccctagagaagaaaggtgtcctcgctaagatccgggtaaattccctctacttctctaccatacattattcgcagagatttttgttaggaaatgagaacagagaagtgattggtttgaaatacatacattactctttttctagggttcctgctattcagatcgaaatgctcgatattgttaattgcctatgcatctggaatcttgctgatagtttatttgtgtttgtaggctgagctccgtgcaagtgtgtttgaagcaattgaagaagaggatagagtgatagagaacaatgaaggaccgcctccagctctgttgggaagctgtaatgatcgtgcaaggaagcttcatgcttctccttga

SEQ ID NO: 184777 - DNA, 165 bp, Arabidopsis thaliana landsberg
tgtataacaatgatgaaactttccggggaaactaacgaagaggagcttaaattttccggggaaataaaggacacgagaagaaagaaaagcaccagaaagttttggttacaagttgagttttggaagttaaagaagaaaccaagtgaacaagggaacggatccaaa

SEQ ID NO: 184778 - DNA, 683 bp, Arabidopsis thaliana landsberg
aaaaaaaccaaaccggtccgacgacgaatatcttcttccagaaaccaaaccggctggtctttcttattcgttaaccgaattagactcagcaaccgacggatttaaccaacgacgaatcatcggttctggtcggttaggaacggtttacgctgcgattattccagatcataaaaatctcgtcgcggttaaaagaatacatcccggtttggttttgagtaaaccgggtttcggtttttccacggttattaaatcgctttcttcttctcatcatccaaacgtcgtttcgattttaggattctcagaagctcccggagaaagaatcgtcgtaacagaattcgtcggagaaggtaagagcttgagtgatcacttacacggagattccaattcagcgactgcggttgaatttggatggaaaacgcgttttaaaatcgcggcgggagcagcgagaggattggagtatttacacgaaatcgcagaccctagaatcgttcacggtagattcacatcatcgaatgttttggtagacgagaaatcaacggctaagatttgcgattacggatttgggtttttgattccgattgaaaaatctgggatttttgggtatatagaagaaggttattgcacagagagtgatgtgtatggatacggcgtcgttttaatggagattttgagtggaagaagaa

SEQ ID NO: 184779 - DNA, 167 bp, Arabidopsis thaliana landsberg
atgcgggtgtccgagaaactggacttcggcatgatcggcctcaatcgcggtctcgtttccgatccggcggcgccgttcggcggcaccaagcagtccggcgtcggccgcgaaggcggccatgagggtctgctggagttcatggaaacgcagtacatctcgctgaactg

SEQ ID NO: 184780 - DNA, 573 bp, Arabidopsis thaliana landsberg
gcctttccattgggatctactttgatgccagagctttcaagacagatcttgaatataacggagggagagaccatgaaagctatagagaataaggggctcctcggagaaaaacattgtcttgactcaaccacatcggattctccaatccggctcgatcaccacagctttgaagctctatttacgatcgactttgttgatactatgcttctactcttagccatgttggtttgtagaagataccgccaagaaagcaaaagcggcgagatcaatgctaataattcgccaacagatggtaacatgagagctccacctaatcagccaacagatgataacatgagagctccgactagtccgccaattgatgatcaagtccttgagccacctggtccagcattaaatgaagccgatgatcaagatcagcttctgaatgatgaagttaatgttggagatcgaaatgaagtagatattattgtggaagtcgacccaactttggttcaccgtagaaatctgatcacttcaaaaacaatacccacccgaagagctgcactattctcgaggattaagtctgcatag

SEQ ID NO: 184781 - DNA, 152 bp, Arabidopsis thaliana landsberg
atgactaatacaggagaagaaactacacaccacaatccttcggagacaactcttctagccattgagatgatgactcttgtaaccattgatttcgggactttcgagcttggatcggatctcatactcagcttgtattctgctgcaaacttaag

SEQ ID NO: 184782 - DNA, 205 bp, Arabidopsis thaliana landsberg
acaagacctttttcttttccttattgactacgagtttgagtgcaccgttacgcacgatgcaaatgggcaatgcatgattgattatttattagtaagtacattttaacaaaaacttaaattcattttctagcatatttaccgaaaactttatcaaaaaacatacattcgaaacgtgggggtcatgaatgttcttgcagtaaagtaa

SEQ ID NO: 184783 - DNA, 331 bp, Arabidopsis thaliana landsberg
acctgcaattgcttgggcaacatgggatcttatcgctatggtggacgatggcaaacatgatgggactccaacacactctgtaacctttgtgtggaatggacatgaggtgactgttgcttcacatgcttttattactttgctgcaattctttatggaactcgtgatctgtagggttgagcaactagcctctgtgttttaagttacaccttggtttacagggggaggaggtattgttggttggggatttcacaggaaattggaaagaaccgataaaagcaacgcacaaaggcggtccacgttttgaaaatgaaattagacttacacagggaaa

SEQ ID NO: 184784 - DNA, 87 bp, Arabidopsis thaliana landsberg
atcagatccaccagacgagaaactcaattccgcactgctgctgagtcgtcggacttatccaccaagggattcgtggaatttctgtga

SEQ ID NO: 184785 - DNA, 750 bp, Arabidopsis thaliana landsberg
atggcagtatcttccgaaatactcccggagtcgtggcaagtgttcatcaatttccgaggagcagatttgcgcaacggtttcatcagccatctggcgggagctttgacctcagctggaatcacatactacatcgacacggaagaagtcccgagcgaagatctcactgtccttttcaagaggatagaggaatcggaaatcgcactgtccatcttctcgagcaattatgctgagtcaaaatggtgtttggacgagctcgtgaagatcatggaacaagtaaagaaaggaaagctcagaatcatgcccgtcttcttcaacgtgaagccagaggaggtgagagagcagaacggagagttcggacttaagctttacggagaaggtaaaagcaaacgacccaacatacctaattgggagaacgctttgcggtctgtcccaagcaagataggcttgaatttggcgaattttacgtagataaattgtgcttattttgacccgtttcttatcgtagtgaatgtcattgatttctttttttactcattttggtgtctgcagaaacgagaaggagctccttgacaagagcattgactccatcaaaaaagtacttgcccgaattacacgagcatgcatagtaacagaatctctaaacgggatctcaaaagactcagaggcaaagaatgtagacgcattttcgtcgaactccagtgattttacatctactttcattgacgacgacctcagtatcaactcgcctca

SEQ ID NO: 184786 - DNA, 32 bp, Arabidopsis thaliana landsberg
atggctgccaagagcagtttggacgagggaag

SEQ ID NO: 184787 - DNA, 150 bp, Arabidopsis thaliana landsberg
atgtggtatatttggaaggcgcgacagcaaacgatttgtgataatacgagtgttccacctcatgaaactttggatttagcaattcaagaggaaggagagtggagacgagcaaatcaacgagaagatcctaaatccgagacaaacccacca

SEQ ID NO: 184788 - DNA, 99 bp, Arabidopsis thaliana landsberg
atgcacgcaaatgacttcgtgggaattagcatatttctcaatagttgtccggaactggaatcactcacgtttgatttggttactagtagtcgtttcgtg

SEQ ID NO: 184789 - DNA, 326 bp, Arabidopsis thaliana landsberg
atgccgaacgaagctgcttctgggtccagccaggatagtttagtctacctgaagtacaccttcaggtacagaaatcaattcgatgagctgaacgatgactggctagattgcattgaagcgactagcgacaaattgcttggtgcctccatgagggccgaggatgatgccatgacagtggccttcggagggcgaggcaagaagagattgaacaaggtttttgatgttattggttttgtgtacccagactattgctatccccgcgaaagcagagaaagaaaagaaaggctgctgcttcggctatctctaccacgtcgaaggcaaaaaag

SEQ ID NO: 184790 - DNA, 878 bp, Arabidopsis thaliana landsberg
atggatgcagagtatgaagctgcagaagcatatagacagattgacaagctgaagaagaaacatgaaaacgaaatcaacacacttaaccaactcgtcccacaatctcatattcacaatgaatgctctaccaaatgtgatcaagccgtggaaccatcagtaaatgcaagtagtgagcagcaatggagagatgagtttgagccgctttacaaaaaagaaactgagttttcaaatcttgctgagccttcttggttttcgggttatgataggtgcaacatataattctaatatctattttgtgtgtttaatgtgtataaaatgggtgtctgattctgtgatataagtccaatttcactcataacttgcaactcattatgtacaaatgacgcaaacctcctggattcgtagaagattaatccaaccttcatgcagatctcttagcttagactgcaatcctaattcccaaacaattctacttttcattttcatatctcgcactctctttattctagtaacaatattcatatttttggttattacactaactagcaaattacactaacggaactacgtctatcaacgtcttcaaagccaactccacgatcgtgacctgtccggacaaatatgttctaagattgtcgaagcccaactgcaaagaagtcaaagtttttacttgccacaacaacgtcaacaacctttattcatgatagtctctgtcagattgacacacaagttatacagtgttgtgccttgtatttcttctccgtcggcaacagatttcgaccaagagagccaacaagaagatgaagaagaatcggagacttgtgcaatctgtttggagaatatgtcgagatcggagaattattgccagatgccttatt

SEQ ID NO: 184791 - DNA, 432 bp, Arabidopsis thaliana landsberg
atgaagatgtacccaaaatctgactcagacgtcacaagcctcgacctatcatcaccaaaacgtcctacttactacgttcaaagcccatcacgtgactccgacaagtcttcctcggtggcactgactactcatcaaaccactcccacagagtcgccgtcacacccatcaattgctagccgggtatccaatggcggtggtggcggtttccggtggaagggacggaggaaatatcacggcgggagatggtggccggctgataaggaggaaggtggtgatggacggtacgaggatctttatgaggacaacagaggagtctccattgttacttgtagacttattttgggagttgttgcgacattgagtatcttttttcttctttgctctgttctctttggtgcttctcaatcttctcctccaatcgtctacatcaag

SEQ ID NO: 184792 - DNA, 11 bp, Arabidopsis thaliana landsberg
atgcacgagag

SEQ ID NO: 184793 - DNA, 92 bp, Arabidopsis thaliana landsberg
ttcaacgaaaatcgattatcaccggagaagaaaaaaatcaccggagaaagcaacaagaagaagaagaagaagaagaagaagaagatcgttga

SEQ ID NO: 184794 - DNA, 88 bp, Arabidopsis thaliana landsberg
ttctactgtaatgcaattctgcgaaaagacaaaaataacaccagataaaaagatgcctcccaaaacgacaaacaataatggggaataa

SEQ ID NO: 184795 - DNA, 621 bp, Arabidopsis thaliana landsberg
ccactgagactcgaaatcaaggtaatgcagtctcctttgatgctcgatttcatccttaatcattcttattcgggactgtattgacacgcttctttgttttgatcagcgtaagtttgctcaaagatcagaaagagtcaaatctgtagatctccatccaacagagccatggtaatttgagcgcattcattcttcattgctttatatatcgttaaggaaacaagtactaatccatagattgtttcaggatcctggcaagtttgtattccggaactctgtgcatctggaattaccagacccaggttagtatcatctcttgcttttatcttactttctatctgttggtcttcactcttatattttgtgctcccttctgattattgttaacccaaatatgacttttgcagacaatggtaaaatctttcgacgtgactgaattgcctggtatgatatatagcatctcattgttccttcttattctttcgcacatcatttgttgaatctctgtcctggtgttgtgcagttcggtcagcaaagttcattgcacggaagcagtgggttgtagctggagctgatgacatgtttattcgtgtctacaactacaacactatggataagatcaaa

SEQ ID NO: 184796 - DNA, 142 bp, Arabidopsis thaliana landsberg
atgactcaacggttacgtgtagatccgtgtttcactgttttggaacttctaactttaggcagcgctttgacaacgtttaccacacggttcctccaaagtcgaaataaaactagattggatcatttagcagaaagccacacac

SEQ ID NO: 184797 - DNA, 231 bp, Arabidopsis thaliana landsberg
atgcttggaaatcccctcacatttatgcgcttgcttcactatgaaggtgatgtttttactttatcacattaatcttaatgtcaatgctctactcatcccaattaattttcttccttcttatgttaccttttagggatgtctgatccctcaaaaggaatatatggctgcgggccacattctgattttggtatgatgactctcttaggaacggatagtgtaatggggctccag

SEQ ID NO: 184798 - DNA, 952 bp, Arabidopsis thaliana landsberg
atggtcttgaagcggccaacgtaagtgtctgagatatacgctccgacgagaggagtgagattggtgaaacctgaccaaatgttgatgacatttgcagcgtcgacttgttctaagtgaaacactttggttagataaaccatgaagtttgccaacaatcctatcgatcccagtctctccagcgtctcatttcctattcaacccattttattacaaaatattatcagcaaataaatcgacaaataatccctctattgaagaatatcaattatactccattttatctagtaattatcatcactaacaaaattaatcatattccattaaatagagagaaataaaatattataaaaatttaaaagtataaaataatttaaaatgaaagttaacattttggctaaaagagcacttatgatgacaaatttttattccatttcagttataaagtcgtcagctggacgagtgtgaaacatgttggaccgacggttacgagagtgaaatataatataatttttgatcgagctgaaaagattatgcgctcatttcttttgttctgtctattacagaacgtgatcttgcaacggcccgttgcatctcccaatgataatatattaactggtttctagaactatattatccaattaaggaaattaacaaaaaaatattagccaataactgaggaaaggtcaaggattaggtaaactaaattatgtacacgaagcctaaaaataaaattaaaatacctaaaatgaacgagacggctctccatcctccaggctttttctctaccttctcagcatccaatatagatcccggcgaacttatccgcttgtagggatcaacaacatccaactccgacggtgacgatttagagaaactaccggatcgtcccggcaaagaagaaccgtcctttctatcctccaaaaccatctctaagatattactacactcgtga

SEQ ID NO: 184799 - DNA, 30 bp, Arabidopsis thaliana landsberg
gattttgatcgaaaggttgatgtcgactag

SEQ ID NO: 184800 - DNA, 138 bp, Arabidopsis thaliana landsberg
atggtgaagtctgatgctcctgctgtccaacaaatcccgttaacaaaaaggaagtacttagccaacttccttggacgtgcccaggggaaagcaggacgccttcaactggtggagcttgcaaagcagtatcctgacaag

SEQ ID NO: 184801 - DNA, 478 bp, Arabidopsis thaliana landsberg
atgacatacaatctgcaaagcgtcgtccggttcaagtaccgcagcgtattcagcagcgtcgagacgcaaggtcaagtcctcctagagctctccaccaaagaagtgatacaggttgccagcgtcgactacgaggctggggagtcacacggaaacccggtcatcgactatctcgtacgcctcggcactcctatcgcgcagcccgtcaatttctgagaatcccattcctctcagcggccagactcctctcctccttcgtgcgcccgcctccaatgagacctatgcgcgcgtctccggtgactacaatccaatccacgtctcacgcgtcttcgcgagctatgctgccctgcctggaaccatcacgcacggcatgtactccagtgcagcggttcgaagcttggtagagacctgggctgctgagaacaacatcgtccgtgtccgtagcttccacgcatctctcgtcggcatgatacatacctaa

SEQ ID NO: 184802 - DNA, 1283 bp, Arabidopsis thaliana landsberg
atgactaaagaatgggggggacgtttaggtgtgaatggacttggtggacttggtcatatcgctgttaagattggtaaagcctttggtttaagagttactgtgattagtaggtcatcagagaaagagagagaagcaattgatcggcttggtgctgattcgtttcttgttacaacggattctcaaaagatgaaggaagcggttggaactatggatttcattatcgatacggtatcagcagaacatgctctattaccgttgtttagtttgcttaaagtgaatggaaagcttgtggctttaggcttaccggagaagccactcgacctgccaattttccctctagttctcggtaaagaaaacgatgataacccgttgttataagctgtgaatctatgtttgacgtgttgtggaagtaactgttagggtttttggtgttttgttttaggaaggaaaatggtgggaggaagtcagattggagggatgaaggagacacaagagatgcttgagttctgtgccaagcataaaatcgtttcggatattgagctcataaagatgagtgatatcaactctgcgatggaccgtttggctaaatctgatgtcaggtaccggttcgtgatcgatgtggccaactctttactccctgagtcgtcagctgagattttaacggagcaggtggaccatggagtctcgatcacgtctagattctgagattttcttgagcatggttacaaaatcatgaatccgttttcttgttggacttgttacttgtcttttctttctatatgttctgttccctgtttttttctgttaattgtttagaagcaatgaaactatgacttttctagggttttgcaaaaacatgaatctactagcttgttttacaagttacttgaatagaaactttctctgttcttactatgctctgtttcttggcaacactgtttttgttctttgtccaggtataaattataaatgcggttttagtcacacggaaaaatccaaagggagatgccattatatcatttaaaaaccatatattataacaaaatcattactggagtttgcatacatcaaagtttcacagaggaaggcgccggagaagaaccaccggaatttggagattgacagaaaccacgaagaacgttggtttcatcagaggtaaagcctagagacgtgagcatcgcaggccaacaatcggtggtgatgatgtctacggtttgacagcaactaacaccaagttttgtttcaccgttgaggaagaagagaacgatctcgttggtgcatga

SEQ ID NO: 184803 - DNA, 116 bp, Arabidopsis thaliana landsberg
ggcatgcctgtatagaatgtgaacatcttcagcttggtacgcttagcgatgaaatatgtttagctgctcagtctctggccaattatggtgcagacgctagcaacattcggacccag

SEQ ID NO: 184804 - DNA, 750 bp, Arabidopsis thaliana landsberg
gacccacctctaatgttatctgtcaataaatcatcctcatcggggatcaaattagatgattgtggtgtttggcaggtcaaactttctatagctcattagaaattttcctagcatcgatttacatttccgcagtcaacacttattttcttgctctataggcatcttgcaaggagatgttttccttggatgttcttttatccaatgccattggccagcctgtgcacaaggatgtggaggttcatttctcttacaatttctcatcacttttggcactaagttgcctgcttttttagtttggaaaatcattgattacatggttgggtttaaaatgcaaggttgttgcatcactactgtatgccgatacacttccggaggccaagatgggtgaagctgaggctcctcttttgataagagatgaaggagttcaattctcatctgatgatagaccgatcaaactattaaatggacgctcatcctttaagctaaagatctctcaggtaaaaataacattgttactatattatttatctttgtattgcttctctccgaccactttttgtggaaaagtctgaccatttaggttacaattttttcgctttttctgaaatctgtaaagaattgttgttaaatatttgtttccagctttcctccaatagtgatgacagattgttctggattaaatttggaatacgaaatgctaaagattatcctttccttcaagctgtttccaatccaatccgttgcatttag

SEQ ID NO: 184805 - DNA, 1084 bp, Arabidopsis thaliana landsberg
agattggacgagataaagagagaaggagaaagaaagaagagattcgatgttgaatctggtgatgagttctggcaaagacagaagagaaattcaatgagaaatagctttttatggctaaattttggtgacgaagaaggtaaaaagaaacacaaaaagaagaagaaaacaaaatggtaatatagactaaaaactcacagaagatctgtaacaaatggaaactattttggtcaaatgttattttgttaattattcataagtcaaggtcatttagtccatattctttttgtttgaatgaaagataataaatgatacaaaaatgcatgaactaattgtgtcaataaacttaagttttcatgtgattttcaacattataaataaatcattttgattcatttcttgtttgtagaagaaagaataaagataagagcctctttcatagtatcaatggcttccttcaaccactttgtgttactgattctgttaacagtcactcttgttttatccgctgaagcaactaaggaacgccgaccaataccatcaaaggcacaaaagaatgaaatgaagagacaactcaaagctatcaacaagcctgcaatcaagagttttaaggttggcttagccttccttaatcttacatgcttattgtttcatatctaacttctttttcttatgaacagactgaacatggtgatatatttgattgtatcgatattcacaaacaactagcattggatcatcatctactaaaaaaccactctgttcaggttttgttttatacataactaattctctctttatctactgtcttttgtattaaatgatgactctccttagagaatgacgaccaactttgtatatgtagctaaagccaacaacagtacctgaatggatcactgaaaacaacatttcagggagtattaatcttgtacaagaaggtataagctgtccaaatggaacagtaattgtaaaaaggactacaatgcaagatctgatgcatgcacaacgtttgaaatccatgggctacgacggcccgagaccttttctcacagagacaaacaacactaattcaaatggaaaattctat

SEQ ID NO: 184806 - DNA, 2046 bp, Arabidopsis thaliana landsberg
  unsure (1)..(2046): unsure at all n locations
atggctaccaatgcatgtaagttaggaaatttaacctagattcacatcacctaggcacacaaaattttcgttctgtatcttctattctcccttgggaaattaaacattcactattgaatttggcaggaagctgtccttatatctcaccccaatggtgtccctgcgaagacaattggactaagaagttctgccactggaaggtcttgttctttctgctgagatgacacaattgtagaattaatttttctttatttaattggtctcacacagttgaatttatgcaagcaggattgctcaagtaatactggagcaaaactatgatgaacagcagatagttttgtcgaagatcatcagagtttacgctccgttctggttttcgattgcgaggtgtccctcacttacactcagacttttagatctgtcagggaagaagcaaacaagaaaagttggtcttccctttcgaagtaaaaagaatgatgaagtagtcctagatgaggtaaccgaagaagaaatatatgaaggtcatacaattgcttctactttgaatttcaaacttctgggcctgtcagtgtctatatctcagtttggcaatcagcaacatggtcctgtcaaagatctttctgctctgggtgacatggtcagtaatattttattgcatttgatcgatagactagtattctcaaatattgagcttaattaacctttgagtttgtgttaataggatggatctttggatgtggatgcgtatgatcccgatggaaattgcatgcggctatttttatctacaaaaccttgtgcttaccagtcggttcctacaaaggtaacaagcattttgtcttctactttttctttgttattacgtactgactcgaatttattttcagatcatatctgttcgaccattcatgactttcaccaacaggatcggtgaagacatatatattaaactgaacagtgcagatgaaccaaaagtactccatgcttatgattcaagggtctcctttgttttccagccaagtgggagagatgaactccaggtgagctgtctaatttgcagagtctacaccactttctatttcttcataaatttgctttagtcactttgttgaaaaagggagagacacaaaaacaaaagaatggttaaaaatgttgttgaaggtgtccactggaagcatgtagnnnnnnnnnnnnnnnnnntaaaaccagtgagacttctaggagcagtaaattagagtttcactgcaaggcgattatgttctgtattgttaaatggtttacatatgcatacttcccttacctaccacatatgtttacattgtgagaggtaagagcatctctttttatattaatgatgtatcatcttcttattacattgcctaatttcaggtccggttaagagaaacagagtggtcatttcccgttcaagttacccgagaggacacaattgttcttgtattaaagagtaaaaatggtgcacggagatatgtgaaagcagagatacggggatttgaagagggatcacgttttatagttgtatttcgactaggaccaagcaacggtcctatgaggtatcttctctacaagcgacagacatccatgcttgtgaaacaatcactaatttcctcttctttttttgtgaaaacttttcaaaccagggttgaaaatagatcaactgtcaaaagcatcagtgttcggcaatctggttttggtgaagattcgtgggttttgttggaacctcttacaacagaaaattttgcatgggaagatccttatggtcaaaagttcttggatgctaaggttgaaagtgatcaccgctctggggtattcaaagtagacatggaaaaaggtgctgtggattctgaattgtgtagggagttagaagtgaactttgatgttcaagaaattggtgacatcaagattgctagattcaccgatgatgacagtacttcacagagttctaacgaaatcatatctttgacatcgattggaaatcatggatattctactcctcagacacctacagaacacaagaccaccactctggag

SEQ ID NO: 184807 - DNA, 884 bp, Arabidopsis thaliana landsberg
atgaggccattgtggcacacatttgagtcatctctacaagtttatcttcgatcgtcaattgatggtgctgaagattcatatgatggaagatatgattcagatggtgaagaaaagagtcttgacacttttgtcatccaggtaactttataattttaagtgatcagttttccttcaaggtctcaatattggaagttagtcttttggttttttggttagaactggggcatttggctcatagattgtggtattttgatgagtttgaggccaagtgagacttgtttctgtgcagctatttgagtttctgtcaactatcgttagcagtagaagactgtcaaaggtttggctaaaatcgcttcagtttttttccccttcattttggtcgtatgttactttggaattggtttcttacggaaatacttttatatcagaccattgccggtaatgtcagagagttggtatatcaaaccgtcgctttcctgcagattacagaacaacaggtaaagatgaatcatgcatcttctgctactcagacatgatagtatatattggtcatatttgttcttttaaatctcggatgataacatgaatctatcaagggaagtcttacgaagctagacagcctatttatatatatgacgaagtaatttgtttgttgtgcaatagaacttatctcttgctatcttaacgaataaaagatgaccagaaggcttatccactttatctggtttaattattatatggtttatatgtctaacattggagacaagacatccctttattctttatctcatatgtagtttctcttcaggttcatacttggtccatggatgtaaatcagtttgtagccgatgaagatgaaggtagctacagttgtcgtatatcag

SEQ ID NO: 184808 - DNA, 62 bp, Arabidopsis thaliana landsberg
atgatgacaacatacgaagaattaataaatctaaatggtcaaacaaacaccgattccgttag

SEQ ID NO: 184809 - DNA, 267 bp, Arabidopsis thaliana landsberg
gattttgatttcgaagagcttgaagaagttttgcaatactatcctcaaggctatcatggagttgataaggaaggaagacctgtctacattgaaagacttggaaaagctcatccctctaagcttatgcgtatcaccaccatagatagatatttaaagtaccatgtgcaagagtttgagagagctctccaggagaaattccctgcatgctcaattgctgcaaagcgtcgaatctgttccacaactacaatactggatgtgcaaggattg

SEQ ID NO: 184810 - DNA, 343 bp, Arabidopsis thaliana landsberg
atgcttgtcaaccaccagatgtatgcaatgttagagaggatcatgccaagagcaagaaagctcgagttattcgcccgtatgcacaatgctcatgccgggtaaagtttttgaacttttaactgtcatatgatattgttgtcatgaatcttatgagtctactgttggttatagatggctatcacttgggaaccagcttaacggtgtccgattaataaacgaaggtcttcgagctcggtttaaagcatcataccctgaaatagatgtccagccaccatcaccaccaagagcctctgcaatggaaacagacaacgaaccaatggctattgactcaatcacagcttag

SEQ ID NO: 184811 - DNA, 206 bp, Arabidopsis thaliana landsberg
agcattgtagtaacatagagaatggagaagttaaagcgggttctggttcaatggtggataacatggaatctgaagaagttgataacatggaatctgaagaagttgataacaagatggacaatatttatgacgggaagttgtgtgtttctcactcattagatagtttgaaagctggggcttttgtatttggatctttgtcagacaat

SEQ ID NO: 184812 - DNA, 177 bp, Arabidopsis thaliana landsberg
atgtgccggatgaatttcttgcaggagggcggaaaccttggggggatcaacgcgggcgccgcggcgagcgccatgatgaccgcgctccaggcgggcgagcccggcgcgacgtggatgcagctcgggtgggaatacaacccgggctccgacgaactggacgggctgagcgccacgcag

SEQ ID NO: 184813 - DNA, 515 bp, Arabidopsis thaliana landsberg
gaatcagtaaacttcagtgttttgaagatgagccggtctctgagtttgacatggagaaatgtaaactctggcacaaggattacagaaaggagatgtgtcaagcgatgaactctgatgatgatgattcctgtaatgaagttatccagaaatacaagcaggtaagctcttcaatttagttaattctaagagaaaagctttaaccaatagccttcatggatcactggttttttgttgattgtaatgctttataaacaaatcattggttgaacggtttcttctctctgtaacaggagttctacagtgctgcagggtttaaagaaagcaagataagtctagaagaactctacccaaaggcccttgcactttacaacgtcacttacgactatgccatcaagtggaataacgttaaaagttgcgggtttgtctggaaggttgcaggtccggtcctgtgcagattctacgagaagaatttagtaatgtgttcgatttccaagctgaaagagattttcggctga

SEQ ID NO: 184814 - DNA, 45 bp, Arabidopsis thaliana landsberg
tcgtgctttgacatcgacgcttttggtcgtgctttctatcggtga

SEQ ID NO: 184815 - DNA, 160 bp, Arabidopsis thaliana landsberg
tgtctatctttatgatcttcatcaggctttcattagtagacataacaatcgacatatttcttttggagtggggctaaagggttcagaggcactcgatcaagataaacatgaagaactacgaatggttgaaaattacatcaaaataagtaccgtatcctaa

SEQ ID NO: 184816 - DNA, 871 bp, Arabidopsis thaliana landsberg
atggtggcaggtaatcaaagatataatgtttttgtgttgctttgtttccggtgtagattttgttttgcattactgtgtctccggtttgattcttgttcttgttcttatctggatgtttctagtttttttattagatgttggcaagtcaccaaaaccgtctttatgtggaaacatttttgtcttattttgtgagattaacgtagcctagtatgcttcctattgtagggaaaataagtgtaatttgggtctcaatagacgttcttaatcgccagcaacctggtaattagtttatctactctagaatgctgacagtaccacttgatgtcaatgttttgtgttaaaagtgataatttgatatgatctcatatttaattgagtctccttttgacgttgaacatggtattgaggagagacattggatttccattcgaagtggcttctttagtatcagatcaatacataacttttgcaaatgaggtgaagggatgtcatgtcttgacaaacacctcaccatggcctggtattagcaatcctcttttgaattgtttatgaaccatccgtctaggttttgcgttgtgcaagctgatcattttgctttacattctaagtccttcatttgcattccacttataggtttcgctggttatgaagttgtggaattcacatgagctaattgattctctgtttctcgcttttactttatgttttcgtggctttgtcttcttgttgaaatgagctcttaaattgctaaactgtaacttacagcaagtgtaatgtaatgaaagcttgtctcaatagacgttcctaatagccagcctcctggtcaatatgaagaagagatcattgcttctgcaataaaaattgatggagg

SEQ ID NO: 184817 - DNA, 168 bp, Arabidopsis thaliana landsberg
cgagagcgtaatggacgtaagcatgataatcctcccaacccagtaaatcgtctaatcaagtggatagacactcacatacgaaaccaactttcggcaataagatttgaggaagatagaagatatgacaaaagactccaactttggtttagcacaagagggacatactaa

SEQ ID NO: 184818 - DNA, 700 bp, Arabidopsis thaliana landsberg
ggtccaccgtttcggatctgctacctccgcaactttaccgggttccgacatgcgcttcagttgacggttacaacatcatctctcttctgggcagcaccagcaagtgcttttaagtcttcgtatcttggttttgtttttctaaacgtaagtttctcctttcattctctctctcttttcctctcttcgttcgatcttcctctcactctccgatctggttgttaatgaaggtacgattcacatgagacatcttaaggtcgctcctgtttctcatacggtttatgcagattcaatattgggcattagattggcggtgtttgttatcctagttttggtgaatcatctcaactggataattgattaggtatgtgttatgtttattaattaaatcggttatcaaggtttgatttttttcacttttgttatgtgttgtgtgactaattgaattgagctgatgtggttttatagttcgatagatccatttgttctacttgtgccgacaaagctatgatttcaaagcaaatcatgtttgtgtttttggatctgaatatgaactttcttttctatatgaaattgccactagattcttttccacaaagtttgagtctttacgtttctttattggtgtagccttcaaatttgttactaatctattctggttgttaatgtatttcagatttttgttgtgtacgtgtatttgtga

SEQ ID NO: 184819 - DNA, 192 bp, Arabidopsis thaliana landsberg
ccaacgggtttcttgaggtggaccgcggacagcatggatgatacatacttccttgataatcaaatggaagaattgagagttgatgcatctactggtctacaatggatcgtgtgcatgcatttgaaatcgattagtaacaaagaaattgacccaaacgaagaaagcaatgttgtcgctgtttctttgttctaa

SEQ ID NO: 184820 - DNA, 582 bp, Arabidopsis thaliana landsberg
atgagccctgcacgtagtcatctcgaacaatcaagaaacactcttctctttgcaacttgtgctaaagaggtgaccacaaatgctcaagtcaatttggttgtgtctgagaaagctttggtgaagcaactgcagcgggaactggcgagaatggagaatgagttgaagaatcttggacctgcttctgcttcttcaacctctgatttctacgcgttaatgctcaaacagaaagaagagttgattgcaaagatggaggaacaaatccatgaacttaaatggcaaagagatgtagctcaatctcgggtcgagaatttgcttaaatcaacagcggaagagcggtcatcttcaagttcaatggatagcagaagaagaagaataagctacgattcaacggattttgatgagcctcgaatgctaaataacttggggaagagtaacttgtactctcctgatgaggatggtttcctgctggatgatactacccctcaatttccggggcataacctacatgataaatgggaggagatggctcaaagcaccacccaagaaccagaagatgcttgcaaagaagttagatgcattgaa

SEQ ID NO: 184821 - DNA, 317 bp, Arabidopsis thaliana landsberg
atgcaggttcgagtagctgatcctacttttcttggatacttcatcgataaaggggctgcttcggctgcaaaagttgtgcggaaggtatataagatcatacaatctaactggtctagaaagattttaagattaagacttcatcttctttatatttctgtacggaaaaaaaacaggcatatcctcaagaacaggtaggagtgtttgttagaagaggtaaaggaggaccgttgacagtagttgagtatagtgagcttgatcagtctatggcttctgctattaatcaacgaacaggacgtcttcaatattgctggagtaac

SEQ ID NO: 184822 - DNA, 406 bp, Arabidopsis thaliana landsberg
atggccgatgatgagtcaagaaccatcctgttggagaagaacgaagactgccctggctgtatcattgatcgaaccaagcaacagcaacgaggcgttccttacttgcacctctccttcatctggctcgtgtcactctgcactggttaataagattttttctccttttgcgcttttgttgtgtgtttcttatactaatgtttcaaagcttttgccaaatttcagctcttccaatatcttcactgtttccatatatttatttcatggtaagctaagttgttgttgcttctaactccattgaattagcttggtttgagttcagagaatgaccaatatgtattgtggcagatcagagacttccatatagcaaaacaagaagaagatattggtttctatgctggttttgttg

SEQ ID NO: 184823 - DNA, 1934 bp, Arabidopsis thaliana landsberg
atggagtcgataacgttagatatagagctgttgcagttaccagagacatcgccaatgtcgatgaaatctaatcaagattttgttaagaagctctttgatcaatggcttgctcttcctgaaaccaatcgtttggtaaatgtttcttccatttttcttgtatcataatatgtattttctttaatggtgacataatgaccgcactagcacaaatcactagaataagatgactatggagatatgaaattaagaaatatgtggggtatgaatccggacggtaacacaacgaactagcaaaaatcactaggaatatatgattctggagatatgaaattaagaaataagttttgtaatgtctttaaattttttggatgatatgtgctttttttttttgttgagtcccaatggtgacataacgacgacattagtgcaaactcgtaggataatatgtgttttggtatatggaactaaggaatattggtatgaatgattacaggttacatctttggtaaatgatgcaaaggcaggagtggctttgaatgttatgtgtggaggaggctcttctggcacgaattcagggtcgaatagtccattagcttcaatgtttccggcacgcaatgggcctcctctttctccaaggaattcaactggttctcctcggatcgccagacaaagaactggactatcaaatcttagttctcctctcaaagtagtttctgatcatgttaaagaactcattcctcaggtctaacattttgatccacctttgattttattatcgtatatagtctctctcggcaattttttgttgtactaaagtgattctattatgtattcatgtaatgtatagttttactttgaagatggtcggccaccaccaaatgatctaaaagagcagtgcatagctaagatcaatagtcttttctatggccacgaggatggtttgcaactccaaggttggtaattaatttctcttttaattagatatatcttcatatctcatttataatgactaatttcctcttttgtttctcagaatttaaattagtcactactgaaatatgcaaagttccatcatttttttccacctccattttcaagaaagttgataccaataacactggttttgtgaaaaggtttgcaaattttttcatgtttagctacagagtttgattagtgaaacgaaatgtatataaagttcagagatcataatataaatacctatgaattgtttaacacatgttatatattatgcttttgccaacttctttgcagagaagacttcattgattattgggttaagggaaatatgttaacaaaggagataacaagtcaagtatttacaatattgaagcagccagatcacaactaccttgtccaggttggtttttgtagctgcactatatatatatcaccctttttttgccacattggtagatgatttaattatttatccttctctttgtatatgtatcaactattatttttctggaattatactcgagagttctcaacttcttgagatattgacaggatgatttcaagccagtgcttcaagaattattggcaacacaccctggtcttgaattcttgcaaggcacaccggaatttcaggatagatatggttagtgcaagaatatgaagtgatctttagttcggtttgtttttttacagttttgctgaaatagtaagatatgtttacattagatagaacaaaaatctaaaatgagatgtggtgaatgtaaagttgagtatatgatccattgtaatgtatttgaaaaacttttggcaacagctgaaactgtaatatacagaatatattactacataaataggagtggaaatgggcatcttaccttgagagagcttaagcgaggaaatttagttgacgcaatgcagcatgccgatgaagaagaggacatcaataaggtgttgag

SEQ ID NO: 184824 - DNA, 452 bp, Arabidopsis thaliana landsberg
gttttactcagaggggaaagaaagcaaagaagctaaatgggcagtgaatgatccaatgagcaaatcttataagctctctttaccttcagcactaagacctgataatctcttacctggaaatagacttagatacactgatgcttctaagtccaaatcttctaaagtctcatggtacaagactattcttgatccaggaagtgagattgtcttgaaatggaattgggtcttcattgtctcatgtatggttgctctcttcatcgacccgttgtacttctttgtcccagctataggaggagataaaaactatccttgtgcaaggactgatacaagtttaagcatccttgttactttcttcaggacaatagcggatcttttctacttgctgcacattttcattaagtttaggactggtttcattgcgcctaattcaagtactagagtgtttggtagag

SEQ ID NO: 184825 - DNA, 174 bp, Arabidopsis thaliana landsberg
cattcacaaccgaatacgttggcgcacatctcggaccaaccaccgccgttacctgcggctgttgctgctgttgttgttgttgctgcgaaggaggaggaagagaaggagtcaaagacgtcgattcggattcggatccggtttgttgctcagacgcttcttctttctcctccatag

SEQ ID NO: 184826 - DNA, 311 bp, Arabidopsis thaliana landsberg
gtgatgtttccctctacccagcttggaactgaggaaaattggacactcatgaagacaatcagtgtgactgaatatttaaactatgaagatggtcagttgatgtttcaccatagctgagtgattttattttaaattatttttgtttgatttactttttctgccatttatagaaaatgaggacatgtgttttgtatgggttttcaggaaagttctccaagagtaaaggtgttggagtgtttggtaatgatgtaaaagatacaaatatacctgtcgaagtgtggagatactacttgctgaccaacaggcctgag

SEQ ID NO: 184827 - DNA, 1473 bp, Arabidopsis thaliana landsberg
atggaagccatgggagaatggagcaccggcctaggcggaatatatacagaggaagctgactttatgaatcagctccttgcctcctatgagcaaccttgtggcggttcatcttcagagacaaccgccacactcacggcctaccaccaccagggttctcaatggaatggtggcttttgcttctctcaggagagcagtagttatagtggttactgcgcggcgatgccacggcaagaagaagataacaatgggatggaggacgcgacaatcaacacgaacttgtaccttgttggtgaagagacaagtgaatgtgatgcgacggaatactccggtaaaagcctcttgcctttggagactgtcgcagaaaaccacgaccatagtatgctacagcctgagaactccttgaccacgaccactgatgagaaaatgttcaaccaatgtgagagttcaaagaagaggacgcgtgccacaacaactgatgtaagttgtacaaacgttttttttttttttcagccgaaaccataattctaaatattttaatgttcttgaaaccaaatcagaagaacaagagagccaacaaggcacgaaggagccagaaatgcgtagagatgagtggcgaaaatgaaaatagcggcgaagaagaatatacggagaaggctgcggggaagagaaagaccaaaccacttttgccgcaaaagacttgttgttcggatgacgaatcaaacggtggagacactttcttgtccaaagaagatggcgaggactctaaggctctcaacctcaacggcaagactagggccagccgcggcgcggccacagatcctcaaagcctttacgcaagggtaatttacacataaactttaaaaattaaggcttcgatgttattcaaacatgtacacaaatgtgatgatgagtcttatgtatatgcattgtacaaacataacaaaatttattatgatagctgaaacaattaaacaaagtccattgtatgatggtgcagaaaagaagagagaggataaacgagaggctaaggattttgcaacatctcgtccctaatggaacaaaggtacatatgtctttcattcatgcaaacctttttttttccatgcaaacttatatattactacgtaaccacatcactttttactcatttcgtttcatgattactaagtaaattaaatgtgttaaatatgtatgtatcaggttgatattagcacgatgttggaagaagcagtacaatacgtcaaatttctacagctccaaattaaggtacgttaggttctcaatgattataatataaattaaaccatagaaaatattgtatcaattaaagatagagaattaaatattggttataatgaataatgttatgttatacagttattgagctctgatgatctatggatgtatgcgcctattgcttacaacggaatggacattggccttgacctaaaactcaatgcactgaccagctga

SEQ ID NO: 184828 - DNA, 75 bp, Arabidopsis thaliana landsberg
gtgaacgaatttcacaaaagaaccaacggcactaagaataaaatattcgaaaatcgaattattaaaaaaacatga

SEQ ID NO: 184829 - DNA, 155 bp, Arabidopsis thaliana landsberg
aagtagatatcatcagcacggccgttggtcggaagctttccgccatgtacgaagatacctctttttccatagatggtggcagtggtgtaggcagtgccgggttaagtaaaaaggcggacaatgcgaccgccctatatccgggaaattttctttaa

SEQ ID NO: 184830 - DNA, 356 bp, Arabidopsis thaliana landsberg
atggctgcccctgatgacgggggagatgtcggcgacctaggtgagcccatcaccgaccgtaccttggtgttgaaccttctacgtggcctcaacccctgctatggccacctgaatgttctcatcaagaggatcgtgcccttccccaccttccacatcgtctgcaacaagcttcttctcaaggagctcaccatggagattgagtcacccgctcccgcctcggccctctacagcgtgcctcctggtggtcaggcgcctttgaggggcccgtccctcgacctccgtcgacaggggctcctaaccgccctccccccgccgtgcctgtaggttgcggcttcgtccggctccacggccgatag

SEQ ID NO: 184831 - DNA, 57 bp, Arabidopsis thaliana landsberg
atgccctcgcggacgaaggcctgggtgttggcccggccaatgtttgcggcggcgccg

SEQ ID NO: 184832 - DNA, 420 bp, Arabidopsis thaliana landsberg
ttgggcgctgcaagtgtgttgtctttgtgaaagtgccgatgcgatgtttgtatactcgacgcatgactaccgacctccataatctcaagccgggttactactggtacaccatggccaacgacccgctggccgtcatccatatccatgaagacgggggcgccacgctcatgggcacggactatcgcatcggcgccgaaggcgtcgctgatatggtccggcagggcgagcgctttttctggatcgaaccgccccaagtctgatatggcggatctgctcctcacgaacgtccgcacgccgcaaggcgagggcgtggacgttctggtacgaggcggccgcattctgcaaatcggcccccgccttgaggccgatcccgccgagaacgtcgaagagggcggcggcgccttgctgctgcccgccttc

SEQ ID NO: 184833 - DNA, 212 bp, Arabidopsis thaliana landsberg
gtaataatggtgggaacgaagggggcaaagaaaagttcaagaaagaaacagttacagctttgctagaaatgttggaaaagataaaccctcatgttggtgcatttaggattgcccgtaatagattcaatatagagaaagaagcggaaaattttcatatgaagattatatctaatcgccagaaagatgcagagtgtataaccttccatccgtag

SEQ ID NO: 184834 - DNA, 442 bp, Arabidopsis thaliana landsberg
atgggggcatatctggaatgtaccggcccccacgacccattacgaagtggaggatcctccgaatacaccacccagtggcccctggcagtatcgtgtcacggtggtatgtagtaaccagatcgaaagcgagatcgagtattagacctcgggaagcgcgagctttcaacgtctttcgttgacggcgacggcgggcgacggcggtgtagcgttaagttggaccagcatcgacaatgcgagtagctataaggtttatcgttggagtggcagcagctacgtactccgtggcacgacgacggggacggcctacaccgatacgggcctgaccaacggcacgctctatcgctatgtggtgacagcggtggccgcttatccccgggaccgccaacagtcaccagcggccgaagcgaagccaaatccgccgattaccgccgcatcgggcacc

SEQ ID NO: 184835 - DNA, 552 bp, Arabidopsis thaliana landsberg
gctatcacgtatagatacttaaaagggaaactggaaaagccgcttttcaagtttgagaacttaagagaattcaagattttctttaaggctccaacattttgcactctatttgatatcgctgaattccttaaagagtgccctaaactcgaacagtttatcattgacgtaagtctctctctctgtccccctccctgcctccctatggtctacatataagttactactaaaacttttgattgttatgtgcagattcagaatttcacatttgaacctcaaatgtatttttgggagatacatcataaggcgcagattcagaatacttcgaataacaactaccttttgaagtgtctcacggacgtgaagatcattggctataaaggccactggcatgagcttgatatagtagagttctttgtcaagaacgcaccatctctaaagaggttggagttacagatgcctaagaacgcgaagaacgatgctcacaccccagatgttgcaaggataaagctcataaaaaccatattttcaggggttaaagttaccgaagtttaa

SEQ ID NO: 184836 - DNA, 328 bp, Arabidopsis thaliana landsberg
atgccgagcaaatctgtttgccgaaggcgcacaaatggtgtgtacgcacattgcaggcatcgcatagaaatatgctatattaatatacacatagatatacaatgttcaattcatgtgtcgaatattacatttcccatatactacatctcttaagtacacaaatatctagtcttccattaagatcttctctgcagcttcacatagaagtctggtgtcactatctgcaacagcctgttcgactgttcttattgttgatagtggcgctttcatggctggaccggctcaggatcacatggctcgagtgtcagtaaaagttcagctgctgtaa

SEQ ID NO: 184837 - DNA, 1590 bp, Arabidopsis thaliana landsberg
  unsure (1)..(1590): unsure at all n locations
atgagttctaatcgatactggctgctcggtcaacttaatgttactgaagagcctgttttagatgggaatttccgaaaggaccatcatagccaaggtccgacctctgacgggatacgacggagaggcaaagatgtcgataggagagatcaagctccaagtccaagtaggctgcatcacgcaaaagactaagttcgttgtcatcgactcggaaccaatctacaacgccattttggggagcccttggatctattcgttgaaggcgattccctcaacataccatctctgtctaaagtttccgataggnnnnnnnnnnnnnnnnnnnnnnnnnaaccaaaaggtctcccgaacatgttacgtgatcgagaagaagcagaagaagaaagaaatcttatagcaattttacaggatgaagagcgagctgcaccgtctgaacaaccggctctcgaatcgataaaggcaccgagctgtaagatcatccaggtgaacatcgacaaatcagatccatctcgaacggtgggtatcagaagcgagctagagggagaaataaaggaagaactgatcaccttcctgaagtcgagatcatcatctttcgcttggtccacgaaagatatgacaggaattgcccagaagtaacttgccataaactcaacacggatccgaccttcaaacaagttcgccaaaagcgaaggcgtctaggagccgatcgcgccaaagctgtccaagacgaggtcgaacgactgctgaaagccggcctgattaaagaagtccagtatcccgagtggctagccaacccagtagtagtcaaaaagaagaatggcaagtggagtgtgcgtagactatactgatctaaacagggcatgtcctaaagacagttatcctctgccacacatagatcgcttagtcgaagcgacagccgggaatcaactcttgtctttcatggatgccttctcagggtaaagtcaaatcttgatgcataaagacgactgtgaaaagacggtcttcatcacagatcgcgggatttactgctacatagtcatgtcgtttggcttgaaaaatgctggggcgacttaccaacgtttagtcaacgaaatgtttggcgagctgttgggggtcacaatggaggtctatatcgatgacatgctggtgaagtccttacatgcagcagataacatcaaacacctcagcgcgtgtttcgatattctcggcaaataccagatgaagttgaatcccatgaaatgtacattcggggtaacatcgggtgagtccttaggatacatagtcaccgaaccaggaattgaagccaacccgaagcagattgacgcgatactcggcctgccatctccctagaacaaaagagatgtacaaaggttaacaggtcggatcgcacccatgaatcgcttcatcgcccggtcgactgacaaatgcctccccttctgcaagcttctgcgtggaaacaaggacttttattgggacaaaaaatgtgaaaccgctttccaagagctcaaatcctacctcataagcggggcgatcttagccaaacccgaggtcggagagaccctatatctatacatctccgtatcaagttcgccg

SEQ ID NO: 184838 - DNA, 260 bp, Arabidopsis thaliana landsberg
atgttaatcggaaagttttcctttcttgacctgcccggtttctttgaacaagaggtaaataatcttctaatactctgtttcaaagatccgctctctgcttgagccaatgtataataaaaaggagttattcttttactttctcagaatgtatcagagaggagaataagattctcttcaaatagctcagcaaaagatttactggagaaaatcgatacagccgttgcagaaatgggattcagtgtcaaaagaaacatgccaag

SEQ ID NO: 184839 - DNA, 147 bp, Arabidopsis thaliana landsberg
gctaatgaacacctcgcccaacggagcaccgaggtggcggaccttcggctgctctatgatgagctggaggtggaggtagcggcggcacaggcaaaggcagcgtcagcacggatggaggcgcagcagcgacagttggagcttggctag

SEQ ID NO: 184840 - DNA, 526 bp, Arabidopsis thaliana landsberg
agttttcgatcatttcaccaacctcttctctccttatgtcgagatccactttccggaaagcgatgagtacagtttcaaccaagctttctcggccattgatacctaccttgactcaaaagcaaccgacaagaccaaacatcttagaggaagccaagtaaaagaaagcaaggtttggtattgaaacgaaacgaggctaaagtcagagacgagtacaaaggagctaatgtctggtgggagagagtggttgataatgatggaaaccgatattataagctcacttttcacaaccgcgcaaggatccttgtaaccaattcatacataaaatatgtggttgaagaagggaaatctattatagtcaagaacaagcaaacaaggcttttcacgaataacttaagttcgcaatgggtttttggccagaatatgtggagatctattgaatttgagcaccccgcgagctttcagacactagctatggatccaaagaagaaagaagagatcgtgaatgacctcatcgcctttagtaatg

SEQ ID NO: 184841 - DNA, 150 bp, Arabidopsis thaliana landsberg
ttcgcttacgatggcatttttcacaccagcctctactgggaatccaccggcagcgtgatgggaggcttgggattcctggtaaaggatttcggagaagtaaatttcttctacaccagcaaaaacaagtacggctatcatgaacagtacgag

SEQ ID NO: 184842 - DNA, 191 bp, Arabidopsis thaliana landsberg
atcagcaatcagggggaaaaatcaatcgacgatcatcgcgattgaaaataagaacaaaaacaaaaccgaatcccaggagaaacagcttaaacgaatcaaaatcagcgaatctaacggaacacgatgagattaggagatcgaaggcagacgagaataaacgactaacctggaagcggcgggatcgactatga

SEQ ID NO: 184843 - DNA, 367 bp, Arabidopsis thaliana landsberg
accagggtcgtttgaccacagaggagacatacatgaaccattcgattcaagcgggtcatacccgaagaagtcccaagatgctgcagttggtgcccttgtgagaatgctgaagaaagcgccacctctcagacaagatgtctctgaatcttccagacctgaaatttgctcgaacaacaacaaacccgcaggggctcatgagatagcagtagcgtctatcacagcctcggggattgctctggcctcaaagacaacagctgatgctttggaagagttgaggtcttacaaagaaatgaagaatcatttgttgcttggtcaatccacatcaaacccttcctcggttactattacttcaccctttgatgtttga

SEQ ID NO: 184844 - DNA, 292 bp, Arabidopsis thaliana landsberg
ttgcgtgtgagtaaaatggttataaaggatgatgtaagagagttatttcatacgtggccaaatcaagtagaagacccaacacttgatcacttgatcgaaaacatacatgagaataagtttgttaaaggttatagggatgtgaagagaaatgagaagaagaacaaacttgtaaatggtaaagtagcggttgagtctgaatctcacgcaaagaagcagaaagtctcccacagtgagggtggtgaatattatgaaggagatgcacaaaggaagaagaagaaagaaagaagcaaag

SEQ ID NO: 184845 - DNA, 434 bp, Arabidopsis thaliana landsberg
atggcgcaatacacactcgataccatcccgaaagatttgttcaaagaagccaaaaagaatggcttcggcgatgcgcagatggcacgtatactgcagggacagtgcacggatgaacaggtatacgaaaaacgcaaagcccttggtcttacccgtgtcaacaaaatggtagatacgtgcagcgccgagttcgaagtgaagacgccctatttctacagcacttttgaaggatgaagaagcgtgggttgacgtgagttatcgcgagatatcgggcgtcaactcacgccatatactattccccatttttctttactttgcagctccttacgcaaacgttttccatgaaggtgacagacatcaaggttctccatgacccagaaacccgcggcggtttcggaaaaagtaagatagagatcggcaaagagaatgaaaatgtg

SEQ ID NO: 184846 - DNA, 473 bp, Arabidopsis thaliana landsberg
atgacaaaatcaaatagatgtggaggattggggtttaaggatattaatgtgtttaatgatgatcttacttgcaaaagtgagccgactaatcctttcaaaatcttcttgcctccttgcaaaaataatgttaggaaaattttgcaaaacaacccctttccttgattgctcagtcacgaccacaacctcacatggatgtagaggaatttgtataggtagagacctgatcaaatcccagttgggtaaatcaatcgaatcaagtactttgacaaaggtatggtcacaaccttggctttccttgtcggcgccattattccttataggtccaccaacagagtataaccaaagtatgactattgataactttatacgcccaatttccaagtcttgggacagggcaaatattctgcatcgcctcctcaacatgaatcagaaatcctcgcactttgacctggtactctggaagccaaagatcg

SEQ ID NO: 184847 - DNA, 2902 bp, Arabidopsis thaliana landsberg
atggaagatggaaacaaattggatcggaagaagacaatgacgatgaactgggaaggattaggagattttgaagatgaagatgatgatagattcttcgaaactcatgatcgtctctcttctgctttaactttcgacatggctaatgcttcttcttccgatgaagatgaagatttcgacgattgtcgactctcgttttcttcagccgtctcttccttaaccaccgcctctaggaaatttcgtacgccggcgatgtctcctgattacgatatttggatggctgctccgggatctatatctgagcgtcgtcgtcgtcttctccatgggatgggacttgctagtaataaagatatggttagtgctgtttccattcgtcgcgttgtttctaatgcgcctgttgttagtaacggtgaagaaaagaagatgaagaagaagatgaatcatgaggttgatgaacaagatcatgatcatgttccggttatgcttgcgaggtcaagatcggaatcagatattgagaggttcttgattgagaaacgaagaaaagaagagattttagggaaaatctcaaagcagcgtcttacaagaacgtattctactatttgtcctacaaggacaaggatttgtcagtaccaaactccgatcagacaaacacctgcggtttgtggaaatggaaaagctttgcgcggtggtggagaggcgttgacatcggtaatgtcgaatgcgagggttggcgcgtttttcttgataaagaatcttgatacagggaaagagtttatagtgaatgagtatgatgaagatggaatgtggaataggcttagtgatctgcaaacagggaagcaattaactttggaggagtttgagaaatgtgttggttattcacctgtggttaaagagcttatgcgtagagagaatgtgaataggattaactacgaaccgttaatggatcttcgcaagtttaattcgtatctttccaagagtgtgaggttaagtaagagaagaggagctgcattgttgaagaacattaaaggtgtagctcattccatgagtttacgcgttgcggataaagatgtaagcgatggaatcactgatagtccgaaaaaggggaaagatcataaacatggtaaagctaatgagtgggtgaaagttagaccaacagggaaatcttacaaggagttaagtgctttacatatgtgtcaagagattcaagctcatgagggtgcggtttggactatcaagtttagtcaagatgctcattatctagcgagcggaggagcggatagagtcattcatgtgtgggaggttcaagaatgtgaactaatgtctatgaatgaaggaagtctcactcctattcatccttcactttgtgactcttctggaaatgagataactgtggtagagaagaaaaagaaaggaaagggatcatccgggagacgacacaatcatattccggattacgtacatgttcctgaaacagtcttctcgttttctgataagcctgtatgctctttgaaaggtcatctggatgctattttggatctttcatggtccaaatctcagcttcttctttcatcttctatggacaaaacagtcaggctatgggatatagaaaccaaaacatgtctcaaactgtttgcccataatgactatggtaagacaaatcttttgtatcctatcttcacatctagctattaattttctgcatgcacttttgactatattgtctcattgattcaacagtgacatgtattcagttcagtccagtggatgaaaattatttcttaagtggttcacttgacgctaaaataaggatatggagcatacaagatcgacatgttgtggaatggagtgatcttcatgaaatggttactgctgcttgctacacaccagacggtcaggtatttgctctgtttttttgctctgttttttgctctgtttcttggagtagtctacaaaatccatccattatggtgtttttataatgatggaagttttggttttttcggttgaagggtgcacttatcgggtcacataaaggaatttgtcgtgcttacgatacagaaggttcttcctaagctctttctgtatcaaacatcatgtttaccagttgaatacttcttttcattgcgacgcgcttttttcttctgtagaacagattgtaagctgagccaaactaatcagattgatgttcagagcaacaagaaatcacaagcgaaaaggaagatcactagttttcaggttcctttctttaaaagccaaaatccttcttaagactttagtaaactaaaatgttaacaagttgttgatgccattatatagttttccccggtgaatccatctgaagttcttgtcacatccgctgattcacggattcgaatactagacggttctgaagttattcacaaattcaaaggtaaattctctacaagcactagagccaagatgaacaaaaacaaaaactgatactttttattgacaggctttagaaacacatgtagccaactctctgcttcgtatagccaagatgggaaatacataatatgtgcgagtgaagactctcaagtttacttatggaagaatgactttcaccgaacaagatcaacactcacgacacaatctcacgaacattttcattgcaaagatgtctcagccgctgttccttggcatggtcatgttagaggtgagccaccaccagttcagattcactctaaacgccactcaaagcgcatatctacttcaagccagccttcatccaccataagctcaccaacaaaagaagaaacctcggcgactggaccaactacatctaaccggaataaaaaatcagggttacctccaatgcctaagaaagccgctacaaagagtcagattcaaccagaggaagaggcaggaccggagctgggaagca

SEQ ID NO: 184848 - DNA, 757 bp, Arabidopsis thaliana landsberg
atggaaaatcacttcatggccttgaaaagagatggcttcaggagctaaaggatgacactggagaatcactgcaggctcagattatcttcaaaagtaaccttgttggttcagtaaataaggtcttctgcaatatcactgcagccacaaatcagattgtcgacggatttatcccttgtcaagtactgagccatactcctaaactttaatcttttatcccccaataagcttaccttttgcatcattaggaaaatatttggatactgtcatattgtacttacctcagctaatggtttacccactacagtttttgatcctcttgctgctgtttacagacatgcaggtgccacggcatcccattacaagattcagtggaaaagccaacagagaagttgaaatgctccgtaaccaatcatgaacttggaaagtatgatgtgattgaaaattctgtgaaagttggcaacagaacaaccctgtttttacctacaatccatagcctccagaaacttcatccagtttcttcccaagttgatttcaatgtcatagagaggactaatctaacttctctcagcgaaggtaaggcttttagctattccacagcactctcttcttttgacttcgattcttgcctccaagatagagagcttgattcaagtatgctattttgacgtaggcctactacttgggataccttacattgtaagcccttcaacttgtcatgaaacagaagaaatggatcaaccagatttgaacactcaga

SEQ ID NO: 184849 - DNA, 296 bp, Arabidopsis thaliana landsberg
atgcagggcggcaggatccgcgtccaacccggccgcaccgtcgtgaagctagcagaagatcgccaaggactggcgcggctccacacccgccgcgaggacctcgtccacgacggcgccgtcgtgctaattctcctccgatcgacgacgattgatctctccaccatgcagggcggcaggatccgcgtccaacccggccgcaccgtcgtgaagctagcagaagatcgccaaggactggcggcggctccacacctcgcccctggcgagcagctgctcgtgctcgagggcgaggacctctc

SEQ ID NO: 184850 - DNA, 529 bp, Arabidopsis thaliana landsberg
gtgcatgctaaagtctccaatgcaaactttaatagccaaggtatatatctactacataaccgtgtagataaattaattactatgtatgaaacgtacgtatgtatgtaaataagttttatcatgcttatcaaaatttctatatagctccacaaatgaaaaatagtgaaggtcttggagcaagcaatggtacccaaattgccaagaaggtattggtaactacgtactatggtactcaattctcaatccattttttttttgtttacgaaataagtataagttagacatattggttttgatcaattaaaattgacttacatcattttattcttagcatgctgaagatgtaattgaaaaccgaaagacgttgaagcatgtaaatgtgaaggtggaggcaaatgagaagaatggtttagaaatagagagtaaagaaatggtgaagaaaagaaaaaacaagaagagactcaccaagacggagagtttaactgccgattatagcaaccctggtcatcatcctcctaggcataactaa

SEQ ID NO: 184851 - DNA, 621 bp, Arabidopsis thaliana landsberg
cttgggaatgaaactgcggatcgcctgcggcgcactgtggaaccagcccagtgccggctgggccagcaaactgatgccgacgccaatgccgccgatcagcgccagcatcagcacactggctgccagtgcacgcgggatatgccgacgcgccgcaaacgcaacgatgggattgagcgccaagccgatgaacgcagccagcaccagcgggatcaacagggtgcgggtaatcgtggcggtatacagcaatgccagcagcagcatcgcattgagaatgacgcgaatgccgcgcaggtgacggcgtacaccgcgaccgctacgcaagctgtgcgacaagcgccgcacgcgcgtcacgccgggcggcaggtcctgcacgatcacgtgcaccggagcgtcaccgccagccgccatggccggcgatgcagagggatcgatggtgttcatgccggtgggtcgccgcccgccgcgcccagttcggccagcaagcgggtgccgtgcgccacgacttcggcgaggccgccactgagcagcgagcctagacccggcacgcgcaacggatgcacgttcagccggcccaacacgaaaccggaaccggccgccgcgccaaccgtggccaacgggtaa

SEQ ID NO: 184852 - DNA, 539 bp, Arabidopsis thaliana landsberg
gagcagccgccgcaactgcctggggatcgttcgtcgtaacctggatcgacgccgccgcccctgccgcagtaggaggaagagtaaaaatcgcggcacccggattgccattaccgtccactcccagcgcattctgcgcgttcactgacgttccgattccataggcaaggctatcgagcgcactcgcatacaccggcagttcctgggctctcgcctcgagaatgccgcccagttgtccgcccgtcagtcccgaggtcacatcctgcgctcctcccccggcgagcacatggaccgtccccgccaccagcgtcgtgctcatcgcatacgactggctgccgctcaccagcagcgcaccattcgaggtcgtcagcgtaatgccgtttgcctccgtcgtcatctggtccagaccgacatactgcgacaactgcgtgatggcatactgtcgctgatcttcgagcacgccggcatcggtctgcggatcggcatgagcaatctgctgattcagcgatgcaatcgtcgtcgtcaacgtgttgatctgcccg

SEQ ID NO: 184853 - DNA, 401 bp, Arabidopsis thaliana landsberg
atgcatggagtgagaatagcatctggatacatctttccttcaactccttcaccaaatgccaagtcaaaagaagatgattcggacttggcattcgcagaacttggtccagtttctgatacaacaactacccacccgacgaccaaaaagcttccagtatatgaaccatcactctcagaggatgaagaagattctggttcagagagagataacccagagaagaagaagcaacagatgatgagtaaagaaggtaaagagagctcgttattgcaaattctggattcttattacacaaataaagatggagaattgaaggagaatccggtggagaggaagcttgtaagcaacggtagaaagcaaaagcctacaaagacgtattcttttgtgaaagattcagaagtcta

SEQ ID NO: 184854 - DNA, 448 bp, Arabidopsis thaliana landsberg
atgcttaccgctactgtaaatcccctgccggtgctcaataaccagggctcggcgcctgtggcgcaatgcagcgggcaaacatatacctattcgcctgccagcgctacacccggcaccagcatcatctggtccagggctgcagttacaggtatggcaaataccgggaatgccggtgccggtaatcccaatgaagtgctggtcaacaatacgcagtcacctgttgtagccctataccgctttacactaagcgccaacggatgcgccaacccgcagaatgtatccgttaccgtaaatcccagccctgtattaagtagttccattaaccctgtgagtgtatgcagcgggaaatcattcaattatacaccgctctctgcacaaagcaattcgccaacttttacatgggtgcgcctgaccaatccttttatcaacggcggcgtatctggctcgg

SEQ ID NO: 184855 - DNA, 403 bp, Arabidopsis thaliana landsberg
tgcagatgaagtacttcctgtgtacaggtgtgttcccatatgtcaaagcacagctcttttgttttattttgacatgattgtgaatattaattacgtttactgggtcttctctggataccttcctcacattaagtgtgggaaaaaaatgtgctaaggtacttttttttttccactcgttcagtgaatcttctcatatgaaggtataagaatatagaatttaccttcactttgaacttaaattctgggtttgtatgacaggaatacgatttatgattctaccattggacgtttccttacggcggtatattccagctgttctgatgccgctgtcaaactaactgcagaaagtttagtgttggttttctctcatgctttacagagaacaaaaagtgaggagcttaag

SEQ ID NO: 184856 - DNA, 1323 bp, Arabidopsis thaliana landsberg
  unsure (1)..(1323): unsure at all n locations
atgcagttttggattcacctccccgaagttcagaaacctagaggtgctcaaaccaattggtcagaacatgcaaaggcgctcgagagttcatcatcggtgactaagtttctgagctccaatgtcctttacgccctagaaagccaaaagcctagagatatggctgcaaggtattatggccatatgttccttctttcgacaacagtcatctccttctgtctattgtcatttactttggcccagtactctctgttgtttggatttgtagaagtagaacttttgaagatgaattatcaaacgaagtcagtgattgatggataggtttccaccacattgtgttatatcgcttttccagcatcacttggttctatgtgacaatgcgtgttttgtttccttatcaatagctttgtacaaactagaggcttcagcttttacatggctcgactttcataccaccaaactgctccaaataatattagatgatatgtgcatcatatgtctctttgatgtatctcactatggtagtgatggaaatcttgttatgttttgttctgtcttcttcttaaatatgtttacaactatgtgattcacaattatttgaaaagctttgttctctttctgcctaggtcaattgcgtttcccagtgtgaatgtgcatactttggcgcacccgcaaatttcaaaggtaatttcttttgaagggatattgtggtggtaactatagttttcaattgtggtcataagcaggatcttcattacatgtttttctttctctttccatttctttcagtaaacaatttatctcatcgtagttcctattttctcctagtttctggttgacctttcccttgtatatagacctcttttcatgaactgtacatatatgttagttattggtatcctatgtgggcaggcttggcgtgctctttcaagtctttcagtaaataatacctacctaagacctggcgttactccccccattgatgttggcaccaatgactcttattctgcaagagagagatctaccgcaaaagttatatctagcactggtggttctgtttattcgagcactcgaccaaacctaagtgcaatgaatgtttcannnnnnnnnnnnnnnnnnnatagtttcccttcctctgtccctggtgatgataaaatagttgctgaaaagtttccacggggaaacaatgagatcagagaatcagaacccagttgcacgcatttaaatggtgtggagaagtcattcgggaattctgcattcccagctgagcagttcgaatctagaaaagcatgtcttgatgatatggatgatgatgacatacttgag

SEQ ID NO: 184857 - DNA, 156 bp, Arabidopsis thaliana landsberg
gaaccacgggagaggctgaacattgtgtctgcaacggcctgtgaacgtacctgcaacaagaacataacacacaaatcagcagaaagaacgacaactattgaaagattaatagaaagaggaatacagaaattagacaactcaccgagtgaaagctga

SEQ ID NO: 184858 - DNA, 118 bp, Arabidopsis thaliana landsberg
gaatttcgtcgaacaactggtgggcgagtgcctcatgagtcagcaaataaaccggacaacgaataatccaatggatacgctcacatctgttggaaacttcgacaagccacgaccgtga

SEQ ID NO: 184859 - DNA, 1765 bp, Arabidopsis thaliana landsberg
  unsure (1)..(1765): unsure at all n locations
cgagtagtcaccactgccaccgaagcttggcgccatgggaccccgcacgaaagacagaagaacctcgaaccccttctccaggccttggaggcgttgcggaaggggggactcactgctgcgggagtgattgccgccatccaccgtcggagggtgcttcccttggcggacggacggctgtccgtttgggagatgaccccggaggctgactgggagggctcgcggatgtcccctgatcctcttcccttcgacgccctccaatggcgggtgtccgtcgcgttggggaagccggacccccacgccttctcccagcccttgatgcgccctgaccaagggtgcgtgactctggtgagtgtccgctccttccttcttcttgcgtcgggttgcccctggttcttacggtcgggatttccccccttctccaggaggtggggtggcacaagccttccctgccacgggtcccgcaggacgcggtggaccgagcagcgcggcgagtcgccgcgagcgagaagaagaagaagaaggacgcggagaaggcccgggcccgcgagcggaggcgtgctcgagacgccttggaaaagctccgtcgccggcaggagagggaggggctcccgagggagccgtcgccggaaacgcctgacgacgacgacgatgatgaaggtgatgacgaggaggacgacatggccgcccgccttggcctcagccccgacttggggtttggccaggagtcgtcaagccagcccccgagcgggctgacgccatcagttcccggagtcgggacgtcgaggtcccggcccgaggagcgggggcagaccgagggggtacttgacccctcggccagggaagtcgaggtgaccccggggagtcaggtcgaggcgtctgtttctcgggagccgtcgcccacgccggcagcgcaggagggtgaccctcaggtcgccgtggcaacgcccgggcagtccgtctcacgggcgtccaaggtgcccaaggcgagggagatgccgaagctggcggcgaggtggacctcggcagtgtcttcgggggtcgagatccgagagacctcccctcaggcacggttgatcatggcccggagcgggtnnnnnnnnnnnnnnnnnnnnnnnnnngtttttcattcgtatgtcccgaccgcgattttcctttcctcctcagcaagcgaagccatggcctgaccgatctggctccccagaaggcccttaagacggcgtcggcttccgcagccagtgtcgagccgggccttgctgttcagctggccttctcgcaaggcgctccacagcggggggctctggcggcaccagtcgccgtggagcgagttcccgaggccggctcttctgccgaggcagccatcgtgctggaggaggcgactgacgtggacgtggccccgagcccaccggacgtgccgccggtgctggcgcctgttgttactgaagccgctgccgtcccagtcggggagcgacctgttgctgccaatgctgagatggccgaggcgtcggcgctcggtgcctcggaggaggggggcgcggaaacgcgatccgtcccgccgagcgcagccttgtcactgtgcggcggactcccagggtcggcgccagttgctccggttccggacccgtgaggcctcagatcccttcttcgttcttgacgacgaacgggaggagcagtcttgggacgagctccgtgagtgtgccgaagcaacggtggggtcgctccggtcgtcgctggaggttttctgcagggacgtcccaaaatcctccag

SEQ ID NO: 184860 - DNA, 902 bp, Arabidopsis thaliana landsberg
atggcggattcgttggcaccattgttgcccacccacattgaagaagatgacgacacttcttcacctctgactttcgacaagatcctcgagaaaagcttgtctgatttcggattctcgcagttcttacagatagttctcgttgggctcgcgctaacctttgactctcagcagatattcatcaccgtcttcacagatgcatatcccacgtggcactgtcttgaccacacgatctgcaatccggcaactaccgatatctgtaagattccccggtcagcttgggattgggacggtggtttcaaaggtaaatcagtcatttcagagttcgatctcgagtgctccagctccttcctcagaagtctacctagttcaactttttatgtgggttctatcgttggtgcagtcgttttggctatgataccctgacggttccttgggacggaagcaactgctttttttctcgagtttcgcaccgtcactcactggaatctctattttcttatcctccaacatatggatctactccttcttaaagtacgggatcggattcgcgcgtactcagaccgggacatacgcgttagttctgataagtgagcgaatttccaccaaatggagaccgcgagctactatggttccgtttactctgtttgtgttagggttcatgtcgttgtctggaatcgcttaccttgtccgacacgcttcttggaaagttctctatctatgcacatccattcctgcaggaatccacagtattttcatctatttctttgccctagagtcaccgcgttggctccatttggaagggaagaacaaagaagccattgaagtgctcaaacggatttcacctgcaaatagaggttacttggaatccgtatcttcgaggttacgtccaaaagaaacactag

SEQ ID NO: 184861 - DNA, 350 bp, Arabidopsis thaliana landsberg
cttatcacacgagttctctaggtatttcaagaacaacaaatccacatggcttacttagtgaatctcaatttgaagacgatttcgataatgtaagtattttcatatacaaagttagaaatattttatgtgaatttggtgggattgcttgaacaacacaaagactaatgttaatctttgtaatgcaggatctcttcgagcttgaaagaagtattgaatctggtgtcaatgacacaaagactcacttggatatctatttggctgagccaagactagagtggaaaactttttcaaatttagatgttttgaagtattggaaagacaaccaacatcggcttggggatttagcgtaa

SEQ ID NO: 184862 - DNA, 773 bp, Arabidopsis thaliana landsberg
atgcaagaggagctcaacaacttcaagaggaatgaagtttggacgctggtgcctcgtcccaagcaaaatgttgtgggaaccaaatgggtgttccgcaacaaacaagacgagcacggagtggtgacaaggaacaaggctcgacttgtggcaaaaggttatgcccaagtcgcaggtttagactttgaggagactttcgctcctgtggctaggctagagtccattcgtatcttgctagcatatgccgctcaccattctttcaggttgttccaaatggatgtgaagagcgctttcctcaacgggccaataaaggaggaggtgtacgtagagcaaccccctggcttcgaggatgaatggtacccgaccacgtgtgtaagctctctaaggcgctctatggacttaagcaagccccaagagcatggtatgaatgccttagagactttttaattgctaatgctttcaaggttgggaaagccgatccaactttattcactaagacatgtgatggcgatttatttgtgtgccatatttatgtcgatgacataatatttggttctactaaccaaaagtcttgtgaagagtttagcaggatgatgactcaaaagttcgaaatgtcgatgatgggcgagttgaactacttccttgggttccaagtgaagcaactcaaggacaacactttaatctcccaaacgaagtacacgcaagacttgatcaagcggtttggaatgaaggatgccaagcccgcaaagactccaatgggaacagatgggaactga

SEQ ID NO: 184863 - DNA, 247 bp, Arabidopsis thaliana landsberg
acacaaattgtctgaagatctaacaccaaagacaaagccttttaacaacaacaacaacaaaaaagaaaccttcaacgggattggtgatgtcgtcttgagcaaaagtagaagaaaagcaacagaagaggaagaagaagagcagaggtatgaggagacgagagacatgatgggtcgaaaacatatcgagagaggaggaaacagaggagacccaaggaaaaaacgaaatctcgagagagagagagtttag

SEQ ID NO: 184864 - DNA, 489 bp, Arabidopsis thaliana landsberg
catcggtgtgtaaaatgagattggtaatggagtgcaacgagggcgaagggtttcactttctgttagtcacatacgaacatgaggaggatgaatatcttgctcaaaatgatcttttattgctatcaaaagaagaggtacatatactattcctttgtttttgtttgattttccaagggtgttgtatgacttgcatttctgattttgtactttcttgtataaaattttcattatcagatgttggattcacttagagattaacttttgcagattaaagggaattcatttccttcatcttatgggtttgctgtagtggaacatcgtcaaaataatcttcttcgtcttcggatgtatttagctgaagacattgtgcagataaccaagaatactaaatcctctagaacaaagtcatttatccaagcgctttcaaatatgcgttctcttattacatcatctgccagccctattgacaaaagggtattcagtttaaag

SEQ ID NO: 184865 - DNA, 119 bp, Arabidopsis thaliana landsberg
atggagttcgctcaggcgcacggccagtccctggccactgcagtggaggcggcgctgaccacaaagatgcgccggctccagggcatgatccgtgccgcgtatcgcgagatcccgctggc

SEQ ID NO: 184866 - DNA, 80 bp, Arabidopsis thaliana landsberg
gcttgtccaagtgtcgatgggttaccgtggtcgacatgatttctcttattcttgttgtgcatgtttatgataagatatga

SEQ ID NO: 184867 - DNA, 97 bp, Arabidopsis thaliana landsberg
atggaatccgccgtgacttgtgagaatggattcagggaaagagacgacggtgacggtgatggtggtggtgtgatgacgtggacgtctccaattggtg

SEQ ID NO: 184868 - DNA, 870 bp, Arabidopsis thaliana landsberg
atgtttcagaactggagacaaaactttcagaacaggccaagattctctctaatcttcaacagaaagtcgatgacttggcagcaaaggtgtgcttttgtttccccattgaagagttatgttttgactcttaactacagaactcatttactgtttcatcagacttaatatatttcactcagcttattacttatcgcacgtttacatgtaaactgcatataccaattgcttaacattagctcttgtttctctttataagtagtctctgattctgatgtagccaagacttgaacttcataatgtaactaatatgtatatatgcatactcaattcctactacttaatgacttgttgatagaaggaaacagtcatatacataattcctactacttattgacgttgatagaaatatgtctgttttctcctttcagcatgcttacaacccagatgaagaatatactgaagtggaatctcaactaagggctcgtttagaatcgtttcttgaaacagctagggcattcaatacaatctacacaaaggtatttctttttcatactaactcataattctctctccctatcaacctagattagctagaagtaaaatgcataagttcagcttttttcttgcgaacacaaaatgcagactctgactcttagatgctgcttccatgtcgcaaaaaatgcctctgaatatcttatgatctgactatctaaaacagaaactgaaacataagccgatgtatctttatcactatgtttggacttttttcaggaaaatagcccatggacgcatatgatggaagtgcctcagcttcatggttttggtcctgctgcagaccgcttactagaagcatataatatgcttttaaag

SEQ ID NO: 184869 - DNA, 20 bp, Arabidopsis thaliana landsberg
atggcagcaactgagatcag

SEQ ID NO: 184870 - DNA, 1961 bp, Arabidopsis thaliana landsberg
atggtcttcttctttgtgcagacgaaggttttgaacttgattctcttttgcagtcatactctaatggattcttcttctgcttccctccttaggatctgtgctgctgcaatcacgattttgggtacggtttcatttctgatttatacaaaattcatcagatccaatccgcagaagaagaagataacggcttcgtctcgcaattgggaacacaatgtgttctcgagcttcagctctgtagatgtacccaaatcctttctcagtaggattaggaaagagttaagaagaaagggtttcgagccactaatcgataatgaaaccgagaggtgcgtgtcgatcggacctgagctcagaaacgcgattagtgtctcgagaatcgtgattgtcgtgctctcaaggaactacgctctctctccgtggtgtctcgacgagttggtggagataatgaagtgcaaagaagagttgggtcaaagagtggtgactattttctataatttggatccaattgatgtattgaagcagactggagattttggggataatttcagaaaaacacgaaagggtaaaacagatgaagacatttggaaatgcactagagctttggcggaattgcctagagtctataaacttaccagccgcttgttagtcttcttaatctttcttaacacatgaaagtaattcacagttttttaatatgtgtttgatgactatgtttaggtccataaagattgatgatacggctatgaacaagcacagagaagaatgtgagagaaaaaacgccgaggacattgatagatggattaaagctttggagcaagtggccacaatcgatggtttccgttcatgggactggtcggtttttcattaccacttgcctcttcttaatgctgcatcaaacaagtttttttaagtgtatgcgaattattcatgactatttatttactatatgtttagggatgacgaaaaggctacggtcgaaaaaatagctaatgatatttcgagtataatgaatacttccactcaatcaagtgctttccaaggcttagttgggatggaagctcatatggaaaagatgaaagagctgctaggtctggactcagataaagtgagactgataggtatttgtggtcttcctgggagtggtaaaaccaccatcgctaaacgtttataccaacaactccttcctcaattcgaattgagtactatcattattgatatcaaaggatgttatccaagaacttgctacaatgaggacgacaggttactgctgttacaaagccatttactgtctcaactattaaatcacaagtgtactggtgagattcttcaattggaagctgcacatgaaatgttgaaagacaagaaagtgctactcgttcttgatgacgtggacagcataggacaattagatgccttggcaaacgaagctcggtggtttggtcctggaagtcggattatcatcacaacagaaaatcaaagacttgtgatggctcataggatcaaccatatttacaaagtagaattttcatcaactgatgaggcttttcaaatcttcggtatgcgtgcctttggtcaaaagcatccctataatggtttctatgagctttctcgggaagttactgagcttgctggtgggctccctttgggattgaaggtcatgggctcgtccttacgaggaatgtccaagcaggagtggaaaaggacactaccaaggttaaggacatgccttgatggaaaaattgagagcattttaatgtttagctacgaggctttaagtcatgaagacaaagatttgtttctttgtatagcttgctttttcaactatcaaaacattaagaaagtggaaaaacatcttgcggatagattcttggatgtgaggcaagggctttatgtcttagccgaaaaatctctcatacatataggcacgggaacgatagagatgcatacttcgctagtgcaactag

SEQ ID NO: 184871 - DNA, 254 bp, Arabidopsis thaliana landsberg
gtatccaaactagttctagttttcagattctacgctatatcagccgaattccccgagttcagattctacgctatatcaaagccataaatggacgaacaaaaaacactaatgatcaaatcatgaaaagatcagcttctcaagcattgtgcacaaaaaacatgtacatgcttcaagacgtgttgaataaaacttccacatgtgtccgaactctaaatgagcgtgaacatagaaagttactcgaaaaagaaagataa

SEQ ID NO: 184872 - DNA, 117 bp, Arabidopsis thaliana landsberg
atgtctttgagcgacatcggctgtgacaaacttcttagcaatatgttgaaccttgccatagctttggacgacaggtcctcgttttctttgctgttcaagaaaccagaccgtgttacg

SEQ ID NO: 184873 - DNA, 340 bp, Arabidopsis thaliana landsberg
atgattcgggttaccggcacggcggctccggctatgtctgtggtgtttccgacttcatggagacaaccggttatgcttcctctccggagcgcaaagaccttcaagcctcacacatttcttgatcttaaaggaggcaaagagtacagtacaaagtacaaacatctctctaaaatttatatttgcttctctagtgtaatcgtttttggattcaatgttttgaaaaacgttcgatattgcagaatgagtgagttccatgaggttgagcttaaagttcgtgattatgaattggatcagtttggtgttgtgaacaatgctgtttacgcaaactactgccaacacg

SEQ ID NO: 184874 - DNA, 223 bp, Arabidopsis thaliana landsberg
ggccaaaaacgaattaattataacagatgaaagaaaaactaacggcgtagaggatggtgaaaagctcccaaccggagtgaaaaacccaagcctgagaatctctttcacagaaagcagcaatgatcaagaactgaatgattccgaagaaacaagtgtaagacgtaaccgagagcctcgctggataagacttaagaaccggagcttggaaaacaagccagcctga

SEQ ID NO: 184875 - DNA, 1918 bp, Arabidopsis thaliana landsberg
atgagactgagacggctgccgtggacccagtcgatcctgagccgactcaacctgaactcgaggtggccaaagatccatagtggttgtgtccacttaaagggggttgtccctttttattaacaaactcgaagtttatttttcaaactattttcatcgcctaagtaggctttttattttctgaacaagtgttttgcctgaggaggcttttaaacctttttaagaccgtgatcccaagagggtttctgcaatatttaagtacggatttgcaaaggccatcttttaaatagcttctttgtttaaccatgtggccaagttgtgagatttataggctgatcaaacctatctcttaaaatgtgagtctgaactcgttttaaatccgcgaattccccaactcgggttcggtcaattcgacttatttactgggcttgggccttaatcgtttttcttttatttaataaattgtttgtctttaatgcgacggttgccatttctttcctcggaaaatagggaaagcctcacgcctctaaggcaataattgctataataattaattttgtggtttcgagaaaaaccttaactctctataaaaaagagcacaaactgtcattagtgtcccaaaatatgatctcagaaatttacttggtaaatacttcaagaatggaaaacgaaggatcctccaccatatgtcctcttgaccctagtagccgactgattctgtccggcgatggcttcgagcccgccggcgtcctctttcctcacgtctgctttcacttcccctcgaaggataagaaagaggcgtacaattttatggataaggtaggtctcttactctttttcttaccgaagtgattcctactcatattaacgctcgaggcccgaattgcccgtatcgaaaggaaggtgagggccatggagagcgatcccttccaatgggaatggaggaacttagactgtgtggcgaagatcccgcacatacttcggatgtacctccgtgctcgaggtcaagtccccggacccgtaaacgctccggtccaagtgatcatgtctgacagtgaaaaggatgatgacgaggaagaggacagcacccttggaagcgtgtgaagaatgaacccgaggtgaatgtcaagaacaaggcatctaccttgaactccgaaccggcgatgaaggagcctgttcccgagcctcttccctaaatgttccccgaaacttgaaactctttttttttattttcgtatggactttcctctgggcttcgacccatttttatttaaggaagcttccctattttgcttgattccacaaatatttgttttggagatatgctttgaatgtagggcgatgagagcgacgtaaatgcttccgcgaatcactccggccttgaatggaatcgcatctttgaaagttacgaatccttctataaattgattctctgtgttttctttattcttcacctacccttcgtttttccttttgtgtagttatggcttttaaccatcgatgctcggagtccatgccagacttttccagggttgggatgatcgactgaggagatgccgaatgtgtcggacagaggacgctccccacttcgcaatttcagatctcagatcagagctccatgtgcattaatcaaggatctttcaagcagagatcaagaaattgcaatggccttcatcaaagcttttgcggctcagcaccaaaagcgttcatcaaaaaagaagaaacttcgaaagaaaatcaaccagatgctgcggagagtcaccgtgatatcaagggagctacacaccccaactcgcatcccggggactggatcgagcttggaatcaccgaatttgctcgcatcccggattgtatgatgcccatccttgatcttgccaaccgaggagtcaaagtattttacaagacgagaaagatttcctag

SEQ ID NO: 184876 - DNA, 1087 bp, Arabidopsis thaliana landsberg
gttctgcagacgttctcttctgaaagaatttatagatgaatcacttattgatagaattcccggtcgccaaaatgaccgtaaaacattgttaggagagttgaactggatcttcactgcagtcacagacaccattgcctggaatgtgcttccacgcggtacttcccaaactttccccctaatgaatcaatgcaaaattgttgacaaaaaatagtatcaagaccaaactctcaagtttgacttcttgtttgttttctccattcctcatgaagttagttttaccccacagaacttttccagagattattcagacaggacttgttggttgctagccttttccgaaatttcttactagctgagaggataatgcggtccggaaattgtaccccaatatcacatcctatgctacctcctacgcatcagcatcatatgtggtattggacgttatccctagtttgcattttgatgaattgtgtgtctgagctctttacctctgctaatagctgttttccagggatgcatgggacatggctgctgaaatctgcctttctcagcttcctcaattttttctggacccaaatacggagtttcaggtttgttttgtccattattatatttccttgtaattgtatgatttggtatgatgtctgtcttgttgataatgcttgttactctcctttatctagccaagttcatttttcactgagcaactgacagcttttgaggtctggctggatcatggatctgagcataagaagccaccagagcagttacctattgttcttcaggtgccacctgaaccctaaatttacccctcctgtgttttaaaagaaggcccctatcttatggtccatgagaaactattcatatctatttgtcattcatcgacactgcttctttcttattgatgatctagggagcaatcactggcttcattcttcctcttccatctaatatctatatatatcctaccatcttagcttacttggaatctgattcgtatcaggtcttacttagccagtgccatcggtatcgtgctctggtgcttcttggaagatttcttgatatgggtccttgggctgtcgatttg

SEQ ID NO: 184877 - DNA, 642 bp, Arabidopsis thaliana landsberg
atgaatactattacagtaattaaaaaaggtaagtcagccgtgtaatgttcgaactcaactaatcagccgtatcgtttaataattcggttgtaattgcatgatattatagtaattaatcttttgctaataagtcaggcttaacaaggccaagttatccgctaatccagctctctacggctgatttatgacactcgaaaataactcagccgtaacgacatcccataactaaggcatctttgataactcagccagccggaaaatgataaattagccgtgtcgaggaaataacttagccgttttctcataactcagccataacgttgtgtgggttatgcttgaaattctcataactcagacaaatttcattaactcagccgtaacgtaggctggattatctcataacttagacatattttataaatcagccataactatggctaaattatactcataattccgtcgttttgtcataactcagccattttgtctttagtcaaacgcaacataccctaaactcagctgtaactgtcgctgtatctcctaacagtcgagttcattaatacacgtcaattatttctgacgtggcgacgcgggtttgctgacgtgacaatggcattccttgtaattatattttttctgtaa

SEQ ID NO: 184878 - DNA, 369 bp, Arabidopsis thaliana landsberg
acaaaacccatcgcttgtttaagtctatgaatccggagaatctgagaagttgggaagattacaaagctgcattcttgacacagtattttacccagtccaggacagccattatgaggaatgagatctcctcctttcagcaaaccggtactaaatcattccatgaagcttgggagcggttcaaagtttactatagggaatgccctcaccacggatttcgatatgccacattgatcaacactttctacatgggagtcgataaggactacaagatggcgttagacactactagtaatagggactttatgaccaagactgaggaggaagctacacaactaattgagaatcttgcacctagcgacgaccaccaca

SEQ ID NO: 184879 - DNA, 329 bp, Arabidopsis thaliana landsberg
atgagggacacccgcgagcagcctactttggaaaccaattcccatcaaacaacacggaatcagacaaaaatctgtgtacccttggaaagatctcgtttccaagattctagaacagctttaaatgctcaaatccaaggtccatagccaagtcaaacgaagaagacacagtcagacaaacaaaaacaacttcatccaattcacaactcttctgtcttctattaaaacactttctcctagaaatctgcttcagacttctttttctcttcttcataggtcacaaatacttctccacactgaagcatacaccatggtttgaaaagcagaactga

SEQ ID NO: 184880 - DNA, 2178 bp, Arabidopsis thaliana landsberg
  unsure (1)..(2178): unsure at all n locations
aggacggtttcagagcttccgggagatgttttcgtttgtgggtttcgtggtgttcctctctggatttttcctgggaattctcgccgtcttatccgctgaagctgcgggatttatgtatctcctgaagcgattgaatcgcaagagagatcgtattgagtcaaaacccgtctctgatccatctatcaaggattttaatcctcgcgaatccatcgatttctgtatcaacaaacaggtgatcgctcttaattcctctttttgagtttcttaagggttttgtttctgagagagagagaagaatgttccttagctaaagagattatctttttagaaaattcaattctgggtcttattctgaaatgtgtgcgagcatgctgcttccgttgtgagaattgaattcgtttcataggaaatttcgattgaggttgtagctaaagtggctcttagggtcgattgattattaaagtcaccaattttctttttagaccgtttgaattgtagttgaagttagggccatacaatatctgtttctgccattttgggtctctttctcaatgtctgtaatgaagttttgtttctatttccagggagtggtatggattttggagttggatgaaggtctgaagaactggatgaaggaaaagttaccaaaagagcagaagaggaagagaggcttgttggagattcatccacttcgaaagttcgcnnnnnnnnnnnnnnnnnnnnnnnnnnnnnnnnatgctgatagcactcagagtgagactaccgtttctttaataggttgcagtattgaggctgtttcaggctctgatctccctacaagaaaatggtaccacctctttctttatgaccctttttttaatgattaagtggaacttcttatgatcatgaagttttgttttcttttgtttcttagggccaaaaggtttccaataaaagttgaaagcaagatttctccagccttatacaagagaaaccaggtgttttacatctatctcgagacttcttgggaaaaggaatcatggtgtaaatcccttcgtcttgctgcttgtgaaaatcaggaaaggtttatttggtactccaccaaattgaaagaagatttccgtaattatgtgacttctcttaatgttgcatatccttcatttttgaaaccatcacttgggtttagttttgagacacttgacaaagggaacagaacggatggttcatcctcaaaggttcgcttgttcttgaagaaattttctagaaagcgatcaaatcgtgaagacaggaaaacctattcacatcatggaagtagctcaaggaagtgctttccaggaaagaataatatgacagatgatactgatgtgcctgttttttcacgttctgtgagccataacagtcatatttctggggtcagtcatctttctggggtttcagatggagactctgaagaaaaggttgacatggatgaaggaacattagcgttgaacttgctcatttctaggctatttttcgatctcaaacggaaaacaggagtgaagaattcagtgcaagcacgaattcaggtctgcactttttcatgattctgaacctttcatgaacttagacatttgaggtgatttgatttctataactaaacaaagatctaacattttggttttaaacagcggttgttatctaacatgaggactccgagctacataggcgaactaatctgctccgatgttgacactggaaatctcccacctcatatacatgctacacgggttcttccaatggagatgagtggtgtgtgggcattcgaactagatattgaatactctggtgacgtggtgattgacgttgaaacacgggttgacatccgtgaggtggatctgcaacaaggcataaccgagacaaggttgcagccaagttcttcaggggtagtcccgtcaaatttcgctgaaggtgttgaagattttgaaaagcaattagtcttccctgtggaaactgttaatgcaagagaagtgaaaaatggtgaagccaataaagcaggctagttcaatgtttacttaatgtggattaatgcagtcttttctagtttaacccacagagatcatgcgagcgtgattcctgttcaaaaccttttctcaaggtgataattacgattgatttcttaccatctttctgtggttgcagatgaatccaagagctcaagag

SEQ ID NO: 184881 - DNA, 143 bp, Arabidopsis thaliana landsberg
atgagttctgcatccgatgctggtgatgtcactatatccttcgacagcgatgagtttcaatccaatcagtggatggctacgaaaacagtgacgcggatggctgaattctctggcgatccggattttggagagagaacagcgag

SEQ ID NO: 184882 - DNA, 410 bp, Arabidopsis thaliana landsberg
tgaggacgggagcgaaaacctcttcgcgtgcgctggggcggccgccattcgccggtacgcgactggtgcggaggtggccgctgtcgtcgatgcagaggcggtcgcgccgctggtgaggctgcccactgtagaggtggttgcctccactggcgagaccgtcagcgccatctaccgtcggacctccgactctttggctttaatggcctcgttgtcacccccacaggaagacgggggtgaggaccttttcgcagggcggaggtcgttgtcgctgctggtgcaaaggtggtcgctgctgccggcgatccgtcgatgcagaggtggtcgccaccgttggtggggctgtccggagcgagcttccagcacgactctcgttggtgcaatgtagtccattcctgcagaaatcgagctag

SEQ ID NO: 184883 - DNA, 444 bp, Arabidopsis thaliana landsberg
ccggcaagcgcattgcttacggcgccgcggccatcgctgctggcggctttaataagcctgccaaacttggtgttcccggttggcgcattggtgggtttcgacgcaggctttttgaatgcatcacgcatcaagggcagccacgcggccatcaagagtggcatgttgtgcgccgaagcagtgttcgatgcagtcaccaacaacagatcacacgatgagctggacgcctatcccaaggcattccatgattcctggctgtttgatgagctttatcgtgcacgcaacttcaagcagtggatgtccaaggggctttacacgggcaccatgatggtgggcttcgagcaaaaactgttcaatggcaaagtgccttggacactgcacctcaagcacgccgatctcgagtgtttgcgaccggcttccgagttccagaaaagaagcatatcccga

SEQ ID NO: 184884 - DNA, 30 bp, Arabidopsis thaliana landsberg
gtctcagacgagattcttcggcaaatttaa

SEQ ID NO: 184885 - DNA, 1301 bp, Arabidopsis thaliana landsberg
atgaacgcgtactctaaaccggagtacatttctaacatagaaaatgtactaaaggggaaaccagagatgcagtttcttctcgattctccatttggggaactttttaaaatacccaaaaacaaggcatctttcaatgctaagcttgtccttggactaatatgccgtcagttagtgacaaagaaggtgaatgagatgtggattgtattcggcggtcatccaattagatttggattaagagaatttagtatcctaactaggctggaatgtgggaagtatcccaagaagaaagacgttgatgatgttatcagtgtgaaacctgagtgtgagagtgtttggaagactctgtttgatgagaggtttggggacacggttccaacaattgctgatttggtgagctggctgcaggaggaggaaagcatggaggggtggaagcaactggcactatctcttattattttggttgacggtgtggtagcggcccacagtaaccccaacaggcctacttcgaagactgtcgagatgactaagaacctggagttcttctgcaaatacccatggggaagggtgtcctttacccgtactttggggaggatagcaaatttccaaactccttacgatgctcaacaactaataaggggtttacttgtagggtcttatgcactccatggcttcccattagctctccagcttttagctttcgaaacaatcccatcaattgctaagctaggacctgatgatgtacctaacaggacatttgctgagaggtctatccatcgtcttgcctctctgcgagcaatctgaacatctcgcattttggagtgtgaggctgctgatgaggtgtgttaaattgtgtatgtacgtacataataagtaaatgtacattatctatggttaacatacttatttgtgtaggttgaggtcaactatattgtgaaaccagctgataatgtttgtcctccatctctttcatgggatgatgaagttgatgatccaagggttgattacattgaggcactgttgatagatgggcaccagtggcaggaggatgaatgggttggaggctatgctagagtaccaaagcagtcgcgcccaccacacctagaagagacaggtaagtataagtataaaggttttttacaaatttttttggtattacacccagaagaaaaccaattaatagcagcaactggtctattatagatgttaagaggaaacgaaatgcaccgggcccgagccctaaagaacctgctatgaaaaaacagaaatctgaaatggactgtgataaagaacgagaatgctga

SEQ ID NO: 184886 - DNA, 100 bp, Arabidopsis thaliana landsberg
tcaaatgggtcagcaagtttacgtgttgatccctctgaaaatattggctctccagatggatcggtcttccatgcttcatttcaaataaaggaaacataca

SEQ ID NO: 184887 - DNA, 63 bp, Arabidopsis thaliana landsberg
aattgaagaagccatcacgagccgtgacattagaagctctacgagaactgattggtgaacaag

SEQ ID NO: 184888 - DNA, 271 bp, Arabidopsis thaliana landsberg
agatgtgcggcgagtacaaggccatccgctcggccatgcccgaggagctggttccccagatcccgtacgtgaaaaagttcgtggagcttatgggtctgcccgcgttcgagcgccccggcttcgaggcgaacgacctgatcgccactttcgcccaccgggccgctgatttatccaaagagcatgcggacgtggccatcatttcttcggataaagacctgatacagctcgtgggcgggcatatctacctcttcgacaccatgaagaaccagaa

SEQ ID NO: 184889 - DNA, 158 bp, Arabidopsis thaliana landsberg
ttatttttgcggtttggttttgcgaaaaaagaaacaattttttacgaagaaaacgaagaagaagaacgagacagagagattcgagagagaattagaaatcagttcaaaatttattcatccacttcttcgttttttgacattaccgttcgaattgttgg

SEQ ID NO: 184890 - DNA, 510 bp, Arabidopsis thaliana landsberg
ggtctctttttctatttgaagattgactggcttaacaagcttattggccatatgtggccttatatggacaaagtaagtcttcttcttagctttcatgtttgttttattgttgtcttttatcttcttcaatactgtaacttgttaaacaatgttccttgtaatgtttatttcaggctatctgtaagatggccaagtcaatagccaaacccattatcgctgagcaaattccaaactacaaaatcgattcagttgaatttgaaatgctcactttgggttcattaccaccaagtttccaaggtttctacttttgtttaatactcatagatacacatttcagttccttaattagttcatgaatgtttcgctgtgatattatcactatcattcgcaggaatgaaagtatatgcaactgatgacaaagaaattatcatggagttgtcagtgaaatgggcagggaaccctaatatcattgttgaagccaaagcactagggttaaaagctactgatcaa

SEQ ID NO: 184891 - DNA, 140 bp, Arabidopsis thaliana landsberg
aagaaatttcaaaactttcaaaagctcaaatcttttttccctttttcgattatattcatcgtcgtcgagaccggagatatctttatctgatcaaaagtttcttttttccgatcgtcttttctctcccagagaaaaattaa

SEQ ID NO: 184892 - DNA, 1637 bp, Arabidopsis thaliana landsberg
atgggtctctctgctttctacggtactcccaagccggaatccgaagccatcactctcatccaccacgccatgcactccggcgtcactttccttgacacctccgatatctacggtcctgagaccaacgagcttctcctcagcaaggttcgattttgataactccccttttgatattgttgaatatttgagttcgtgaattagatatgggaactggacttgattcgctgagcttcataaatgatttggatgttgaaagtttggatttttgtcaggctctcaaggatggggtgagagaaaaagtggaacttgcgaccaaatatggaatcaggtatgcagaggggaaagtagagtttaagggagatcctgcttatgtaagagctgcttgtgaggctagtttaatgcgactagatgttgcctgcattgatctctattatcagcatcgaattgatactcgtgtccctatcgaaatcactgtaagccctcttcttgtcaatcttccttcatggttttgcaactttcaaatgaaatggaagttatatagttcttctccgtgaccttcacacctttggctagggacatgttgggtataatatagagtccaaaagtttagctttcactttcagaactatgttttctgcttgggtcactctctctgaaattgctagcttattcatgaagaaccgttgtctggtgatatgatcttatcatcccttaagaatttttcgtttgaatagactcttttaggtttggctctgagctctaattggtttgccacacttcatgacctttatagaaagccagcaccttttgctgaacttagcaatttcttttgtttgtcaatttcaaagattggagaactgaagaagctagtggaagaaggtaaaataaagtatattggtttgtcagaagcatcagcttcaactatcagaagagcacatgctgttcacccgataaccgctgtgcaaatagaatggtccttatggtcgagagacgtggaagaagatatcattcctacctgcaggtatcaagatttcatttcatcctccttttttgatgcactatctatcaaatatgtaacatcttctctctctctttcttcagggaacttgggattgggattgttgcatacagtcctctaggacgaggtttcttcgcatctggacccaagcttgttgagaacctagagaagaatgacttcagaaaggcaagtacacagcctttatatgacttgtttgttgatgagccttagataagctgtggattaatcaaatggctttatataaacccacttatttcaggctctaccaagattccaagaggaaaacttagaccacaacaagattgtttatgaaaaagtttgtgcaatatcggagaagaaagggtgcactcctggacaactagccctggcatgggttcatcaccagggagatgatgtttgccctatcccaggaaccactaagatcgagaacctcaaacagaacattggagctttagcagtgaaactcactccgcaagagatgtatgagcttgaggccattgcccaaccaggttttgtgaaaggagatagatacagtaacatgataccaactttcaaaaacgctgagactccgccattgtctgcttggaaagccgcttaa

SEQ ID NO: 184893 - DNA, 127 bp, Arabidopsis thaliana landsberg
atgcacctcggaggaggacaacaaggaattcagaacatgggaattttgccaccaccaccaaagaggcaagcagtgggacctcgagtgtatgcactagaaggtcaagatggtgcagaaccgatcgctg

SEQ ID NO: 184894 - DNA, 881 bp, Arabidopsis thaliana landsberg
atgaaggccacatttttcatcacatatatcatggtcgatggttgggctggcattgcagctgagatactcagagtggttccattagtcatctttcacctgaaaaacacgtttttggttaagacagaacaagacaggcagcaagcaatggatccaggtcatctggactttgcaacatctgaaccacggattcagttctatttcttgctaggcctcgtatacgctgctgttgcgccaattctccttccattcattatcgtcttctttgctttcgcatacgttgtttttcggcatcaggtaccttaaaagctaaaaatatcatagtgttcttctaaagcatacctgcaatatatgcaataatgttaatatgtcttatctactgctgcaaggttattaatgtctacgaccagaaatatgagagcggggctagatactggcctgacgtgcatagacgtttgatcatatgtctaataatatcacagcttctgatgatgggtctgctcagcacaaagaaatttgcaaaagtaacagctctgcttctccctcagcctatcttaaccttttggttttacagatactgcgcaggacggtttgaatcggccttctcaaaatttcctttacaggtgatgagtcaaaagctcttgctgcaaaaaaaagacttgtatacaaatgtttcaactgattttttgggattgaatatatttaacaggaagcaatggtgaaggatacactagaaaaagcaactgaaccgaatctaaacctcaaggaatatctgaaagatgcttacgtgcatccggtttttaaaggcaatgattttgaccgaccacgggtagtcgatgaggaggaaagtaaccctcttgtaaggaccaagaggacttctcaag

SEQ ID NO: 184895 - DNA, 143 bp, Arabidopsis thaliana landsberg
atgctctttctaagtaatgtgttcacaaatgatgtttttgcaaatccaatggaggcgtattcttcaatttcttcgatagacgacgaagcggagattttcagttcccagactgtcgatgtatatgttggttttgtaatcggaag

SEQ ID NO: 184896 - DNA, 304 bp, Arabidopsis thaliana landsberg
atggccaataaaccatggagacaactttctcaatcagtattggattatgacctatctggtttgtcaactttcttgttctatggttgattatagagttgaattttaactttcacacagtaatatgttatatacctatttatcaaatatttttttttccgtcaaggtggattagtgaagagaatgccgtctcttgctggatttggcaaagatattgttaaaaaatcttataaggcggttttgatatatacaagatatgaaatacatgatcatgagttcaaggccaaggtcctatcccttgataatg

SEQ ID NO: 184897 - DNA, 2345 bp, Arabidopsis thaliana landsberg
  unsure (1)..(2345): unsure at all n locations
atgattcttggtgtttgtgctttcgtctctttgattgttgggattgcaactgaaggatggcctcaaggatcgcatgatggtcttggcattgttgctagtattcttttagttgtgtttgtgacagcaactagtgactatagacaatctttgcagttccgggatttggataaagagaagaagaagatcacggttcaagttacgcgaaacgggtttagacaaaagatgtctatatatgatttgctccctggagatgttgttcatcttgctatcggagatcaagtccctgcagatggtcttttcctctcgggattctctgttgttatcgatgaatcgagtttaactggagagagtgagcctgtgatggtgactgcacagaaccctttccttctctctggaaccaaagttcaagatgggtcatgtaagatgttggttacaacagttgggatgagaactcaatggggaaagttaatggcaacacttagtgaaggaggagatgacgaaactccgttgcaggtgaaacttaatggagttgcaaccatcattgggaaaattggtcttttcttcgctattgttacctttgcggttttggtacaaggaatgtttatgaggaagctttcattaggcactcattggtggtggtccggagatgatgcattagagcttttggagtattttgctattgctgtcacaattgttgttgttgcggttcctgaaggtttaccattagctgtcacacttagtctcgcgtttgcgatgaagaagatgatgannnnnnnnnnnnnnnnnnnnnnnnnnnnnncttgtgagacaatgggatctgcaactaccatttgtagtgacaagactggtacattaacaacaaatcacatgactgttgtgaaatcttgcatttgtatgaatgttcaagatgtagctagcaaaagttctagtttacaatctgatatccctgaagctgccttgaaactacttctccagtcgatttttaataataccggtggagaagttgttgtgaacgaacgtggcaagactgagatattggggacaccaacagagactgctatattggagttaggactatctcttggaggtaagtttcaagaagagagacaatctaacaagttattaaagttgagccgttaactcaacaaagaaaagaatgggagtagtcattgagctgcctgaaggaggacgcattcgcgctcacacgaaaggagcttcacagatagttttagcggcttgtgataaagtcatcaactcaagtggtgaagttgttccgcttgatgatgaatccatcaagttcttgaatgttacaatcgatgagtttgcaaatgaagctcttcgtactctttgccttgcttatatggatatcgaaagcgggttttcggctgatgaaggtattccggaaaaagggtttacatgcatagggattgttggtatcaaagaccctgttcgtcctggagttcgggagtccgtggaactttgtcgccgtgcgggtattatggtgagaatggttacaggagataacattaacaccgcaaaggctattgctagagaatgtggaattctcactgatgatggtatagcaattgaaggtcctgtgtttagagagaagaatcaagaagagatgcttgaactcattcccaagattcaggtaacttttcaagatttagatattttttgctttcttgataagtctttaaaccataacttttttttttcttgacaggtcatggctcgttcttccccaatggacaagcatacactggtgaagcagttgaggactacttttgatgaagttgttgctgtgactggcgacgggacaaacgatgcaccagcgctccacgaggctgacataggattagcaatgggcattgccgggactgaagtgagtatcatatatccaaataagtctaatgttattatgcaaacgactcaaacatttttttaaactcttttaggtagcgaaagagagtgcggatgtcatcattctcgacgataacttcagcacaatcgtcaccgtagcgaaatggggacgttctgtttacattaacattcagaaatttgtgcagtttcaactaacagtcaatgttgttgcccttattgttaacttctcttcagcttgcttgactggtaagttaaagaaattagctgattctgtttttattcaaattttcatttttttacaattatattgtcttcgtttctatctttacttttgtttctaaattaattcacaggaagtgctcctctaactgctgttcaactgctttgggttaacatgatcatggacacacttggagctcttgctctagctacagaacctccgaacaacgagctgatgaaac

SEQ ID NO: 184898 - DNA, 111 bp, Arabidopsis thaliana landsberg
atgaatcccgttatcggccaaacagcattgcataccattgacttagaggccagatccgtggccgggctggctgcttatattgatgatgctttcagcaaaaccgttgaactg

SEQ ID NO: 184899 - DNA, 92 bp, Arabidopsis thaliana landsberg
gtccattctgctgataggattcttgagctgctgaacttggggaacagtagacgaaaaactgagagcacagagatgaatggaacatcatcaag

SEQ ID NO: 184900 - DNA, 103 bp, Arabidopsis thaliana landsberg
atgagtgatcggagtctgaaaaagtctctccccggtaaaagcaatcgccaggcggatgagaatttggatctcttctcagtcaaccgtggaacttctttggatg

SEQ ID NO: 184901 - DNA, 4276 bp, Arabidopsis thaliana landsberg
atggatgagtctgacttgacggtttacatcaaattgtttaaatatctgtttcgccttatgacagctgcagtctgtgagaatgctgttaataggatgaaactccacgctgttataacgtctcagacattttttgagcttttggcggagtctggattgctgtgtgttgagttggaaaggcaggttatacagctgttgttagaacttgcacttgaagtggtggttcccccgtttttaacatcagagtcaacggcccttgctactataccagaaaatgaaaacacaacttttgttgtaacaaccccatcgggccagttcaatcctgacaaggagagaatttacaatgcaggtgcggtcagagttctgatccgttctttgttgctttttagtccaaaaatgcagctagaatttttgagacttctggaaagtcttgcacgtgccagtccattcaatcaggaaaacctcacatcgattggtaagaaccagtccattcttcaatcaattttatgatccctatcgcttttggtctttccgttttatctctcaacttatctctttctcgtcatgaattgtaattgaacaggttgcgtggaactcttgttggagatcatttacccctttcttgcgggttcatctccatttctttcttatgctttgaagattgtggaaattcttggagcgtacaggtaaagaatgccctgcattattattaaaaaatttaaatatatttccaacgttactgctttcactttactatctgttttcttagtaaatagtttttttgtgtgtgtgtagattgtccccatctgagctccgaatgctgtttagatatgttttgcaaatgaggattatgaattcaggtcatgcaatagttggcatgatggaaaaactaattctcatggaagacacagccttggaacatctatctctggctccttttgtagaattggatatgagcaaaactgggcatgtttctgttcaggtgtccctgggagaaagatcttggccgcctgctgctggttattcattggtttgttggttccagtttcgtaatttttttgacaacccaaggaaaagaatcagaagcctctaaagctggcggttcatcaaagacgcgcatgtcaagtgcccaacaacacgagcagaacattttccggatgttttctgttggtgctgtaagcaatgaaagtccattctatgcagaactttactttcaggaggatggtattctgacccttgccactagcaattcacattctttgtcgttttctggattggagattgaggagggcaggtggcatcaccttgctgttgttcatagtaaaccgaatgctcttgctggactcttccaagctagtgttgcatatgtctatcttgatggaaaactaaggcacacgggtaaattggggtactctccttcgcctgttggaaaatctttgcaggtaacagttggaactccggctacttgtgccagagttagtgatctgacatggaaaacacgctcatgttatctttttgaggaggtgctcacatcaggttgcattggtttcatgtacattcttggtagggggtacaaaggtcttttccaggatgcagacctcttacgctttgtgcctaatcaggcttgtggtgggggcagcatggctatcctggactcattagacactgacatgacttcatcgtcgaatggacaaaagtttgatggaagcaatagacaaggtgactccaaggcagatggcagtggaattgtctgggatcttgagaggttgggaaatcttgcctttcagttacctggcaagaaactgatatttgcatttgatggaacatgctcggagttcatccgtgcgtctggaaatttttcactcctcaatctggttgacccattgtctgctgctgcttctccaattggaggtatatagtagtcttaaaaactcttcttcattttgtacatattcatctgaatcgatttcataatttgattcattcttctttttcaaatggttcaggaataccacgttttgggcgtctggtaggaaatgtatctatctgcagacaaagtgtgattggtgatactatccgacctgtgggaggaatgactgttgtacttgcgcttgttgaggctgccgaatctagaaatatgctacatatggctctttcattgcttgcatgtgcgcttcatcaaaaccctcaaaatgtgaaggatatgcaaaccataaggggatatcatttactagctctgtttttgcgtcccaaaatgaccctgtttgacatgcagtctttggagatattttttcaaattgcagcatgcgaagctttgttttcagagccaaaaaagttggagagtgtacagagtaatattactatgccacctacagagactatattcgaaaacagttacgaggatcttagtctttcgaggttccggtacgatagttcctcagttgggtctcatggggatatggatgacttttctgttcccaaggattcatttagccatctctctgagctagaaacagatatccctgttgaaacttcaaactgcattgtcttatccaacgccgatatggttgaacatgtccttctggactggaccctttgggtaacatcccctgtttccatccagattgctttacttggtttcctggaaaatttggtttcaatgcattggtacaggaatcacaatcttacaattctgcgcagaatcaatctggtagaacatttgttagtgacacttcagagaggtgatgtggaagttccggtcctagaaaaattagttgttctgctaggatgcatcttagaagacggattcctgacttctgagcttgaaaatgtcgttaggtttgtgattatgacatttaacccacctgaagtgaagtcacgaagctcattgttgcgcgaatcaatgggaaagcatgtaattgtgagaaatatgcttttggaaatgctcattgatcttcaggtaaccattaaagcagaggaccttctggagctgtggcataagatagtctcgtcaaaattgataacatacttcctcgatgaagctgtgcatcctactagtatgaggtggatcatgacccttcttggtgtctgtcttgcttcctctccgaacttttcccttaaatttcgaacaagtggaggttatcaggggctgctgcgggtacttcaaaacttttatgattccccagacatatattacatactgttctgcttgatctttgggaaacctgtttatccaagactaccggaagttcgaatgttagactttcatgctctagtgccaaatgatggaagctatgtggagttaaagttcatagaactgttggattcagtggtggcaatggctaaatctacttatgacaggttgatcatgcaatcaatgctagcccaccagtctggaaatctttctcaggtgagtgctagtcttgtggcagagcttatagagggggcagaaatgactggggagcttcagggggaagctttgatgcacaaaacatatgcggcacgtttgatgggtggcgaagcgtcagctcctgctgctgcaacgtctgttctccgtttcatggttgaccttgcaaagatgtgccctcaattttctactgcttgcagacgtgcagaatttgttgaaaattgtgctgatctttacttctcctgtgtcaggttggcattacagacctactgatatatgtttccaccgcctagtaaatattgacgatatttttaggtttttgaaaataaataaatttttctgcatagattttatctttcgttggacagactatgtgaacagtattttgttttagttatcatatcttgttcaatgtctgagggtcttagataagaccaggatattttcatgatgttggatttagtgtgaccctgcaagatgtttatttgcataacttgcgcctaaaggctattttgtgctgtagggctgcttatgctgtgaagatggcgaaacagctctctgtgaaggcggaagagaagcatataaatgatgctgacgatagcggctcacaaggaagcttgcctcatgatcaggatcagtccactaaaacctccatcagtgttggaagcttccctcaagggcaggtcagtcttggttccgaagacatgtctttacctgcaaattatgtggttaatgataagatggagaacattcttccaccaccaacacaggacacaagtaaatcattacaaggtgttgaagatgttaagaaacaagacgatcatcatgttggcccttcagcttccagtgaaagggactttcaagattttacag

SEQ ID NO: 184902 - DNA, 358 bp, Arabidopsis thaliana landsberg
gggacaggaagcgcgcataggcccgaacccgtgcgggaccccaagccgtctgcaaccaaaaaggccaccggagcccaaccggggacggtcaacaaagcccgacacgccacataaaagttggaaaggcgagggcgagcgcccccaagcccaacatggaggacccgaagaaccggccgagcccacagccgaggaaactcgggggaaccacacagagggcgatagcccacgccccaacccaggagacaacgaacgacggcagacgctgcgggcaccaccagaggagcgcggcataccccgccaggcaagacaccactatcgggcccgacaggagcacacaccgaaccctctcaaagatcag

SEQ ID NO: 184903 - DNA, 433 bp, Arabidopsis thaliana landsberg
atggtggaatgtaggatgcaaatgaaggggaaggtgatgggacagacaaaggtgaatgcaaaaggaagaacaaggcacaaatggaaatacctaattggggagaaaggaatcacttgtaacgatgctgacgaattaaccaggtgatgaaaaccctaatttttaaatagaagaactgaatcctataatgataatggatggtgatgaaaactaataaagagccccggcaaatcgaaaccctaattcttaatgacagaattagttttacgttttccttagaaggtttcctgggaagaaagggttcttgaagagggcaacgagcctgcgtcttgtagtgagaagaagtgttgttcatacctgcatccattatcaccaaacaaaaacaagaaaacagagcaaaacacacaaaagcgatgataaaagaaacgaatattaa

SEQ ID NO: 184904 - DNA, 583 bp, Arabidopsis thaliana landsberg
cgtcacaaatccattgcacgagccaaacacatgttttaaaccgtcttttgtaccgctcgaagcgagggtttggttcgtcggttgacacgaaccatttaaatgccatccgtcacttaagcgtgtcttcaccccaaaacaccagcggtgttaaccaacaagagcaaaaggagagagatctaattgagaatctgcccggacagccttcagttagttttagacaatatggcggttatgtgaccgtgaatgagtcagcaggtcgatccttgtactattatttcgtggaagccaccaaaaccaaaaagtctttaccccttgttctatggctaaacggaggtatgtatctaccatctagttctacttttttttgttttttcctattcgttgagaaatcatacaagtaacaaaattgatgaattttgtccacaaaacataaatattcatacacaattatatatatatctatttttaaaatatgcaggacctggttgttcctccctatatggggcatttcaagagcttggtccattccgcatatatggcgacggcaaaacactctataccaatccttattcatggaacaacg

SEQ ID NO: 184905 - DNA, 269 bp, Arabidopsis thaliana landsberg
atgtggaatcaatggatccactacatgaggatgcctgttactaaccagtttccttcttatatgtccatgtcctcatatcacaaacgacaagctttcggtgagatttgtttcgcccttttttacttgtacctttacagctaaactcagatatgatgatagctaattagatgatatgttgcagtgttgtatttgcagatgaatccaggcgggataacgatattcgggtggacagtagacaggcatttgataaacacaatattcttcattga

SEQ ID NO: 184906 - DNA, 1577 bp, Arabidopsis thaliana landsberg
gagacctgcatagaattggtggttattggtgaagacgggattgttgaatcggtgtgtgaacagtatgtatttggaacaattaaggatttggctgtcatacctcagagtagcaagctttattcgaatagtttgcaggtaagcattttccatttaagcacggtatactgtatttgattgatcaggtattttactccggcaaagattttttttaaattggtgacaaccaagctttttgttttgttagtaacaggaatgcagatctatatgatttgatatgtcaaccatctgttatcttttgcagatgggaaaagaccttctggctgttctttctgattctggaaagctctcatttctctcatttagcaatgaaatgcacaggtttagatcccatgtactcttatttatcccggaaacctaatgtcaccgttgctcatttcactgctgtttggtgtaggttctcgccaatacaacatgttcaactttctactccaggtaactcaaggattcaactcggaagaatgctcacaatagattccaggcaagttttcaaaaaccatgattttgttacttcattatcctattgatgacttagatactacttttaaaataaccataattgctagctgtttcttttttcttttgtatgttttggcctttgcccaagtactcactattcgattgttgagagaattgaattggagcgttcatgtttctaagccacaccttaatgttaaagcttacattttttgtatcttgaatagcaaccagtaattttgactcctgtaatgcattttgcagtggtctctttcttgctgtcagtgcgtatcatgaccgttttgctctgttttccctctcaacatcgtctatgggtgatattattcatcaggtattgatttctgccaccaacttcggatcatcttgtaacttcagtagacgggaggtttaccttttgttgtggcatgattgatattgataaagtggctaacattatatttaatttcttttattttagaggatttcttatccttctgaagacggagggaatggtagctctattcaagcaatatctggtactatttggagcatgtgcttcatttctaaagattttaatgaatccaaggagtatgctcctattcttgccattgttataaataggtattgaatcctttcaatttgagaagctctgttttcagttattgtgcctgcttacctcagtatttttctgatcgtataggaaagggtccctcatgaatgagctggctttgtttagatggaatgtcaaagaggaatccatatgtttaatatcagagtatgttgaaactggggctctggcacatagtattgtcgaagttcctcactcctctggatttgcctttctgtttaggattggtgatgttctcttaatggatctaagagatcctcaaaacccttgctgtctgtttaggacatccttagattttgttcctgcttcattaatggaagagcattttgttgaagagtcgtgtagagtacaagatggagacgatgagggctgtaatgttgttgtatgtgctttgttagagctcagggatcatgag

SEQ ID NO: 184907 - DNA, 74 bp, Arabidopsis thaliana landsberg
ctacaaaaatcgaaactttccgacgagttttgaacattaggacttcattcggcaagaagcattaccgtagtatg

SEQ ID NO: 184908 - DNA, 1378 bp, Arabidopsis thaliana landsberg
accagagagagagaactccaaactgagatatatcacaataccgtcaaatccactcatacacataccctaaatactcaaatcggagcagtgggagtacctcaatcgaacacggcgacgcgagacagtgaagatggcagagacgatgaaataacacggagaatttcgattggaaacggcgtgcttatgatcagcaacggagggaagattttggggaatcggcgacactcggcaatacagatcggtgaaggaaaaagcaaagaagatacaagtttttttagtcacgtaaaacggcacgaactctactttatcaattcaggaacagcgagtagttaaaatattgaattacgaaaacaccccttggttcagataaaatctttgtgatggccgcttttctcatttataacggataaaaaccgtaaacaatacacaagaacagaggctgacacctaaagcttactctctaactgcaatggctcacttcatagacctcaacagtctcaccaacactttaccgtctcttccgaaactacccgagagtcgtaaaaccggaaaatccagcgggtttgcttgcagcagaactgaagaatctcaagaaccggattcggtacagatcagaagacggatgacattaggatttgctgtctcaataggtccagccggaattctcggcgaaaataatgtttccttggcacaagacaatgggttttggattgatggtcctcttccaattcctcctatttacaacagtaagcgccattttatattcttgattgttttctttcttcaaatgtttgaacattttgagccatacaactattcaagatgagaattcgatttggtagaatcatttgatttccggttttgaattcgtcctcgatttgaatatacagatatcgtgaatgagaagacgggaacgagaacattcataaagaaaggagtgtatgtagcggatatcgggacgaaaggaagaatgtatagagttaaaaagaatgcttttgatctcttggcaatggaggatttgatcggaccagatactttaaactatgtgaaaaagtacttgaggcttaaatccacatttttgttttacgatttcgacaatctcatctctgctgctgcctctgaagacaagcaacctctcactgatttagccaacagattgttcgacaatttcgaaaaggtaagtgtactaatgaagtcctggttcgttcaaaccgaagagactattgtttttttaaaatttcttctcttttctgatatatcctatatgtttatttgttgttttcttggtgtttcgacacagcttgaagatgcagctaagacgaagaacttagcagagacggaatcgtgttataaagatacaaagtttcttcttcaagag

SEQ ID NO: 184909 - DNA, 483 bp, Arabidopsis thaliana landsberg
actaaagatcctcgtaaaaacaaccacaagattctaattgcggattccgacatccataatacgtacgttgtatcattcttaataacattatttgtaacttgggtcattttctataaaaattatttgtgtgctgagtctttctaagtttctttttttttggggtcaaagtttccatctaagattcttcaaaaacataattagtgtagatggctgcgtactcttaccagattagacagtagacaagtaagagcattgactgcctaccaaaggaatttgcccaatccaacccgaaatgttttcggagttcgttgcactttcttctagtaaattggtttaagagcagaattggacaggttcgagacacttgagtattgccacaaatatatgaaaatggcttgacaagcatattctgaggaacagtgggatgaagacagtgtttaaaaaacctcgtactcgtgtgctctttttttccctagactatga

SEQ ID NO: 184910 - DNA, 51 bp, Arabidopsis thaliana landsberg
gtaactattattcctcagcttacacggttccacatatcccggttttattaa

SEQ ID NO: 184911 - DNA, 782 bp, Arabidopsis thaliana landsberg
atgagtatcaatccgaccacaatccggcgagtttttcggtggtgtgtcgatgcctttccgctgaatatctatttaagtgagtctctttgttctttgattgtaatggactctcatctacatcgtcgattcgttttcgacatgaatttctttttgagagatgatttacaatcccgaatctaggatcctggagactcaaatgttggattagatgatggcaggattaagattcagacagatcttatcgttaaacatcatctccatctatgttcagcgagtattggcctctttctctcactcatggaagcaaggataaagttcgatgatgacgtcttttcattcttgtgctcgaaaatctttacgctaccaactgttctttttggatataaagattgattttatggatccaaaaatcccttgttaaacagattttccggtacgttatggtggctttggaggcagttaatcttactctgagggaataaaaaaatcatcgactacaccaataaaatcgctttttatcgaagtcatatgaagaaattacaaaatcttttcaattctggccattgaaatataccaacaaaggaatcgagattatggatctatcacgggtgatatttacaaccaatatcgaaccatcgcctaacgcgggtaatggaaatgtttgtgtggttagcgatgtaactgatggatcgcaaccctttgattttcagaaaaagttttggtgctatgtaaaaaagaagatagcccaacaaggagatcaaaatagaccggtgacgaaggag

SEQ ID NO: 184912 - DNA, 3798 bp, Arabidopsis thaliana landsberg
ggaagttgacaacgactgttgaagaaaaagaagcagtagattctgagcttgaattagctttgatgaagttaaaagaatcagaagagattagcagtaagttgaaacttgaaactgagaagttagaggacgaaaagtcaatagcactgagtgataacagggaactgcatcagaaactggaagttgctggcaaaacagaaactgatctgaaccagaagttagaagatataaaaaaagagagagatgaactgcaaactgagagggacaatggtatcaaaagatttcaagaagctgaaaaagttgcagaagattggaaaacaacgagtgatcagctcaaagatgaaacttctaatctcaagcagcagcttgaagcatcagagcagcgagtttcagagctgaccagcggtatgaatagtgcagaggaagagaacaaatctctatccttgaaagtttcggagatttcagatgtgatccaacagggacagaccaccatacaagaactaatttccgaattgggagagatgaaggaaaagtacaaggaaaaagagagtgagcattctagtttggtggagttacataagacccatgagagagaatcatcaagtcaggtgaaagaattagaagcacacatagaatcatcagagaagttggttgcagatttcacccaaagcctgaacaatgcagaggaagagaaaaaactgctatctcagaaaatagcagaactctctaacgagattcaagaggcgcagaacaccatgcaagaactcatgtctgagtctgggcagttgaaagagagccacagtgtgaaagagcgagaacttttcagtttgagggacatccatgagattcatcaaagagactcatccaccagagcaagtgaattagaagctcaactggagtcctcaaaacagcaggtctcagatttgagtgcgagtctgaaagctgcagaggaagaaaacaaagctatatcctcgaaaaacgtggaaactatgaacaaactcgatcaaacgcagaacacgatacaggaactcatggctgaattgggaaagttgaaagacagccacagagagaaagagagtgagctttctagtttggtggaagtacacgagactcaccagagagattcatcaattcatgtgaaagaattagaagagcaagtggaatcatcaaagaaattggttgcggagttgaaccaaaccctcgcacaatgcagaggaagagaaaaaagtgctatctcagaaaatagcagaactgtctaacgagattaaagaggcacaaaccaccatacaagaactcgtgtctgagtctgggcagttgaaagagagccacagtgtaaaggatagagatcttttcagcttgagggacatccacgagactcatcaaagagaatcatccactcgcgtgagtgaattagaagctcaactggaatcctcagaacagcggatctcagatttgactgtggatctgaaggatgcagaggaagaaaacaaagctatctcctcgaaaaatttggaaactatggacaagcttgaacaggctcagaacacgataaaagaactcatggatgaattgggagagttgaaagaccgacacaaagagaaagagagtgagctttctagtttggtgaagtcagcagatcaacaggttgcagatatgaagcagagtctggacaatgcagaagaagagaaaaaaatgttatctcagagaatcttagatatctctaatgagattcaagaagcacaaaaaaccatacaagaacacatgtctgagtctgaacagttgaaagagagccacggtgtgaaagagagggaacttactggtttgagggacattcacgagactcatcaaagagaatcatccactcgtttgagtgaattagaaactcaactgaaattattagaacaacgggtcgtagatctgagtgcgagtctgaatgctgcagaggaagaaaagaagtccctgtcctcaatgatcttggaaattacggatgagctcaaacaggcccaaagcaaggtacaggaaaatgtgactgaattggcagagtctaaagatacactcgcacaaaaagagaatgagctttctagttttgtggaggtaccgaaggcccataagtgagcttcctctagtcaggtgaaacaattagaagcacgggtggaatcagcagaggaacaggttaaagaattgtaccagaacctgaacagttcagaggaagagaagaaaattttatctcagcaaatttcagaaatgtcgatcaagatcaagcgggcggaaagcaccatacaagaactcagctctgagtctgaacgattaaaagggagccacgctgagaaagacaatgagctttttagcttgagggatatccatgagactcatcagagagaattatccactcagttaagaggtttagaagcgcaactggaatcatctgaacacagggttttggaattgagcgaaagtctgaaggctgcagaagaagaaagcagaactatgtccacgaaaatctcagaaacttcagatgagcttgaacggacacagatcatggtacaggaactcacagctgattcgagcaaactgaaagagcagctcgctgagaaagaaagcaaactattccttctgacagagaaggacagcaaatcacaggtgcaaataaaagaactagaagcaacagtagcgacactggagctggaactagagtcagttcgtgcccgtataatagatcttgagacagagattgcaagcaagaccaccgtagttgagcagttggaagcgcaaaacagagaaatggttgctagaatctcagaacttgagaagacaatggaggagagaggaactgaactctcagctttaactcaaaaacttgaggataacgataagcaatcatcgtcttcaattgagactttgacagctgagatcgatggcctacgagcagaattagattcaatgtctgttcaaaaagaagaggtggagaaacaaatggtgtgcaaaagcgaggaagcctcagtgaagattaaacgtttggatgatgaggtcaatggtctgagacagcaagtggcctcacttgatagccagagagcagaactcgagatccaacttgaaaagaagtccgaggagatatctgaatatctgagtcagattacaaatctaaaagaggagatcataaacaaggttaaagttcacgagagtattctagaagaaataaatggtttatctgagaagattaagggtcgtgaacttgagttagagactctagggaaacagagaagtgagcttgatgaggagctgagaactaagaaagaagagaatgttcaaatgcacgataagatcaacgtagcgtcttctgaaataatggccttaacagaactgatcaacaatctgaagaatgagcttgattctctacaggtgcagaagagcgaaaccgaagcagagcttgagagagagaagcaagagaaatcagaattgtcgaatcagatcaccgatgtccagaaagcattggtagagcaagaagctgcttacaatacgctggaagaggaacacaagcagataaacgaactatttaaagaaactgaagcaacactaaataaggtaactgtggattacaaagaagctcaaagattgttggaggagaggggtaaggaagtgacatccagagattctacaattggggttcatgaagagacgatggagagtttacgtaacgagctggaaatgaaaggagacgagatcgaaactctcatggagaagatcagtaacatcgaggttaagctacgcttgtcgaaccagaaactgagagtaaccgaacag

SEQ ID NO: 184913 - DNA, 335 bp, Arabidopsis thaliana landsberg
atgcttggcaagtacgttgatacacaaactcgaagtaccatcaaaagaacacttgggatatccaacgaaggaggaatgggcacttacttgggacttcctgaaaaaattcacggttcaaaaacccaagtcttcgcttttgtccaagatcacctccatagtcgattcaacacttggtgagccaaattcctttccaagggtgggaaagagattcttataaaatcagtagctcaaacccttctgacatacgtcatgtcgtgtttcctcctacctaaagctatacgctcaaaattatccagtgctatcgcggattttttgtggaagacaagagcagatag

SEQ ID NO: 184914 - DNA, 54 bp, Arabidopsis thaliana landsberg
atggagtatgagatctataaggcgacaaacactattcggggttatataaccaag

SEQ ID NO: 184915 - DNA, 449 bp, Arabidopsis thaliana landsberg
ttccttcagtgataaacccataaacgaagctgcaactggtccaattgggagagagttgtttgaaaaggagcaagatgaccttcttgctgatttgaaagacattcctaagaaagcttgtgatcgtcgagtgagtgtgcacatttcttctttcactccctcctctcattggatttaaccatatttgttttctgtctaatagataaatgagtttgtgaaacgggcaagagcagcaaagatacatgcgtacatcatcagccatttgaagaaggagatgccagcgataatggggaaagccaaagctcaacagaaactgatagataacttggaagacgagtttggaaaggttggtaattggtttgattctgcggatcttttcaatacgccggttctgattccgatcatatttcatgctaatatgtgtttcaatgttgtgggggacatgaaaacag

SEQ ID NO: 184916 - DNA, 446 bp, Arabidopsis thaliana landsberg
atgctggccgggcccggcgcccggtgcggtccgttcgtcattgaactgtgctcccgcccaagaagcaacacagggctagtcaccaccctgtcacctagtagaaccggatcgtacatcctttttgccggaatagtaaggatttaacgagtccgaacgccccgtggttcctgccgccccgccccgcccggcgcgccggtggctgccctgccgcgcgcgaaccggtcaccctctcctccccggcggtccggcctcgttactcaccgactgataaaggggccggccgtgttttgcgcaaagtgataaaaggctcgcgcgagtccggcctgtttagcactcactgataaacccggaactgggcttctagcattcactgataaagtctcttccgggcccgggatttctcatgatttctgctcttcggccgtttgccggcaggtttcgcgcag

SEQ ID NO: 184917 - DNA, 36 bp, Arabidopsis thaliana landsberg; identical to SEQ ID NO: 181455

SEQ ID NO: 184918 - DNA, 310 bp, Arabidopsis thaliana landsberg
atggggcagaagccatcgtacctcctgctgctcgtcggcctcctcgccatcgccatgctctgcgccggcccgggtcacgcgctgtgccaactgaacgacgccaacgcggtggcctggagttctccttgggctccaaggcggccacggcgggggccaagaccgagccgctggacccgtccttgagcgacgactacgagaacggtaccagccacgtggagttcgagccagagctcggccgcgcgacggtcgtcccgctgcgacaacgtcaccgtactgcagacatacacatcgaactggatggaaacaatgg

SEQ ID NO: 184919 - DNA, 1304 bp, Arabidopsis thaliana landsberg
atatccttgatgttattttcaatgaagacccaagtcttgtcaatgaacgagatgaagaaggacggacctgcctttcagttgcagcatacgtagggtactataaaggggtagtcaatctcttacaccgatcaacatcaaatgtctttgagtgtgatgatgatggttcctatccaatccacatggcagtggagaagggtcgcgtcaaaattttcctagagcttctcaagtgttgtcccgattcacaatacctacttaacaaacaaggtcagaacattcttcacattgcggcaaaaagtgggaaaactggaacttacctattacaagtcatcaaggcttatgatttgataaagaatgatctgattatggagcaagatgtggatgggaatacacctctgcacttagccaccttaacgtggcgtcctcgaactgttaatatacttaatgggttcactttgggaaaccacctacatatacgtaacaaagatggcttgagtgctctggatatagcggagtcgaatctgcagtccaattacgtctttcgagaggtatatctgtctgtacgttattttgtttttgatacaatataaagccttttctcttatttccatttgttcatcttctttggatatcagagaatgacgttgatggtcttattgtgcacttgttcgccaagagggtttaaaatgatacccacaagtggaataacattaaaaagcagatcagaaaaagtagccggtaacaaatacaaagacagtatcaatgtacttctacttgtggcaactctagtagctactgtggcatttgctgcaggtattgccataccaggaggatttagtagttctactccaaaaaggggaattgcaattttggacgatgatgacttcctctcgatttttctggtgtttaacacattggcgatgcaaagctctgttctggcaatagttgctctaatatgggcacaactgggggatccagtacttgttcataaaacctttcatttggcattgccagcactctttgtttctctagtttcaatgtcctcagcattcttctgcggcgtggtggctacaacaaagcacaatccttggctttttgatagcactatctttatctctatcatctttctttttgtggtagcttatctccttgccccttacgctatccctcagtttccgggcactccttttcttcaaagaattactaaatgttatctcgactttatgttgttgtttgttaatgaagatgatgttgatattgtctgcgagaagaagcaggagaccgtccatctttatgtcgcgaactaa

SEQ ID NO: 184920 - DNA, 213 bp, Arabidopsis thaliana landsberg
ttccagcctgaagatcttccatctaaattgactttaaacgatgtggagtttaaattttcttgctccaagaggataaaagaatgtggtgtacgactcttgaatgtgtctccatatccagatgatagtgatggaagctctgaaacagagtacaaccaacagtctcgagaaaaatgtgatgttgtagagactgcgagaagcaataaacggatgcgg

SEQ ID NO: 184921 - DNA, 489 bp, Arabidopsis thaliana landsberg
atgtggtggttctgcctggggagtttcgacgaggccttcacgccgcgcggcggggtgctggcggcgggcctcgcctggatcgtcatcgccagcgccgatcgcggcctgtttggtccggcggtcgcgggcaagggcctgtcgtggctgctgatcgcgctgggcctggccatgatcggttacctggcctggcgactggtccgcgaccgcgcgggcgatctgatcgaggccagccggcgggatcgggtgctggtcgtggcgctgctggccgggcaattgctggccgacttcctggtcgacctggtcatgggcctggactgggggccggcggccttcaccatcgcccagaacgccgccctgctggccttcgccgtctggctggccttgcgtatgctgcctgtctctccgacacgcgccgcgccggcggccatcaccctgcccgcccataccgacgaagcctcgctggccgagcggctgcgggtgctggtcgag

SEQ ID NO: 184922 - DNA, 378 bp, Arabidopsis thaliana landsberg
atgccgacgttgaacatgatgcgcccatggctggccgcactgacgctgaccgtatcgccgttgctgaaggccggcctggatccggagcatggcgtggacaagcaactgcgggcgcagatgacggacgccggcaagaacgtgctgggtctggagaccgccgaacagcagatccgctttctcgccgacctgccccgcgcgatcgaactggcgctgttgcgctcgaccatgcgcgatgccgacaagggcgcgttccgcctcaccgaactgatcgacgcatggaaagccggcgacgtggacaccatcgtccgcctcggcaacgacgacatgcgccaacacgagccgaagctctaccaatcgctgttggtgctacgcaaccag

SEQ ID NO: 184923 - DNA, 174 bp, Arabidopsis thaliana landsberg
atactggacatcaatctcaatctctacttcaagtccatacatttcgaaagtaagagtggccgaagttcaaacattttaaaagccaactacgagaactcagaatatgtgaaagccaaagaaaagaaaagaaaagaagtgtttcacaacaaggttcatggagaagcaaatacatga

SEQ ID NO: 184924 - DNA, 110 bp, Arabidopsis thaliana landsberg
atacattcagtttgtgaaaaaaaacttcagacctgtcctatcaaaggaagcagaagaaattatttcaagttattatcgactacaaagaagatcttcaactcataatgcag

SEQ ID NO: 184925 - DNA, 441 bp, Arabidopsis thaliana landsberg
  unsure (1)..(441): unsure at all n locations
atggtgatccgctcgacggtgcggtcggcgagcagttcgncgacgatccgcagcgcgaatgtcgtcttaccggcgccgggggtggcgaccatcaggaaatctcgcggcttggcggtcagatagcgcaccagagcccggcgttgccagctccgcaaagcccgggtgctgggcgctgcttcagcccgcacccggtctcctatctgatcgagatgcagtctaaggcaagccgataggatcgctggcgtgtccaccccgcgcgagccggaatccatccgtgtcgagcggctccgcgacgcgcaggccaaggcagtcgcgctgttcgacgaaatcgagcgccgcggcatggtccgccccggggtcggcgagcggcagctctccgatgagatccgggacctggccgccgacatgttcggggtaacgcggcactggcatcggcgggtg

SEQ ID NO: 184926 - DNA, 79 bp, Arabidopsis thaliana landsberg
atgacaccactcaactttcccataaacctcatggtcgttgcgcctctcagtcataaagaaatagagacaactctcggag

SEQ ID NO: 184927 - DNA, 155 bp, Arabidopsis thaliana landsberg
atgaaaacacagcgtttcttgatgttgaatattttacgagggctttatgttgaatcgcaaactaaaaataagctgtatcaattattcggatctcaatatgaaaggcgatttgtcaatggtctgctctttgtcacttcgagtggcctagattcgtg

SEQ ID NO: 184928 - DNA, 108 bp, Arabidopsis thaliana landsberg
gaaaaagtgaagaagtgccgacttaggaatgtaagaaacagtgatcggcctttaaagcatgatcgcataaaggacgtgatctatatattagaactgacccagaactaa

SEQ ID NO: 184929 - DNA, 395 bp, Arabidopsis thaliana landsberg
gttcttcaaaccctcaccgaggggcccactccttcttcagaattgatacttactatacggaagttgtttgatacaagaataaaggtgaagacgatggaatgtttattgaaaactcgttaagagcaaaaccataagctaattcttctctaatgttttcttggtttttgaacattttatgggactacaggatgtagagattcttttcccaattttgccattcctgccaagagatgatgtaaatctctttccctaccttttccccttttattgactcattgggttatagttttcttattttcctaaacttgtctctcgatcaggttctccgcatttttccccatatggtgaatcttcctatggagaaattccaagttgcactttctcgtgtgctgcag

SEQ ID NO: 184930 - DNA, 1177 bp, Arabidopsis thaliana landsberg
tcgacttaatcaagtgctatacactcggtcaagctcatgatgttagtgtaggagctgagtttagggggaaaaaagaatttcgaaaatctattgatcttcaattttttaacgagttcaaggtttttaggtttaggatatttcctctagtaatctagggtttatctggtttcccgagataaattaattaggggttttgggtttcttcattgcaatggcgagaagacatggatggcaacttccagctcacacatttcaggtttttttccttacaatacttcactgagagtattgattgggttctgtctttgactttggttttaacgatttgggaaattcctgtcgtaatctgctattgtgacaagtttgttcctttttctaatccttttgaaaatgacatcaaatgttttgttcgtatctggtagtttactttgttgtgatatagtattcacatagttttcaaaatcttttctttttcctctgctttatgtgtttggggataaaacacacatttaagtttatgtatatggttatctaacatggtctgttgctcatgttgctgtgcaggttgttgccataactgtatttttcttgctaactgtcgcttactatgccttctttgctccatttcttggaaacaaactctatgaatatattgccattggtgtttactctttcctggtaagacctaaaacgaaacattgttacactaagctctcagttgcattaaacttgttctttatctcacatctctcatcactatggcaatttattcatagagtttgcataatgattttacaggcgttttcggttttagttctttacatccgatgcactggtatagatcctgcagatcctggaatctttgtgaaggctgataacactccagctcataagtcacagaacagtaactatgttcctggtacgttctctacccgatgatgttgtgtataaggcttacataaatcggatacttctttcttatagtgatgtctctgttgcagagaatgcttcagcaattgatggtgggccatatattagacacggctcaggttgctgtagtgctataggaagattcatttgtggttgtttagtaatacaagattgccgtagagatacccaacaagagcaatcaaacgaacaagaagaagctttgttctgctcattgtgcaatgctgag

SEQ ID NO: 184931 - DNA, 885 bp, Arabidopsis thaliana landsberg
atgtacctaaacaacttcatcaagagagttacatgtacttgtacttgtgcacaaggaccagtccgattattggccacttctcgtcagtgatgttccaatctcatatttctgtattattttttttcatttagtctgttttccatttctagatcagtaacaatgagaaccttgttttggttaaaatcacaattttctagtccagtttctattagatgagacgtttttcctgaagtttttttgatcgaatcaccttcctatgtttttctcacactaaaccacctgttacatctacttacatacatctgcatttgcatcaccaaaactctattcatcaatcattattgtggggaatattggtatttggtagctatttatagagactttacatatagtttactgtttttttttataaaactttaaattcgtctaacagaaatatattttgtatccatataaaaatcaaggcaaagttatcatttgtcatttaataacttaagaaattaagcccaacacaaaatggaatgataatattcgaaataatctcatcggaaaagaaaagaaaatatccaataaaaagaggccacgtacgtaaatagctccagtagcattcccgcctaaatgataaataagatattagaaagatttaaacattgaaaatcgactttttattttctccataaatcgaaaaccctaaatcctctctccccgtaccgtacgtcttcctcaaaccagcagcaacgttgctatggataacgatgacctcgcctccggctcctcttcaggttctaatctcttctcctctttttcatttcagcgtctccgctattatacacatgtactgacttctcgatgttgattacggatttgacaacgcctaatttctag

SEQ ID NO: 184932 - DNA, 108 bp, Arabidopsis thaliana landsberg
tgcttgccagaaaacgacgacgcgaaacggaaggaggaggaaaagaatcaacgattggataatcgtaacgagacgcttaagcgtatcgcatcgagaagagtaccctaa

SEQ ID NO: 184933 - DNA, 154 bp, Arabidopsis thaliana landsberg
aacgagaatatggattcgcgacaaaaaatatcacccccacgagttatatagtacatggaacctaatgcaactagttgtctttcgtctcacgggaccacatataataaagtttctgacgctaattacaatcattaaacataatcgtggagattaa

SEQ ID NO: 184934 - DNA, 1528 bp, Arabidopsis thaliana landsberg
  unsure (1)..(1528): unsure at all n locations
atggatgaagacattgtgaaaccatttgtaacgcctgagaatatgatgaataaggaagatggtttgaatccgggaggtgattctacagggaaggcaatgacttcaaagcctaaagagaaaaagattcctcattatctcagagcatcaactggttcgtgtcatgatttgtgtaagtatgggaagagacagatacctgtggagaaaccatggcgttcgagtactaaaaagatcttcaagaaatctcttgatgatgatttgaatgagactntgaagccgggttcttctaaaatgaagaagaaggtgagggaagtcgagaaaaacgagggtactgatgattcttttgaggtgattaaaagagaggttgtgaagtatcaagcgagtggtgtctctggtgggatgaggaagccagaggtattgatcatatcatcttgtgatgaaactcctgtgaagcagatgaagaagaagacaacattaagttccaaacttaaaccttcaccagatttgggatctcgttcatcaggaaacgttgatgccctgaagccaaaaggtttaacgaaatcatattcagcgctagcaacatcgaaatctaaagtaaaccatgaaaaagttgttgcttcaccagttttgaaacctaaaatgggtaaaagaaatgatggaaaagacgaagatgcaaagataaagaaggctactgtctccaccagagttgtgtcaaagaaggttccagtgactccaagagcgtcactttctccaggatcatcagtaagactagctggaagttcaagtttgagaaagagtcagagcttaaaggctgcattttcctcttcctcgctggcaaaatcagaaaccaagacccgtgaatagttctgatgaacctaataagcagttgtatgattatccagtcgaggagaaaacattgcacgttgttgaaatggaaacaactaacaatgtcgtccctgagaatgatcagaatcagcaaggttttgttgaaccttttcttcctcctcttctaccgaaccaatcaactccaaaagatgatgagagtactgtttcagaaccagaggagtacgaatacacttcaggaagcaacgaagctgagagcgaagaagaagagattggattgtccaatggagagaagaaaccaagagtggcgagaaaggagggtgattctgcagatgaagctgcacggaaattacgtttcagaaggggaaaaattgtggatcctgatactgtgggtgagagtgcaaggaagctcaagtttagacgaggaagggatctaggggaagacaaaacgcgagatgcacaagttaggagaagctttaagaagagggaagatatcagagaagaagaactcaatgaggatggtgaaaaagttgtgttgaggcatcaagatgttcaggagaaagatgcacagggactgttcaacaatgtcattgaagaaacagcgagtaaactcgtcgaagctcggaaaagcaaagttaaggctttggttggtgctttcgaaaccgttatttctcttcaagaatcttag

SEQ ID NO: 184935 - DNA, 208 bp, Arabidopsis thaliana landsberg
ggtggtaaatgacaatccctcagagcgtgtgatgagtctcccaacaacgaggaagttagcgatgaagaacaagactgtgtttgggacaggtgatagatggggagctcctaccttgactgcaaacatggcgtttgtcagagccgtggctcagtcgggcatgtctctttccactattgaccatagccctcgagctctcactggcgattag

SEQ ID NO: 184936 - DNA, 43 bp, Arabidopsis thaliana landsberg
atgactggggtgctgccgggggcccagctgctcccgggggctg

SEQ ID NO: 184937 - DNA, 153 bp, Arabidopsis thaliana landsberg
atgccgcagaaacctagtcctccccagggagatgtaactttttatgaatttttatccagggattggtttgaagatgaacttcgctattttcaaggtggggaagatggtctagcaccaagtgtatgggaaagtaaagtttctagttttcctctg

SEQ ID NO: 184938 - DNA, 119 bp, Arabidopsis thaliana landsberg
aagatgaatcagattcgtctgagctgtatgacgaggaggacgatgttgctgacgatggagtatcgtctcccgaatcagaatctctcttccggtgcttacccatattgttcaatccctga

SEQ ID NO: 184939 - DNA, 85 bp, Arabidopsis thaliana landsberg
atgccgaaagggatagtgttcgttgagcagttaggagcggcggaggagagttgtggctgtggtgttgacggtggagacggcacac

SEQ ID NO: 184940 - DNA, 229 bp, Arabidopsis thaliana landsberg
atgacccgagtgtcatattttgtcaaagctaaggtatatatgataatagtaataccataatatttattaactaatcctctcaagaacccaagaggcatcgacaacgccagagtcatcagtatcatgggtcctagatccattaccgaaccactggatcgcaaaaaagacatgcccaatgaaaagagacgcaacactgatctatccatttgtggacagagatcgatcgagg

SEQ ID NO: 184941 - DNA, 2288 bp, Arabidopsis thaliana landsberg
atcaaaccactcgttaaacccaccaacactatcattcatcttcctccatttcaatattcatggcatgatattgtctcaaaatgtaagtgtatttatgcttaagtgctcaaattgaattaattggctggatgttaattgacttaaaagaaatataatgtgtctacacggacttaacaaattagtcaggaaggtctgcttcattggctacaagatatgttgaattttaactgaataatattatatttgtatctgatcaaccataatacagactagaacttgttactgattactgtctttgaaaatgttgctgacacctgtggctctgctacattaaaaaattggcagctaacgatcatgcgttgaccattgttagcttgtgggctccagttttggcggtgagtgtattccttagttgtcctcttaattagatatcaactgtctaagagtttctttcgtaactaccttccattaactcttgtcctttatgagttactaatcgtggcatttggtattgatgtttagatttatcttatggatattcatatatggtacacactcttgtctgcaattattggtggtgtgatgggtgcaaaagctcgcctaggcgaggtactcctgaaccctagaatgttctactactaaatctttttgtagaacgatattgtgttctgttatattgctggtccccttactaaccatgttcaattatctttctatcttagatacgcaccatcgagatggttcataagcgttttgagagttttccagaggctttgctcagaaccttgttctcctgtgtaaaaggttataatttggatctgtctttattttgttacatttcttggaacataaacaatattgtactcctatgattaccagtatattaaagtttttctttttgggcttccttcgccgcctaatctctgttgtaatgatatatttcagagtaccacttggccaacatgcttctcaggttagtgataagtttaaactctctgtcttatcactcgatgttttaatagatattcttgcattattgccttacattgttagttctttgtctaaaaatggctctgtgatctaatcaacaatgatatgttttggccactacagccaaaacagtttcaaacatctacttttgtgataacaatatctgttctcagtatcttatgtttgtgactccatgcttaaataggaaaattaaagtcgatgatgcttgtaaatgtatcttgtttcattgatcgtggatgtaacagaatttaatttctgaaagtccttaatatagaaaattgtccttctccagcttttgctgtaactctataatgttgtttttgccatgtattttagctcctatgttttgttctctcctaatacttcattataccctaattgtactcttcgttcccactttgtcctgtgcattgcgctgattgtttctctctgtctaacctttcttttctggttaatgattaattcttagagctttttccgactgttttggcaggatggtcaggatatgaacaaggcatatgctgcgatgttttcacctttttggaatgagataataaagagcttgagagaggaagattatctcagtaacaggttattgattattacatgctttcgtgttctttcattttttgccgtttgtacaacgcctcttactcatacatttgaattctttgactgtagggagatggatttgctttctattcccagtaacacggggagccttagactagtccagtggcccttgtttcttctctgcagtaaggtgcagcttgttaaataatttcctctctttaatgttgagagctcaggcgtgacatttttctctcatgtgtgaattattcttgcttcttttgtttttcagattctggtagccattgatttagccatggagtgcaaagaaacacaagaagtactatggagacaaatatgcgatgatgaatacatggcgtatgcagttcaggagtgctattacagtgttgaaaaaatattgaattccatggttaatgatgaagggcgacgttggtacagtatttcagtttgcttgaatctcaatgtttgtttaatatgcgaagatcatgtctgttaaccatagattgctgtttttggaattttacatgtgacattgtatttatgcctcttttcactttggtaatagggtggaaagaatttttctggagatcagcaacagtatagaacagggttcccttgcgataactctaaatcttaagaagcttcagttagtggtttccagatttactgcattaaccgggcttttg

SEQ ID NO: 184942 - DNA, 755 bp, Arabidopsis thaliana landsberg
atggcagctaggcagcgtcgcgggcagaacgagcaagctcccccgccacctcccccagctcccacagtgcaggagttgatggcccagcagaatgagattctgcgacagctcttgcagcgccagccccaccaacagcatcatggtggaggccagcatcagcgacctccggctatggcaacataccaggagtttctgagcacgcagccgcccttgttcaccaaggcagaggatccgttggacgccgacgtatggcttcgcgtcgtcgagtccaagtttcccctcctcacaggagactgccctgatgaggccaaggctcttcgccgcacagcacgttcgcggcccagctcggacttggtgggaccacttccgtgctatgctccccgctgatcatgaagtatcttgggaggaattcaagaccgccttcagaggacaccacattccagctggcattcttgatcggaagttgaatgaattcctggccctcaatcaaggaacccgcacggtactacagtatgcgcaagccttcaacgacttatgccagtatgcagggtatcatgctgattctgatgaaaagaagagggatccttccgcaggggtctcaataccaagctgcgagaacgactcaacactgtccgggccaatagcttcaatgagttggtcaacatggccatctctcaggaggattgcattgttgctcaccgggcagagaagaagaggaaggcaccaatggcatcaccatccgctcaggctcagag

SEQ ID NO: 184943 - DNA, 186 bp, Arabidopsis thaliana landsberg
aacagcaatccggcctttgagtggtctgatccatctattcgcagtcgacggtccgagcacagcgggtctagtaggagagattccgttcatgcgccccattcgcaaccggccgcgccgcgagcttcgctaacttccttactgcagttggcaatccaggttttcggtttggggcgtgggcagtcagag

SEQ ID NO: 184944 - DNA, 422 bp, Arabidopsis thaliana landsberg
ggtctgaaatataccaagagatattagctaaagcacttgccaattcattcaatgcgaaattgctaatatttgacagcaatccaattttgggggtaagatattgtatgtgtttcttaaatatgacatccgaggaagctgtttgtaaaaaaatcaatgttggttacttacaagtatgatgatatgcttgttagtttacaagaggaaagattttgcatctacacttatttatctgctttcctgactacgggtatgatatgcatccgctctgcaatttcctgcaggttatgactgctaaagaatttgagtcactgatgaatggacctgcgctcattgatcgcggaaagagctacaatttgacatcaggccatggagattcatctatcccttctcctgctacttctccccgttcatttggaactcca

SEQ ID NO: 184945 - DNA, 145 bp, Arabidopsis thaliana landsberg
atataagaagattccatcacatagaaatgactcgttcttggaagtaaaggtttcgaattttaccggtcgacggaagctctccggttacgatcgtccggcgagatttagttgggaagtgaagaaggagaacgcaggagaagactga

SEQ ID NO: 184946 - DNA, 279 bp, Arabidopsis thaliana landsberg
atgtgttgatcctgaagcagagaatcgtcctagaatgagtcaggttgcgcgcatgcttgaatctgatgaacacccttttcacaaggtactaaaatattcttatgatggtctaaagctgtaacaatatagttatatacatgtttctgtattcataaatgaaacaagattttcgcattttggcaggagaggaggaacaaaaggagcaaaaccgcgggcatggagattgttgagaccaaagacgaatctcttggtcctagtggctcagagacaaagccttag

SEQ ID NO: 184947 - DNA, 165 bp, Arabidopsis thaliana landsberg
atggtcatggtgttggtggatatgcatgacttctacgatgagacgctggccgctggtgcagtgctggttggagccgctgatgaagtagaagagaccaggacgatcaaggtcgaatgtgctgtttccattgtcaaaggctgtaatgggatcgctgccgttgcagtg

SEQ ID NO: 184948 - DNA, 865 bp, Arabidopsis thaliana landsberg
aaaaaaaccaaagattaaaaaaagataaacggattgaactcaattgtacaaaatgtgttctagtgaacttacccgacactaaacttatattttatgtaagtgtgggcgattaaatgctacctgagagattatgaagattctagtgatagggttattcttaaaatggtggaggatatgaccgagaaaatgacaagtattggaagagcttgaattagatatggtttcttttagaagtatggatattgttgcatattggaaaaacaatacatcccgttttaaagaattatcatcaatggcgtgtgatattcttagcatttcgatcactatcgttgcatcggaatcagcttttagtatcggaagtcgtgttcttaacaagtatagaagatgcttgttaccaacaaatgtacaagctctcatatgcgcaagaaactgatttcatggatttcaagaagttggtatatattctaataagaattttgtttacataattgatttatagttggccttgcttgattaatagttttgttggaaacttaaatggctttgggattgcatcttttagattaatagctcgattataacagtttaacccacatctgaactcgtttgcatgtggttggatcatttgttttagccttagttataacaatgtctttaaagaagtgtttaaattgcagtaatactagtactcttcctctcatgatcagtatggtatgtataagagctcacaatgattcttttagctaactacatggtttttattattgtaggtgatgatgtctaaattcatgaagagaaagggaacacacattgtgataaagtttcagtttgagtggctcttgggaattgctgctttcatatacaa

SEQ ID NO: 184949 - DNA, 311 bp, Arabidopsis thaliana landsberg
gtgtatcatttaccatagatgcacaaccggttatgggaaatccgatggtatatttatgtgggaacatagaaattggagtgctcatgaagatgcttgtgaagacaggcattgaattgtcagcaatggaatatggagtcgagtataaagatgcaaacttgaacccacctcctcccaagaaagttgaggctccttcaattggaacagctgagacaaaggacgtgaaagacacggtgcctcctcctcttcctgaggttgttaacaccaagttgtatacaagaaagtctcgcggtttaagaaggttcttttgttaa

SEQ ID NO: 184950 - DNA, 48 bp, Arabidopsis thaliana landsberg
atggatgtgaaactcttcactggagcatacggcgataacgaaaacaag

SEQ ID NO: 184951 - DNA, 146 bp, Arabidopsis thaliana landsberg
gagtagacacgtgcacgtggcacatgcagggaatgggaaggtggagtgttgacaaagaagaagaggatgatccaagtttcgaaatgattccaaaagttatgaactataagccaaagtgctcaatcgccaaacatgaacttaaataa

SEQ ID NO: 184952 - DNA, 109 bp, Arabidopsis thaliana landsberg
cgttagctccgatcccgtgaaggaggaggagcgtgggcttggtgtggatgtgagtaagtgggatccaacagtggaagacggtgccgtcgccaagatcggaggtagatga

SEQ ID NO: 184953 - DNA, 1609 bp, Arabidopsis thaliana landsberg
gtgtcattcacttagacattacgggagagtgaaagatccaacggttgagaatcttcttcctgattttgattttgatcatactgttggtaggagactaggttcagcttctggtgctagaactgttgtgttgatggttgttgatgcttcagatttcgatggttcttttcctaagagagtagctaagcttgtgtcgagaactattgatgagaataatatggcttggaaagaagggaagtctggtaatgtacctagagttgttgttgttgtgactaagattgatttgttaccgagttcgttgtctcctaataggtttgagcaatggcttagattaagagctcgtgaaggtggtttaagtaagagtactaagttgcattttgttagtcctgttaagaattgggggattaaggatttggttgaagatgtggctgctatggctgggaagagaggtcatgtttgggctgttggatcgcagaatgccggaaaaagtacgttgattaatgctgttgggaaggttgttggtgggaaagtttggcatttgacggaagctcctgtgccgggaactacgttggggataattaggattgaaggtgttttgccttttgaggctaagttgtttgatactccggggctgttgaatccgcatcagatcactacgaggcttacgagagaggagcagagacttgttcatattagcaaggagcttaaaccaaggacttataggatcaaggtttggttcaatataatagaatgtgttggctttttggatacaattgtgggattgttaattggattgtgttgttgttgcaggaaggttatacggttcacattggtgggctaatgagacttgacattgatgaagcatctgttgattctctatatgtgacagtttgggcgtctccttatgttccacttcacatggggaagaaggagaatgcttacaaaacactcgaggaccatttcggttgtcgattgcaggtaaagctctggccttttcagttgtgtaagacagaatatgatcaatttatgtattgaacattatttcgattacaaagttttgatgtaaaaagaaaatattacttgaggaccatttcgattgtagataaatatcatattgtaacgaacttgaagtatttaggatcaaagcttgatttgaacactgcccttgatactagtcctaaccttttgtacattttggtttttgatgaagccgccgattggagagaagcgggttgaagagttggggaaatgggttagaaaggaattccgagtgagtggaaccagttgggacacaagttcagtagatatagctgtttcaggtctcggttggtttgcgttaggactaaaaggagacgcgattttaggtgtatggactcacgaggggattgatgtcttctgccgtgactcattgctcccgcaacgagcacacacttttgaagactctggattcactgtctccaagatcgttgccaaagctgatagaaattttaaccaaattcacgaggaaacacagaagaaacgaaaacccaacaagtctttttcagattctgtatctgacagagacaatagccgcgaggtgtcacagccttcagatatcttaccaacaatgtga

SEQ ID NO: 184954 - DNA, 454 bp, Arabidopsis thaliana landsberg
atgattatgcggaaacttgatgaattcagttctgaagaagaagttggacctttatctccggtagccagtagccttgctgctgggatatctggtgccgttgcagctgcagcatcacatagctttgacacagcaagaacacgtgcacagtgtgtaatattgccaaaggtttaaagaaactccactcatggctttccactttatcttacaaagagatatgaaactcattttctctgtttggtttctattgttttacttacagaatacagcaaaggagaggaagtttctaaaatggaataaaccagggaagagattagagagatggacaggaatccatcctacagacagaaatctcttgttccgaggtattgggatgaggatggctcgaagctctgttgcatcgactgtgatcgtaggaagctattacttagctgtcgatttattggttcccaagtga

SEQ ID NO: 184955 - DNA, 120 bp, Arabidopsis thaliana landsberg
tttcgatacgcactctataaaaatcttcttcttcttttcgcgaagtacaacaatcctatcactttgactctctgtgttctacgctcaagttctatgcgcgttggtcacacgcgtacttga

SEQ ID NO: 184956 - DNA, 1135 bp, Arabidopsis thaliana landsberg
atgatgatgataatggggagaaaatgtgaagattgtgggaatcaagcgaagaaagattgtgtgtacatgagatgcagaacttgctgcaaatccaaagccttccattgccaaactcacatcgagagcacttgggttcctgcctatagaacatctcatcacaaacaccaatcgcaaccgctctctactagtatcccaaaaggtatgagagagcaacaacaactttcaaatttttgtccttcatcaggttcttatctcctactcttatttatgctcatgttaatttttttctctcaccataaaacatctgaatttttggggtctttcaaatttcatttcatttctgagttaattgtatatgtcctaaagatagagaaatgagattttcggatctcatgaactttaaacaagacttgctagtaagtgcaaataagtacactacatattgatgtatccttgtgtgttgtgatgatgtttagtgatctatgtctatttttatatcaatcgataggaattaggttttttcttctcctctattctcgatgttactatttgatcatgtaaaatgatcacaatcctgcttttgattttagatttttggtattattttttgaattcttgatttttgaagtggattacgtagtaaatatataaacaaacgtctctagttatgatctttgacaaattgagaaatgtaggaatcttgttttttcactaattactttaatggcttacttaagaaaaataattgatgctaataaaattattagacaaacagacttatcgtgttgaaacattctttcctattttaggtgtacaaatccacactactcctggacattttccggcagagttgagttccctagcagatttccgatgcgtaaaagtgagttcaatcgatgatggaaaagagcaatatgcttatcagaccacggtgaacattggaggacatgttttcagagggattcttcacgatcaaggactccacaaagtgatggtagatcatcattataatgaaaatagtaataatcatcaagagttacttactccttcaacttcttcatgtcccttgaagatcacaagtccttttaccgatttcatgttcggtacccgattttcttcggtcctaagaagatag

SEQ ID NO: 184957 - DNA, 160 bp, Arabidopsis thaliana landsberg
gatattgttacttgctgaactgaactacccagctacgagtacattacatcacaagcagaagcaaggggatggacctactaagaagaggaagacgaagacgaagatgaggaatcctgagcatcgggtccgtctgcttggtcgatacaaaactcgtgcttga

SEQ ID NO: 184958 - DNA, 457 bp, Arabidopsis thaliana landsberg
gaaaacctctatgtcgatatctacaaagcccaaattaaagtcagttcatggccagcagaactactagaagaaaaggtaatttttctgacgctattgtgtcaggaaatatttcacaatgttaatagacgtacctatacagaaattggtgtgttgctgcagttttctagccaactcgttaacctgcacacaacctgggaaattagaaaaagagaaaaggctctaactagcaatactaaatgaagttgaacttgtctgtagatagggacgtcatttactgggctgttttcagtttgttatatggaatactgtatatattaaaaaatgttgacaagaaatggagatgacagagatttgggaaggtgtgttgttggaaaaacatgaagccactcgaaggttctccacctagttttcttctctatcaattcaggtatacaagttctacttacatgaccaataa

SEQ ID NO: 184959 - DNA, 64 bp, Arabidopsis thaliana landsberg
atgcgcgcaggctccactgacggcaaacaacctgatcattcaagcactgaggagctaactccac

SEQ ID NO: 184960 - DNA, 420 bp, Arabidopsis thaliana landsberg
atgaccgcgctcgccaatcgctacgatatcgtcttcctgttcgacgtcaccaatggcaacccgaatggcgaccccgatgccggcaacctgccgcgcctcgatccggagaccaatcacggtctggtcagcgatgtgtcgctgaaacgcaagatccgcaactacaccgaactcgccaggggtgcgcagcccggctttcgcatctacgtgcaggagggctcgatcctcaacgagagacaccgcgaggcctacagggcgatccggcccggcaacgaaaaggtcgataaggatgccaagctcaacccgcagaacgacgatgaagccaaacgcctcaccgctttcatgtgcgagaatttctttgatgtgcgcaccttcggcgccgtgatgagcaccggcatcaatgccggtcaagtgcgcgggccg

SEQ ID NO: 184961 - DNA, 449 bp, Arabidopsis thaliana landsberg
atgcatggagaggactacattgctttaggtttcctcttcggcgataaaagtaaagtggcttatatatcagacgtatcacggattccaccgagtaccgagtatggtaagagctcattatgttatgccctaatcattatacctctgtagttcacttctactaaagagaaagattgatattcttatgaatctttgattaagcagctatttccaaagctggggctggacagttagatcttcttatcctggatacaaatataccgcggaaggttaacatcatctcataacttttgtttaccgctttttcgatcttgataacctttcttgctgaccatctctttgataatagagaggaccacatcccacacacatctgttttacagaggtttggttcaatggttctcttttttttcttcccaaagaatgcttcacttctctaaacctttttgaga

SEQ ID NO: 184962 - DNA, 744 bp, Arabidopsis thaliana landsberg
atggctctagctcgtctggctttgagaaaccttcaacaaaaactgtctcctagtttgatgggtcaatcttgtgaaagaggtttggtcggaaatcgacataatccaatgaagctaaacagattcatggctaaatcggctggtgaacaagaggataagatgaacacagaagtgagtgtgtctgagaagaaatctcctcgacagaatttcccccggagacgtggccgaaaaagcctctggcgtaacaccgacgatcatggctacttcactcccaccctaaatggtacgtttgtcattttagttcattattgatatacctatttagcagaaaatttcaatagtgtcacaataataatattttcgaaataaattatataaaaaaaattcaacatttaagtgtaacatatatcccataaaagaaaaattaagaagaaaatttgaaattctagaatcataaaaatacatcaaattttaaatttacattttcattgcattaaatctcatgaaacataattaatgtaaacctctatttttgcttgaattgaattttttcttcttcttaaaacagagttctttcctccgattataggaaatgctctgatacaagcaacagagaatataaacagaattttcgacaacttcaacgttaatccattccaactaatgggtcaagtgaaagagcaagacgactgttacaagctcagatacgaggttccagggctaaccaaagaagacgtgaagatcacg

SEQ ID NO: 184963 - DNA, 438 bp, Arabidopsis thaliana landsberg
atgaggtttgaggaaagtaaaaacaattgtcaaaatccgagaaaatctgagaaagtaacaaacggcaaaagttacactatctcttcggatattgtttcacctccatattcaaattcaaatcccatcagtgatcacgtacatcccgccacacccattcctgaagccgtctctcaaagtccgatgaaagaaatctcaatcgatgatccttatctcccaccacatcctcagctaccgaaacttgaaccgccacgtggccgtcgtgtctctttagaagaattattgcatccgaaagagaaattcaccggcgatttgatgaaattcatacgccaaagcgggaacgcgatttcgaaacgcatctcggttttgctagagaacgacgatgacgacgactcgatcgatgacgtgaccgagttcaaaatctctggagtgaaagttctc

SEQ ID NO: 184964 - DNA, 266 bp, Arabidopsis thaliana landsberg
  unsure (1)..(266): unsure at all n locations
atggaagagaaactgccaaacaagggaagctcaatgaaaattcaaaaaccccattttcaaattatagggaaaaagaaaggcaaacgcatgaaatcagtgagagagattgatatatggcaattaatgggctttgaagaatttaccataaatgctgcaaatatccgacagggtgagagaaactagaaagcataaannnnnnnnnnnnnnnnnnnnnatttaaaatttgtaaatgttccactttaggcattttccacgcaaacctctaa

SEQ ID NO: 184965 - DNA, 672 bp, Arabidopsis thaliana landsberg
atggagcttccatggctctctctcaccaccttcactctttccctacttatctacttctcttcaactacacaagctttcaaacgatgccctaactgtggatctacccgagtcccgtacccgctaagcacgggactagattgtggcgatccaggttacaggatccggtgcaacaactacggttccctatggttcgacacgctcaatggctcaaccaatccaatcaaaacaattgacccatcgggccaacggttcgttctccgtccaccaggtttcgaacaaaacaaatgtgtctcggtcgatatcaagtaccacggtattcaactagacctaaaccttccttttaatgtgagttgtagtaacacggttataatcatgaactgtacaaaagatggtctagatgcgtacagctctcaagggtttaactgctcagacaatagcttgtgccacaagtttctaaatgcaaatctcgaggcacgaggcaattgccgaggcgtgacgtcttgctgctggtataaaaccggggcatcggttaatacttacaaagtttatcgagctaggccagatatgtgttcggcttatcagagttttatgaatttggatctgacgatcccggttagcaaatggggcgaaccagccgtggagatactatgggaactcctagagacctggttt

SEQ ID NO: 184966 - DNA, 132 bp, Arabidopsis thaliana landsberg
gtggttgcagatataatgttgaagcaagtggttgccaagtattctataggtaaagcggcgatttatggaagtaacagagaaaagcttagacctttcatgtgccaaaccagttgtcgattccacaatggacgg

SEQ ID NO: 184967 - DNA, 201 bp, Arabidopsis thaliana landsberg
gtcaagaccaatacccgggtggtggacaccacggaagcgaacctgctcggttcgggcaccatcgatctgaacaaggagcagatcgactatcagattcatacccagcccaagcgcatgaatatcggctcgctggcggcgccgatcaacatcaaaggtccgctgcgctccccgcgcattctgccggatcccggcgcgctggcc

SEQ ID NO: 184968 - DNA, 243 bp, Arabidopsis thaliana landsberg
  unsure (1)..(243): unsure at all n locations
atgaaatttggaaagtccattatcctggcggcggcgctcagcgtcggcatggccgcgannnnntcggctgaagacatcgtcatcggctcgtcgctcggcctgaccggatacggttcgctgaccgacgcgcactggcgcgacggcctcgcggccgcgatcgagcgcgtcaacggccagggcggcgtgctaggaaagaagctgcgcctcgtcaccgaagacaacaagtcgaccccgcagcaggcg

SEQ ID NO: 184969 - DNA, 476 bp, Arabidopsis thaliana landsberg
atgggcgcatttggctggaaagtactgaaggtaaaggcactactttctacatcgcttttccatcagcccccagtaagtgatcacgttaattaattcgttagtttgaaatgtaattttaataattaaattagtataatgttatactaatcagtttgttataatctttccgaataatgaaaagattgttttttaccgcatttttatttttatgctgtttatggcttcacgcccaaaccattaccggcgaggtttacagcgaaggaagtaatgaagctattataggagccacggtttactacggagggaccatggagggtactataaccaacgcaaagggtggatttgaactaagagccaggcacgaacagatcccggtaattgtgagctgcataggctactacaccagtagggttatctacaagcccggacagcctttaattgtacgcctgaaacccaaactggagcaacttaaaacg

SEQ ID NO: 184970 - DNA, 387 bp, Arabidopsis thaliana landsberg
atggttaaacgaatgatagataagatacaaatcaaagaaagagcacataagagatcgacatacaagtacaagcttcactacttcttgcttgatcgcattcatagtaaccccaaaggttacaaactctaccacaaaggcaaaggggactataagccgggaggtaaaaccttgcgataccgacaagtattgatcatccacaccactcactagaaggaattttggcaaaatcaattgctcaaaccaagcaaccgtagcatttaagacatgttttcatgagggccccaccgtatgcagcaagggcataatcggagcatcttcgtcgaaccgatggcatctttgtcactaggtgtctttgtagatcttggaagcaccgctccttttggctaa

SEQ ID NO: 184971 - DNA, 384 bp, Arabidopsis thaliana landsberg
atggggcccagccgccgccggattgccgccgccagactgctgcactgggttgtcgcctacggcaagggcagccacagcgtggccagcgccccttcggcgccatcacgcacacccaggctgacgccgccttcatgcgcttcggcgatctgccgcgccagcgccaggccgatgccggaaccgcccggcttggtggtgaagaacggcacgaacaggttgtcgctggcgggcggaccggggccgtcgtcttccacttcgaccagtgcacgcccggcttcgcggcgccagcgcaggcgcacgccgccgcccgtgcccaaggcggcttccaccgcgttgtgcaacaggttgatgagcgcctgttcgagctggtccgcgtcggcctgcacg

SEQ ID NO: 184972 - DNA, 433 bp, Arabidopsis thaliana landsberg
aaatctgttcaaattgatgatgatgaatactcaatatgtcttgaggagcctaaagttgaggaaaacaaggttgttatcactgggaagaagaagggtaagaaaaggaataagaagggtacgcagcagcagcaggatgacgacgatgattttgctgataagtttgcggtggaggaagaggttgttccggataatgcttttgtagggaataataagaagtcgaaaggtaaaaaagacggtggctctgttagctttgccctgcttgctgatgaagataacagggaggaagcagaggataatgatatcacgttttcaggtaggaaaaaatcatctaaaaagaagagcagcagtgtcttggcctcaataggtgatgaagaaagtagtcaatctaaaacttctgattctaagagtgtggagcttgtagaatcggcaagga

SEQ ID NO: 184973 - DNA, 123 bp, Arabidopsis thaliana landsberg
ctctcctcctggcgctgtctctcggcgccatcgttcccttctatgcacccccaatcgagctcctcgcctgcagcagaccctcctctggtgcgccgcgcgtgcgccgtcggcgagatgtcgaac

SEQ ID NO: 184974 - DNA, 281 bp, Arabidopsis thaliana landsberg
tcacttttctggaggaccgtgctgatcatgtacatgtgaaaaggaaccctcctgtcaatactgaaaccactacaagaggtcagataccgatactcaaaacaagagcatttggggagttatatgcttcaggttcatcagtgaatgctaagccttctaaaaagagaaagcttatactcaacacgccagaaacagatgattcagatgatcaaggccctcaatcaggagagaagaaattaattaaaaatcctcctcttgtagaaaaggctccaagtcagaacatc

SEQ ID NO: 184975 - DNA, 81 bp, Arabidopsis thaliana landsberg
atgatcaccgttcgcgcgtcttctcgggcggtccgctccgctccgctccggccggtggtgctccgtgctcgacagctcgag

SEQ ID NO: 184976 - DNA, 407 bp, Arabidopsis thaliana landsberg
tttgtttacgacaaggacactcggatagttattggagacgatcatggaaacaaaacaccacttgaagtcaaagaggtaattctaattatcaaacttgttcttacatttatctttgggaacatattagcttaatatttttgattatgcggcacagttggaccttgaatatccgggtgaatatgtcacagcggtggagggctcttacgataaaaggaattgggagtgacggcgaagctataaccatgcttaggttcaagactaacaaacgaacatctatatcctttggattcgaatctagctcaagctttctactcgagaaagaaggcttcaaaatcgtggggttccatggaaaagcaagtaacatgattcatcagcttggggttcatgtcatgcccatcacccactga

SEQ ID NO: 184977 - DNA, 801 bp, Arabidopsis thaliana landsberg
gcgcttcatgatcttatttctttagtccatgaccacgttaatgctgttgatacaagtaagggactccaacacacttcacccagttgttcagagggcggcgaaaaaagcaagttcctggtgaatgcaatgtcttgtttagaagatgatcacgttgcccatttgctttggaatcttgaagcctctagacttcgggatgttctccttgcaatggcagtaagttaactctaaaaggcatttactttactgtgtttatcctcacatggtattgcattagctggagttaagttacctaaaactattggtcaaaatggagattttcgttttagttttacataagatttttgagtgaaaatcctttgaatttatttggtcctatcatgtaacttatttcagcgttatttcccaagaactttagaagcattaatactccacatgctctcacccattgctgcggaagttctaacacagaagtttgatgagattgaccaacagactggtgaagaagataggtttgttctgaagcattgttgtgtttttatttccatactttaaaactggagagtaacttgttatctctcttctttttttcgtttccaattcttaggacccagttctttcgggaattttatagtgcattcgatgatgaagcagctgcgatggatataattttaagtaggaaagaggcttttgcatttcaggtatgttctctagcatcactttgtcgactgtgaacctaccataaactcaaaggagagaaattttcggcatcatactgatatctgcgtaaacctggttacataa

SEQ ID NO: 184978 - DNA, 356 bp, Arabidopsis thaliana landsberg
ctacggataagctggaaaaaaagatcagggagctggccgccctgcaagagtttatgaaggcagccaataaatgcctgcgaaataacaacaaagctgccttcttacaactgccccacgccacccctgaattgtgggagcagctcagcacccccgacccggtgcatggtattggcttcgcttcttacaggctgacgaataataacgcaaacattaaccgccttaaaaagcgcctgcaatcactccgggcggccgcagaatggtcgacaaaagaaattaccgtaaaaggggtgcgcctggtgcagaacgtagaggctaaccgcgtgcagcttattttccctgacaagccgccaaaaaag

SEQ ID NO: 184979 - DNA, 343 bp, Arabidopsis thaliana landsberg
atgcatgctactgtgaagacgaaattggtttctaagtttgttcacaagcttattgttggcgaatggatattcattgagacttttggtcttacctatgcgtatggccagtttcgtcccacaacccatctttacaagatggggtttcaggctagaactgaggtgatgggttgtgagtctatctctgataccaactttctgtctttggctaagttttccaaaatctagagtggtgagcttaaccctcatatgttggttggtgagtggtttagtttctatataatatgattgatctttttccttctaagcgctatcaccaaaagaggaacttatgttttacgaataa

SEQ ID NO: 184980 - DNA, 480 bp, Arabidopsis thaliana landsberg
atctatgcattaggtgcaaaacttggtagatcattagaaggaaataaaccgaggagagataacctgttgaagaaacctctcgggcagagctggattgaagtcagaaatttaattcacacattcacgacaggtgatcagtcgaaattatgtactgatgtgctgtatcccttggtggaaaaaatgagtaggctggataatagaagtgaccaatataatggagaactttggattgaggaagaaggaagggaagaaacttgtggaatccacagtgaaaaatttgccatggcgtttggtctcatttcgtcatccggtgcatctaagacgacgataaggatcttgaaaaatcttaggatgtgccgagactgccatgatactgcaaagtacgtctctaagagatacggctgtgacatattgttggaggacacaagatgcttgcaccactttaagaatggagattgttcctgtaaagattatcggtag

SEQ ID NO: 184981 - DNA, 167 bp, Arabidopsis thaliana landsberg
cacttcagagaaattgggtattgactcggataaacgaaggtctaaaaaatctgactcaaaaaaggcagctcctccacatacagtaaatggtagcaacgaacacgttgttgaagattcagaaagatcccaaaagtgggctttgcagtcacatgggcagaaccttacag

SEQ ID NO: 184982 - DNA, 33 bp, Arabidopsis thaliana landsberg
atgggccgaattcaggttcgttggcccatccag

SEQ ID NO: 184983 - DNA, 527 bp, Arabidopsis thaliana landsberg
atgcacaatttaagcaaagcagataaaacagcgaccctagacattcacaactacgaatacgacgggccccacttggagataataatgcggggcccaataaatcaaactcttcttacatcgcaaagcggtgcacgctccttggtcagttagattttgcaacatagcgtggtgagaaacgattttctaaagtcaactgatttgggtatcgatataattaatacatacatttatgtgtgtatgttgtaaatgatcattaagtatgaaactatgaatgatgaaactatgattagggtttataatatatagtatgaatgggttaaagcttgtggttgactaattttaatatcataaaatgaagattgaggaagaaaagtgaatatttattaaagtaccagaaactcgatggaggcggagatgaggaaaatgacgaatgtggagaagaaggcgtcagcaaggaagccaccgaggagagcgagaaggaaggctgtggccatgaaagtggtcacttcactcgacgatctggctag

SEQ ID NO: 184984 - DNA, 382 bp, Arabidopsis thaliana landsberg
atgaaatcaaaaaagaccaaacataatttcaaatctacttacatcttgtttcgttggacagcggaagaatggtcttccagggttagtcttcgacgccgaggtatagattacgacgtctaatccacattcacactttgaaagaaacccacgttcccaacgacctccgtcttgaatacgaggatacgaattcctagaaatataactcattgttgtcgctcaagatggagaattcgggtatgaagaagaattggagttccaatcgcgtttagaaatgataaagaagaagaagattcagagaattagggatcgaaaattgattttagcgattttattggatttggggtttcgattaagtcaaaaacgacgcagttttggtcactaa

SEQ ID NO: 184985 - DNA, 506 bp, Arabidopsis thaliana landsberg
atgaacgaatccacagtgcaacgagcgaaacctgaacatatggcagctgttgtggatcaatggaaggaaacagagataagcaaatcgagaaagaagtgtgtgttatgttttctttcttggttgtcctgtttaaatgttgctaagaggctaatgggtttaagattttttcaggtacgagaagctaagtgagaagattgtgtcatgggaagataagaagaggaaaaaggcaaagagaaaacttcatagaacagaggtgcctcttcttttctttttcctccactttcctttggttccaaaaactaatccttaaataactatacaaccaatcaatgtggtgaatgtgcagagaagtgtagagaaaacaaagttgaaggcgacccagaggttcagggacgaaaatgaacgtattgagattatcgttgcaagtgcaagagcacatgcgtatgagagtcgaataaaagaagagttgaaggttaaggagaaagcaaacctcatgagaacaactg

SEQ ID NO: 184986 - DNA, 131 bp, Arabidopsis thaliana landsberg
gacgccagcgcctacgcctggctggccgccgatcccgcgcatcggcgcctgttcgcgccgcaacaggccatgggcacgtgcatcaaccgccagttggccacccgtgtgggccgcgccaaccgccagacctg

SEQ ID NO: 184987 - DNA, 34 bp, Arabidopsis thaliana landsberg
atgaaatccgggattcatacagaaggtggtttgg

SEQ ID NO: 184988 - DNA, 52 bp, Arabidopsis thaliana landsberg
gcggaaaggcaattgaacctgctgttaaagctgtcaccgtggtgctaacaaa

SEQ ID NO: 184989 - DNA, 75 bp, Arabidopsis thaliana landsberg
ctcggttatgtcctggatgatgggcagctaagcaaccttttctggcgtttcaaagctgtggcagagcaaaaaaag

SEQ ID NO: 184990 - DNA, 302 bp, Arabidopsis thaliana landsberg
attcagataaaaatgagcgtgcaatggacataatcaatcggttcattggcaattgttgttggatgaacatacatatcgttccaccacatggtgaagtgttcgagataagagtagctcaaggctatggagcacgttggtctcgagatggaaccaaagtatgtatatgggtgagacttgaagtatgtatctttcagacgtgtctgatcatcaattgttttgttgctgtttatttttattggcagttcattggatttcttgagccttacatggaggatggtcactccatggcctggaagcattaa

SEQ ID NO: 184991 - DNA, 546 bp, Arabidopsis thaliana landsberg
aagctctgacgaagaagatgggtgaagaagaagcagtagcagaagaaaatggtggacttaaggtagaatcaggagaacaaaaatcatcctggcctactatgagatttgatgtctctccttatagaacgcaccatttctctaagcagttcaggacagctcgaaaccctaataatttcctcaagggtcttaagtggtacccttttcttcttgtttcaaatcaatctcttgagtagagttttgttctttctcaaagtttggttttttctttttgcctaacttttgaggtactgattttgttactgtttcttatataggtcacctgatggttcatgtttccttgcaagctctgaagataatacacttagtctgtttcatctgtaagttgaataatttcaattgaaatatttttgtagcttaagtatcaataattttgtatgtttgtgtagttttagttctctgttgaatctttagttttgcaaatttgccccatcaggccacaagatggaggggattctaatggctatggagtgccagtccctgaagaag

SEQ ID NO: 184992 - DNA, 408 bp, Arabidopsis thaliana landsberg
atgatagaagaagatgagaaagatttaaagaagaaaaaatccagccctgagccgaaggtggctgttccgaagaaaagaaaagttgccgctgcgaacgcaagaacaactgatatagaggaaaaagttccttcaacgcctcctgctgctgacgtggaggaaacattaaaggtaatgaccgaatctttacctctcaagctaagtccactagggccacaactaatgaaggttttacagaagaaggtggagcctacggcaatcaagaagcctgctgaaaaaaggcgaaggattattactgttattgatgctattgaagaaacgccaccatcggcttcagcgtcaagaacaccggttgccgacagcgtgcagctaccgaggctgccccatcgaagctgcaactgccgaagctga

SEQ ID NO: 184993 - DNA, 507 bp, Arabidopsis thaliana landsberg
atggatattgatgtctttcgacatttggagtcgacaacaccagcatcaaattcatcctctccgggtgtctcgaatcttcggtcgctagcattagaaaagtttccttttctagaatatgcagtacggaacgtgctttatcatgctgatatttcgcaactttttggaatttctcaggatgactttgttgagaatttctttctcagagattggatagcattggacaaccttctcgagagattcaaggtgcgtcatcacactaccgatgcgaatctgttatatatacttgcggaaaggaatctgccgaatctcattcaacttgaactcaagcgacttgaacacattgatatcaaaggtgaacgctatggctttccactccttgcagccttggcacatgagagtgaagatgccgttaaggcacttcttgcaccgcagcccagcaccgattttaacggtctaatacctggtaatttgcaaacttttaaagcagaaggcgattatcaagaagtt

SEQ ID NO: 184994 - DNA, 1911 bp, Arabidopsis thaliana landsberg
gctctaagcattaccctgacactcttgcagatcaccaagcatgcatcaaccaagatggcacggtgcctggtgaaaggagtactgattcattttgtggaaagtattgtcaagaggtagccttcctttttcttttttaccttttatcctggcgctttattacttgaaacgctgagtatttcatttgtttcttcccttctttttctttaatttatagttattcgaggaacttcagttattcattggagtaaaacacccactgcctgagggattttcatggtcattccttcgccgctttgagctccctagtgaggttgccgattgtgacatatctgagaagattgcatataatgccaaaatggctgttgcattttctgttatggatgagtgcttttcacctttggttgatcacaggagtggagtcaacctgcttcaaaacattgtttataattttgggtaagctcattcccaaaacctgtccttatatgcttctgttttgttcaattggtttattggcaagtgttttatggatatgtaaacagtccgtatgttactacttactagattatgtttaaactttttcctatttttttgtaggtcgaacttccatcggctagatttcagcagttttctcactgctgttttggagaggggtgatgaaatcattgctgtggcgtctattaggtatgcctttggtaccatgaaaatgagaacaaggggtaataagtttctagacttatcatactagacttaaaagcattacttagatgtgacattacactgttcgtatcatactagtggactagtggggcaaacaagattagaaaaccactttgtacccctttcattatactatttcttttgttaaggtacagagatcttaagtttgatagaacacactacatttagatgttagcagtttatgtcgtactaagataaagaaattccctaagtatatgcctctacatggtctcaggtgtttgattgaaactctgttgccgggttctcgataaattgagaatactaactgtgtatagaaattagcttttcttcccataggactgatatatctcttactcaggatacacggcaatcaactggcagaaatgccgtttatcggaacccgctatatgtacaggcgtcaagggatgtgtcgtcgactaatggatggcattgaatctgtaggccctcctccacttcttgtcatatcctaaattcctttttctgttagtttggtggttatttacattaaagttcgtcgcttatttctctcaaatgtttcttgctatatctgaagttttattagatgtctggcaattctgctgctatcctgcttgttttggcgacgggccattctgctttttctcaggttctttcaggcattaagaaagaaatatggaaatagctttgcatttccatgtctgatatatgctaaatgacaaaatgattgctagatcacactgaactaaaaacatggatttgtgtagtcatttgatttcaaatatgtataagtgactttataggatagttgatgcgaactagtcaagcttcttagtatgccatatgtcttgatctgctgtgtactatctcagtcttctgttttgtttagtttagacttcattctgtgtacgatttctgaagatccatattacaaatgtgctttatcatcaggcgcttggttctctcaaagtagacaagttagtcataccagcagtgccagaactgattgatacatggacttcaggctttggcttcgcacctgtcaatgattctgagaaaaaaacaattaagaatctgaacttgttggtgttccctggcgtagacatgttggggaaatcattggtgaaggagattttcactgacttagttgtttcatctcccaatggaactaactcagtttctcttggcatctga

SEQ ID NO: 184995 - DNA, 316 bp, Arabidopsis thaliana landsberg
atgttaattagatcaacgggtaggcatctctcgcacttcgatcagcaaaatgtgaccgttgatagaaggcatcgacgattaacaacgaaccaatttggggggaccaggtgggataccggtcaagtgagttgtctgattcctgcagagacagatatacccttcctctaatcgtaatgcggacaaatccttctttttcataaagatgggtattttggtaatcgacactcgaagaagacacgccaagtgtgcatttctaaatttaacccactatactgcaagaacctcgacgatcaagcctgtgggacgttttgcatga

SEQ ID NO: 184996 - DNA, 486 bp, Arabidopsis thaliana landsberg
ggcttcatcggcaaggtgatcaacacgggcggcctgggtccccatgccatccgcaacaaccagcggcccgactggttcttcgaccggtcgcgctatggcggcattctctgcgacattgccagccaccagttcgagcagttcctgttcttctccaatgccatggatgccgaagtggtctcggccagcgtcgccaatcgcggcaatcccgaccggccgggcctgcaggatgtgggtgacgtgcatctgcgtacgcctgatacgaccggctatatccgcgtcgactggttcacccccgaaggcctgcccacctggggcgacgggcgcctcaccatcctgggcaccgagggctatatcgagctacggaaatacatcgacattgccgggcggccgggtgaaaatcacctctttatcgtcaacaagcaggggccgcgccatgtcgattgctcccaggtcgagcggccgttcgggcggctctttctcgacgat

SEQ ID NO: 184997 - DNA, 208 bp, Arabidopsis thaliana landsberg
actgccttgccggatcgactgccgaggatctatgatgagtgatggtcgacgcgtttgcttgtcccttggtcaacccttcgacctgtgcgagttgttgacggcgggcactccagaagcggtgactattgacaaaccagaagcacgcaggtggctaccctgcctgctgcgatacgacctgaagttgattcctgacagtgaagaaatttaa

SEQ ID NO: 184998 - DNA, 202 bp, Arabidopsis thaliana landsberg
atgccgccgctctacccgcaactgcttgacgcgtgcatgtcccatgccgttctaatcctgacagacctacgaacaaattactactggtacaccggctccacactgcgcgagcactacaggctgccgtgcccggaaagcctctacggcgccgacctcgccctcttccgcgggcgaggctctccatgctttacttcaactaccc

SEQ ID NO: 184999 - DNA, 333 bp, Arabidopsis thaliana landsberg
atggtgaggatgaagagcacgaccgcggcgatgctctccaggctgggaatcagccacaggttcgtgcggagcgtctcgctgcgccagtctgattcggcggcgaaccgccggaaggtaaaggccatcccacccggattctggtcgacggaataccactgccgaccaggcttcccggctcacctgcgtaccaggatagccgcgtttcagtgcgtgaaatgctctccgatcggcccgagaatcagcatggggaagtagatgaggcccccgcccctcacgatgaccccggtgaggaaaacggcaaacgtcaggcccgcggtatcgagggtcgcccgg

SEQ ID NO: 185000 - DNA, 1972 bp, Arabidopsis thaliana landsberg
atgtgcgccaagaaagctggtttaggaatttcgtcgaacatgtggtgggcgtatctcatgaaggaccatatcaatcgaataacgactgaatccgatgaaaaaaacgctcacatccgttccgacgagacgaacgtgaatccggatccccgtcgtagaattgtgctgtaacgcataacgatgacgaacgagaggtagagtgacatgcaaaggatttttcaaatctttttttttttgtgcaacgaaacaagaaggcaaaagcacgaatttatctcctaatttttatgaaacgaagcaaatccggtttaaccgattcaaatcgaatcgaaaccgtataaaaaaaaaaatctgatccgaaaacaaaaccaaagtgcaactaaactgattcagttttaatgttcccttatccaaacaaccctaactcaaccgaaccaaatgaaaaccaataaaacctttaattaataaaaaccgacaacatttctgttcctatgattcataaaccgaataattaaaatttggttatctctagtctcaacgctgacgaaatgaataatccaagctacaaaatgaatgtcattatttatttaatcatatccttaattcgtcatgtctgtttcaaagcaaacatagatacattttgatttgaataatttaggtcaaccattaacaaaatctataatggggtaaggtgtcaaatgaatacaagagggttggtatggtgggttagaagaatgttcataactacctcaactacacacaaatctggtatttgtggtttaagccgagctaaaccatagagagaagccacatacataccataaactgcaaccaccaccaccactccacatgacaagagaggttcaccaaacttgacccgacccttattaccccctttgaatgtttggggtaagtaacatataaatatacagatgcattggagggagttttgtattagtcttcaacatgtcttgcaaaggagatatcgtggttggtgtggaggaaggattgtttctcttaccttcaaatctttttaatgaactctttcttgatcgtccatttccacaggtttctattcttttataacatcatgaactattgttattaatgctaaggatgtataattaatcaatctttgttacataatctgtagagtaatcgagtaggtagctactatgatcggaagccaagaatgtggtatgcattgaaccacaagggttccatggtgaggccaaatggtgatgataaaggtgcagcacgagttaagccacgtggcactggagtgtttcttcctgagagaccggtgagtagctcacaagagaaactcaacaacaagccatgccccatcatctcctctcattccagaaaaatctttcttcctaaggaatggtcttattagctagtacaatcagcattttatttactttgtgtataacttatacaattaccgaggctacaacaaaaataagtttaaatgtccttttctagagttggcaccctaaagatcagtattgggtatggttcctcaatgattcttgctttcttgcctctctataccgagctccttaagaacctgaaagatgtcacacgatagaccttcttggtacctaacgtatgtggttcagggtcaatggaggccagagaagttcgccaacaaatgtagctatgattggagacattgtcatcttcaagtttcaagagcaaccgttgaaacctaactaagggaactggtgtaacaccaaagttcggcttccacgtctaataactttgatctcttcaaatagaaaacacctcccatctgcagtttcaaccagaaaacatgagacaagacttatactcactttgtgccactagattctccaaaaacgaacaacaacaattggacaagtattacaccgctaatctcaatgaaaaacaaaaacttctgcaggaatttgaaaatcaagaacaggccgggcaacaaactgaaaccttttaa

SEQ ID NO: 185001 - DNA, 53 bp, Arabidopsis thaliana landsberg
atgctgcagctggctcggagtaggcaggctgcatttggaccgtggctgtgcag

SEQ ID NO: 185002 - DNA, 146 bp, Arabidopsis thaliana landsberg
atgagctgcgtcttccatggaacaaagttttgagagaagctcgtacactcaccgccgcaaacatcgtagtcgctccgccgggaagaaagagaggagaagaagttggtctaacgccgattgaatattatcaaacgacgccgtattga

SEQ ID NO: 185003 - DNA, 275 bp, Arabidopsis thaliana landsberg
atggcagtttattcgtcggctagagtatctggagccgggttgggtcgcacggtcgcgaaccaaacccccgtaggttcattctacgactttgtacatttcagtcctgtttatttacttcgtacacactgagaagtagtactaggaacatttgctatttatacgaggagattcacattggctacgcaatcacgacgcatttgcgactcggccgccagcgctgggacgagaagatcctgctccgtacagtgtgcggcgtctgggctacaagtttctga

SEQ ID NO: 185004 - DNA, 256 bp, Arabidopsis thaliana landsberg
atttggccaatatctgaagcagagatctgcatcaatttctgaatataaacctctgaatggttttgatatgtcgatgcttggtgaagtatgtattctacttacttaaactgttactagcagttgcaaacttcatcgactcatatcctggaaaacttgatatttcctgcagcttgctcttaaggatgctgataagctaatgagtcttcagagcagtttagtgaagtcatatattacaaaggcttgtgccctcatgttg

SEQ ID NO: 185005 - DNA, 1217 bp, Arabidopsis thaliana landsberg
atgtcatcacttttgaggccggtgactggtaaaaggaattacaacattagcaatgcgaagacactcctgctgcagtgtttacgggacgctaaatcacatccactccctcctaggcgctttccggtttcatgctcagatgaaggaatcttgatggatggtgttctggtcacatcagccactaaaaagaaggtgtatgagtctccttcaagctatccaggacgatcagcacgttcttcaatcttccggagtcagctcaagaagactacagagtgtagcagccctataagcgattcaggacctaaccaggttcgtctttcgctctttattgtttacatatttgtgagattagaatcggtaagaacatcactgacttacttaagaaacattgcatgtgatattccacaatggtcacaacatagagttgctagacgttagtgacttgatgtctttcgatgactgttttagatcaaacgaagctgaatcagataatgttggaaatgtctattttttgttgaacatgattccaagtatagatgatgctgaacttccaatgcattgatctattcaggagaagcaaatattgtgtatcattgtcgcaactacgctcacatttatgtattgaaatgtctgttgagagttctttggtgattttgcaggaaaccactcgctctcagcaatcttcttcagctggcaaggaaaatatgctggcaaatagtccttgtacaccaaaggtttttactttacaacgcattgtgtatcaggatttctgaagaatcataagtttataaccagttctcatttgcttttatctgtgtttattaggctgctaaacctttcaaactgcaagcttctgctgaaccattcatcctcacaccaagacaagctgcttctccttatacaccacagcaactcccatatgatcattatagtccacagtttccatgcgctgtaagtttatctcaactcacactttttcttcaatgataaaccctttttgtttcagaaactaactcagactgcaattacgtttgcagaatcccctgcacctgcagctatacccgtacctgcaccggcctcggtctctgatctacgtttatcagagaccaccactttttccgctcttaccccatgggcctgacccctatacgctagatagtcaaaaggactttcctccaattctttttgcaaccaaacacccaccaccagttcacacttag

SEQ ID NO: 185006 - DNA, 248 bp, Arabidopsis thaliana landsberg
cacacacccacattgtcgaccaccaaggtaacttcataaatcataaccaagcctgttgtacaagctaaaatcttaattgagaaccgtgctacgagcgactgcaataattgtctagactatgacatagcggtttagatatgtcacagtttttaccacttttgactcttatcgtctctatgttttcattagggatgtgcattttgaccgaacctagccaaactgaaccaaacctagccaaactgaactga

SEQ ID NO: 185007 - DNA, 754 bp, Arabidopsis thaliana landsberg
gtcctaattgaggttccatactcactactccagtccctactatgtacgataattgtatatcctacgatcggctaccatatgtccgtttacaagatgttttggagcttgtacagcatcttctgctcgttactcatcttcaactacagtgggatgcttatggttgctttgacgccaaacattcacatggcagtgactctacgctcatcttttttctccatgttaaatctgtttgctggctttgtcattccaaaacaggtaaggctccccttatcccccacgccgtttgacatatagccaagatccaacgtatgtgtcacttagtgcatgttaaacctgtggtcttgtagacttattgcatcaataaccagtaggcttagagctatgtcaggtctatttaactcgaaatgttgctgcgttgcgtggaatattaattgtatatcattcatataaaggctcctgaacacaaaaaatgtatcgttttccgtagaaaatcccaaaatggtggatatggatgtactacctgagcccgacatcatgggtgttggaaggattactgagttcgcaatatggagatgtcgacaaagagatattagtatttggagagaagaagagagtttcagctttcttggaggattactttggttacaaacatgaatcattggctgttgtggcgtttgttctcatcgcttatcccattatcgtggcaactctttttgccttcttcatgagcaaactcagtttccaaaagaaatag

SEQ ID NO: 185008 - DNA, 512 bp, Arabidopsis thaliana landsberg
ggtttcagaagacgacgtgaatatgttcaatggtacatttggagagagttttttggaaacgttgacgattcagggcttcagggatcatccatttgccgagcattggatgagaaatgtgaattttatctgcacagatactgttttcacctcagaagattacaggtaataatttttttttttttcgtgaatatagaagaagattggaatgggtttggttttgactgttttagtttttttttcatgatttgcatagcagcaatgatacttctcttgtggaggagattgtaagggctattaagagacgtctacagggcaaaaaacttccgagacgtgtgcaagatgaaaaactacctagccctttagacatgttcatgccaaaagaaccgaatgctcaagaggggtttggaacagagttgctttatgttgctattgctgctttgctctgctatttcattatcccttttgttttcactgattgggatgtcttcagtatccttcagtggctcgttgcg

SEQ ID NO: 185009 - DNA, 270 bp, Arabidopsis thaliana landsberg
gcgctcagagtgctggcgtgggcgttgaccagtattctgactcgggcttgttcgctttgtgggcaacttgtgctcctggacactcggctggtgtggctgatgcgctggtcaatgaagcggccaagctgtcaggtcctctaagcgcctagatttcactgctcacccagttctgattgcgttagcgcccttgaataacaccgagctgcgcgcagccaagaacgccgccaaagcctcgctctttgcccaagactcgctggcttctcgtctcgc

SEQ ID NO: 185010 - DNA, 53 bp, Arabidopsis thaliana landsberg
atgctggtaagtgtgtttcgttcccacaggttgataagattcgtattaggtga

SEQ ID NO: 185011 - DNA, 454 bp, Arabidopsis thaliana landsberg
atggaaaaggtaggtgaagatgaggagaagaccattgaagaagcaaacaactcaactgaggagacgaggagtgataaagaggaggaaaggataaaaggtactattgctgatcaggttgatccagtagattccactgaagaaggttctacgggtccatccaactcacacactgtagtctccaaagatcatgattttagtgaatctgatatggaggacgaagagcaggttctcgagtttttcagacgtaatcacggtttttcacctgaggtcaccaagagaaacaacttcccatatgttaacaactctgaaaggatggtacttcagttccaagaagacacttctgcagaaacagaacaaacaaatgaaatgttccacagtttgaatgatagcaacgagattcttgaaggaaccaagtcatcatcagcttcagatgaggataccgaggcctccccta

SEQ ID NO: 185012 - DNA, 480 bp, Arabidopsis thaliana landsberg
atgccgaagcatggtacgccaccttttttatttagatatatagcactaagttagatattatttctaactatctcgttggttttcgttgcagtcggcgtcacatggtggcagccttgctccaccttctcggcctatactatggcccataagggtaaggcgacgtccgacgtcacctacaacccggatgacggacccgaggcctacaccaaccccgccgtctacagccgcctccatgactacaccgccatggcgcaggaggtccatggcccagactatgatccgagcaccgagccgatcgaccccgatgtgctcatgagggtcggaggaggcaagagacatgggcggtactggattgccgacggggcaatcgactcgtcctccactcccactctgtctcaggtgagagcaaggagcacgggctcgagtccagccatacgacctcggcacgacagctcacagcatcgcatacagcaactcgag

SEQ ID NO: 185013 - DNA, 351 bp, Arabidopsis thaliana landsberg
atggatgcgtatgacgatgctattggtactgctagggaggtttacgaggaggaaattatcgaaccagcagcagaagatgtggctcttaaagactgtcttaacaaggaacagagggccgcctatgataagattttatctgccgttgacactgatcagggcggattattctttgtggatggacctggtggcaccggaaagacttacctatatagagtgctactcgcgacgctacgcagccagggcaagattgcagtggcaacagctacatctggcgttgcggcttccataatgcctggaggaagaaccgcccattcacgcttcaagatacctctcactattgacgatggcgct

SEQ ID NO: 185014 - DNA, 397 bp, Arabidopsis thaliana landsberg
atggagggaaagaaattgaatttgtatgctccattaccatcaataaggcgaattccgtctatgatagagcgttcaagtgagttagagaacaagaagacgacgattacaagaccagagcttcgatcatgtccgagcacaaaacaagaaacgccggtttttgtattaccagaccagagctttgatcatctcacagaaccagcttcaattccttttatgtgggaacaaatccctggaaaaccaaaagatgacatggctacattgattcaagagtcaggtctactagaaaccgatgatgaagaagaagacgaagtagatgaagatttggatacggtttcttcaaatgcaagcttctctgttaactgcagcacaagtggagttagcgaaatcgagaagaccg

SEQ ID NO: 185015 - DNA, 338 bp, Arabidopsis thaliana landsberg
aaataactactttttgcggcgatgagttagaaagaaagattgatggttctccagaagccacagactttgaaggtaacagggaagactattcttctggggagattgattactttgaagccatgaccctgaatatacaggagacaaaggaggaagactacatgccagagccattagtcccagagaatctgaaattcgaagatacatgtattaacaagccaagaagaggacaagcaagacgaggaagaccaaagcgggatttccaaagggatactctacctggtctctcttctctgtcaggcatgaagtcactgaagatattcaaatgtttgggggactga

SEQ ID NO: 185016 - DNA, 98 bp, Arabidopsis thaliana landsberg
atggctacggaatgttcaaactttggtctgatcgatgtagctaacagatgtaagctgctgaggaagcttcatattgatggtggccgcacggataggat

SEQ ID NO: 185017 - DNA, 264 bp, Arabidopsis thaliana landsberg
atgttggcggcgctgcgctggatcgccggcgccacgccgggcagcggcgagctgctgcggctgatggacggcaccccggtcccgtgcggccagaccgtggtcaccgtgaaacgctctgacctggccggatacgccggctacggctattgcgcctcgcattcgcgggtctactggggctccaagctgctgctcatcgtgacctgcgacgggaccgccaccgggttcgccctggccaacccgaaactggacggggaacgcgagacc

SEQ ID NO: 185018 - DNA, 1158 bp, Arabidopsis thaliana landsberg
atgggaagccaaactcctatgcatccttcccggtctccaatgcggcattctggaggtttgtcaccttaatttcgcagtttcaagatccaatcatttgtttgtgtttttgtttctcatttgacaacatgtttgatatgtttatgtaaaaaattcagctacacctatccatgatggaatgaggacacctatgcgtggtagagcttggaatccttacatgcctatgagtcctcctaggtactttaacatggccactcttcatttattcccataaatatttcacattctgagcaagtgtctcaaaccaaaatatggtgttgtgtctcagggataactgggaagatgggaacccgggatcatggggaacaagtccatatgaagcagctacgcctggatcagattggggtagtagtactcctggtcgtagtagttacagagatgccggaacaccaataaacaatggttttgtctactaccttttatgccttaacggtttcttgctttgacgaatcttattctcacacacttttctcatgcagctaatgccccaagtcctatgacaccaagctcaacttcctacttacctaccacacccggaggacaagcaatgactcctggaaccgatctcgatgtcatgtctctcgatataggtgcctgcctatctcttagttttataccattggtgtttttgattctcatattcttaactctaccaggtggagatgcagaaaccaggttcatacccggtatattggccaatgtacacaaagctggagaggatagaaatcccggtgttattcgagatgttcttccggtttgtcctctttaaactacacagaagaatgttgtattggagtaaacattttccagtttactgattatgtaagcctctttttcctttgtggtcatcatcaggatggctcctgtgtagtcgcacttggacacagaggtgaaggcgagacgataagagcgacacagaacaaagtgagcctagtttgtccgaagaagaacgaacgtgtgaagattcttggaggcaagtattgtggttcaacagctaaggtcattggtgaggacggtcaggacggtatagttaagctagatgaaagtctcgatatcaagatattgaagctgactatattagccaagttagttcatgagtga

SEQ ID NO: 185019 - DNA, 409 bp, Arabidopsis thaliana landsberg
  unsure (1)..(409): unsure at all n locations
ctgcagcgcattgggctgaaaggggagcagccgctcaaaggtgagcccaatgagcatttgccgcctgttgattctgacagcgactttgccgccttccagctcaaatatccccaggcagggttcctggattacctgagctatcatatgtttcccannnnnnnnnnnnnnnnnnnnnnnnnnnnnnnnnntttacggaaacgtggaaaccattcctacgcctgccttcttttacaggctgaagctgtgagaggagatactggtaaccctcagcaaaggcaaaaccattattgtaaagctgctgtatgtgcagccgcccgatgaaagcggcatgcgcaccgtggtgtttgagctgaacggctacacccgccgcgtgcaggtgcgcgaccataatgttgccagcgtggtgccg

SEQ ID NO: 185020 - DNA, 547 bp, Arabidopsis thaliana landsberg
gccttgctctgctgcaaagtaatagccagtttcctgaatcatatgaggactgtatggaagctccagcatttcatcttcaggaggctgctatgttgcataaatttgcagaagctgcttatactgtatgtttgacaacacaggctccaaaactcttcttaaaatggtagatttctctaaccttcacgtgttgtgcaggggccgctgcttgatgttgggagaaatcctgctttatttttatgcacatggatttgtagacaagggattttaacaccttggagccgtaaatggtatactatacctggttagctcgtttgaagaaactcaacttgtttctttgaagtttactctttccagttttcatacctttcccttgtgtctgatcttgatacggacaaatacatattatatcaatgtaagaaacttccttgcaattatttgcaggcggcctaaacttgatggtgataattggtggcgaggtcatgcagctgccttccttaagttcataaattttcctgctcatgttcttcgacgaggccgaatttgtagg

SEQ ID NO: 185021 - DNA, 18 bp, Arabidopsis thaliana landsberg
actaatatcatcgagtag

SEQ ID NO: 185022 - DNA, 13 bp, Arabidopsis thaliana landsberg
tggaatccgataa

SEQ ID NO: 185023 - DNA, 553 bp, Arabidopsis thaliana landsberg
atggcactcgttgactatacggattctggagcaaaagatttgcctgaaactgtcctcagctactttctagagcaaaggctattcaagcgcctcaaggaagaaagataccaaacagcaaaggctaccgggaagagcatcaatgatgtaagaatatgaagtggtttcgattcatttgagtttctgttttgagtttctgtttttttatacggaacttgttactttttttctttccaggtacctgaaccagaggatcttactctcagagtcgtgttttcggctgacagaaccttaactgtcaacaaacaatttgccagtttacttcacaaagaaaactttcctagtgaattcccttacagatcaaaggtgagaatcagtagtaccacaactgaatatttgactttagctccaaatatgtatttcaaaacttagttgatattaatttctactctttcaggttatttcttctatttcagaaagttccatgggagttgaatataatgccttctttggcattgtgtttgtcccaaaaagtttaggaatccagaatggttaa

SEQ ID NO: 185024 - DNA, 648 bp, Arabidopsis thaliana landsberg
atgtcagaacgcagactccctgattcagtgataaccattaatgactttaaagcaatagtttctccacctaagaggtatcaaaacccgcatctgctcgatatgcaccgggcacataacccaaaacccgtgcaagaagacatgactaagcttgctctcgagctctatggtccacacacttcacagaaacaagtaatatacttcactcttcttatccagttaattcatttcctctctgattctaatctcgttttctattttaacgacagagctttgatttcctaagtctctcatctgctggagcagcacaatctcatttcccacttccaaactcatttccacagtatcaaatctctgcagcttacaatagccagctctcacctgctacttctagccatcaggtgacctaaatgatctctcttctgagcaagttaatggtttcagttagtagtataacacaaacattctttcttcttgtaggtgcagcagctttctccttatctagccagtcggttccagaccgcttacaacgcaaaccagcagcagcaacaacagcttcaaaaaaggctatgggctgttcagtacagaccaacaaatggaaacaccatgcagtcgaaccaatacagtaaaccaaacctcttcttaacctga

SEQ ID NO: 185025 - DNA, 405 bp, Arabidopsis thaliana landsberg
atggcagaggccgccctcgtttcttcgcggcgatggcaccagacgcaacagatcgaactcctcgccgacggtcgcatcagattgagctttcaaacgccgagtctcgccccagtcgtatcgtgggtccttgaatgggggccgcatgcccgcgccatcgccccacaacgcttgctcgagcttgttaagggtgagctggatgaggcgcgcgcgcagtactgactcgcgctttactcgcgcggtttccagtcagtgactcgatagaactcatgcggagcttcacgacgctcgaatacggagccaatgggctcgtcgagaagctcgtcgacgcgtttgaccatctccgccaacgctcgaagcggcacgatggagatggtctcagcgagcgagctgtactcttcgttctcg

SEQ ID NO: 185026 - DNA, 694 bp, Arabidopsis thaliana landsberg
ttttgtattgtcttaacggaactctccaacttcaggatcttattatgaatctagtgaataccttacaacaagctgctgaaacaacagatggtaagatagacacttctatccactatgtctgatatagcgataaaatattggcgacagttgatcaattttctgatccttgttataggttctcaaaatggaaaggtgccgcctttgcctcgaggatctgacagcaatggaaccgtaagtagatttatttaacctactattcattctcaaaataatgtcactcacatttttggtctctgtcttgggattacaggttgtagaacttacagcagatgagcgagagaggttactacttaccaagataaccgagcttcgagctaggttgttcctcttcttcaatcaatcaaacctttcttataggagatcaatgtggtatagtctatctaattgcttctgaaattcaatttctttaggatgaaagagttgacggaagaacttgaagtagaaaaatcaaaacagacccaagtaagtgaattcacttgatctcatgaacaactcatgaaacaaatttgctagttgttgaaactgaacccacattgagtaaaaactgatttctgaaccataatcatccatctcttgtgtttatctacagctgcagcagaaattgaaatcagtcaccggtcgcgagcaattgtaa

SEQ ID NO: 185027 - DNA, 187 bp, Arabidopsis thaliana landsberg
gatctctcctgaccgtcgattacgtacacgtgtcattcatgcgaacgattacttttttgcatcacgacgtcgttctaatagtcacggccacgagtcgccacaaaccacccaatgttcatatgctgctctgtgtgattttgatggtccaaatttcatagtagttctaatatattgtactatccagtag

SEQ ID NO: 185028 - DNA, 127 bp, Arabidopsis thaliana landsberg
gctggtcctggccgaaaaagaagactacgggtctaaaagttccaaaatttcctcaataatcaaagaaactcttgcaatgctctttatacttgaagctgtaacagatcttaaccattcttgtagatga

SEQ ID NO: 185029 - DNA, 349 bp, Arabidopsis thaliana landsberg
  unsure (1)..(349): unsure at all n locations
atgacggtgctcgatatcctgcgggaggaaaacntgcaggagaacgctcgccaggtcggcgaccacctaagggacggctggcagcgctgatcgaaaaattcccgattgccggggcggttcacggcatgggcctctatctcggcctcgaattcgtgcgcgacagaacgacgctggagccggccaccggcgagacggcggcgatctgcgagcggctgctcgatctcggtgtgctcatgcagccgacaggcgatcacctcaacgtgttgaagatcaaaccgccgctctgcctgacgatcgagagtgccgacttcttcgcagacatgctggaaaaggtgctttccgagggctg

SEQ ID NO: 185030 - DNA, 1497 bp, Arabidopsis thaliana landsberg
tactatctacaccgttggccatccccggcccaacgccaatacaattcatggcgggtcttcttgctcgaatcgttacaaaaaatacgaacaaagagaccagtactccagagagcccgaggagtccgcggactccacaaggctctattctcatggacaagtacgaaataggaagcttcttggccacggaagcttcgctaaggtctatttagcacggaacattcattctggggaggatgttgccatcaaagtcattgacaaggagaagatagtgaagagtggattggccggtcatattaaacgggagatttcaatcctccgccgtgtccgccacccttacattgtacacctactcgaggttatggctacgaagacaaagatttacattgtgatggagtacgttcgaggcggagagctttataatacggtggctagaggacggcttcgagaaggaaccgcgaggagatatttccagcagttgatctcatccgttgctttctgccacagccgcggtgtttaccaccgcgatctcaagcttgagaatctgcttttggacgacaaggggaacgtgaaagtctctgactttgggctcagcgttgtctcggagcagctcaagcaagaaggaatctgtcaaacgttttgcgggacaccagcttatttggcgcctgaggttttgacaaggaaaggttatgaaggtgcaaaagccgatatttggtcttgtggagtgatcttgtttgtattgatggctggttatcttccatttgatgacaagaacatattggttatgtatacaaagatatataaagggcagtttaagtgtcctaaatggttttctcctgagcttgcaaggcttgtgacccggatgctagacacgaatccagatacccgaatcacaataccggagatcatgaagcatagatggttcaagaaagggttcaaacatgtcaaattctatattgaaaacgataagttatgtagggaggatgatgacaatgatgatgacgattcatcatcattgtcatcaggccgatcatcgactgcttcagaaggagatgcagagtttactagaaagaggttgattcaatgccgagacccgcgagtctaaacgcatttgacatcttatcgttctcagatctttcgggtttgtttgaagaaggtggacaaggagcaaggtttgtatctgctgctcctatgacaaagatcatatcgaaattggaagagattgccaaagaggtgaaatttatggtgaggaagaaggattggagcgtgaggctagaaggttgtagagaaggagctaaaggaccgttgacaattagagtcgagatctttgagctgacgccatctcttgtggtggttgaagtgaagaagaaaggaggaaatatagaagagtatgaagagttttgcaacaaggaacttagaccacagctggagaaactgatgcattaccaagcagatgaagttgaagaagtaatgtgtttgccacctgaaattgaacagtga

SEQ ID NO: 185031 - DNA, 173 bp, Arabidopsis thaliana landsberg
tttcggtcagtccaatcgatgtagttcctaagaaaggaggtgttacagcggtcaagaacgacaaggatgaattgattcctacaaggacgattaaaggccatcgtatgtgtatcgattaccggaagctgaatgcttctaccaggaaagatcattttccttctaccatttattga

SEQ ID NO: 185032 - DNA, 258 bp, Arabidopsis thaliana landsberg
aatcaccgaaacgtaccaaatcttaaccaaaatgttgaaaaatgtcaatttttcaataacgaaccaaaccaaattaggttttcggttccatttcagcaccaatttccaaaccggaccggaccaattaacctaaacgctcataactatccaaaactcaggtccgaaacttaaccaaattcagtgattataccttcatacagaggaacacttggttctgtctctgaaattcagcacgaacagaaaccagatcggatttaa

SEQ ID NO: 185033 - DNA, 157 bp, Arabidopsis thaliana landsberg
atggccattctggccgaagacgaggccaccattcagtcgaatatcgccaatctgtccgaaaaagaaaagcagatgcagctcgagaatctgcgggtcacgcgtgaaaccttcgagagcctgttcagcgacgaggcccatgcccgcaccgtggccgccg

SEQ ID NO: 185034 - DNA, 136 bp, Arabidopsis thaliana landsberg
atgactcacgatccaaaggtaatgggtttccaggcccaaatgaagcctaaaccattggcacaactcaacaattatgacgccacgattggtgagcggaggagccaaaaaaccatcaccggaaaagctaggcaagacg

SEQ ID NO: 185035 - DNA, 1561 bp, Arabidopsis thaliana landsberg
gatgcctaaacgagtttttgaaggtttctaagtgccgacgtagcaagggcctagttgtggttccagttttctacggactcacaaattccatagtgaagaaacattgcttggaactgaaaaagatgtatcctgacgataaggtagacgagtggcggaacgctctatgggacatcgcagacttacgaggaggacacgtatcatctcataagcgaaggtttgtacaagtagaaccatttttatatcttgattagtgttcgaatttggtaattcagaacaaaaaaaagcagttgacttaaatgagttcccaaagaaaattgagttcttctttgcttcttttcgcaaatatagttaactaacctaatcaagaaaatatattattttgtgattgaggttttctgaagttcaaatttacttatcaaaacggcgtccttagatttacaaaacgtttggaaatattttgtgtgttcatttttaggagtcaaaccattttacaaaacgttttgaaatattagtggggaaaaaaaaaaaaacgtttcgaaatatcttgaattctgctgaacaataaagagaattagcctacttttctaaaatttagatttttttcccccttttccccttaaaagggatcttttttgtattttttttagccttcatgctttgtgaaatgaagatagataataataatatacaaatttaatattatttttgaattagatcaataaatatgtctccgaaaatgttgaaaatgtctaatccggaaaatccttttaaccatgacctcgttagttgatatattaaaatatctttaataagacgatttgtataaaaatgcagcgactccgaacttgtggaaaaaattgttgccgacgtgcgtcaaaaacttgaccgtaggggtagaattggagtctactccagattgacgaagatagaatacttgctttgcaagcaaccaggctgcatcatccgcagcttaggtatatggggtatggcaggcataggaaagacgacacttgctagagcagcttataccaactttcccgtgattgaagcttcttgcttcatcgaagacttcgacagggagtttcaggagaagggcttctttgggttgttggagaaacagcttggcgtaaaccctcaagttacaagactgagcattcttttaaaaacattacgcagtaaaagaattcttcttgttctcgatgatgtgcgcaagccactgggtgcaacgagttttctttgtgaatttgactggcttggtcctggaagcttgataatcgtaacctctcaagataagcaagtacttgtccaatgtcaggtcaacgagatatataaggttcaaggcttaaacaagcacgagtctctgcagctgttctccagatgtgcgtttggaaaagatgtaccagatcagaacctcctggagttgtctatgaaattcgttgactatgctaacggaaacccgttagctctcagcatttgtggcaagaatctgaagggcaaaacaccaaaagatatgaagagtgtagtccttgaactcaagcgacatctttccgacaagattttc

SEQ ID NO: 185036 - DNA, 211 bp, Arabidopsis thaliana landsberg
atggaaggtaggatcgaagctcttctctccactattctagttgtgacgactctgtgtgcgactactctattgacaccaggacaagccgagggactcgtgacaccgcaattttcttccattcctggttctccaattgttctcacaaaatgttggtcatcactcctcaacattcaaggttgcaaaatcgaaatctttaaatctgttttaaccg

SEQ ID NO: 185037 - DNA, 88 bp, Arabidopsis thaliana landsberg
gagtaagaaacgggagaagagatcaaaacacaagtcccataggagctccaatgatacaccaaacggggcaccgccacccataggttga

SEQ ID NO: 185038 - DNA, 84 bp, Arabidopsis thaliana landsberg
attcatctctatgctcatcgaaatcatcataatcagcaaaatcagaagatctcccagatgctgtatcgttcacaggctcagtag

SEQ ID NO: 185039 - DNA, 235 bp, Arabidopsis thaliana landsberg
atggacagccttgggcacagcgcaggccttcagcggcgcagccaggtcgtggccctggcattggttgtgatgatgcggatagttcctgtccgcatcggctggcacttcgtcgtgatcgcccgcgctgtgcatccacagcgtcgcctcggtgacttcgtgcgcgctcgagagctcgatcgcatgcaccgccgcgccattggcgaggctgccgagcatcaggagaccgatgaacagg

SEQ ID NO: 185040 - DNA, 1100 bp, Arabidopsis thaliana landsberg
gagacgtgacgataagagattaatcgtgaaaaagggtttcgagtgcgacaacaagtacgttgtttcttacaatagagcgttgttgttacgttatcgtgcacttattaacgtcgaatggtgtaaccaatcaagttctattaagtatcttttgaactacatcaaaaagaggatgaaaagggtaatattattcatgacgagatagaaaaatattttagctgcaggtatgttttttccgtacttggtatatggtgtgatgatttgtactgagatttattaggtttatattgcttttttgtacatgtagatatatccaaagtaaatgtatcatttctaaaactcactgaagtttttcattttgtttccactctccaaaaagagagtatatctccaccatacctacatcatacttaaagaaagcaacaaccaaatacaacgaacaaactacaagatccttcagaattcgtaaatcatctacttatccacagttccagttacaagtctcatctacttatcaattactatgtattttgtatacttggctatagtctatggtctcatctacaatcactaacgatgaaagtatatgtttcgtttgatcctacaggcaacacacaattacatttcaaacaccaacaaaagtatacaacctacatatagtataaaaacacaaaaaaatatacaaaatattcatatcattcggaagaaaataacctcacaaatagataaacataagatttctaatgcaatcaagccgaacaatgaaaaaggtaaaagatgaacaatgacacatcggaattctttgtggtgaatcaatgaacgcatctacaattcgcctaattccacaatagaaagccataattcaacaataatcgcagagtctgagaatagaagcttcgtcgtcaacactctccgccggcagctctctgcaattgtactgcaattctcctaattccacaatttgcctaattcctcaatagaagctttgtcgccagctctctccgccggtaactgtctccatcattggtagctctctacatcgccagcagctctctacgtcgccggcaattctctctgccgtcgtcatctctcttcgtcgttag

SEQ ID NO: 185041 - DNA, 858 bp, Arabidopsis thaliana landsberg
atgggtcaacgccgatcaataccgaattctggtgatcggaacatcaaagtaggatggttatggtattggcaacataacttctgtcaatacttcgtgtagttaagaagacatttttaaagtgtgcatgtgtggcggtgtattaagtggcgatgtgttggcttatatttcgtgtagctgataaacatttttccaaaatttttttatatattaactaaccattgataaaaaaaaataaaaaagacattgcatggaattttcaattagagcatatagcttaagaatttttgttaaatcaccgaattataagaccaatcaaagtcgggtgtcaactaaagctagtgagaatgcggatatgtcgcggtagacaggtggcgtaacgtaattaaagataaatagaggaataaaacaaaatcatatcttttttgacattcttttttttacatctaaaaacaaactcatatcatataatagtttcttggcttctctctaaattttaaacagaaaactttccctcctaattcaccaagtttctagggttttcagttctttgtttgggttctttgtgttggtagagatatctccggctgaaatggcggattcgccacggacgagtcaacaaacgccaatactatgcggcgggagttacacaaggtactgccagagatttggtacgacagaggaggcaaagatcacggtgagattgataaggctattagtatcctgacttgtctaaggaaaatagaatcgaagaagccggaatctgatatatctatgataaaagttccaaaagagtttatatgtacactctcgaacaagatcatgattgaagctatgctcatcgcttctcgccaggtttga

SEQ ID NO: 185042 - DNA, 167 bp, Arabidopsis thaliana landsberg
ctcctaagaaaagaccaaggtcctgttcctgtcccaatcctgttacagtcacatttacattctgttataagaaagttggaaaagtttttacatttgtactacaagaaacagagagtttcacaaagttttaccgccagaatccaacggctgctctaagactcatgtaa

SEQ ID NO: 185043 - DNA, 2209 bp, Arabidopsis thaliana landsberg
atgtccctgcaaacactaactgaaattctgaaaaccgcaatagccctagtgaaattgaacaatgtgaaaggaatgggaaagcaagatcatacaatttttgatacggtaaaaagtcagatatctacgacaattctctgagttcagtgtcaatgctcatttttgcaaagatgggtattaaagtttcacagagctatccaattaaagcaatttcaaaactatacactgctacagattctgcattaggagaatcaaaggtctctgatttgatactaccaacagtaaacaacatgcaagttcgaagctatgcaaagatcaaagagttttaaaaaaaaaagttgcttacagatatactaaacacaaaacatttggaagaatatcaaactcctggattcgcactgcagagcataccctgagctaatgacctagaattctgtgaatcgatacccaggcacgaagtcaatctagctgaagccaccgcactgtacaatggaagcaacgattgaagcgaacccagctgaccaatcggcctgtcaaatccaaaaacaaaaccttttatgaattacatcaatcgagaactcacgaatacgaatccaactcaaatccgttttacctcgaaaatccaggcgaaggagggacgccgatgaatgatgaagccgatttgggacgaatagatggcttgttcattgcagatctaaacgcagtaaacgctggttttgacaaagatcgacatcgtgaagccattttgccggaaaaacgaaacgaatggtgaagctgagattttgatttctaggttaacaagagcaagaaagagagagaggggtttttcgaggtttaaccaaaaacgacgacgttatcaaacaaaaagtcaatgacaaacaaacggcatgatgtcccacagtcataccaaaaaccacacgacgtctaaaattgtttaattttcgatccattaaaccaagtaaactttaccttccgtgtaacgccgtctttgtgatctcctacacgtcgccgttattccacacgtgtgccaacgtttcatacaaagaatctccgcacagtttacatgacgtgtatgtataagtaactgtacctatatacttaacacgaatatatatatctcgcataaattctccaactgccgtaacggaattctcaaaaatcatggaatctgtcggatccaatcaaatatctccgtacgtaagtaaccgtgaccaacggcatttcttggctcaaccggtggcagataggatacttcgagctctcgtcaccggatccgtcttctccaccgtcctaatgcaggaacttttcacgttcttggtgcaacgtgtaacgtctacacagtgacgctaatggccacacctacttgcacttgtcccgaccgtaagaagccgtgcaaacacatcttgtttgtcttaatccgagttcttggaattcctctcgacgataagtgtctcaggcaacggagactccggccatgcctcctcttccacctcttctctgccccgacacggcctgactgcctcgccagtttccgcctccaacaacggtttcttcagcttttcccagccaccacttctcaacccggctatactactaactcatcctcctccaccagtaaaatggtaatcttcttttaccctgtacgaatataattgtcgtcgttgtaatgggaaatggttgttaaaaaaatttattacgtcgttttacataaaaatatatctaaactacatgtatttttttacaccgctaaacaaatactcctaaataaccaatgttttaaataaaattttactttacttttaggggatataaatagatcttacatgcatatatcatttgttatattgaataggaaaatgaggtggatgaagagccggcaacatgtccaatatgtctagacgatattatcgcaatagaaaacgtagacggtggaaatggtggagggaaggagaaggaaaccgcggtggtgaagtgcagagtatgcaagaacaaggttcatgatgaatgcatgctggcgtggagaaagagtcgtggacggcggccggccatctgtgtggtatgccgtgcacggtggccagcaaatagatcgagtaagaatcctaatgttggtgataataacgagaactgccacggtaattgttatttgaatttagctccttacgttgatgaggaagtggaggatggggttggcacgagccaacggccatgttga

SEQ ID NO: 185044 - DNA, 42 bp, Arabidopsis thaliana landsberg
atgcaggaaatggaaaggtgtaaaaatggcaaatccgaaaag

SEQ ID NO: 185045 - DNA, 28 bp, Arabidopsis thaliana landsberg
atgtcggatgaaatgcaagctcgtgagg

SEQ ID NO: 185046 - DNA, 918 bp, Arabidopsis thaliana landsberg
gtgacctctaaaaaggatcaagctcaatactgggcacatccttcgaagccatatcagttcattcctgtctcagacatagcggctgcattccgtaactcgaaatacgggcatgctgcggattccaagctggctgcaccatttgacaagaaatctgcggatccttcagctttatgcagaacaaaatttgccatttcaggatgggaaaaccttaaagtttgctttgtacgagaattattattgatcaaacggcacaaatttctttacacttttaggacatgccaggtaaatatctacatctttatgctgcatttgtaaatttggcatcatctagagtattgacacttaggtttgtttccatgacattggttttgtgtggcttttgaatcaagtaaccaataaattttgtctataccataagcctaggtcttcatttgcgcttgcttcaattctgcttttctaaaattagtcttattcttatatatatgcaccattatgtgatacaatttgcatcactatagtgacatcttgacgtagatattattcaaatgtccttagataaaattctaagattctgatccaaaacattttgtgttccataaaggttggatttgtgggacttgtcacagcgacagtgttcttgaaaactagattacacccaacaagcgaacaatttggcaacgagtatctatcttgccttttcttcgggctagtccacatgatgttcaacggtttctctgaactacctctcatgatatcgcgtctcccggtgttttacaagcaaagggataactcctttcatcctgcttggtcatggtctattgctagctggctcttgcgtgtgccttactctgtccttgaagctgttgtctggagtggtgtagtatacttcactgtgggacttgctccctcagcaggcag

SEQ ID NO: 185047 - DNA, 127 bp, Arabidopsis thaliana landsberg
gcctccaacttatgaaacttcttctccttcatcatcaacacaggaacaagaaaaagaaaacataatatcattggatataaagtctatgcttacttcatcactttcacaaattcgactaaccatgtga

SEQ ID NO: 185048 - DNA, 343 bp, Arabidopsis thaliana landsberg
atgaggaaaaaacacggctccgtgccaaaattacatacatgttcaggccccgacagccgcaatgaacaaacacaccggcattcgagatgccattacaaacggaactccggttccccctccgcaggtacgaacaaccccactccgagggggaaggcctgcggagcaacggaaggccgcgaacggcgcgccgtcacctgctccagcagcggcgacgacgacgacttctgctccggggggtcgaacagcggcagcactgacctcagggcggatgctgctgccaggaggcccccgcccacgccaaaactcgtgaggcaaggacgggcagaaggccgtagagttggag

SEQ ID NO: 185049 - DNA, 327 bp, Arabidopsis thaliana landsberg
atggctacaacttaccttgctgatgttaaacccttcaagactagctggcgtgtgcaagtgaaaatcctccacacctggaaacaatacacagcccagtcaggagaaacactcgaaatggtactagctgatcagagggtacgttcatgttatgcaatatgatcaaagtttttcttaatttcatatatatacttcttgatgataaactataatcttctgtgacagggatccaagatccatgcaagtgttaaaaagagtttggtgaatatgtatgacaggcacattgcgcttgaccagtggagagttattgagaacttctctttgggtcaa

SEQ ID NO: 185050 - DNA, 324 bp, Arabidopsis thaliana landsberg
gatatcctcctttgctaccagatgaccttactgaatctctacttctagatgttcttgatggagtaagagttctatatgtaaatggaaggtcccgtgaagccgaattgcttcttgcgcaaaaggtgaaatgaaaatgctctgtttggtgtgttttgcttagttctgtttacgtatgttacagctctttctcactcatctatggtttttatgcaggcacatagcaagaatataccaatcttaattaatgcagagaaaaaaaggacagggctagatgagctcattgacttagctgattatgatatttgccctacccccttccctcag

SEQ ID NO: 185051 - DNA, 1376 bp, Arabidopsis thaliana landsberg
tcaattcgtcgaacaccttgtgtgcacaaaaacacttcaaaaacgttacccttttgagctgcaaattcaaaaaaagaggagagacaaaaccaacaaaggagcgatacaaccaacaaacaaggattagaagctatagattcaaagggaaaagagagacaaaatcaacaaaccttttccatctgaaacgtgagaggatgagtgaaagaagagagaaaggaggagagaaaggtgaagaacaatgtagaatttgggatgtaagaagtggaattagagatggacaaagaagaaatttagggtttgaaggaatcaattttggggatttttttttttcttaagatgtgtttagcgttttgtcgcttaatatttttagatctgagacaataagcggttaagtgaattttttcgcataagtattggtgaaatagatgattttagcttcccgcttagtgattttctatcatagcgtttatcaaacgctattaaaaaataatcaaaataaaaattcatctttcatagtagttacagaaaatgagctatcctcttgtgctatcaatgcgaatatttgttgtagtgtagagtaataaacaaatagattcgagccgagtaaccagagcacacgtgtcttcaaagttcacatgtaacattcccaatctcaagaaatgggctatacattattgaaatcaaaatttgtagcccactaggcctatatgaagcaaactcccaaaaacaagggtaattaatctttaatatgtagctgtataagaattttcatctaagtttagcaaagtaaccttagccactaagagaaacaaacgaaagagagacaaagagagggagagagaaaagagaattatggtgaggcaaaggctttggtcaccatatgagcttcactgatagtcaccgtcaaacacttcacccactagaaccaagatctaatagactagtttgtttgggtaaggaaactcttacataattatgtcttctcctctttcaagtcttttgttttggtcattttggaacttagcttaaaatactaattttaggtgaaaaattagaggtaaacttaggtgaaaaattagaggttgcccactagtctccggaagttgtgccgtctaatgtggcttaggcagaagcaccactagtgaatgtcctgaggctaatgagaagtctatgtttagaaattttgtaggttccaagaatacatgcggagagagcgaggtatgagaggagcatcagaagtgaatattctacagcatggcattaccgaatgaggcatccccacctccaccacatcttgtgcatgcttatagacaagatacatcgtatgtggatgctatcagatatttgaagctcgtgtgtatggagttattttgtga

SEQ ID NO: 185052 - DNA, 409 bp, Arabidopsis thaliana landsberg
agaagaacttctatccaaaagggttacgtgcaatttttcgatatcaagaccctcgagaaagcgacaggcggttttaaagaaagtagtgtaatcggacaaggcggtttcggatgcgtttacaaggcttgtttggacaataacgttaaagcagcggtcaagaagatcgagaacgttagccaagaagcaaaacgagaatttcaggtataaataacataaaccaagttctgtatttcatgttcagattcttgaatctatattgattcttggagatctcagaatgaagttgacttgttgagcaagatccatcactcgaacgttatatcattgttgggctctgcaagcgaaatcaactcgagtttcatcgtttatgagctcatggagaaaggatccttagatgaacagttacatg

SEQ ID NO: 185053 - DNA, 204 bp, Arabidopsis thaliana landsberg
tcagcctttggggccgagtggttcggcaatcctgctgggcctgtgctcgtggaccagattgaggggctctcaatcggtcttgtactggaggcgtcaacctggcaaagacagatgactggggtgccccccaaatggagtattgtggtgtcccgaaaggatatggtggcatactccacatctgattcgggatatatggtggtggtg

SEQ ID NO: 185054 - DNA, 451 bp, Arabidopsis thaliana landsberg
  unsure (1)..(451): unsure at all n locations
ggccgcaggtggagatcggcggcaacgaccgctatgtctcggtcagccgtgccgagttcaagcacatcaccgaggggcgcggcagcatcgaactgcagcagagcgtgctgccgctgggcgaatagccgttcgcgcagcagccacatccttcctttcaaactcgcgcattttccgccaaggnnnnnnnnnnnnnnnnnnnnnncccctgaccgcctgggagcgcccgtactggcagccgaacgacgaggagatcgtcctgcagttctacgtgttcggcgagttcgagtccgtgcgcgtgccgtcccagccctacggcagcccgggcctgccggcgggcatcacctcgaccaatcactatcaccacgcgctgcgcagctgggagggctacccgctccagggctcgctgggcaagctgttcaaggacgaatcgcccgaggcttaccagcgcgcg

SEQ ID NO: 185055 - DNA, 112 bp, Arabidopsis thaliana landsberg
aaatcgtcgtcggaatagttcccgcgacgtgctctactctgtcggatggctcgcctttgggctttcacgcgagacgtatctcgtgccagctgtggcctcacagttgactcac

SEQ ID NO: 185056 - DNA, 835 bp, Arabidopsis thaliana landsberg
attttatggtcctatatctcctccgcatcaaggtcctctcgggtttccagagctgcggatatttgaaatatctgacaataagtttacaggaagcttgccaccaaactactttgtgaactggaaagcatcatcacgcacgatgaatcaagatgggggtttatatatggtatacgaggagaagctgttcgacgaaggcggctatggttatacagatgctttagatttgcaatacaaaggtctacacatggagcaagctaaggccctcacttcctacgccgccattgatttttctggaaatagactcgaaggacagattcctgaatctattggtctcttgaaggcactgattgcagtcaatatatcaaacaacgccttcacaggccatattcccctgtctatggccaatcttgagaatctcgagtcactagacatgtcaagaaaccaactctcggggactattcctaatggactagggagcatttcgtttttggcgtacatcaacgtgtctcacaaccaactcacgggtgaaataccacaaggaacacagattactgggcaatctaaatcttccttcgaagggaatgcagggctttgtggtcttcctctcaaggaaagttgcttcggcactggtgcacctccgatgtatcaccaaaagcaagaagacaaagaagaagaagaagaagaagaagaagaagaagtgttgaacgggagagcagtggcaatagggtatggatctggattattgcttggattggcaatagcacaagttattgcttcatacaaaccggagtggcttgtcaagataattgatctgaataaacgcagaaagcgttag

SEQ ID NO: 185057 - DNA, 302 bp, Arabidopsis thaliana landsberg
atgaagaaagaatctgtatgcgcaatttcaaatgcgaccttacttggttctcatgatcaaatcaagtacgtccctgtcttatttctttctttttgcactttcaacttaacatgcttatagatgatcatcaaagtcacaatctccatttattggtgtgattcagatacatggtggagcagagctgcatcaaacctttatgtgatatcctgttttgtccagatgtaaaaaccatcttaaagtgtctggatggaatggaaaacacattgaaggttggagaggctgaaaagaacgcaggagacgac

SEQ ID NO: 185058 - DNA, 201 bp, Arabidopsis thaliana landsberg
gcccattatagcttaataaaaataaaatatttggaatggacccagcagacttgttttgactgtccgatgatcgaaccaatagtcaatagagaaacatgtcaacgatccgacccgagaaaagcgggtcggattgaaaatacccgcaccgtcgggtttacgataggagagaccaagtggctctcatggcacaagcttctatga

SEQ ID NO: 185059 - DNA, 146 bp, Arabidopsis thaliana landsberg
acgaataattcattacatgaggacgacaaagtattggttggagaatccgccaataccagacatgtgtcggataagatcgaacacgttgataaaattcttcagccgaaatttgaaacaattgaatgcacgattattattaacgttat

SEQ ID NO: 185060 - DNA, 482 bp, Arabidopsis thaliana landsberg
gtgcaccgaaatggcaaggaccagaggagcaagatagccgctggttcgagccaatcaaatggaagaacttctctcacgtaagcacctcacctatcgaacacacagagacccacatcggcgatctctccggcgttcacattgtcactggagctcagctcggggtttgggatttcggatcaaaaaacgttttgcatttgaaactactcttctctaaagtccccggttgtacaataagaaggtccgtctgggaccacactcccgttgcttcctcagggagactggaaccgggaggtccatctacatcaagttcgaccgaggaagtgtcagggcaatcaggaaaactggccaagattgtggattcgtcagagatgttaaaaggaccacaggatttacctggacattggcttgtcactggagcaaagctaggcgttgaaaagggtaagattgtattgcgtgtgaagtattcgttgctaaattattga

SEQ ID NO: 185061 - DNA, 409 bp, Arabidopsis thaliana landsberg
atgcacgagcgcaccgtgcgcgtcgcgatcctcgacgactatcagaacattgcccgcgagatggccgattggtcgatgctcggcgggcgtgccgcgctgacggtcttcaacgaccatatcgccgacgaaacggctctgattgaacggcttaaaccgttcgacgtgctgtgcgtgatgagggaacgaacgccgctgacgcggcggatcctcgaacagcttcccaacctgcgccttatcgcatcgaccggcgcgcgcaacgcatcgatcgacctggatgacgagcgcgagcgcggtatacacgtcgcgcataccggatacatcaagagcccgaccgtcgaactgacgtgggggctgattcttgcgggcgcccggagcatcgtccaagacgcaaactccgtcgcgcgcggcg

SEQ ID NO: 185062 - DNA, 55 bp, Arabidopsis thaliana landsberg
gttaagcattgggccaaagctcatgaagttaacagtgcgctacaccgaaccctga

SEQ ID NO: 185063 - DNA, 212 bp, Arabidopsis thaliana landsberg
aatttactgatgttgttgcaatcaagtatccaaaagtgaatttggattcgcttgttgacgccaggctcggtcttcgactgacaccttgtcagaccacgaaggcaagaagatcagtaaaaagtgtgggacaaggaatgatgggaaatgcagcagattttcttatgggaattagcaatgttaagatcctttacttatcattcgacacacttgag

SEQ ID NO: 185064 - DNA, 468 bp, Arabidopsis thaliana landsberg
accgataaagccacactgctcgccaaagtagttcaacgagtcagagaacttaaacagcaaaccctagagacctccgactccgaccaaacattattaccatcagagaccgacgaaattagtgttctacactttggagactattcaaacgacggtcatataatcttcaaagcctctctatgttgtgaagatagatcagatctcttgccggaccttatggagattctcaagtctcttaacatgaagactctccgagctgagatggtaaccattggtggtcggacaagaagtgttcttgtcgtagctgctgacaaagagatgcacggcgtcgagtctgtgcattttttgcaaaatgctctcaagtcgctgcttgagcggtcaagcaagtcgttgatggaacgtagttctggtggtggaggaggagaacggtcaaagcggcgtcgtgcgctggatcacatcataatggtgtga

SEQ ID NO: 185065 - DNA, 284 bp, Arabidopsis thaliana landsberg
atggacgacgagaccctcgacgagctcgagcgcgtcgcgtgcccctccgccggctcctgcggtggccagtacacggccaacacgatggccatggtcgccgaggcgatcggcctcgcgctgccctacagctgcggcgcgccggcgccgtacgaaatccgcgacgcgatgtgcgccaaggcgggcgagcaggtgatggaactgctcaaggtgcagctccgtccgcgcgacatcgcgacccgcaaggcgttcgagaacgccgccatgacagtaaccgccactgacgg

SEQ ID NO: 185066 - DNA, 111 bp, Arabidopsis thaliana landsberg
atgccggacaataactggctagcgagaagctcactgaacctgcttagcatgcagccaaaccacaaccgatgtaacgggaaggatagtataatgggtgcaagagagacccgt

SEQ ID NO: 185067 - DNA, 748 bp, Arabidopsis thaliana landsberg
  unsure (1)..(748): unsure at all n locations
catggtggtaaagggagttgtttgcaagaaaaatgtggttaataggagaatgagtacgaagattgagaaagctcgactattgattctaggcggtggacttgagtatcaaagggtctcaaaccagttatcaagttttgatactttgttgcaacaggtgaaatttgcctgccgcttacatatttctttttcttcctgttggtggttagaaatggattttgttatctatgtctaaacccttctacctcttnnnnnnnnnnnnnnnnnnnnnnnnnnnnnnnnnnnnnnnnnnnnnnnnnnnngattcacgctgaacgtccaaatattctactagtcgaaaaatcagtttctcgatttgcgcaagagtatcttctagccaaagacatatctcttgttctaaacatcaagaggccacttttagaccgcattgctcgctgcactggtgctcaaataattccttcagtagaccacctctcctctcaaaagctgggttactgtgagaattttcgggtggataggtatcctgaagaacatggttcaactggtcaagttggaaagaaagtggtgaagacgttgatgtattttgagcattgtccaaagccattaggctttactgtaagcattcccaactattagaatttaatacacagaccagattttatattattgcctcatgatattacctcttgctttttatgtcccttcttcttcagattttgctgaggggtgcaaatgaagatgagttaaaaaa

SEQ ID NO: 185068 - DNA, 229 bp, Arabidopsis thaliana landsberg
atgacaaacaagtgcacgctcttgtcaaggatccggaacagagctctctcaccatcgaagagatatccaacaccttcttcgcatgcagcagctcgaggactctctgaagcaagtttcgagatcgatcacaacgaatcaagccaagaggaggaagcgatgcaagaagaagaaactttcaactctcctgccaaaaacactcgatcccgaggaaagaagcccgtgggagaag

SEQ ID NO: 185069 - DNA, 1391 bp, Arabidopsis thaliana landsberg
  unsure (1)..(1391): unsure at all n locations
atgggtaaagaagaggagaaagagagtgggaggaacaagatgaattgttttggaagtgttagatcgatattcatgcacgcggacggtgtagattggttgttgatgggattagggttaatcggagccgtcggtgatggtttcacaactcctcttgttcttctcatcaccagcaagcttatgaacaacatcggtggttcctctttcaacactgataccttcatgcaaagcatctccaaggttctctctctctctctctctttcttctctgccatataattaaccactttgttttcttagtagatcatttttttttttgtcaagatttttggatgctttgttgtccagaatccgttgacaattttgttaataaaccaacaaaattaccaacatataagtataacaaccaaattgacttcttcaagtcttacaagtttacatgtatacttcaatctttgactaatgtttatttttttattttgtgtaattaacagaattctgtagctttgctttatgtggcttgtggatcttgggttgtttgtttccttggtaagcctttctaaaaattaataatattggttcctttccttttctatggnatagntgacttgagtacttgacccccaatattatggatttgattttttttttcgttcttaaaaacaaacagccggatattgttggacaagaacaggggagagacaaacagcaagattgagataaaagtacttaagggcagttttaagacaagatgtgggttactttgatcttcatgttacaagcacttctgatgttatcactagtgtttctagtgacagttttgtcatccaagacgtcctcagtgaaaaagtatctctcacgtttaattatatctttgcataattctaataactatattcttagtgtgtgtaaaccaaccttttatgtttggtgcagttaccgaattttttgatgagcgcatcaacgttcgttggaagctatatagtcggatttatcttgctatggagactcgccatagttggtttacctttcattgtccttctagtgatcccgggccttatgtatggacgagccctcataatcatttcgaggaagatacgtgaagagtacaatgaggctggtttcgtagctgagcaggcaatctcttcggtccgaaccgtctatgcgttctctggggagaggaagacaatatcaaagttctcaaccgcgcttcaagggtcggtgaagctaggtattaaacaagggcttgctaagggaatcactattggaagcaatggaatcacttttgccatgtgggggttcatgtcttggtatggaagccggatggtcatgtaccatggtgctcagggtggtactgtctttgcagttgctgctgctattgctatcggtggcgt

SEQ ID NO: 185070 - DNA, 143 bp, Arabidopsis thaliana landsberg
ggggagaggatcgagaaacctggggcattgaaaaaatccgcgccatggaaaaacaatggggcctggatctggacatttcctggaagaagatcgccaaaaaaatccaaggcctcattctcttcggcaagagtgatgaaagatga

SEQ ID NO: 185071 - DNA, 546 bp, Arabidopsis thaliana landsberg
atgtatgagcagcagcaacatttcatggatttgcaaagcgattctgggtttggggacgatagctcctggctcgccggcgatgacgatcttcgtctctctcctcaccaatctgccgccggtacgaactccggcaatgagaatctagatcgtcgtctcttaaaagatctcgttgagatggttccccttatcgagcattacatggtaaatcctttctaactctcttggccgtttttgtcgagttatcagagctcaataatgtttgggtttcgaggggattgcagattctgggatagattcgacggaattggtttcttaattttgagaaatttgcagcaattttgaaacttttttgacagattgatttggacattaaaatttgaaatttctgaaagataaagactgtagatttcatatttagctcgaaatttattgactctcttctctcactgaaacgatatataggaacataaagaaaggagttcgtttaagcggcgtggttccatgatctacactaagatgccttcaaaagaatccttgtcccgaagg

SEQ ID NO: 185072 - DNA, 331 bp, Arabidopsis thaliana landsberg
tcacgaaagagaggtgtgatgaagtggagagtttggtgtttgatctttttgcaaattgtggtgctacaggtgattaatatatcaaagtttaatatatgtattcaaattaattttcgaatcattactaaatcaacatttcttctttctccattacttagaggaacaactagattttccggtgctttatgcctctgcaaaagaagggtgggcatcttctacctataccaaagaccctcctgtagatgcgaagaatatggcagatttgcttgatgccgtagtaagacatgttcagcctccaaaagcaaaccttgatgagccatttctgatgctg

SEQ ID NO: 185073 - DNA, 60 bp, Arabidopsis thaliana landsberg
atgttgagaaggttgcgtgtttcagataagaatgatgccgatatattcatcgaaaagatt

SEQ ID NO: 185074 - DNA, 541 bp, Arabidopsis thaliana landsberg
tgtatcaacattacagaggtttcagggtcagaagaagagacagacatagatgaattacacgagtctctgaaacaaagcacagactttacaagtgtcttaccggtctgcaattcatcggtaaataacgttttcagatacataatttcctcacaagttctacattttgttaatgaaaatatcttcaatgctcttaacattttcagctagtgactagactgacagggaatgttacagggagattggttatagtaacagctgagaaaataccttcatcggaactcatagacacaaccggtgctggagatgcgtttaccggagctttgctttatggtattacgcttcactaaatcgtagtaaaccaaatgtatctgaacagaatctgaccgactccaattgtttacaggtttgtgcacaggcatggctttagaggaaatgttgacatttgcatctcgagtcgtaagtttgcttcttcttcttttgtttattccagcgctattttcaaaacgctaggcgttacgcgtttgatcagaatagtgattga

SEQ ID NO: 185075 - DNA, 606 bp, Arabidopsis thaliana landsberg
atggtttcctctcagcgtcctgtccccaacaaaatccagaaacagcaatatctatccatcagcccttcaaattctgtcttgaaagatgatgttgaacttgagttctctgatgtgtttggtccactccccgaagaggccaatgatattgcttacgacgagcctgctgttgtctacagtcgatcccactccttggttggcccgtgttcgctcgatagtcattctttgaagctgaccaagctcaccttactagagactgaggactcaattgacttggtggagtgtctcgaaggtgaatctttaaaagaaaatgatgatttctctggtaatgacgacagtgacaatgagaaagctttagagggagatctggtgaaagtctcaggtgtagtaggcatagatgattttgaggttatgaaggttgttgggaaaggtgcgtttgggaaagtctaccaggtgaggaaaaaggagacctctgagatatacgctatgaaagtcatgaggaaagatcacattatggagaagaaccatgctgaatacatgaaagctgagcgcgatattcttacaaaaattgatcacccattcattgttcaacttaaatactcttttcag

SEQ ID NO: 185076 - DNA, 310 bp, Arabidopsis thaliana landsberg
atgcaaaagcaaaaactcgacaaagtaaaacgaataaagaaaacaactcttgctcattcattcatgtgttccaatatgtaggtgttagctttcgtaacggtatttactatctatttgccttttagtttattgactttatctgaatgaaaattaacacctaaacagtcgcagtaatactcaaccaaacttcaaaagttatctcgattttatcgtacggtcacacagtcatttagactatgacatccgggcgtcattgtggagtcatacccaaccggaaaaaccaaccatcgaatcatcacatcgaatataa

SEQ ID NO: 185077 - DNA, 172 bp, Arabidopsis thaliana landsberg
gaacttagtagacatgagtctagcctttacccttctgatttggcgcgtctatatacgaccggatatgatagaattaggacacgatgatactctgattttgggggggatgacaaaaggtttaatggatcttggcttcacagaatcttcgatttggccaagggcagtgatctga

SEQ ID NO: 185078 - DNA, 529 bp, Arabidopsis thaliana landsberg
aaaaatgcagacataatcatatgcacagcctcaggtgctgcagaaataaatgaggaaaggactggaaatatagaagttcttgtggttgatgaggcagctcagcttaaagaatgtgaatcagttgctgcattgcaacttcctggactacgtcacgccattctaataggagatgagtttcagttacctgcaatggttcataacgatcaatgcgagaaggcgaaattcggaagaagcttgttcgagagattggttctgcttggtcataaaaagcatttgcttgatgttcagtaccgaatgcatccttcgattagtcgtttccctaataaagagttttatggtgggagaatcaaagatgctgcaaatgttcaagaaagtatttatcaaaagacgtttcttcaaggaaacatgtttggctcattttcttttatcaatgttggacgtggaaaagaagagtttggtgatggagatagtcccaagaacatggttgaagttgctgtggtttctgaaatcatatcaaatcttttcaaag

SEQ ID NO: 185079 - DNA, 253 bp, Arabidopsis thaliana landsberg
actcgaagaagatatctttctcaacagcttttggaccgaggatttcacgtatgcatgcctcatacctggtcagcggtgagtatgcaaattttcttcctctagattcacatcaattattatgttgttcatatatacatgtagttgattctttcaaaattgcttgtagcatggacttgtcattgaaggtgaacctaaaggtcttcccatcggggaaactcctgaacatctgtctgggcgaaaaatggtaaaaaag

SEQ ID NO: 185080 - DNA, 376 bp, Arabidopsis thaliana landsberg
ttttcaataccccgcggtgcaatctccggcgagagctcctggtccgcggaagagttcttcaacgacggcaaaatcctccctatagaaatgaaaaagatcccggaacccatatatcgtagtaaaacagataaatataaaaccggtttacccaggcctgagataattccaatcgaagattttgaacaggttcttgaaatagaagaaattggagaccaagaagatgaggtaaagttgccattacttccttataactcgaccggttcgaattctatcaagagtcaggtttcgtcttcttcttcatcttctttttacggtagttttccgaaaccgatattgaagaagaaccatggaggttacaagtacaagggacatggag

SEQ ID NO: 185081 - DNA, 559 bp, Arabidopsis thaliana landsberg
atgattaggtccttgctgcaacccaaacttccggagatgcaggaaagaaatggtttcagggaactgctgatgctgttaggcagtttatatgggtctttgaggtcttcttttgtctttcatctcttagtaagtgttcttgtacattgttggaaacatgatatggcggtgtttctgtaggatgccaagacaaagaatgtggaacatgtcttgatcttgtctggggatcatctctatcggatggattacatgaactttgtgcaggttagttttatttttcttatttgtccacactgagcttcatgtaaactttgtttcatttctcgtctttgcagaagcacattgagtccaatgctgatatcacagtttcttgtcttcccatggatgagaggtgtgtctgaggatcattaacattgtttcttgccttgtttattcgatgaacttatttgagcttttccttattcacagccgtgcttcggactttgggctgcttaaaattgaccagtctggtaaaatcattcaattctcggaaaaaccaaagggagatgacttaaaggaaata

SEQ ID NO: 185082 - DNA, 939 bp, Arabidopsis thaliana landsberg
atgggagaaggaccatctgctaggttctcttctgcaggggcttgtctagatcctcacaaagctggttttcttgtcattgttggtggctgcaataagaatctcgaggcgttggatgacatgttctacttacagacaggtttgttaggacctatcgggttttctctgattcttcagtactgtagctaatattctgtatttggttatagcaaatttgcttttgtgcaaggttgctaattattctcctaatcttctttgcttatggagaatagaaggtagatacgatgtccggtttcatcaaaatccagggagatcgtctctaaggaaacaaatgaagctaaaatgccaagggcaggaattaactgtggccaaaaccaacattgaccatggtgtgctaacatgaactcttactttaatcgacattatcttgggaacaaaaaatatagcatttattgtatatggtgttattgtaggaagagagaatgtccctttgaacattggctatattgatcaaagaaaaccgatgtttcaagccagggttactgaaaacgcccctctaggttacactatagaaacgatcattgatggaaaggttcttcgcggtgttttgttttcaaacagacacagctctgtgcgaattgcagattcaagcattagtagtaggcaagtgttagttattattctcttttttgcttaggttatagtttctcttgtgtcccctttgttctaaagcatggtttatttgtgattgataacagggaaaggcctgctacgtcagatggagattgtgatcatagagcaaagataccaagaacttttagcaaggatccagctggtagtagccaacaagctgcttctactgatccttctgatgattctaccaacaaggttgcagatttagatgattcggacacacccatgattgacactgtcgatgctcat

SEQ ID NO: 185083 - DNA, 372 bp, Arabidopsis thaliana landsberg
acgtatcgctgcccggcgaatcgcccgccgaccgtgccgacaagctcttcgtttcgatcaaccagtcgctgcgcaccatcgagaacgagcaattgacccgcatcaccaatctggccgacgcggcctacgtaaaatgccgacacgatcgcggaggcgctgcaagcggccgacctgcctgtcgccagcaatttcggcaaggacgagagcgacgtcggcggcccgctgattcccgtcaacagcgcggcgatgttcgacaccaaggtcaaggaactggacgatgcgctggacacgctcgaccatctgaagcaggaggcgcgccgcctgccgcttgccaatcccgcgccgggccacgcggtcaccagcccgttcggc

SEQ ID NO: 185084 - DNA, 151 bp, Arabidopsis thaliana landsberg
gagagggggaaaaccccccaacagcaagaacaaatacaaaaaactgaataaaaatacaactacattcgggccgtgcgtaacctcacaactacagctgcgtccttcaacgcttatcgaagcaacaggagccggcattgaaccacaagcatga

SEQ ID NO: 185085 - DNA, 280 bp, Arabidopsis thaliana landsberg
ggccaacccgttgacccggtccgacacgacccgaattccgccactccaacggagctctagcaccgccaagagaagccaaaatgatctcagcattacgaagagacaaaggcaaagatgggattttgggaaatctccgagtgaccaattcgtcatccaagctcagtttttctcctccgacaactccgggccaacccgggctaaccggatctccgattcctctcataaccgtacctctctcaatcccgccaaatccaccaccgtcattctcggcgtatattag

SEQ ID NO: 185086 - DNA, 52 bp, Arabidopsis thaliana landsberg
atgatcatagctcaacaagttgtggggaaccagtggcatgaactcaccaaag

SEQ ID NO: 185087 - DNA, 305 bp, Arabidopsis thaliana landsberg
atggctccagccaaactcaatgctaacaaaacgaagaccacctatgacattaaaaacaccaaagcggtgttacaatattattaccaaagagaacttcagcaatcgaattttgtccctatttctgtttcaggttgggataagatatcgtacgactggaacttgccagcagtaactagttcaaggaaaaataccttgaaaaagaagctccaatcattcccctggcaaagagatcttaaagcttttacagtggtgttccatgaagagatcactgacaatgagaggtcatgtgatgagtcttttgagag

SEQ ID NO: 185088 - DNA, 372 bp, Arabidopsis thaliana landsberg
atgcagacgtgcgccagtcctcgtctcatgttggacgattacaagctgaaggtcgatgtcacttatggcgatgcccaggggcttgttcgcgctgacttctgggtacgtaatcttgtgtgtgttatatggaagcaatcattaaaaagttagataacattgcattctttttgtaggcacgttttcggttggccgacggggatgacgcgaaccacgcctagaaggtgtttcaagtaaatgcctatcagttggtgaaggaggccctgtacgaggcaaggattcaggccacgtgcatgtattatcaacaaattttagggcaaaagatgaacaagaagacaagggcctcgagtatataccttcgcgaggaagagtatc

SEQ ID NO: 185089 - DNA, 315 bp, Arabidopsis thaliana landsberg
atgaaccgacggcgacttttggtatcggcgacactgctctcgtatttgctctacggcatggctctcgtctccgttgaagcctccggtggtacgaaattccttaaattaaacgtagattcacttgtttcttaaacactctgttatgcttaggttaaacttagattccttaaccaaatgttatcttctgagtgttaatggtggaaaatctcgtggttataggtgaaaagcttagagataatctggatttgactaaaacgacgacgtcgtcaccgagcatatcacatcggaaaatgctgcttctctctcctggtactg

SEQ ID NO: 185090 - DNA, 282 bp, Arabidopsis thaliana landsberg
atgtgggcgtacgaggagctcgggtggggcggctactggttctgggacccggtggagaacgcctcgctcctcccctggctcaccggtacggcattcctgcactcggtgatgatccaggagaagcgcgggatgttgaagatgtggaacatctacctcatcctggggaccttcctcctcagcatcttcgccaccttcctgacgcgctcggggctcatcgagtcggtgcactccttcgcggagaacacgacgatcgcgtacatcttcctgggctttctcaccgcg

SEQ ID NO: 185091 - DNA, 536 bp, Arabidopsis thaliana landsberg
cgacgagggtgcggaggttgaacaaatcgtggggcatgtaaaggaaatcctaagaacaatttcaggggagattccacgaggaagagaaagtgaatcgccgagaggagaaggagaaggagaagcagagcctaagactactccttcagatgattctctactccatgggattgaaacaagggtagagcaactaaaagagaagctagagttgaaatctgaaaatgtcactcgctttatcggcgttgttgggatgcctggaataggtaaaacgactcttgccaagagactattcagtgaatgtggaaaacatttcctgcataagatgtttctagatgacgtgagccagaagccagagccttttttagacgagacgctgcacacggacctattgctcgggttatggaagagcaaaaacaatgggagagatggaaatagagccaagttatcgattgactacataaagactcaactacaaggaaaaaaagtttttgttgttcttgacaatgtgggtgacaagagtcagatagataagattcttg

SEQ ID NO: 185092 - DNA, 134 bp, Arabidopsis thaliana landsberg
atgggtcttttagccgcaagtaaaggcaaacccatggaaggcattgttgagcaagtccacgatggcagcaccattcgcgtttatcttctcccggaatattcagttcgtacaaggattttgttgctggactccac

SEQ ID NO: 185093 - DNA, 160 bp, Arabidopsis thaliana landsberg
atggagtatgtggccatcattaaagcgtcgaattggaatggagagagtcacgtgctcatgaagcgagccggcgttggagctagacccatgtcaagagattcacccccagcccgagttaagccggcgtgctctgaagtgaatagcttcccaccggaaacac

SEQ ID NO: 185094 - DNA, 2534 bp, Arabidopsis thaliana landsberg
ggaattcgataatcatactcggagtgaggaagatatcactctcacaggtaccttttgtctgtgttttttttccttggttctagatgcagcataccatgattttgaggtgtttatgatgttgatgcttatttttcagatcaaattcctactggcattgatccttatgttgctgtaacattcgacgaggtgagattactgcttgcttcttatgacattgaagttgattctgacttcttgtttcccatgtctccgagcacttgttattgaatgaaagtttgtatgcctttcttacaggacatcatctcagaatctatcccgatggatgtcgagtgaggctcttcatagagttttgatttcctttactacaccttgctcttaatcttccttatctgtttagttgatcttctttaataatgttgttacatatttttatgctttgagcagccaatcaacagaacctgtgcgtaggcataccggagaaattgatgttgaaacggctcatgagacaggaccagacaatgagccaagagactcccctatccccttcgatactggaacctatagtcaaagtaaaaacacagaggaattcactgaagtccaggatcctagacaaagtaacttgacagaagagcgcattcccaattccgagagaaacgatgccacttctcctggaactgttcccgagattgagagaatgcgtgacgctgcacatgatctaagccccacgtcccatccatcatttgctgcacaacaacaggatgtcagagttgaacgcactgagtcattggatgaaactttgaatgagaaggaacccactatccctagtattgatgaagaaatgttaaattctggaaggcattctgcgtttgagcttcgctcaggatctccaggttctgctgctggttctgaggaagaacgtgcagattttggtgagctagcaacatagtctgataatttgaagcttaaccactacattctctctcttattatctatttaaaacacttttttctttatgttaagtgcatccatcacctcaactggtgcttcagccatctcctccccaaccacaaagaagggcaaggaagaggaagaactttgatggtgtcacagtattaaccaacaagtaataacttttccgttgcttcatgtggctttgattatttcattacctgttttgcatactgattactgaatttggaacaggaacataagtgaaaggcttaaggatcctagtaagactctacgtaagagaaagaagttgtcttcatcaaaactaggttttcggagacttgataaccagtcaaagaaggatcaacttttcaatgagcccttgtttactggtaactttctttgattattattttattttcgacagttttgccttctttttccctttgtttttgaagaaagattattgcctgtatgtgtcaacctgcaggcttctcagatgatttacgcaatgtctttgaaaaggactatgtagcttcaaagccacatcttgctgtttctgatgaaactttaccagaacctgcatctgtatctcctactcgagaagctgaagtagaaattaatccggtctctccaattccagattctactaatccagacagtacagttcagctatctccagcgcagaaaactgaagatgtcctagactctgcaggtcctcgacccgcgcatgcagagtctgtagcaacagaagcacaatctcctcggacatttgataacgatgacatgggaatagaacatttaagggatggtggtttccctgtgtacatgccgtcaccacctccaagatcttcaccttttagaaccgatgacttcaccactcagtctggaaattgggagacagaatcttatagaacagagccttcaacttccacagttccagaggacttgcctggccaaagaaatttggggctttcacctgtttctgaaaggactgacgaggtttgttctcgcatgttcgcgtgttttgtttttaccattcttggtgcgttgctaaccttgatagcaataccatttgcatgtgccatacaggaactttatttcctggaggtaggtggcaattccccagtaggaacaccagctagtcaagattctgctgctttgacagggagagcaaggtatatatattcctaaaaccatgtggatttcatttaagagcctactgtttctctactaacctgtaacattcattgaacattgcagagccttggctcagtatcttaaacaacgttcttcaagtagtcccaccacatcaagccatccttctggagatctaagtttgagcgagatcttggcaggaaagacaaggaagctagctgctcgaatgttcttcgagacactggtgagtgattctctgtacatatgtttttctttgtatctctgtagtgcctcgagcttagacgagttgtttttgaatttgcaggttttgaagtctaggggacttatagatatgcaacaggaccgaccatacggagatatcgctttgaagttgatgcctgcccttttttctaaggttcaaacgtga

SEQ ID NO: 185095 - DNA, 522 bp, Arabidopsis thaliana landsberg
  unsure (1)..(522): unsure at all n locations
cgtacgggaccatacccgaccgcaaatcgattcatcaatgcccgcagtccgggaaatttcgcgcaagctggaattgccgcaatccagcgccaccaaatcgaacggcgtcacactggattgcttcgtcgctacgctcctcgcaatgacggtcaaagcgccggactccctgcccgcgcgggaatgacggctcttctgaagctttggtcagtacgctcgctcgtcaccccgcaacgcgcggatgacggtcagggcaatgagcttgagatccatcgtcaaactgatgttgcggcaatagaacacgtcgaaacnnnnnnnnnnnnnnnnnnnnnnnnnnnnnnntgtttcaccgcggcagccggagatttgcgcaagaccggaaacacccggcttgacgacattgcgaagcgggtattgaggcaccagatcctgaaacatgtgatccagttcaggaacatgcggacgcgggccgatcaccgacatttcaccgcgcagcacgttgagaaattgcggaatctcgtccag

SEQ ID NO: 185096 - DNA, 588 bp, Arabidopsis thaliana landsberg
aaaggtctgtcaaggcgagcaatgtgctgaattcaagtactattgaggtcacattggatccaaattattcagatttgggatttgccgataaaagtgacgatgatcttgatggttgggagtttaagactgctgagtctatgtttggaactcttggtggaagttataaggtatgttgtagataagcttacgccttttcttattgttctctagtgaggaaattgtacttgttgcgtagagcaatttgtaatgttttgctatttgtatagtttttttaagatatattaagggagatgaatctttacgttgacattttgacatagtcagcaagatgttgtgatgcgcttttacatatctgtattctagcaggaggaacgagagaaagcggtccagaatacagcggatgtaagttcaggtgtttggagttcacctgctataaatggaacaggtccaaattttgatactgctaaagtagatgcagttaagttagtggctgaacgggaaaatggagatgatgacccttgggacaatggcggatgggagtttaaggttgctgaagcgaaagagccaaagcgcgatttaactaacaag

SEQ ID NO: 185097 - DNA, 276 bp, Arabidopsis thaliana landsberg
atgtatccttgtggctacgttgctcaagtcaccaacttgtctcctcaagccactgagaaagatgttcataggatcttctctcactgtggtatcggcgagctcgttgaaatcaccgggtaacaacaacgttcattgatcagtagattattaatcattcttgaatctgtttatattttgtttcatgtctccatggatttcatgtgccaaggggatgcattaacggcttatgtaaccttcagagatgcgtatgctctggatatggctgtgttacttagc

SEQ ID NO: 185098 - DNA, 322 bp, Arabidopsis thaliana landsberg
atgttcattaataatcataccgtccatggattcgaacaaatggatgacttaaagaaccaccagcttgaaaaaaacataaataaaagtaggttttgggtaactgtatgtgcttggtgaagatcatatgtattatcggctaactgaaaatcatcaagacttattgcaggcttacggaaccatcacaaccggctgcaccataatagaattaaggttctctaaaccctttcagaatcatccacttagatttggccataaacagttgtccattttaccaaaagcacttgttcatcgtagtacttacgaaagtaaccaaaacacatga

SEQ ID NO: 185099 - DNA, 150 bp, Arabidopsis thaliana landsberg
atggattcgattcagcaacgaagaggtgggattgtatctgtctctccagctcagacaccacgatcaagtgacaaatcagcaagagaatcgagatcttctgaatcaaattcaaccaatagaaatgataaagaaaagggtgtgaatgtgcag

SEQ ID NO: 185100 - DNA, 526 bp, Arabidopsis thaliana landsberg
gtgatgagtacgttgacatcgtcaaaagagcttttggttctgatgaagaatattgataaagcctttcactctaaacaaactggaccaggaaactcaaaagtgaacgaattgtctagattttctccatctatccgtgagcagttgaaggtatgcctatatttttcctcaacaccaattgttatctgttctccggtcatagaacgcttttccagtgattttactcttatgtatccgccatcctttgtcttcatacttatttagctttttcatcataacacccttggaagtttaacaaaagactgtaaaatcaatctttttttcacataagtcacataagtactcaaactctatactgaaaaatcatgtttaactgcttgtggaacttcaggattgggaagatgggttgtgtgagagcaacgctgatggctcatacttgcatgaaaactggaacaaagacttgaaactctttagtgatggtgaagatggcggacaacaactgcttcaggttaatgtcttccttttataa

SEQ ID NO: 185101 - DNA, 561 bp, Arabidopsis thaliana landsberg
atgttccgttgtgctgcagcatttcagtggttggatcggaggattacccaatcaagatacgcccatgtaggttatgtttctttagtggatatatagttcctcatatcaatacttttttgcagttattgacatttcctgtacaactgactaggtgcctctggggaattttggacttgattggctaacattcacaatagatatcttcctatccagggcactccgtgaccagcaacaggttctttcttcgaattttcgtctactttctaatacttttaatagttccaatgttacgccatatgctttctttttctttctttttttcctcgctctctttttttctgtttgcctttttgcttttgctctgtgtgtgcatcttcactgattgtgattttttctttttttccttttcttttagaagtgcatattatgtatttagaaagagaagagcagcttttccatatcactgaattttcttttgtataacaggtcctttgggtgtcagataatggtgttccagaccttggaggtataaacaatgaagaggcattctttgccgatgag

SEQ ID NO: 185102 - DNA, 379 bp, Arabidopsis thaliana landsberg
atgacgcgggcgaagacgaacgcctggtcggcgcgcctctccgatcttctgttcccgaccgacgagaagaattggggcatccagccgacgccggttccaaccttggcgcgcaaggcgaaggaagcggtcgaccacgccaaggccggcacccagctcgccaatcaggagcaagaccccaagcgcgccgcccagatcgcggcgatggcgaacgacttcgcccaggcggccaaggacaccgaagccgagatcgaggaagccaagaagcgctgcgaccggatggaaaccgcgatcgacgatcagctcgtcgaggcggactatgccgtccagtgcaggctcatcatcgaggatgcctgcaagatcggcaccggcattctgaaag

SEQ ID NO: 185103 - DNA, 532 bp, Arabidopsis thaliana landsberg
atggtctggggcgcatccgaagctgggagtatgcgtgggggtccggcttccccatcgcggccgacacccgccattggagggcgtcgaaggggagaggatcaggggacattcgtgagccctcccagtcagcttccggggtcatctcccagagcgacagcgccgctccgccaatgggagcacccttcggcggtggatggcggcgatcacacccgcagcggtaagtcccccctcccgcaactccttcaaggcctggagaaggggctcgagatttttctgcctctcgtgcggggtcccgtggcgccaggcgtcggtggcagccgtaacaactcgctgagaaaacggtgggagcaactcaccgtcgttccggaggtagaaccaccggcgctgccaccccgttgttcgaagacgcgagaatggcaggaatgtactgcaacgcccgcgactgcctcaacaagagaatgcagcctgcgggccgcaccgctgcacggatcctctctccccgtcgacaaggcgaaaggtcggcgagaaagaa

SEQ ID NO: 185104 - DNA, 398 bp, Arabidopsis thaliana landsberg
cttgcggaacgcgtcggcggcagccttgagaaccagctcgcgatcgaagccgcaaacggtggcggtatgcgaaggcatcgaagatttcccggacgaatcaatgcgccggcatcaggtattcggcaatggggccgagcgccaacgccggcaggaaggtgagtgcgcccaccacgatcaccacgcaggccagcagcacgacgaacagcggcgtgtgcgtgggcagcgtgccggccgattccggcacgtggcgtttcgcggcaagcgagccggccatcgccagcatcgcgatgatcagcgggaagcgcgccaggaacatgcagatgcccagcaacacgttccagaacagggtattcgccgagagccccgcaaacgcgctggcgttgttgttcgatgccgag

SEQ ID NO: 185105 - DNA, 267 bp, Arabidopsis thaliana landsberg
gttgaaaatgtcttcaggaaacaaacaaaaccaagagatgatgacgtgttgcctcaccaatcaaataatattttcgacaaaagaaaactaacaaattatgatggagttggagaaaaaaactcaaccaatagaagtcaattggaagcaagggttcttttcgtaatttccactcgaattcaatgcccggacaaaagggtgttttcgtcagaaccgagaaatacgaacaacgaagaaactagaggtccactgtccaagaaaaatgcttaa

SEQ ID NO: 185106 - DNA, 565 bp, Arabidopsis thaliana landsberg
cgaatccaaacgctttcaacatagatctgaggtttctccactcaatcgacatttttctcaacccaatcgaaagatttgaaaggtaataacttcttcggttcaaatccttcttctttggtttataggttcttgtctgaatgtgtatttcgatttgttgttttctttgtctaatccgatttatgtttttgttgaagatgtttgggggaaacgattatacccgatggctctctctgacaagtggttcaaatcttgtgggtggtgatgctacttctccaggtaacacatcggcggtctaagataatcgccaagcccactctcgccattcccgtcgacactccggttcgcctgctatgtccacccgttcgcctgctatgtccaccggttcgcctgctcaatccaccggttctcctgccatatccaccggttcaccagttcttttcagtggttctccgtcgtcaccaggcacgggatcttctgctacaccagccagtggttcacattcttcactggccaatcaatacggatagccaccatctttacggatcaacaatctaaccttggatga

SEQ ID NO: 185107 - DNA, 2055 bp, Arabidopsis thaliana landsberg
aaagctagatgagaccgagtatgcagcatggaacagtgaatttcacaaagccaaaacttcagttggagctgatagagatgaaatgctcgagaaggtttcagatatgatggagaaggaattgatccttgttggagctactgctgtggaggacaaactgcaaaaaggggtatgtagcatagttcaaaatatgattataactgagaaacagcctttccaaaatcattttcaacttactgtttgtatctcactttaggtgcctcaatgcatagataaccttgcccaagctggtctcaaaatatgggttttgacaggagataagatggagacagcaataaacatagggtttgttcttcattgttactgataataccacagactcctaaactgtttctgactagatacatttctaaaactaagtggactaattgagttctttggttgatcccaatgcagatatgcctgcagtttactacgacagggtatgaagcagatatccatttcacttacaaatgtggaggaatcatcacaaaactctgaagctgtatgtattttgtcgatgctataattaaaaaccaacttttacagctgtttcagtagaaacttgcatgtgataacaaaacttgttaatggtcaggctgcaaaggagagcattttgatgcagatcacaaatgcttcacagatgattaaaattgaaaaggatccacatgcagcatttgctttgatcattgatggaaaaacacttacctatgctttgaggatgatgtcaagtatcagtttcttgcccttgcagttgactgtgcatcagtgatatgctgtcgtgtctctcccaaacagaaagcacttgtaagaatagttccacaattctcaaaacatctttcttggtttcagaatattacatatgccatattttgtttatcttggtttttgtaggtaacaaggctggccaaagaaggaacaggaaaaacaactttggcaattggtgatggtgcaaatgatgttggaatgattcaagaagctgatattggtgttggcatcagtggcgttgaaggcatgcaggttgcttaaaaacttttcttcagcacaatgagacatggttaagttttgttggtttttctgagagtagttggttctgtttctttgcaggcagtaatggcaagtgacttctccatagcccagtttcggtttcttgagagactacttgttgtccacggacattggtgctacaaacgaatagcccagatggtaatatatgcattgatataactcaccagaaaacaaatatctatatatatacctgatcttgattcgtcattgttggtttcacagatttgttatttcttctacaagaacataacctttggtctgactctcttctacttcgaatgctttaccggattttctggtcaatcaatatacaacgactcctacttactactcttcaacgttgttctcacttctctcccggtcatttccctcggagtttttgaacaagatgttccttctgatgtctgcttacaggttatataaagtcctctccatcatctttcacatatataacaaaaccttctttttggatcttgattcatttcttggcctgttttctttatctagttccctgcattgtatcaacaaggccccaagaacctgttcttcgactggtacagaatccttggatggatggggaatggagtttatgcatccatagtcatctttacactcaaccttggaatcttccatgttcaatcattccgctcagatggccaaaccgcagatatgaatgccatgggaaccgcaatgttcacatgcatcatatgggcagtaaatgttcaaatagctctaaccatgagtcacttcacttggatccaacacgtaatgatttggggaagcataggagcttggtacgtcttcctcgctctttacggtatgttaccagtaaaactctctggtaacatctttcacatgctcgtcgagattcttgcccctgcacccatcatctggcttacttcacttctggtcattgccgccacaacgctaccttacttgttccacatttaa

SEQ ID NO: 185108 - DNA, 274 bp, Arabidopsis thaliana landsberg
atggcgaattgccaaaccctagcgcattttaagcaagatttcggactcgaatttgagtgggttcgtaatcaagttggcggcgtcgatgctgaattgagagtcgcgcgggaaaatagaatgtgggtaatcgcgagatggtgaaaatagggtttgcgataaatgagtacatgtatatgtgattagttttagctcaagtggagctaagattcgtagaataaaagaagacggtcgcaagaggagaatggacgagctcaaaatccggtcattttgtggc

SEQ ID NO: 185109 - DNA, 787 bp, Arabidopsis thaliana landsberg
atgtctttcgtgcttttcgactacttcgaaagtggatcccgaaaacgacggagtacacgtaagcagccaaggctgaccgagccgagggactcctacgcctccgggatacggatacctcactcatcaccttctgcgataagtaactcgcgtttggataagcgattccgcggaccgaacaagtcttcacgctcgaaagctcctctgccgaagtgattcttcgggcctcctcgactgtgtcggtggcagaaccctatggacgggcaagggtgcgcgtaagcggcaaggccgaccgagccgagggattcctacgcctccgggatacggatacctcactcatcaccttccgtgaaaagcaactctcgctcgcacagacaattctgttaccgacgaaaaagtccagatactcgaaacaagaggaaaagaagcgcatctttacaacacggcgagggtgtgtttgggcctcggcgaccgcagaaaacacacgctacaagacaatccgatcctgcaggctcggatcttgacggctgaagggagcagcagcaccctcggcatcgacgacacttcggtgaggtccgacctagcctcggacggcgacccggtccgaggatctccactctgaaggacaacgtcatcaccaagccctgaccatcgccgccagggtcttctccgagaatccggcccgagcaggcggctcggccggtcaccccgaggcctcgaccagctgtcctccgaggacatcagctcgcccgaggcctcggcagatcaattccggcgtcggtcccgctaa

SEQ ID NO: 185110 - DNA, 500 bp, Arabidopsis thaliana landsberg
atgaattcagaaacatcttaccactaccaagcctttcgtctgaagagctgcaagcctattttgttcaccaaaacttgttttcttcattggggaaccaagcaaccgtgagaaatcaattgcatctgaaagaatcatcgaaaaaaacccagaaaattccaagttccacaaacaccaacagaaaaattacccattaatgtccatcttgaagtttcattgtcgccttctgcgttgtgtttccaggtgcttcacgggcaccaccatcagctatccagccacaagacctggctacacaaaatttgagaaactcgaggaccctctgatagaatttaccaacatgaaaaggacaatcatcctcgatcttgatgaaacgttggttcacgcaacaacacatcttccgggagttaaacatgatttcatggtgatggtgaaaatggaaagggagataatgccaatctttgtggtgaaacgtcccggtgtgactgaattcttggagagacttg

SEQ ID NO: 185111 - DNA, 813 bp, Arabidopsis thaliana landsberg
atgcccgtagacgatccgaccgagttcccagaacacatctggtaccaaggtcaggccatccttgaacatcgttcctcacgaacacggcctaaggcttttcaacccgtaccatgtccgtaagttgtgttagtccggacaagactaatatcagaagtacacaaggatttttaaagaaaatctcctttattcaataaaacatgaaaacacttacaatagattgggatcccgaggctaatgcccaaatcgagtaaatttataaatctaattttactaagacaacaaactctacaccggttccccaaggtccgtggtcccctttaggtctccccaactaaggttacttgtaagacaaaaagtagttacttgagtaatctaagattactcagtgagcccgggtttctaacaaataacaaaaatcccaatcccagtccccaatcaaacaatgaatacgagtatactcaatggagtatactcgacacaaaatgacacaacacaaaccaacaagcaatgaatactctttatggagtgattgcagcgggcactgcttaatttaaaactagcatgctgacgactcttcatcctacgggctctatactatacgatgctgatttcgcacaaggcaatgtctccaaccgctatacacaaagtctaaaacgatcacatcccttccccactccaaatcgtgtaaaagggaccaactcctttatagtaaaacttttactaccccgttgggcagtctcgggtggtagcgaaccattccgagctattgggacaatcacgacatcgtcacaccttagtcataaaaatgactaa

SEQ ID NO: 185112 - DNA, 35 bp, Arabidopsis thaliana landsberg
agttcgtctccgttaagaatccatccgatgaatga

SEQ ID NO: 185113 - DNA, 213 bp, Arabidopsis thaliana landsberg
atcaaggatcctagtgttctgccacaacccttagtgaattttgttggaaaaacattccagtttgtcgtatcaattgagaaggacaacattaatgatggtaatgacacatacaaagttgcatacgcttgggttggtcttgagcctttacaaagtgacaccattcatgattctgacttgcatgatgatcttcagactattgtttcagttgaacag

SEQ ID NO: 185114 - DNA, 81 bp, Arabidopsis thaliana landsberg
aattccactcagccacaccgaagatctctaaaaggagcagttattccaaaagaactacgagcgaagcagccgcagaaagag

SEQ ID NO: 185115 - DNA, 536 bp, Arabidopsis thaliana landsberg
atgtttgggcccgacaccatcccccggtaagactcaattcgattcaacttcagagtttgccattatcattatttattgccactaaattattatggactctgtgtctctcatttattactttctaacaaactccatattttagtagagcctcctcctactagcctggatcttttgtgtattttgtactagtattcaagtccctgtcttcaatccctactcaaactgagattactttaaccttagattattggtctactaaattgacttggtcttttcaaacaagatttccatttttctaaaacgtctatatatatttagtaatgtttataatacaatctaaggcgtatacgttttcttttttcttttctactggttcgacttcttagaattgaattttgcccagaggaaagtaacaaattatctcttttgcaaatccggtcactgacggtgcactgcatcacattcacgtgccattccaacgcacaaccgtattccgatacttttttccttcttctacccgtacgctgttattataa

SEQ ID NO: 185116 - DNA, 328 bp, Arabidopsis thaliana landsberg
atggcggctggggcgacgctgatcagcatgacgggcttcgcccgtgctgaaggccgacttgagggtaaggcggcctgcggctgggcctgggaagccaagagcgtcaacggcaagaacctcgacgtgcgcctgcgcacgccgcatgggcacgactccctcgagcagcccgcccgccaggcagttggcgaattgttcgtccgcggctccatcaatctgacgctcgtggtgtcggcagagaatgcatccgccggcaccggtgtagacgaagccgtactcgatgcgctcatcgacctcgtcaaacgcaagacggcgcagcacggcacagaca

SEQ ID NO: 185117 - DNA, 724 bp, Arabidopsis thaliana landsberg
atgacccagcagagagtaagtagagatatatattacgggaaagcattctgtaacatgatgatacaaagccaaaaacagaagcaagacctaaattcagattcaatagaatgtgatgtctctctcaagaccaaaaaagataattctagcttgtaaagaacaaatttcaagaaaatgccgaagctaatgcaataaaataaactgatcaagcaatatacccaatcagatggagtaaacccaggaattcgaaagagttaaaaattcagaagctacttgcagaattgatggcttgtagtttcagttcgattttgcctttttcttgtatcttctcatcgtatatggtctcttttggcatttaaaaaagtttcagtcattcagtgaatattaacaaactttttagttagagcaaagaaaataatatttacaaagtaacccctcagccaaaattgcaaacaaaactaccctctccctttgctctctttctcaacaaaacacacataaaaagaaaaggaaaaaaaaactcaaaactccagtagaaggctatcatcatctccgccgcggtttcctttctttccacacttcgtagcaatcgatgttcccaacgccgatgaagggaggtgtcgatggcggcttccacattattttagcgtttggcgattggaaatctagggcttgcgcttcagactataacactgtgaaacgacgacgtttcaattttcagcggtaa

SEQ ID NO: 185118 - DNA, 874 bp, Arabidopsis thaliana landsberg
  unsure (1)..(874): unsure at all n locations
ggcatatcaacggacaggatcatagatgttcggcggctgttatcggttaacttcgacacctgccacgtcaccaattattcgctctcccatgaggtaaataacctgagattttaacaaaagaaaaatgaggtaaaaataatctgagtgagtggaagtttctaaattgttccatgttagttacttgtttctctggttcacgattgttggttacttgttaatgtttgatggtccagaaatattcatgtttattgtggaatttcttaggatcctaaaaataaagtgagctaaaaaagtaaaggaaaatgactttttcatctgagaaataaagaaaagaatatagtgtcattgaattttgctagtctgacaattgagtttccttttctgtttttagataacagatattttaccagaattgccttattcaaaatcatcccataaagagtataaaaaaattgactgtggtaaaatagttaaatcaaattcacgttctgactcaagattggttgcagataagaggatcgcggttaaaagacacagtggatgtgtcggcccttaaaccctgtgttctcacgttaacggaaggtaaacttctctcgcgcatcaaatatgannnnnnnnnnnnnnnnnnnnnnnnnnnnnttagaaaacctaaacgctgccgtttctatttatctgccaaacgacgtcactttacttttgtgccttttctttaattcgtgagaccgttgtgatttctttttgttgccagaggattacaatgaaggaacagcagtggcgcacgttagacggctgcttgacatcgtcgcctgtaccacttgcttcggtccgtcgccggagaaatcagactccgtgaaaagtgcgcaggttaagggag

SEQ ID NO: 185119 - DNA, 60 bp, Arabidopsis thaliana landsberg
atgtattggtcctttcgagcggtcgataaatttcaacgtcttgatcatagagtaattttg

SEQ ID NO: 185120 - DNA, 210 bp, Arabidopsis thaliana landsberg
ctacatccaaacacatgggttcttgagtacagccaaagctcggtgatggatgatagttcaagtttgttgtcactaacaatcgatatcatgaaacacttcgtgttccgagtagcaaagaatgtgaatcgggagcgttattggatgttttcatcctcacgacgactgtatagagaagcagagtcaaaggctagcgcaatgacaccaacttag

SEQ ID NO: 185121 - DNA, 739 bp, Arabidopsis thaliana landsberg
ggtttctttggaacactcgcagagccaatgaatagtggaactaaggaaatggattttaaactaaacccagagctaaaaggaacactgaaagcattgtgcaatgatccaaaaacaacagtagttgtattgagtagaagtggcaaaaacatattaaacaaggtatcatcagtgtctttattatataagatttatacatctattttgtaactcatgtgctggtacttaaaattcagaattttggagagtctaatatatggctggctgcggaaaatggaatgttcgaaaagcagacaactggagaatgggtgacaaatatgcctcaaaacgtgaaccttgattgggtcgatggtgtaaaggttagtaatttctgtaaaaactagacaaacttgttaatctttcctttatatcttttatggatttgattgttttgtataacgtagaatgtttttaagtatttcactgatcgaactccaagatcgtacttcgaagcaagcgagacttcgctcgtatggaattatgaatatgcaggtgatttggattagtttcttgaattccagacacttttatctttttgttaaaatttccattttcttgactctttttgtaagatgttgaatttgggagagcacaagcaagagacttgttacaatacctatgggcaggaccaatctctaatgcatcagttgatgttgttcgaggaaaccattctgttgaagtccatgccattggtgagattaag

SEQ ID NO: 185122 - DNA, 679 bp, Arabidopsis thaliana landsberg
atgggagatctcaacagagaatttaataacggttgtagatggccattgttctacggtgacaataaaacctctgcatcaaacaacgatcaatgctacaataatgggttcacgtctcagactacatttgggtttgacaaagatgtggtgagaaggacaatgctcgaacacgaagctgtttttaagacacaggttaacttagtggaagattttctctgtgacctttttatcagttcctctggcttttggttgattgtattttgtgaattttgatccttttaaccaggttttggaacttcaccgggtatataggacacagaaggatatgatggatgaattgaaaaggaaacagtttaataaagaatgggttcagattgaggcatcactttcttctcaagctacgaatgatgatgttcgtaaatggaaaatccctagcttccctttggcgaactcggtttacgatagaccatccatgtcggttgttgaggataatggccattctcccatgaaaggaagcaattctcaaggtccagtttcatggcaaaatggagctagttccaaaagtgttgaagtgtccgaggttagaccgacgaaaatcagaagaaagatgatagatctttgccttccagctgatgagtacattgatgacaatgaagaagttgttgagttaaaggatcacagg

SEQ ID NO: 185123 - DNA, 63 bp, Arabidopsis thaliana landsberg
atggacatcgaagggcaggaaccggaaatagaaatggcatgcgtgagacctgtgccgtttccg

SEQ ID NO: 185124 - DNA, 441 bp, Arabidopsis thaliana landsberg
  unsure (1)..(441): unsure at all n locations
atgattgatgagtataacacaccagagaggttttgggccaaagctgtcaacactgcatgttatgcatcaaacatgctatttcctcaccggctacttgcgaagactccctatgaactgctaaatgggaaaaagccagacgtccccttcttccgggtgtttggatgcaaatgctacatctacaagaaacgccatcacctagggaagtttcaaagacattgtgttattggttttcttttgggttattcattaaagtccaaagcatatcgagtattcaatcatnngcctggcgtggtagaagaaacatatgatgtggaatttgatgagactaatgcgtcccaaggagcacttgaaaatcttgatgatgtaggtgatgagccagttagggaagcaatgaagaacatgccaattggagctatcaaaccaaaagaagatgaagaagag

SEQ ID NO: 185125 - DNA, 163 bp, Arabidopsis thaliana landsberg
tcctttgaacgacattatcgaactcaaaagctatgtgagagttacatatacgcgaggacagctcaatacagcgacaatcagttctcggttgccaggttgtgtgaggctattaacacaagcccaccaaacactaagagtgatctactagaccagatcttcgcag

SEQ ID NO: 185126 - DNA, 700 bp, Arabidopsis thaliana landsberg
cgctccaccgactgatgacaatgtccctacgacggaagctacagaggatgatattgctgagacggatgaggatagggaggaggagtatgatacgagcatgtatcacttcagtgagcacatacctccagcgcgggagagaaagagcttgagtgaagctcacagaaacggcagtaagttgcagaggtggtgcaagaaacaagataggttacttatcaagtgcttcaaggccatcacgtttctgacggacaagataagttgcttctcttctaccacagctattccgcagggagagcgtcctcaggacatgccttcgaggagatatgacgcgccagggccaagtcatcacaggcctgagccaagtcaccacaggcctgagcctagtgaccgagtagtaccaccagtccctgcaaggcattcatcattcgagcctcgggaactcgggagaaagaagaaggctgcactcgctaggtctggcagcaggagtacacgacttctccagtcccatagcttacgcgaccgcggtgctggccgcagcagaagaagagaggtcgagtatcatcagagcggtgctggccgcgacgaaggagcagaggtcgagtacccccagggggaagctgagacacaacatggagatttttcgatggcctgggagcaatcacatgcagctattgacgaccaaatccgctcctttttccactga

SEQ ID NO: 185127 - DNA, 3107 bp, Arabidopsis thaliana landsberg
atgcaaactcgatccaaaggttctgcacacctactaccattcaaagacagaattgacagaatagctcgtgagttacaagaaaccaaagcaaaggcagcttgtaatcagcaaagacccgctgctatggatcaacagaacagaccagttgatgttcaagacccacctatagttgatcaactcataagacgattgtaagaaagcttttcttgccaagttcttctctaacgctcgcaccgctagattaaggaacgagatctcaggcttcacacagaaaaacaatgaaactttttgtgaagcttgggagaggtttaaaagctacaccactcagtgcccttatcacggtttcaagaaggcttcattattgagcacactctacagaggagctttaccaaagatcagaatgcttcttgtcaccgcctcaaatgggaatttcctgaacaatgatgtcgaagaaggatgggagtgataagtaggttttttaggcctacttatatgctgaatgtgaggttcaattcaattctccttaaacactaacatgtggatgcagctatagggggtattaatccagtccactgttattgctagcaatcaagatgtgtacacaagcaactaagtcaagccagattataatgatggttggtttctagtaacaatcctaggtcagggttcaaacaggtaaaaatgagaacttaagagccctactcaatgatcgggtcgagtagaaccaacaggtgacagtattaagaactaaaatgcaaacaacatgggatacaaataacacgtaaataaaagtgcattcagggggtgaatacaaataaatctaagaagaatagaactcctaaggatggattaattgataagggcaactctaggattcaacaggtggctatcaggtgaaaggtagatacccttgacgatagattcaaaaaccgggtcaatccactgtcgtgacagagacccccataactctaccacttcctctgtagctgcctggatcgagtaaagaggtcgattgcctattttgtagctacctggatcgagtgaatggatcgagtagagtcctttttagctccttctgttcctgaaaacacaccaaaacatgcaatgcatatgcaagatgatcctagatgcctaagtatgcaaaataagctaaaatggtgcaaaatgatatgatacaacgagcaaatgcacaactaagtgataataaacatacacctaaaatgagtaaaatacagtgttatgatacctgaatcatgatgatcccatctgtatgatgtgtgtcacgtgtaactcaattctgctatggcatacgaatgctcatggatggttcgctaccgaccgggcgctacatgacgatgtagtataaggaatggaaatcttctttagactttgtatctacgagtatgccagccattgcctcgaggagatcatgtattcgtaaagggccttgcttaggttgatagagccatgattgcattagttatcctatacatattaagaaattcgagtcttcatgcattctgcatggtgcattatattttgcttgtgttgtatgttgtgtgttaaccttgtttatgtcttgcttgttaggtagtagtattgttacgtgttgttgctgcttagggggtaaggaagggtattacgataacactatatagatccggggttcactaagtaatgctagattacttatgacgctacttatctttttcaggaaaacttagttgaccaaccttgtagagggtgctcgtgacttaggacgaaccaatgtaggtttaacggctttttgtaaattcttactaagtatattatgtatggttttcaaagaggatctgaaaactatatacgttttgctaaccatttctcgtatgatatatatatatatataagactcggatttctaaaatttatatggttatactgactgatatttgtcttttccggactatcaccactcgcgtccgcggtacgggttgaaaagccttaggccacgggcgggaggctggactcttgcggttggacgactcgggcgaacgaattcgtttcgaaaacctgggttggctgactccgggcgttcaacgtgacactcctattttatttatatttttatagcgggataggggtgttacaaggtggtatcacagcatggtttgttacgctacgagaaaccatggttttcaatgttttatcgagtaaatgtgtcgcaaaaagctattaggaaatttgttcagtcacttgctagagtttaggtagattgacctataggacaaaccctttttgtttaggttggcttacccttgttgttagtattataggtggcttacccttttgcttgtattttcgtgtcttaacctctttgtttgtattatagtatcccactaaagagatcacgtggtagggagtctgtggaagaggagggacggtccttgggtctgtcgtccaggcgatatgaccttcgtgagagagtcaggggtaggtgtgtgagaagggatgtggccgagtgttcccgggttatatcggagactagatcgagcgatacggttgctgattttggtcttgcagggatagttgctatgtcagagcaggaggatgtgcatataggggatgggatgatgatcgattcggattgtgaggatgattgtgtgatcacgggagtgaggacggtggagcaggagctgggtctgaagggacatgagatcgtgatggtccatgtctatgtgagtgttcccacgagcagttctgccacgccatcctttgcacttaacccgtattcaccgatatcctacgagtcatatccggatgaggatgaggatccaccagtttctccatacgttccggaggctatcgatcactctcccgatagccattttgcactgttatgggagggcatgtcccccatactttgtttcgcggctgacatgagggctgacgctattctgacatttgacgggggctctacatcgggtatccagataccgttctgcttcatctttggcgaggatgtttattacccgaggactgttagttatacacgcagtatatgcccatggccattgcttgtctttacagtggagagtatgggcattacgcggcaacctgtatgctaa

SEQ ID NO: 185128 - DNA, 2999 bp, Arabidopsis thaliana landsberg
aagcacgaaccaacaatttgaacctgagaaatcgtttgcaactggcgagaagtctttgtctgaaactcgatgttctagtacaagacgaagagactggtttgtccgagatggtgcgattgcgaatcttgggtacaagagccattagagatcgacttctcaggaaaaaaatattttagggtttaaacataactttcttctacttcacccactcgagagaaacgtcaatgttggaaattgaatctttgcttaatcgtgtacaagtgaaatcagaagagaaaggtgagaaaatgaagtgtagagagatgtgtgtttaaggaagaagaagaggcgcgctcgtgtgtagaagaacgaagaagaagaagaatagtagtgaaggaaaagagagaaaaaggccattgggcccagaagtgaacaaggcccaattatgggttcaatggtcgtttgggccgcataaaacaatatttagcatagaggctaaagtcaaagtatatagaagagaaaaaaatatatataacatgttcatcatgaaaacttcaacggtccaatgatctcccgaccaaagttgagctcatatgcaacaaacacaaataaatatagatttatatgtattatcaaggattaaaactatatataggtttgaaaaaaatgggcacgacgtgatagcatcaaagtcatctacttcaagacgtgatcagcctaaagaccaaaagaatattacccaacttttgtgtttttcctcaacctcataaacccccccaatcctcctcactcttccctatcctcttcatttttcccaatcatcaaacacaagattagagttcgattctccaaagaaaatatggtaagttcctacatttaatcttctgatgtagatgatgatgatgcattgattctgtttatgttctgattgtcaacatgtgaaatttatatgtggatggtgtggttgaatatatatggttttgtgttatttggtttggaagtgtaacacatgaataggtttcatgtatatattgacttcattaagaatgatgttgtggacatatggtttatatgctatgatcctaaatcacaatctaagttttatggtaactggttaggaagatgtatagaatggaaaaagcttaatgtataaataaatgactacgtgtgtgtgtgtgtgtgtgttgtgcaggctaattcagcgtctgggatgcatgtgaatgatgaatgcaagattaagttcttagagttgaaagcaaagaggacatacaggttcattgtgttcaaaatcgatgagaaggctcagcaagtccaaatagaaaagcttgggaatccagaagaaacttacgacgatttcaccagctctatccccgatgacgaatgtcgatacgctgtctatgattttgatttcaccacagaggacaattgtcagaagagcaagatctttttcatcgcgtggtaacaacacattgctctccttaacatgtttttttccacatgatttcaaatgctcatgaatgtgttgtattgatcaggtcacctgatacatcgagagttcggagtaagatgttgtatgcaagctcaaaagacaggttcaagagagaaatggaaggaattcaagttgaattgcaagcaactgatcctagtgagatgagccttgacatcatcaaaggacgactcaatctctgagcaacaacaacattctaatgcatcctttattcgtttcaaattgttaagctttaacatgccattttcttggaccatttctgcttttgcttgtccgctatattacattttgtgtggattcaatgtctttaaattgttttgtttttcacaagaaagaaaaaaaagaatgataattattttgcaaagatagatattagatagtgaaattactccatagtggggacttggtatggaatgctttggcatatattgaacacatgcatcttatttttttatatgggggattccattcttcaatgaaaggattataaaaactaaccaaattataaactaagagcaattagaacaacacttagtgctcgccaatcatatcaagattcgctagcttgcaagcattgtgatatatttattccttgcgacatattaatttaaaacgaacgatggttttcaaatattccctcaagacataaaacgacaccaatgcattgaaaccgacagttccaaattttcaccttttgtaatcgaacatgtgtgttacttcactataaatagacctaaatgtgcatttaactagcaactagaacttaaagcctgaaactcattctcaatcaaatggagccaaatattccgatccaaagaggtaactcatatcagtattgtttagattcatgttgtatcttaaatttttagtttatacctactaccacataggagatgagcagtcaaaagttattaaggcatggaaggaactaaagataacaaaggtcaataacaagtaagtcacaacacaaacacttttcagcgtcgtttcagtaccactgtgacagattctctgattgcaggactcagaagaagctactagatatttcaggatgggagaaaaagaaaactacaaagatcgaatctgaactcgctagaattcaggtgattccacaaaagacatctaccaattcctaatctgaactatgtactcatgtatgcttaagactgttctactgctgtagcctgtagtgtatgatcaaaaacatgaatctatctaaacagcaagttaaccaaatggtacaagactatgaaacatgacatttcatgtcgtcaaagaactaacatacagacgaaaaaattgttgttttctacagcggaagatggacagtaagaagatggagaaatctgagaaactaaggaacgaaaaagcggcagttcatgcaaaggcacaaaagaagaaggcagatgttcaaaccagacgggctcaagagatccttgatgcggaagaagctgctgctaggtttcaagccgcaggaaagatacccaagaagtcatctttgagctgcttctga

SEQ ID NO: 185129 - DNA, 242 bp, Arabidopsis thaliana landsberg
agcctatattgtgaatcttggtgatctgcttgagcgttggagtaatggctatttcaagtaaagtttttgtttgtttttgcttaattttcctaagacaaattgtgacacttgtcgctcaatacaacatgtaacatgattttcaagtacagtttcttttgtaatgacatatttttctacatgtttttataccttacagatctacattgcatcgggtactcgggaatgggcaggaccgatattct

SEQ ID NO: 185130 - DNA, 930 bp, Arabidopsis thaliana landsberg
gttcaagtgtttttcgctagatctgatgaagaactaaacaaagtgaatcagtttcacaagcccaaagaaacagagtttttggaaagaggagagattctgaagaaacagttggagactcttgcagaactcaaacagatcttaagtgatcggaagaagagaaacttgtctggctcaaattcacatcgctccttctcatcttctgttcgaaactctgatttctctgcaggttagtcttcttcttattaatgcttttattacaagttaggtcagatttagggtactttagtaaattctgcattttgacttaagagttaagactcttattaaaagctaaccattagtatatttgagatatgacgcggcctgcacccattagaaatcgcaaaagtgcatgtcctagaggccgtttacgtagtgcggctagtaaaagaaaagtaggttatttaatatttttatataattgcacaatttagcgtttttgaaataatttaagtaaaaattcaaatgttttgttataacacaatagaaattctactactgaaagacaagatttgttaagcatacaaatcttttgcatgcggatgcaaaactcgaagctgcatatatgtgaaagaaagaattttagagttttgagattttattatgtagacatgcatatcttcaatggccgacaagaacacaaatcgattctactaacaaacgaacaaaatgtttgtgagtaagaaaataaaaatggaccgacaatagatggctaggtcgacaaaaaattttattttcttcttctctttagatcctgtgttaatagtcacaaaatatataattatttgtaatttattttttcttattgttcagggtctccaggagaactaagtgagatacaaagtgaaacatcaagaacagatgaaatcatagaggccttagagaggaacg

SEQ ID NO: 185131 - DNA, 108 bp, Arabidopsis thaliana landsberg
tcgaggaaaagatcttcagcaattgattaccgaagaaaagaaggcccctggatgacgtcaaccagaacccgtagtcgtgcttctgactatctcgtcaaattagtcagg

SEQ ID NO: 185132 - DNA, 1488 bp, Arabidopsis thaliana landsberg
gggcatttatcacaacctccaaccccagcgttgtcagaagcttctgttggtggtacatcagctgtcccacccctagccaaccctgttaatagggacgcatctgtaaccaagtctgaaccgtttattctaagcgcagaagcagatgacacctgtgtgacttctgctttggtatgttaatcccaccatctaaatgacgtttgcttatgcatattttccaagccacatccaatggccttatctctttacattatcgcttatggttccaggttaccccagctgtggactcatcatgcacgcaagtctgtgttctcccacccattggcagctcttcctcgcaaactacgcctccagaccggcataaaatgactcttcgcaataaaaactctctgcatcgtaagtgtgaccccaggaaagaagatcttgtgcctacccccactcgcttacgtgtcacttgacaatcagctctggctggcacaccttttccatcttccaagcaaaccaaccctggacgccctattcctcttctctctactgttgctgcctctctcacagctcctgaccagaaaaaagttgccaagttaaaagcacagcttgcaaaagcaaaaactaggtcactttcccttcatttttacttctctcaccatattctgtctttcgtactaatccattttgcattgttttagtgagtacatgattctcggacaaccagttcgtccgtcctttttcactgagattttacaacctcaacaatggctttctactccggtttgtttctccctatacttctttccccccatctcattcttgcttttacagaaaacagctaactcttcccaaatctatgtactgcagcatattgatgtactcttagctttcatttggggaaaacatgagacctttttccggcagcagcggataacaattcttgattcccttttcacctctataattgccagcagctatgccaccttcaacagatgtgctaatcctttggactttgtctggcaccggttgcttatcttgtctataacaggttcactaccaggtaggcaacccccacagcgttggcttgaagatgttgacacagtctacattccaatgaattggggcagaaagcattgggttactctttctctggatcttcgggttgggcacatttccatacttgacccatttcctgactgcaattcagctcgtaaagttctttcttacatgtctcctgttgcgaagactttgcctgacttggtgcgttctgtttttggtaaaagcccatcccagtggccagaatctggtttcacctttgcgagacttgaggggttagcacagaataaacgtggaggcgactgtggtgccatctgtgtcaagttcctggagctgcattcccatgcactacaagaccaactcattgctcttactgatgcagaagttaataatctccgttgtaactacgcgcttgccctatacgaagagtttgttggaaagctttag

SEQ ID NO: 185133 - DNA, 213 bp, Arabidopsis thaliana landsberg
tttgctagtcgtttttacgacgtttcttcagatagtcctttcttatcctcggaccatgctcgttatctgagtcttgtgtcaatgaaggtggtctctcgatcggagcccaagactactttccgttccctgttcatccatcataggaccgatagagcctctgcctattatttacaagagagtcacattaaagttttttcatgtgaaggaaaatga

SEQ ID NO: 185134 - DNA, 304 bp, Arabidopsis thaliana landsberg
atgattctttatcaacgaagccaccgactcactcgtaaccacttcaaaattcttcgtcatgtgaacattcccaacgagttgactcaacacaaccgattccgtaaccgagtttttcttcttatgctgcagctaaatcgtcgctctcacaatctcagtgtgcatcgagctcgataatctcctgattcctttagctccatcgatcaaaatcgccggaataacatcagagcttttcttgccactgtgtttagagaagaagaggactgattcggggatccgattacgaatcgggttaacgggtcactga

SEQ ID NO: 185135 - DNA, 525 bp, Arabidopsis thaliana landsberg
ggccaatacaagtcaacattagtttgtcctatttgcaaaaaggtttctgttatgtttgatccgttcatgtacctatcgctaccattgccatgcacatcaatgcgaacaatggatttaacagtcatgagtgccgatgggagtagtttgcctattccattgactgtcaacgttcctaagtttggaaaatttgaagatcttcataaggctcttgtcactgcctgttctttaccagaggaggagactttattggttactgaggtatatctctatattctatatggtatactgttgctatgaatctcattctggtgcgttggtggagtttttgttaacacagacaatggaatttctcttgatttggtcttcacttgtataggtatacaacaatcggattattcgcttcctggaggagcctactgattcattaaccttgatcagagatggtgacaaacttgtcgtgtatcggttaaagaaggatgcaaacaattctcctttaattgtgtatatgcatcagaagctggaaga

SEQ ID NO: 185136 - DNA, 185 bp, Arabidopsis thaliana landsberg
atgagtcaattcactcgtgttcaggtgtgcacatcagcgaaggaagctagggacgtgaagcggaccagattggatatcctagcatctgaatttgaaaacttgacaatggagaatgaagagtccattgaggagttcagcagttggctgagttcaatttctcaggaggctgttatcttgggaaaaag

SEQ ID NO: 185137 - DNA, 190 bp, Arabidopsis thaliana landsberg
atggtcaagatccacagtctacaagatagctatactcttctgatcgaggcaatccgtgccgagttcgataagtccctcgacctgtcgcgtgggataaagtctaagttggtacctaaggagccgacctccaatcagtcgattgagagattgtataacaagtacaactcattgctcctacgtgcagccgttt

SEQ ID NO: 185138 - DNA, 278 bp, Arabidopsis thaliana landsberg
agcgggatgcggttgaagtactgacacccaagcacacacatgacaccaaggcaaactcgaccccaaaacaccaaccaaccacctaccggcagcacaaagcccacagggagaagccaaagtccacaagacccccaggccccgagtcccccaacaaggagacaaatcccacgcccccaagacccggtcgcggggcaagtgcttacactcaaccacacacacgacggacacaaagggctgctgagacaatgcccaaaaggcacctgatgacacggcagcac

SEQ ID NO: 185139 - DNA, 435 bp, Arabidopsis thaliana landsberg
atggatgttaacactgcgtataagtccattcgacctagatttgtcttggaagtaagtttgtgctttgatgttaatgacttggctctgaaggaagtgattttcatatctgaaatgattctccttttttgtagttatgtatatttttaaggttgaatccaaaggcagagcagaatgagtcgatagatcggagttttctacggttgagagttgctagatgtcataggaagctgcagctggataagaaaatgactgatttgtctagcgaagcgtcgtggcaaaaagcgtggcatctttactgtgagtttggaacactagggtttattttggaatcacattgtgaccgttctcgtggaatttgttttaaaagcggaaaaccagaagggatgatagagtttccgtggaatgatctgttaagagcgcattctctagcgtctg

SEQ ID NO: 185140 - DNA, 674 bp, Arabidopsis thaliana landsberg
atgactgtgtgtaaagatatttttgtttccaataactgtgtgtatgcatcaattccgtttatggaaagtggagccagagccactactttgcagaaatgttgtcgaacagtgatatgctttgtcggtatgatgccctcgcacatagtcaattgtaaatgtatctgttttaaattgttttatgaaagcatatttcatgtgcaatcttggtggttacagatttggatgctggttttagcccaacgccctcaaaagtgagtaacactatccttcattccttgatattattagtacaattttatttgattatttaacatgctttttgcagaccgatcttgcatatcacaaccccttcactttggctctgaaaaactttggttgtaaatcaaaggagaaggataacggtcagtttgaaacccatttgtagccttattttgctcttcttctagtaactagtatatatttattctaaaaattaatttttacagatatcaatatttcgtttcatagagtaggaacagcattagtttttgagcaagtggagcgggattatgagaactgggttatggagatgcataaaacttatgatgaagaagatgcgttgggcgaagatgacgcagtcattatttttgattccttggataacaaagctctttgcatttcgcctgattgtaaag

SEQ ID NO: 185141 - DNA, 147 bp, Arabidopsis thaliana landsberg
atgacctcggtgtctccgtccctgcttccacatccaaaaggtaagcgacttctaaatcttctttttttctttaagtttcacagtttaagacatcgatcaaattcttttcagatcactggattcaatccaagccaccatttttgtcag

SEQ ID NO: 185142 - DNA, 1465 bp, Arabidopsis thaliana landsberg
  unsure (1)..(1465): unsure at all n locations
atgggaggtgcttcagaaggtgcctctcannnnnnnnnnnnnnnnnnnnnnnnnngagacgccgcttcccgggattcgccttaccaaagatatgatattcagcaggctgcacgctggattgagcaaattcttcccttttctttgcttctgttggttgtttttatccgccagcatttgcagggtactatttcatatctctctctctcgtgtcttttctgatgatttcctcctgctatttgacttttcctcctgctatctctctctcagggttctttgtcgccatttggattgctgctgtcatgttcaagtcaaatgatattctcaagaagcaaacagctttgaaggttttcttttgcttttacttgtttcttttcccattcaatgttcaaatgggtcagtcttaagtctcttttaatgatttcagggtgagaggcatatctcggcattaattggaatctctgtagcatttacggcccatgttgttggtgtttattggtggtttcggaaggatgacctcttgtatcccttaatcatgctgcctccaaagtccataccacctttctggcatgccatttttatcatagtggtgaatggtctgtactttctctcctatatttggtttcccttgctttaacgagtccactttcatcagctaacagttcatcagctatgcagtattcccaatatgattcgttgtagtatcctgttggatcatttggtgcttactcacttgtccctatattcctcagatacacttgtccggcagcctcaatgatttcaagtgttttttgttgatgtactacaaaaacagtaggggtcggaattatcgtaaacaggtgatgtagaaaaatattcttctctgtcccctttagctgtattcagtttcatttggcatggctcactgtggcgtctctgggatacataatttggttattcacttccaatgcagggtcaattgctaactttggttgaatatttcatgcttctgtatcgctctttactgcctacccctgtatggtaccgtttctttttgaacaaggattatggaagcctcttctcctctcttatgacgggattgtatcttacattcaagctcacttcagtagttgagaaggtaggtggctttctagaattttggacctccctttttttttttgtggaagctaagggaaattggcaatgagattcaggttcaatccttctttacggcattgaaggctttgtcacgtaaagaggtgcactacggatcatatgcaactacagagcaggtacaatttaactccttgcagattcgaatctaccttatgcctcttaaggtttaagcccacatgagcaaagaagtgtctttctaatgtgtgcaggtaaatgcagcaggcgacctgtgtgccatctgccaggagaagatgcacaccccaattcttcttcgctgcaaacacatgttttgcgaagattgcgtttcagagtg

SEQ ID NO: 185143 - DNA, 636 bp, Arabidopsis thaliana landsberg
agagagaaggtgatttccggtttcttagaattaaaatccggcgacctcttaccataagaactttacctctcttcactcttccagatctttcagaaaggtaaagcatgtcgccaaaaaggatctaaccagatctgtttataatcttatctatatatgatctaaataaattttgatttcatgtcggattcttcctaccggctatgtccgggtttttgtcttctcgctctcgcgagattgatctcctttcttctagcctattgaaaactctgcttttcttcaaatttcaactgatttgcccatcctctcgtagagtaatatcttcatcatctcctttggctcatgaagtttagagccaagatccgactacatcaagttcggtgtcgtccgtgatggagcttccccggagttggagttgctcgaagttttttgaagcttatcgtaaaattgaaccgagtttcttcgcgttttaggcttgaactggagaccggcaaatgggaagggacttaccaccgatacagaactggaccgcgatggctatcacagttggcggtgttcggcgtgatgcatgcaggggtgtccaattacctgacgcgtggctcggcggagttccatcactcaacacgtgtcagcatctaa

SEQ ID NO: 185144 - DNA, 98 bp, Arabidopsis thaliana landsberg
accgacaaccgcccaatgcgtatgacacccatgggtctatcgtggcccgagtgtgcttgggccgtcacggtagccgcggcgtccacaaggagaagtag

SEQ ID NO: 185145 - DNA, 465 bp, Arabidopsis thaliana landsberg
catgatgatcgtcgtagtgatggaaaagttgatagaagaccaacttctggtaattctcgccaaatttactctttccttctcttcattacataagcaaaaatatatgtctttaataatattggtaggtcttatgaacatattacttgcttttaaatgtttgaagtgagaggatcgtggagaagttcaagagatcagagtaaccgaagagctggagatgatgagaagtcacagcatcgtaaagacgaagacaaaagctcatggcgacatgataggttccgtgagagtgatgacacccaaggagcactctctaggaaacgaccagccttcagggagaagaagattgcagaggaaactgggaacaacacagacagaacaagaactgaggatggaaaagacactaatctaaacaatcgcagacagaacgaccggaactggaggagccaatacgcattcagaaagacatga

SEQ ID NO: 185146 - DNA, 93 bp, Arabidopsis thaliana landsberg
atcatcttttccataaacttccgattccgacaaactcatacactgatcggtgttaagaaaccgttaatttttgctgacatggatgcgaagtag

SEQ ID NO: 185147 - DNA, 47 bp, Arabidopsis thaliana landsberg
atggaagaagaaaaacgagagcgagaggaaaaacaaagacgagaatg

SEQ ID NO: 185148 - DNA, 59 bp, Arabidopsis thaliana landsberg
attcatatgtttattccccagatttccacagaaagacagagactttgaaaaaagttagg

SEQ ID NO: 185149 - DNA, 100 bp, Arabidopsis thaliana landsberg
tccaattcgaaagcgtggaatcgcggccaaagattcgctagtggtcggcttcttggacctccaacaatgcttatttgtatgtttaccagatacagactaa

SEQ ID NO: 185150 - DNA, 222 bp, Arabidopsis thaliana landsberg
ttacaagacaagtgtccaaacataagcacacaggctcgaaaacatacacatccaaaagcccaaatccaaggcgcgcaggcccgacaacaagagcaaagcccaaaacaaccaaagaagctgaaacttaaaaacagcaggcccaaaaaccaaaagaacgaagagggaacgacccaaggacccaaaaaactcataaggaaacctgaaccgcagaggaggacctag

SEQ ID NO: 185151 - DNA, 74 bp, Arabidopsis thaliana landsberg
atggaacaagatgttggcaaacctccgttcttcgatgggaccaattacccgtactggaagattcgcatgtctgc

SEQ ID NO: 185152 - DNA, 86 bp, Arabidopsis thaliana landsberg
gttgtcagcattgcaacccctactcaggagaggatgaagccgtggaaggagaccaccaggagttccaagattacgatgagttctag

SEQ ID NO: 185153 - DNA, 217 bp, Arabidopsis thaliana landsberg
atggcggcgcctgttttactgaatcttgaaaaggatgaactgcgcaaaaatatggtggtcagaaaatcgcccacctttgacagcaggaccattgatgtgacctacctggaagcagtcggacgcaccctggccggagtcgcaccctggctggaactgccggaagataattccaaagaagggcaactgcgcaaaagactcagggaggcagccgtcaaag

SEQ ID NO: 185154 - DNA, 282 bp, Arabidopsis thaliana landsberg
atggccactgattcaaatgacgtaatcaacgatggtggaactggagacggaattgagaagagcacggattctaaaccggaaatcgaatcggatgacctcaatcccaaatccaaaccggaatatgatcaaatgaagaagcttgttgccatgttcaagaaactcaatcctgaagctaaggagtttttcccttcttacaagaggaatactaatcagtctgacgattttgtgattgctataaagccatctggtgaagacaacaaaaaggttgccattaaccggagg

SEQ ID NO: 185155 - DNA, 2223 bp, Arabidopsis thaliana landsberg
gttgcagtagaagttcttgtgatcgaatcagataatgtggcagccgcaatagctgaagaagtgactcgggattcaatagacagaattgtcattggaggctcatcccgtagttttttctcaaggtacactaccaccctgctgctagctttcgacctttgttctttctattccgtgtaccaatgaatctgttttgaaaattccaggaaagctgatatttgctcggtgatatcagctttgatgccaaacttttgtacagtctatgttgtttcaaaaggtaaattgtcatgcgtccgaccatcagactcagacggaaatgctactataagagaagatggtagtgagagaacaaattcttcaagcggttcttctggtcccacctcaggtccatgactcatcaatgtatttgtgtgaatactctactagaaatggtgtgtatatctaattctgttaccccattttctcttctagattcatcagatgtaatgtcaagtgcgcatgactctcaatctcgtcctctatcccttccggtcaggagaatgcaacatttccctgcaattgcaggacaggcatcagttccaatggaaacgagttctgttggctcggatgaaaccaggtgcatgtctttggatgcagaggaagctagagatgtttcaagtatcaatagaagcagcacagatactacatcacgttggactcctcggcgtagagattatgaggagagaaaagaagctatgagttcttcttcgagcaaccgtgaatacgggaattttggtactaggtttagttggagtggcatgggtgtcgatactacacactctcgggcttctcaacaagcttccaacatgtctgatgctctaagtgaacaatcctatacagacaaccaggtataaaatggagttttaatttcgacattgtcttgtgaatcggaataatataagattatttgttcaggtaaacctaaactttgaggttgagaagttgagagctgagcttagacacgttcaagaaatgtatgctgtggctcaaaccgaaacctttgatgcttctcgaaaggtgaaggcctcataatatcatatatctttgcatttgatgaaacttattaaattgagctcaatgcttttctgaaaatgtttcagcttggtgaacttaaccaacgtcggttagaagaagccataaagcttgaagagctaaagctgaaggagtaccaagctcgagagttagcagaaaaggaaaagcaaaattttgagaaggcaacgagagatgcagagagcctgagagaaagagcaaaaagagaaattgcgccgagaaaaaaacccgaaaggaaatgctaacgtgatactaaagagaaggagaagcttgagggcactctcgggtctcctcagctgcaatatcagcactttgcttgggaagaaattatggctgtcacttcatcattctcagaagaactgaagatcggaatgggagcttacggagctgtttacaagtgtaatctgcatcatacaactgcagttgtcaaagttttgcagtcagctgaaaatcaactttccaaacaattccaacaagaggtatggaagtgagctcaaatttggtttaaggaactttgtttgagattttgtgcctttcactatatggaagttttctgattttaatttcaattcttgtggataagagtctacatttatctcactggcctctctaatttgcagctcgaaatcttgagcaagattaggcatccacatttggttctccttctaggagcgtgcccggagcaaggtgctttagtttatgagtacatggaaaacggtagcttggaggacagacttttccaggtcaacaacagtccgccactcccgtggtttgagcggtttaggattgcttgggaagttgcagcggctcttgtcttcctccacaaatcaaagcctaaaccgatcattcaccgtgatcttaaacctgcaaacatcttacttgatcacaactttgtcagcaaagttggagacgtgggactctcaacgatggttcaagtcgatcctctatcaactaaattcactatatacaaacaaacaagccccgtgggaacgttatgctatattgatccggaatatcagcgcactggaaggatatcatcgaaatcagatatctactcctttggaatgattcttaaacagcttctcacagcaaaacctgctattgcattgacacatttcgttgagagcgcaatggata

SEQ ID NO: 185156 - DNA, 660 bp, Arabidopsis thaliana landsberg
atgtataggaacaaaaagaaagaagaatctagtaaaggtaaaataactatcttacattttaaattaaattttaataaatatgtttgtcgtgtaactttgcataaggaaatatttagattttcaacataatgcatagtgaagtttatatccgtttattcataattatgcacctccaatcctttgacagaaataaaaatgatgcgggagatgacacagaggcaatctcagcaataccttcaaatctatgaacgtgctacccaatttatccaaaatcaacaaaggtttttatgttcatgtattaacttagtttttcgtataattaatcgttttttggtttcgtgagtaaaacaatcttctttttcaatttcttctaggctacaactggataatactgagaagataaccccagttttgggatcaagtaacaagtctctagatcaatcttcaaaggtaatttttttttccttttgtaatttttagattactaaatatcatgcatgattatcaacatgttgatttgatgcctatgaaactagattaatgtatattttatggcaggttggactaaatgaaaacagaggcaatgatgttgttgttgttggtggtgcaactggtgaagaagaattgtcccttgaactcactcttggtcgcaagtactaa

SEQ ID NO: 185157 - DNA, 154 bp, Arabidopsis thaliana landsberg
aggcaccaaagaacttgtggacgagaagcatccacgtctcttcagacgacccgtagattaccgcgacttgtttaccttctatcactcagaagctggtcgtaaagttcaatctactcttcaagcttacatgtgtgcgcttgattccaagttttaa

SEQ ID NO: 185158 - DNA, 876 bp, Arabidopsis thaliana landsberg
ttatctccctacgaagagtaatagaaggatgaaagcagcagctagagaaatccaagttatactgaaagggatcgttaacaaaaggttaagggcgagagaagctgggaaagcagcaccaaacgacgatttgttgggaatacttcttgaatcaaatttggggcaagccaaaggaaatggaatgagtactgaggatgtgatggaggagtgcaagttgttctatttcgccgggcaagagacaacttcggtacttctggcttggactatggttttgttaagccaacaccaagactggcaagctcgtgcacgagaggaagtgatgcaagtttttggccataacaaacctgatctacaaggcattaaccaactcaaagttgtaagtattaaccaaaccaaaaaaaaatcaagttgatgcatttcttcaattttgttttgatgattttgttcctacagatgacaatgattatatatgaagtcctgaggctatatcctccagtaatccagatgaacagagcgactcacaaagagataaagctaggtgatatgacactaccaggcggtattcaagtccatatgcctgttctgctaatccaccgtgacactaagctttggggcgatgatgcagcggagttcaagcccgagaggttcaaagaagggatcgcaaaggcaacaaagaaccaggtctgcttcttgcctttcgggtggggaccgaggatttgcatcggtcagaacttcgctctgttggaagcaaagatggctctggctttgattcttcagagattctccttcgagctttcaccttcctatgttcattcaccttacagagtcttcactatacatccacagtgtggggctcatcttatcctgcacaagctttga

SEQ ID NO: 185159 - DNA, 1524 bp, Arabidopsis thaliana landsberg
atgaatgccgtcggtaggatcggaagctatatctaccgtggtgtaggtacggtttcaggtccgtttcatccatttggtggtgcgatagacattatcgttgttgaacaacctgatggaacgtttaaatcgtctccttggtatgttagatttgggaaatttcaaggggttttgaagaatggtaggaatttgatcagaattgatgttaatggcgttgattctggtttcaatatgtatttagctcatactggacaagcttattttcttagagaagttgaagatgttgttggtgaatctgagagtggtgaagtttatactttgtcttctggtgatgaagctgagactactagtagggatgatgttgttgataaggttaagattcctttgaagtctaggagttgtaactatgattctcctagtcctcgtactggtaatgggaagattgttggtaagcctgggattttagggtatgtgtttggtgggaggtctgttagagagagtcaagattgtggtgtggagagagctgagattgctgctgatttattggaggttaagtggtctactaatatcgatacgcgtaagcgtggaaaaggtatgtcttctgagtctttggatggtaaagactatggtgagagtactagtactagtggaaaatcttgtgttgagggtagctctgagatgatagttgatagcgattcgatattggagactcctcttgttgcatctcctacattgcggtttcttgatgagaaagagcaggattttcgtgaaagcactaatgtggaagattattgtgaagaggatggatcgagtggagttgttgttgaaaatggtttatgtgaagcatcgaatatggtgttctctgttactagtgaagggagtggaaacgtagagatctttgtcgaaccaagaaccgaggcactagcagaggttagttactacatctaatcaatttcatattcttgggaatgcttgattaatagcttcaaaggtagaataagaaggttataaatgtatggtactgatgtcttgtataaattgtatctccactaggatgctgtaagtggaagcgatctggattccaagcaagaactgttaagggctcctgaatctgtggaaattgcaacattgggttcagctgaccaagcggatatggggagcattggcacttctcaagaaggaagcagtactggctctccagttcaagatgaaaataaaatcaccataaaagatatgcatatctcggcaggagattttgagaagtctcagtcagcaagtggagaaagcatcctgcaaccagagatagaagaagaacaattttcctttagcgatcttgatgaatgtaaacctggtggtaatagttctgtagggtcaagttcttctgacactgtaaaagttgatgggaaagagagttatgatgaaactaaaactagtcctgaaaacggcgtggataacacaatggccttgtcagagccgattaacatagagaggaaaaaggatatcttcacagatgagatggagcggttg

SEQ ID NO: 185160 - DNA, 114 bp, Arabidopsis thaliana landsberg
attactgagtccaaactctacgagtggcgtgaggcttttggtggtgaggagatcaagaagcagaaggccctcgagtgcggaaaagaccgcgccaaagaaggctgccaaggataa

SEQ ID NO: 185161 - DNA, 562 bp, Arabidopsis thaliana landsberg
atgcaggcgttgggtcagctggtcgcggccggcgccgatttccagaagatcgacgcggcgatggagaaattcggctggccgatgggaccggcgtatctcaacgacgtcatcggcatggacaccgggatccacgtcgcgcagatcatcaccgccggattccccggacacatgccggtcacctggcgcgatccgctgcaggcgatggtcgatcgccagcgctacggccagaagaacggcatcggcttctaccgttatgaaaccgatccggccggcaagccgaaacggacggtggcggacgacagctacgaactgctgaagaccgtgcagccggatggcgtgcgcgagttcagcgacgccgagatcgtcgagcgcatgatgctggcgatgatcaacgaggcggtgcgctgcctggacgaacagatcgtcgagacggcgcccgaactcgacatggcgctgatgctcggcctcggcctgccgcagtatctcggcggtgcgctgaagtacaccgactggctcggactcgaacgcgtgctggcgtggtcggagcgttatgcgacgctcg

SEQ ID NO: 185162 - DNA, 2433 bp, Arabidopsis thaliana landsberg
atgcacagatacaaacatggattctctggattcgcagcccatttatcagaagatgaagctcatctcatagccaagcaaccgggagtactatctgtcttccctgaccagatgttacagctccacaccacacgttcatgggatttcttggtgcaagaaagttatcaaagagatacttacttcaccgaaatgaactatgaacaagaatccgaaatgcatgaaggagacaccattatcggcttccttgattcaggtgagcagtatgaagtgatgaaatatttatatgcgctttttatctacttccagtaaaacaaatactcaatgcagcatatcctgatggagaaaacaggaatatggcccgaggcgcagagctttaacgacaggcacatgggtccagtcccagagaaatggaagggcacttgcatgagagggaagaagacacaacctgattctttccgttgcaataggtaagctgagactgaggaaagtagaacacatgtagagatccgatatatgtttgaatttaccacctcaaacttggataaacaggaaactgataggagcaaggtattacaattcgtcattcttcttagaccccgattatgagacaccacgagactttttggggcacgggacacatgtggcatcaatagcagcagggcaaataatagcaaatgcgtcctactatggcctggcaagtggaatcatgagaggaggttcaccaagttcaagaatagctatgtacagagcgtgctcactcctgggatgtcgtggctcgagcatactagctgcatttgatgatgcaatcgcagatggggttgatgttatatccatatcaatgggcttatggccagacaatttacttgaagatccgctttccatcgggtcatttcatgccgtggaaagagggatcactgttgtttgctctgtaggaaattctggcccatcgagtcaaagtgtgtttaatgctgctccacggatgatcactgttgctgccagcactattgaccgtggctttgagtccaacattcttctgggaggagatgaaaacagattaatcgaggtaagaaggaaaagccaatcaacggacaaatctccattcacataacatcttaaagaatttcttttgcagggttttggaataaatattgccaatatcgataaaacacaggcttacccacttatacacgcacgatcagccaagaagattgatgctaatgaggaagctgctaggtaatagttgcctcttaaaattatagagtaactttgctatacctatactaacaagacaacacaactgcaaaccttcaggaactgcgcacctgatacactggaccaaaccattgttaagggaaagattgttgtgtgtgacagtgatcttgataaccaggtgatccagtggaaaagtgacgaggttaagagacttggaggtatcggtatggtacttgttgatgacgagtcaatggatctgtcttctattgatccctcctttctagtgacaataataaaaccagaggacggcatacaaatcatgtcctacataaattcaacaaggtttaagatgtctcatttcacaagatattgctttcaaacagaactaataataatttttaccaaaaaagaaaaaaaaaacagaactaatatatcataatccacattctagagaaccaattgcaacaatcatgcctacaagatcacgaacaggacacatgttagctccatccataccatccttctcatcaagaggtccttacttgcttaccagaagcatcctcaaggtataagcccttatattcatcataaatatgatctcaacagtattcacagaaacttcaaaaacaaaatattgataaacctgttacagcctgatatggttagtcggtgacagaaatgcagcaccagaaggcaagccaccgccattcttcaccattgaatcagggacttcaatgtcatgtccccatgtctccgggattgctgctcgtctcaaatccagatacccttcatggagtcctgcagcaatcagatctgccatcatgacaacgggtgagaaatcaaaatcaagtagataccagttacggatgattgatcagcacgagttaacccaagtctaactctgtatctgcagccgtgcaaatgaccaacacaggatcccatataactacagaaaaaggagccaaggccacgccttatgactttggtgctgggcaggttactatatttggaccttcatcaccaggactgatttatgaaaccaatcacatggactacctaaacttcctctgctactatggatttacatctgatcagatcaaaaagatatcaaaccgcataccacaaggttttgcttgtcctgaacaaagcaacaggggagacatatctaacatcaactacccatcaatctcgatttctaacttcaatggaaaagaaagcagaaag

SEQ ID NO: 185163 - DNA, 791 bp, Arabidopsis thaliana landsberg
  unsure (1)..(791): unsure at all n locations
atcaatgggttttctaatcatcaacaacaacaacataatgggtatcagaacccaatgaacgctaatcaattagggatgatgaatccacagatgatgaataatccaatgatgggtcacaacatgccaatgcccaatatgccaatacatcctcagttctttaacaatatgcctcaacaacttcctcagtntgctatgcccaaccatatcaaccagctacttcccaatctctcggggaatcttcagtttgcagttgctaacagataaccttatgggtcactctcttcccaactttttccagccttctcgtgaacctcatgctttctcttctcgaccacagcttaattcctttaactcccttccttatcctccggttccaaatccccatcaaaatcaccaatcagggcctccgggtttctcagagccaagaccacaggtaaaaacttcttatttacattgctttttctctatcaaaagggagacttgtctaagttgtttccagtacttcttgctctttaagttaacttgagcttctacaggggcagtctgtcgataataccaatggttcaggtcctaacgggaatgattttcgaaataagtttccaaagcatcaaaatttcaaaggccctggtcaagggtatgttcctactacttactcgcctttcagtgatttgtttgctataatcttggtttatatgtattctgagtttattgtagattccagagacctcagttgcatcaagcagataatggcaagagaaagtctggattcaataaggatcacaggggcaaag

SEQ ID NO: 185164 - DNA, 355 bp, Arabidopsis thaliana landsberg
ctcatcgtttccggcaacgtcaccgcgcgggtggaccgcacctgcaccgaggtgcggggcgacctgcgcgtggaccgggcgcgcatcgtgatccccgacgagaccccgtcgtgcctcgacgatgacgtggtggtgcgcaacgcgccgggcgtggccgagaccgaagacgagcggcgccagcgcccgaccgccagctcccagggcagcaagctggacctgcgcctcgcgttcgacctgggccccgacttccgagtgagcggccgtggcgtggacacgcggctggtcagtacggacgaagtgcgcgccgcgcccgacgggcgttcggagatcgtcaggctgatccgtaccgcgggcg

SEQ ID NO: 185165 - DNA, 53 bp, Arabidopsis thaliana landsberg
atgggcctcaaagcccaaatgacagctgtcaaggaacaaaccggtcgacaaaa

SEQ ID NO: 185166 - DNA, 843 bp, Arabidopsis thaliana landsberg
ccattaggtcctgaggaagctgataaagctacagttccacagaggctcgggcttcagtatgttcgtggttgtgaaatcatcgatatccgcgatgaggagggtaatctgatgaatgattttactggaagagttaaacgggatgaatggaagcccccaaaaggtgaaatgaggactgtgactgtcgctttagatgctgcacagtatcatatagatgttacagacatcgctgaaaaaggtgctgaggatgtgtatggcacatttaatgtgctatgaggaggaaaccaaaagagaacaacttcaaggctattctggaatctatcagagatcttatgaacgaatattgtattgtgccggagtggttgcataatgtttttcttgggtatggcaacccttctgctgcacagtggcctaatatgccaaacctgttggaaatagtggacttcaaagatactttccttaatgcaaatcatctcagtgaaagtttttcagattatgaggttagtacctatattcttttgtatatgatgtgatctagaagactagaactagttcctttccatgtctctaataatttgtgcatattaggtttctttcatcaatgctgaaggtgctgaagctctggatccaagtcctccgtttcgaatcactcttccaaagacactaaaaggaaatggtgctatttctggaaacaagatatctgaagtcaatccagcagataatgttaatatggtggatgcttccccgaaggagaaacttattgttgaggcatataccccacctgacccagggccttatcctcaggaccagccgaagcagaactcagttaaatttacacctacacag

SEQ ID NO: 185167 - DNA, 301 bp, Arabidopsis thaliana landsberg
atggccatcaacccacattctagtaggtagggtcgcaagccacatttaatacgtattgccatctaaagagcactgcgtgcaaactgcactggtggacgtatttgaagccatcgccgaaccgagtcgccgggcattgctcgacgcgctcatcgtcggtgtccgcacggcagacgaattggtcgcgacgctgccggacctcacccaaccgaccgtgtcccaacacctcaaggtgctacgtcaggtcgggctcgtgaaagtgcgcccccacgcacagcgccgcatctacgcactgcggacctga

SEQ ID NO: 185168 - DNA, 303 bp, Arabidopsis thaliana landsberg
atggcagccacagaggcggcaaagcaatcactatggcttcaagatcttcttagtgaatttaccggagaaacatgtgagaaagtgacactctgaatcgataccaagtccgcgatagctctcgccaagaacctcgtatttcacggacgaagcaaacatatcaagaagagatatcattttattcgagagtgtgttgagaatgagctagtggtcgtagaacacgtttccggagacgagaaaaaggctgatatcctaactaaagcccttggaaggatcaagttcaaggaaatgagaatttttatttga

SEQ ID NO: 185169 - DNA, 358 bp, Arabidopsis thaliana landsberg
atgtacacacagaaacactatcttcgggtatatatggattcgaaggtaagaaatgtcataccgtcagttctagcacgcttggctgctgatgaatttctgttgtctacctaaaaatccagaggaaatataagtcaagaactacactaatcaaaaccagatcaaacgatacgaggaaggatctacaaaactgattaagaaattgaatgattcgatactattctagtaattgtaaccatagaatcaatcacaaagcaaagctccggtgacgattcagtgtcagatctgcgatattcactataagacgggaacaaggaatatagtgggcagtgttgttacctgtgacatagctgtggaatag

SEQ ID NO: 185170 - DNA, 83 bp, Arabidopsis thaliana landsberg
tattatatgcttttttttccacgatcgccaacaaccggacaagtataatggaaacaacaacacgttatctcgaatatgcataa

SEQ ID NO: 185171 - DNA, 304 bp, Arabidopsis thaliana landsberg
gtatactatctactacggagtaggtgaaactgcgttgaagctcggtgccataaacgctgccgttttaagtacttctcacaaacgtatttcgcgacattacacggctttctcagttgattttgttgcggggggtaacccaattgttttggagcaactagatatcaaactaaaggcgaaggagaaagcatacgtaggttatgatgcccctggacatattgatataaggtgttataatctgaccccaagccacgagaatgtcaacattcaatgtaaatcttctttcacagaattgacagaagtttaa

SEQ ID NO: 185172 - DNA, 394 bp, Arabidopsis thaliana landsberg
gttgactgccaatatcgacgtggggacaaattatgtatggacgcctgtagataacctggtaaatccggggaccggcataatcaattcggtgcctgtacaaattgaagctacggctaaacctaaagatactactgattatgtgctcacggtcaggaatgcaggttgtcctaatgccctgacggatacctttcatatagcagtcactcctcctattcatgtttttgccggcaatgatacggccgtggcagccggccagcccctgcaattgaatgccgtcgtcaacagcccgtatgccgatgcctttaactggacgcccgctgcaggattgaattttacaaataatgatgacaccgttgctacgctggacaaaatgaccgattccattacggattct

SEQ ID NO: 185173 - DNA, 254 bp, Arabidopsis thaliana landsberg
atgagctggaccgacgaacgcgttgagaccctgaaaaagctctggcaggaaggccattccgccagtcagatcgccaaacaactcggtggcgtcacgcgcaacgccgttatcggcaaggtgcaccgtctcggcctgtcgggccgcgccgcgccttcgcagccgacccgtccgctatataagcccgctcgtccgtcgcgccccgcagcgtcgacttcatcacacagcgagcgtccggcagctcagccgatccgccg

SEQ ID NO: 185174 - DNA, 219 bp, Arabidopsis thaliana landsberg
ggctatggggggtgggcgtgcgcctccgtggatgacacacgtcttgactgtcgggaagagccggtcatgaggcgtgttgtcgagcataaagatgttgtcagggacatcatcgccaccaagtccgccccaacctttggagaccagggcgcgaatacccgccatttcaacggccttgaagatcatatgggtgaattagtcaggatcgaccaccacgattaa

SEQ ID NO: 185175 - DNA, 437 bp, Arabidopsis thaliana landsberg
atgaagcctgacgaccgcctgcggcttctgcgcagctccctgacgatccttgtccatcactgccgacacaacagcagcaatattccgcccgtaaggaaacactttccaatcacgaaccatgcgagatgtaaaaaagtcttcgtcggccgcgcgggggataggaacattcctaggccaccaacccccggtaaccctcagcatccgcgccgaagactcccggagctcgggcgaagacatccttccccccggggccacgcatgtcctcatcaattccctagcaaaaccatcagaaacccccagtcctcccatagcaatacctagtttcctcttcttagaggacggggcagccccggcgcgaggtcgtctccagtctctaccaccggtttcttcccgcgacgatccacatcgtcttggccgggataaccgccatacggtag

SEQ ID NO: 185176 - DNA, 1659 bp, Arabidopsis thaliana landsberg
atggatacacacacgctcaaatctgtctcagatttgcctggaaatttccgttcagctttcagtttcaggtaatatatctctttaaacttgagattttgttttcatcttttggtcattatcgtgttgttgatctactgctggtttaactctaaaggaatggttgcatacatgttatggaatatgatgatgattttcttttctttggtcctttgatataactgtttgtgaatctaaactttgctttgtgttgcttctggatcgtttttgtttagatactttaactcgctgcagagcgagtgctttccgctttgctttcactccgatatcaacatgattatttctgcgccaacgggaagtggtaaaactgtactttttgagctttgcattttgaggctcttctcaaagtccatctctaaggaaggaagttttctccatgctaaaggagctcttaaaacagtaagcttttgagcacttttctgaatctcggcttgatgccttcgttttacaataaccaatattggactgcagctgtttataagtctattttggggtttcttctacctttggtgtcaaggtttacatatctccgtctaaggctttagttcaggagaagctgcgtgattggaatcaaaagttcaattcatggggaatcagttgtttggagctgacaggtgataatgaaacctacagcactaagaatatacaagacgcagatattatcttgaccacacctgaggttagatatcaaattcactttgttgtctgtatttactgtttggaacttgtttactgcttctgatcccccttatgattctagccagaacacaagcaatatctgctatttcattctgtgtttacacgaactacatgcttgtatctccttagtggatcattgtagtttacatgtttcctgcagaaatttgatgcagtaagccgttatcgtgttaccagtggaggattaggtttcttcagcgatattgcgcttgtgctcattgatgaagttcacctactgaatgatccgcgtggagctgctcttgaggcaatagtcagtagattaaagattctttctagcaatcatgaactaaggtcaagtactttagcctctgtgcgtcttctggctgtctcagctactatcccaaacattgaagatctaggtaagacgtagctcacaattctagtcatactctgcagattgtatgactctttttgctttgttaactttgcttcgaagtaaaaaaataaacaaacttgcttcaacacaactaacgttgtaatacttgttcatctattgcagctgaatggctcaaggttcctactgcaggaattaagaggtaacttatggattgcttttcacagaactatgtccttatgtgggtaatttttttcagtttcatcattgtttcccttcccatgttttacaggtttggcgaagaaatgagacctgttaagttgacaacgaaagtttttggtaccggtctcatctcaaaagtcattttatttgtttggttaattgttaagatgatgaatttagctgttgatgactttcctgtttttatgaattggaggaaaatgttaactgtcttttttgtacaggttatgctgctgccaagaatgacttcctctttgaaaaggtatacagtttctgcatcttggatttag

SEQ ID NO: 185177 - DNA, 762 bp, Arabidopsis thaliana landsberg
atggacatgcactacgaggcgcgcatccaggccatcgtcacttaccacagctccgtcctaggggagaaggtgagcaagaaggacgcccgaaccatgtcgttgactccggaccagtacttgcaggtaaatacaaaactttattattggtactaaatatgcttaattttatcttctgatatgttgtgtacttatatttttttagatgattcctcattggtgcgccgcgcatcctgagtgctgggagcagatggtgcagaggtggtgctcggctgagtgggatgaggcgcacaacgctagccgggaacgcggtttgatgatgcaaggtccctcccaccatcaaggcagccgcagcctgggcaaatacgcggaacgatgggtacgcgctcttttttatttaggtatataactttcgattagacatgatttctaaccatctcgttggttttctcgcagtcggcggcacatggtggcgcgccttgctccacgttctcggcatatgccatggcccatgaggggaagacgatgtacaacgacacctacaacctggatgacgggcccgaggcatatagcaaccccgccgtctacagctgcctaagtaagtacactgccatgtcacaagaggtccatgagccagattatgatccgaggaccgaggacatcgacggagatgtcctcatgagggtcggaggaggcaagaggcatgggcggtactggattgccaacggggcaatcgacttgtcgtccactcccactctgtcttag

SEQ ID NO: 185178 - DNA, 479 bp, Arabidopsis thaliana landsberg
tcgtctccggtcaagcagcccgttttaagaagaatatggagcaaaagactgaatctcagtgtaaaaaatgggagacgattgtgaaaacatcgtattcacaccatgatcatgttcgctactcagaggtatgtattaatcggtcctagttttaagaaatctcttaagaatctttgtctctttttggtatgtttggtttcaatagatttggatgacgttcaattgtgcaggggcttattgttgttcatcctactcgtcaacacaaattctgaaaaccggaatcgtttttactccatacagagtttccttttttccggtacataaatatctattagtacacatatatgtattttgtacatgagatcatgatgtcggataaatcccaattctgtgtcggaccggatcgggttaggtttgaaatagccacattattttcacacaatatcaacatcaatccggacagttttagaaattgggtttga

SEQ ID NO: 185179 - DNA, 470 bp, Arabidopsis thaliana landsberg
cgagcgttgccaacctcaagacaattgtgggtcaaagcttcattttcggttttggtgcaaaccatttgggcgaactcgcgtactttagagattcttatgggagaattcatagatacacccaatcccccgatctaggtgatataggaggaggcgttgcaatagggaaactcccttccgtaccagtccccgtcatcggctatatgcttccttcattctcgttgttcgcctatggtcggtcccacacccgttatcaaacccatcagactgatatcgcaacacgtcctctgtcagagaaactctctttagatgatcccattgttgacaaagatgggcgttataccgaagcctttcagagcatttcgaagacaaatggcgtacaagcacctctgccagaagcacttacgagcgagttagaactaaaagcaaaaggttcctacactactcgaaacttcggttacggattcttttca

SEQ ID NO: 185180 - DNA, 1934 bp, Arabidopsis thaliana landsberg
gactctttggcaaaaaaactgtcagcaagagcactccggggcagccctgctcatccccccgggcgctagatccccgcccccatcgtatctttccaacaaaagagccgaaacagagtacgatttccccatgtccaatgaacaaagaccatactggaaacagcctgcctctgaacgcgtccccaactcccaccctaggcctcccgtgtatggatacggcacggtactcatctatcccctgtttcattccccaaaaccaattgagtttatttgaaacaaacgtagtatacgtatctaatactgtgtttgccttctcctcaattgcagtccgaccatcgtcgagaccacggtagagaaagaatggaggccatgagttatgagccagagaccaacgctccttccagcccatatcatccagctggaaaccgcacggtactttctgcttcttctgattcgagtcttctactgtctccaccgtttgtttcctgataccattctctctaaacctgcagcctgaacgtcctaggaaatcaaccgagtatcgtcgagaacaccaggatcgaatgtatgaagcagataccctaagcaatgcgagcccatttcacccattcagaagcccttctccatctccattccacacggtactaataacctaaacttctgatgacctgcttcgtattcaaacccatcaatcactaaatagaatgcattgctttttaaatgcttgatttcagcctgatcgccgcagagaccactacgacatgtatgagcctgaggccaacaccatgctgcataatagcggctccagggagcccattccatccagctggaagccgctctccaccaccatacagaacggtaagtcttgctcgtgattcttgagtacacgatgagccacatagatgacataaactctctctcttcaattgcagcctgatcgtcgtagtaactatggtaaagagcaatttgaggacctgtacgagcaagatggtgatgtcacaccgcgaaacagctctccaccgagcccgtttcatccagcagcatacaaaacggtcggtactcaaaaactcgatactggcttctttttggggataagtaaatcaaattctctttctagtgagtcacttagactgacaatagaatatgttcttcttatgctgcagtctgatcaacgtagtaaccatggtaaagagcaaattgaggacttttatgagcaagatgacgatgtaacaccacgaaacagctctccacctagcccattgcatccagcagcaagccattcaccaccaccaccacaaccatacagaacggtactcaaaaaatcttaagtctggctcattgtttttgtttcagcttcttcctagtgataaaaaacgtcctcttgacagtgagtcacatatattgaattttctctctaattgtgcagcctgaccatcgtagaagccaccaggataacgaggatttcgaggcaatgtatgagctagatggcgacttaatacaccagaagagcgctcctccgagtcccgttcatggaccatactattcatccagcgacgacgataatcactccacctacctctatccagaaatccgcagcccacttcgttccaggatcgtatccgagaacagcacggtgtgaatcctttcccaactctctctctctctctctcacagtcactaatgattctgaaatgcctaaaaaacaaagaaatgacaatgctttaaacctgcagcctgttcaccacaactaccagatagttgcggccgagacctatgagcaagacaagcagttcgagccgccggagctgcctgacgagtcacagagcttcacaatgcaggagattaccaaaatgcgaggactcaagaactacgaaagcggcaaggaagagagtcaatcaatgatatctgaggcttacgtatccgtcgcgaattacaga

SEQ ID NO: 185181 - DNA, 440 bp, Arabidopsis thaliana landsberg
atgtcctcctctgttgaagaattcttagaaaaacagcgaacgaaagacacagagcttctctgttgtggaagtaatggaatcgatttgaaatttcgagaagggaagagaagtgaagaagaagaagaagcagtagaaatggaagccattgacgaacagataaaaatcacagagagtactaaaaccctaaggtggggttagaggtagacgaaacaatgaaacggaatcgttttagtacgagaaactgccacgtggcattatcttgcacgtgtcagtggctttagagttaaatacacattttctgaaaatgattttcaacatctgaagaaaagaatctagacgacgacaatggcggagaagagccaaatccctgataacaacaacaatacttcttcgtcggcgaaaaaaccgacgccggagatcggatcgggttcgggtaaaag

SEQ ID NO: 185182 - DNA, 428 bp, Arabidopsis thaliana landsberg
gattgtatttagtcggataatcccagtgggtgaagccaaaccgcacttgcatcccctgtggcaaactgctgagcagtttggtgctgtctgcacaacccaggtggatgaacatgtcactcatgttgtcacaaattctcttggaaccgacaaggtaaggaagtctgcaaattttaactgttgggccacagaagaaatatcattggggagattctgaatgtgtctgtttgagcaggtaaattgggcactaaccagaggtagatttgttgttcatcctggctggtaaggccctcttggtctcctcttaaagatagaaaaaaaaactggtctattcctgattgtaatagttttcatcgtctgagtgtagggtggaagcatcagcttttctgtaccagagagcaaatgagaacttatatgccatcaacccgtaa

SEQ ID NO: 185183 - DNA, 367 bp, Arabidopsis thaliana landsberg
aaaaggttctgcacttgggaagcttgtggtgacctctggtctcttacatagctcatggagtaagatcttggagatacataacccaccttattcgaatcaagatccaggtctacaagtttcaaaaaaaaaaaaagattcaggtctagaatttcagattcaccgagaagagaaattcacacttgtggtttttagcgcaccaccgatctgcagaagtagtagctctgattctactcttcttcatgtgaaagataaagaaaatccttttccattcctctgctccgagaacaacccatcattctctcttcacacacctgcttttaacctttttacctctgcttctactagtctcacttacctcaaatcagag

SEQ ID NO: 185184 - DNA, 31 bp, Arabidopsis thaliana landsberg
atgaggaaccgaatcacacaaccaaacagag

SEQ ID NO: 185185 - DNA, 133 bp, Arabidopsis thaliana landsberg
atgacactgccgacctggaagcgggcgcctcgaccggtgcgccagggagccgcgcactggggacacgccgtcggcatggtctcgacccatgagccgtccggtcgctgcacgaggcggatcatcagtcctccag

SEQ ID NO: 185186 - DNA, 604 bp, Arabidopsis thaliana landsberg
atcttcgattcagtcacaggcgctggcagactttattgctgattggacgccagggactcaggaggaggaaacgaataaagacaacgaagcctggacagtgttttgtgatggatcttggggaaccttcggagcaggagcggctgctgtgttggtttcaccttccaaagtcaaaatttgttatgcggcaaagcttgattttaattgcacaaataacattgctgagtacgaagccctgcttctgggtcttcggaagctaaaagcaatgggaatcagaagggccatacttaaaactgattcccagattgtttcgggtcatattgacaagagttgcaaggctaaagatccgaagcttgaaaaatatctggatatggttcgaagagttgaagcttccttcgaaggattttctgtcaaaaatatccctcgaggacaaaatgagcatgctgatttgctagctaagtcagcagcacaggggcttcccttaccttcggatgtgttcttcgaaacaataaaagcacttcggtggaacttcttgaaagagcagtcctcaatatatctcctgtttatagcgaagattggagaactgagatcatctcttacctacagg

SEQ ID NO: 185187 - DNA, 117 bp, Arabidopsis thaliana landsberg
atcgaatatttggccaaaacattcgatcgttcaaaaacaaacgtatttttgtttgctctaggtgagaatctaaattcgatagataactattatcggttatataaaggaaaaatttaa

SEQ ID NO: 185188 - DNA, 84 bp, Arabidopsis thaliana landsberg
gtcggaattgcgaaatctgaggagagatcaagccatgacccgaacaagctcctaattgaagcctttaccacaaacatggagtga

SEQ ID NO: 185189 - DNA, 192 bp, Arabidopsis thaliana landsberg
aaacggaaggaacaatataacaaccaaaatacacccacaagcctctgccaaattgacccgaaccacctcctccgtgactacaactcggccgttttagagccaccaaatatccagctagaacgacaagattcacctgaagagattctaggaggggaaaagagaaggagaaagaaaaagaaaatgagatggtga

SEQ ID NO: 185190 - DNA, 523 bp, Arabidopsis thaliana landsberg
atgcaactgcgcagcggcccgttgcagctgaatttctccgatacctggcgcagtgcacggattccggatgcatacgagcggctgttgctcgaagtgatgcgcggtaaccagaacctgttcgtgcgcaaggacgaaatcgagtatgcgtggaagtggtgcgaccagctgatcgccggctggcgtaacgcgggcgatgcgcccaagccatacgcggcaggctcctgggggccgatgagctcgattgcactgatcacacgcgatgggagggcgtggtatggggatatctgaactgaaactgccagcggctgtgaaggtacacgagctggcggatgccaaggctctggccgcaacccaggcccatgacgtggccgagcgcctgcgtgcggccattgccgccaagggccaggcctgcgtggtgctgtccggtggccgtagcccggtgccgttcctcgagcagctggccagcgaaaacctcgactggaccaaggtcaccgtcagcctggccgatgagcgctgggtgccg

SEQ ID NO: 185191 - DNA, 192 bp, Arabidopsis thaliana landsberg
atgaatcttgattgttttcgtcaccgtcaatccgtcatccagctgccggaaacggtgatgatgttaagatggatcgtttttaggaaatatgaaatccatgttggttccgaccccgccgctaccaaacataacatcagccatgtcaacgacagcaagaccgtagtcaacagaatgaccagtggtgacggatga

SEQ ID NO: 185192 - DNA, 93 bp, Arabidopsis thaliana landsberg
atgcggccctgcacctcgcacggctcgtgccgcgtggctcgtgcctgcgcggctcgcacccgcgtggctctcgtgcatgtgcgactccgcccc

SEQ ID NO: 185193 - DNA, 1297 bp, Arabidopsis thaliana landsberg
ccagcgattcatcggtgcagccaatggagttctggtgtttggagtaattgcatcgtttgcagcactcgtggtaacaagtttttggctaaatactttcctgtgaattcattaaatggaaaacaaaaccatagatgacctcatgaccatattgttaggcagttgcaagtggagacttacactgggaagctcttctcaaggctaactttgaggccgttcccatgagtatacccatcattgctctgtcatttgtttatcaggtagtcagagggaatctcattatttcaaacttggattcttggctccaagatgaagattctttctcaattggttgcttttcttacagaatgtggtgccggttctctgcacagatcttgaaggagacttgccgagagtaaggtgacatcataccctgcaacgttaatggtgaaactcactcagtctgtatggactaactcaaccttcttaatatctttatcttcagaaccgccatcgttcttggcacagccataccacttggcttgtttcttgtgtgggacgctgtgattcttggatcgtttccagtagatactggggtggctgttgagaagatggtcgatcctctgcaacaattgagatcaagtagtgtcactgtcggtgtaagtttagttgttcttgcttatttgataaactctcaccaatcaccagctaatcagtcttcttttgatcacacagccgtttgtggaagcattctctctttttgcaatcgcaacatcttatatagggtttgtcttaggcctctctgatttcttctctgactgtaagtatcatcaaacaatcaaacttttatgtttttctactaaatctacagccatggagacataactgtataatctattctttcatcgaaaactttcagtattgaagctcccgagtggccagaacaagcctcttctttacttgcttactctcgttccaccgcttgttctgtccctactggatccagagattttcttcaaggccttagattttgccgggacatatggaggtaagtctcttcttgagaaacctgaatcaacaagttcaaacatgaaaacctaacaactgtatgttctctttcgtagttctggtattgttcggaatcctcccagcagcaatgtcttggtcagataggtacatagtctcatcatcaacagtgacaagattacctcaacttgttcccggaggaaaactcaccctttctctggttatgggagctgcaggatacgtaattatttctgaagtaatagagaatttgtcaaagtatctaaatgtttcttaa

SEQ ID NO: 185194 - DNA, 274 bp, Arabidopsis thaliana landsberg
ccctctttacgttctggtgatggttttgagccatccggagtcctctctcctcatgctgccttccactttccgccaaaagataagaaagaggcgtatggtttcatcgaaaaggtaattgcattaaaccctactgctcctcttagaatctttcgacccttattcgtttctcttggggtaaggttgttgaaaagcatcgtcatgtatgcgaggagagggagcgtgtggagcttaaaaggcaaacgctagaagccgcatcgcccgagtggaaaggaaa

SEQ ID NO: 185195 - DNA, 108 bp, Arabidopsis thaliana landsberg
aaagaaatgtgtggcctactttcattttctaatgccgtatatgaagattttcatattcaggcagatattataaacctgcagcaatcattaactcgattcatctttaat

SEQ ID NO: 185196 - DNA, 1426 bp, Arabidopsis thaliana landsberg
  unsure (1)..(1426): unsure at all n locations
atgggcagagagagagccacgcggcccacgcgttattcggcaaaggccaaattgaagaaaaccaaaccctttggaaaaacctccgtctttcgggtcttcgtcgacattgatccgttttttactcaccgtcgccggtaagtcggtaaccgtcaatcttctttctttagatcatctttgttgtattgctctgtaattttggctcttgatcatattcttttgagacaagaatgagtttttagcgaaaaatagaacagaggaatcagatggtttatctgtgattgaaagagaaatattttcctgtggagaaatcgggattttttccaaggatttatcataagtttgagattcttagaaaggggagttctttagattcttcgtgatcatcaaatgaagaaaggaagtattttatgtttattgaaacgggacttttggattgttcccaataggcaaaagcaaagctttcttcttttgtgaagctcaactgcnatttgttgtttgaagttcgatgcttgatacttgtgatttctattaagtgaaaccattcatagttacttacacacgtgggcagttgttcgtgtgtttggagggattttcagatgatgtgtacttgttgagtattatactagagctcatttttcttcacaacactccctttgaggctctgcggtgaagctttgtagtacctcgaaaactaatttgttaagaacatgctctgattcattggttgcctttttgcgagattcctggactatgcatttgttgattgtttacccatatcttcttgtatcttcataataaatccttgacacactgcagtttagcatcacaatatcctgaaagctcatttcatttgttagaaacatgctctcatgtattggttgcctttttgcatatgaacagttgaaatggcgaagtcttgtaagggccttgctgaagagcttgtcaaatgtctcagtgaatcgatttgtgtcaaggtaatataaaatgtctgaagatgaagctattataagtgtattcattacctgttaactaattaccagttcacttcatttgttttctgattgtgttatagggcgagaaacgatcaattagggactgcactggtgaaaaaagcccatgtataccgagtgagtgtgttggcctaagagaaacctacttcaactgtaaaagaggacaggtatgttttgctctcaccacttgaaaagcctcaatttgttcactaaacccattgtgataatgtagctttgaaatcatccatcatgtttaaaagatacgaaccatacctgccgtggaataagattaagcatgcttgcgaacacttaagagttacattcacccttacagtctcttggtctcattggatgtcgaattgtgttttctctaggtagacatgagagccaggattcgaggaaacaaaggctactaa

SEQ ID NO: 185197 - DNA, 117 bp, Arabidopsis thaliana landsberg
atgctggagagtaagaccttcaagtacatgccgttttggctgtcgttagttagtttcatcaacgcaggactttggacggcttattctttgatctacataattgatatctacctcctt

SEQ ID NO: 185198 - DNA, 1527 bp, Arabidopsis thaliana landsberg
atgaacggtcgtggaaatatgactcaataccagcagaatcctttcagtactgatgatggtggccagagcaccggcgtgtcactctcttcccggacttctctgtcaccaccactgatccgttatccagccgggtcgccggacttcagccccggaccacggtgtacgactcaaccgtcccctaccttctccgacttcactcaagcgagtccttcactgacgtcattcaataatccggcaagctttacaccttcgtttagcttctccaacattcaccaaatgattcctacgccgtcgtcgtcccataactcaaaggcgtcggtgagctctgcttcgtcgtctagcttctactttccccagacgagtccttcatcatgctctactccgtcgtcgttcagtccagactcgttttctcactccaacaccggaccatggtcgatccctcagccttcccctgtgtccagcggatagcaccggccagttctgctctgtcgtcgttcggtccagactcattttctcactccaacaccggaacatggtcgatccctcagccttcccctgtgttctcatccatagcaccggccagctctgtccgccgttgttcggtcgtgattcatttccccgctccaaccgcggaaaagggtcgttgattcataggtcgcctgtgctttcggtcttaccgccggcgcctgtctactcctctaatccgatggtgagatcatctccgccgggtcacccatctccatcagcacatttggaggaaatgtctaaccgtcccccgttgcatcctcagcctcgggttccagtcacgaggtccaactctgcgaaagtctccggtagcaggcctagaaagtatcataaaaggaccaacagtgagctatcaagtatgttggttggggactcaagccgcggcgaggaaggcggatttggaaagctcatatataatgaggaagcaatgaaggaattctgctctgagtatatgatcatgcctaaccaaagtgctgttaacaatagtgatcagaatcggaatgctgatgttttgatgataaccaatactgattcgggaggtgcaaatgatgctaagaaatataaaaggtaagcaagactgggtgacttatattagggaacaatattttttctttaatatattttattattatcttttgtgatgtatggttgttgacatttatttattcatattgatgctctttcagaatgttggcaaaccgagcctcagctgcacgttctaaggagaatcgggaaaagaagattcgtgatatggaactcagagtagaaactcttgaaaacactcaagcttcactgtttggaacgatgacacttttggaggtgagacatatatatcacaatatcaaccatctacttgtcatgtctaagtttcttctatagggaatttgtttaaacaaaactattgttgttgcatgcagaaggaaaacatagtgatgatgaacgagaataagttagcgaagattcgacttcaattactagagcaacaggcccctcttcttactg

SEQ ID NO: 185199 - DNA, 337 bp, Arabidopsis thaliana landsberg
cgtgcgttcaggcagcgccgaatgcctgcccgatgagcatggccgagtgattctgccctcggtggtgcgttatggcgagcacggcgttcgcaacatgggtgaagacgccctggcctgcgccgatcaagacccgttcaacaccattttctctgccaaacgcctgatgggccgtggccacgcagatgtggttggcctgaaactgccctaccgcctgattgatggccaaggcatggtgggcattgaaaccgatttcggtgcaaaaagcccggttcaggtgtcagccgacatactgcgcagcttgagtgggcgggctgagtccaccttaggtggcgacctg

SEQ ID NO: 185200 - DNA, 54 bp, Arabidopsis thaliana landsberg
atggacatgaaagcgtttcttctccagaaattcagccccttggagcgcaaacag

SEQ ID NO: 185201 - DNA, 2659 bp, Arabidopsis thaliana landsberg
atgctgggttattcaagtggttacattcaggtcttggatcttggtggaaagctaattgcaagctgggtttcacacaatgaacctgtgataaagctagcagcaggtggtggtttcatttttagcttagccactcatggtggtgtaagaggatggtatgtgacatccccaggacctcttgacagcttaatccgaacagaattgtctcaaaaggaaatggcatatgcccgacaagacagtgttaaaatcttgattggtacctggaatgttggtgaaggacgggcttcacgcggagcgcttgtgtcttggctgggttctgctgtttcagatgttggcattgtcgctattggcttgcaagaggtggatatgggggctggtttcctagccatgtccactgctaaggaaacggtaactccttttcttacagttatgtactcatgactatttttcttatatcaaaaccggttgaccagatcattaaccaagtacagcaggcaaaacctgtccagtactacctaggatcactagttatagagaaatactgtcatcagtagaatgtttaaaaatgttgcatgcgaattcatacgcttaatatcgggataatgctgtttgtcctacatattttaattgagctcatattggtgtttcggttgtaggtaggggttgaaggaagtgccgtggggcaatggtggcttgatgcaattggaaatgcactggatgagagaaatactttcgaacgtatgggttcaaggcagttggctggactgctaatatctctttggtaggcaaaaaagtcatttcagacgtgttacattttgtgtgttttcgagtgattgcaggtggaccagactaaagtagttttatttccttacatagcaccaaaaatctttcacctgtcttaagagtgtaaagttaaatcatatattccaaattaatcatcttttgtcacctcatatcttataactttctgctttagggtgaggaagagtattaggacacatgtcggagatcttgatgtcgcagcagttccatgtggatttggccgcgccatagggaacaaggtttgacctttacagctatatttcccttggttatgtctaatacaaaatcaggtagtatgatgtatgatccaatagtcaatgatagtggattttgatggctaacctcagattaggatgaatcttcattgttgatctaactgctcacatattaatgttcctactttgtcaaaaacagggaggtgtgggtttgagaatcagagtttatgaccggattatgtgctttgtgaactgtcacttggctgctcacttggaggcagttactcggagaaacgcggattttaatcacatatatcggtcaatggtcttctccaaaggacaaagtgtatatactgctgcagctggtatagtgccgtacctgtttttatcttgctcgcttggcttctccacgtacttattttggcttctttattcttctggcttgccatgggccctttctcttgcagctggtgcttcaacatctgctcaagcgctaaagaataaccctgtaagaagatttcatattagcatttacattttttgttcacaatctcggtctcaagctcctgctgtttgtcccttactaatgttattgttctttttccttgtcacctagaatacaaacaacagcactgaagaggagaagtctcatttagcatcagcagatctggttgcatttttcggtgacttcaattacaggttgtttggtattacctatgatgaagcgagggacttcatctcgcaccgatcttttgattggctcagagagaaagaccaacttaggcaagagatgaatgagggaaaagtattccaaggaatgcgtgaggcattaatcaccttcccgccgacctacaaatttgaaaagaataaaccaggtcttggaggtaaaagatagatttgaaataaatttctcctggttgctctatcatgagtttgtgtctctgatttctcactaactaagcaagcttgtaggaagagaaagatttagacaaggtaattgatttctatgctgctcctatctccagggtatgattcaggggagaaaaagcgaatacccgcttggtgtgacagagttatatatagagacaaccaatcaatctcatatacggagtgcagtttaaagtgccctgtagtttcgtcgactataatgtaatgttccatccacgatcttctgatcttctctcttttctttccctttccctctttcccaccaccctcctatgcgttgtgtttgcaggtatgaagcttgcatggatgtgactgagagcgatcacaaacccgtgcggtgcaaacttcatgctaacatagctcacaccgataaatctgtgcgaagacaggagctagggaaaatagtcaagtcgaatgagaaactcagagccatgttcgaggaactaaaatcagttccagaaacatcagtgagcaccaacaacattcttctccatagtcaggacacgttcatctttacaatcagaaacacttcaaactcgagtagagccatcttcaacatcgtctgtaagggtcaaactctcgttagagaggatggagaggaacctgataatcattcaagaggcacatttggtctccctcgctggcttgaggttattattctccttttacgccactga

SEQ ID NO: 185202 - DNA, 471 bp, Arabidopsis thaliana landsberg
cttcagctccaagtactaacttggaccaaaagttggacgagacgacacagaacggcaagggcaagggcaacagatttccatgtactgcaacaagtagaaggaaaacaaacgtgcataaggaaccatatatgcaagaatcaagacaagataattacaaagaagctccatctaaaggtacatacttttcagcatcatctgatcctaactaataaatttttcagagtttaactataatgttatttgttcttttcagaccatgcatcatcgtcacgttcacataattcactatataacactgacgagtatgatgacaatggggatgcaatctacaactgtgaacattgtggagctttaatgtggtataacgaacgcatagaagagtggcgcgtgaaatcttatccaaatttgcagatggagtgctttaaagctttagttgcaattctcgctatctacaatctcaattactattaa

SEQ ID NO: 185203 - DNA, 118 bp, Arabidopsis thaliana landsberg
atgaacggcggaggaaagttggtctgcgtcaccggagcttccggttacatagcgtcttggattgtcaagcttttgctcctccgtggctacaccgtcaaggccactgttcgagatctaa

SEQ ID NO: 185204 - DNA, 74 bp, Arabidopsis thaliana landsberg
atggtccaactctgtgttgagcacgacagccagattgaccatactgttcagtctgggattgccctcaccaactg

SEQ ID NO: 185205 - DNA, 79 bp, Arabidopsis thaliana landsberg
atgctccggcgagacggtgtaactggagcggttctcgaggccacacgcccgtcgttgcgtcctcagctgctcgtccaag

SEQ ID NO: 185206 - DNA, 195 bp, Arabidopsis thaliana landsberg
atgcaagtaaccacgggggatagattcacaatggtaaccaaggactcaaaagtatactcttgtggtacaactgcgtgggctcttggtcatgggaaggaaactagacgatgtcatgaattgaagcatatagatttaccgtttcttctttctttagccataatagaagctctgttcaagcggagggataaaatttag

SEQ ID NO: 185207 - DNA, 90 bp, Arabidopsis thaliana landsberg
gctgacgtagaatcccctgaatttcacagtcacgcacgcattgcatgctcaaaagacaaatgtcgtccaataatatcatatagatcctaa

SEQ ID NO: 185208 - DNA, 74 bp, Arabidopsis thaliana landsberg
ggaaccagatgtcgcaacttcttcagtaaatcatcgagaaaacgactctaggatggcgttagatgataaaagaa

SEQ ID NO: 185209 - DNA, 97 bp, Arabidopsis thaliana landsberg
gcttttacctgaaagaccacacgactactacaagtgcacagtatatcggagtagtattttaggatcgaatcttcgggagtgtagctacaaggaataa

SEQ ID NO: 185210 - DNA, 288 bp, Arabidopsis thaliana landsberg
atgaaatctaattatgaaggtgagatacaggatttcgaaccgttccggctattgaaagaccggtgtgagaaaatcgtctaaatggctgattacaaactgcttcattccgaagacaacaggtcagagagccacgtgcgcaaataccgaaagatgctattggaaattattgaagtaaaaagggaggaaattctgaaactgagacaggagagaacttgctccaacgagctcatcaagaccaaggaacatgaactcgatctcgaagaagcatggctccgcaagttaccttaa

SEQ ID NO: 185211 - DNA, 236 bp, Arabidopsis thaliana landsberg
gagctacagatgatgactcggatctcgttgatcttgatcagacgcaagatgaagttcaagatgatgatgacgaagatgacctggatcgaattctgggactagctggagacaatagcgatagtggggatgatgaccttagcagcgacggccatgaaagtattgctctgaagctgtcccaattaataaaaaaattagggttaaaatgtgtattgctcggaatggtagagcgcgtgtga

SEQ ID NO: 185212 - DNA, 1528 bp, Arabidopsis thaliana landsberg
atgtcatcaacccaagaaatcccatctccccaaactatgaaacaagaagtcttgttgcatattcctgatgacagagtccatctcgccgatatatccaaaccattggaactcgcctttggcgatccacttgagtttccagaagatttattgggagagaattctcaaagtacttcaagtactccaatgaagaacgatgaaattgattggaaagagtttgcgccgaagactgaagaatacaaaagcgttgtggctaaggccatcgcaggaggaacagggcatatcatcaaaggaatcttcacttgtagcaatgcttactctaagaaggtctaatttatctctcatactaaatatacaagtccttcccatgatgctcatgcatttaaatattagatgattttgatatgaatccacacggttggtgaattatgaagagtcatggacttcctatacaaatacaattgatccttagtgaaaaacatatgtcttctatatactagcatatgcccctttttatttttgagatgggatttcaaacatttattatgaacgaagacgcacatgcttgtaattgtagctttaatatggttttaattgagtttcatgataaaataggttcacaagggaggaggtaaaataatggttgctaaagaggctgaggaaacgagcggtgagacatcacaaataaatggaggtggcaaaaatgtaactaagaagaagaataaactcaacacaaatcttcaaaggtattcacaaaactatattatttttttcaaacaagaaaatctcggattcttgattaattcttgcatgatcctttttacgaaccaaatcatggttatttggatgtaacatatacttagagtggagaagctgtggaaggcaagtgaggcgataggagtcactgtcttagaaggtggagatatggtaagtagttcgatgatagctccagtgatcaagtcgaagttagggaaggcgttgttagctactccaccaggagaggttatattggcttcacttgattcttttagtaagttacataggatataactcaattaatagccactctctacttatcttcattgatttcgaattttttggaatgaaaatcagtataagaaataaaaccgataaaatgtttgatatgatccaatagataaaatacttggtgctgctgaagcggcagagacacaaactcattctgctacaaccatggctgctactaaacttgtgagtaagaggtaattagaattacactttgtgatcctcaaatttgaaatcgaagttatttttcatgtatcgctcctgcgatgtgttctagtattcatttgcaaaatgttgaattgtaacacatattcacatttttgtgacaatcacacaccacagttttggagagaatgccgggaaaaccaccgggaaaatactagaaacaaccggcagcttaggccgaaccgcctggaatattcaaaaagctcttgatccatcattttccatcacctcagaaatggtcaaaaatgctcctagagactag

SEQ ID NO: 185213 - DNA, 1038 bp, Arabidopsis thaliana landsberg
gaaaccttatccagctattccagataatcattatgatattgagaatgctaaaggtgttgttgaagagcttgataggattgaagagtttcttcagtgggtcagctatatttttcctgatggaagctcgtaatgcctcacatttcccttttttcttctctttggttttggtgtcttgtttctgtgagtttggtgtttgcaagttgtgatttttaggttttgggtttacaggctttggtgttttgttaccgtgagatgctttctaaatctagtgactttcttagtttgttgtgttctataagctgcagattgaattttccatgaagtttgggttgaaactttgtattctaaatagagtttgaattatggaaatgaaggaaatggcaatgcaggttggatgatagggcattagaaactttcttgtgactaagttttatgatcttcgtcatctgtttgggttgcttagtgatgaatactttcgtctagattcagtagcttcgtatctcactattttctctctcttttgttttgggctaaaggtacgaaggcacagtttgggatgacttggctcaaggcaaaggtgtttatattgctgaaaatgggcttgtgaggtgatatttctgttttggagatttgcttgttttttgtttctcttgttaatgtctaacaattggttttcaattacccaagaatttttttggtgttggctctgaatttgaatcgttaggtatgagggtgaatggcttcagaatgacatggaaggtcatggggttatcgacgttgatattcctgacattgagcccataccaggttccaagtatgattctcattcctattaatcttcccacgggattttataacatagtcgtttgactaggatattgttctttctgtctatgtaggcttgaagctaagatgcgtgcggaaggaaggattatcaagagagattacatgactccagaagacagaaagtggttggaaatggatgtcgaggatagtgttgcacttactgatgggaattttcaagttcctttacaatga

SEQ ID NO: 185214 - DNA, 441 bp, Arabidopsis thaliana landsberg
tcgagtctaggactagtcttgcatacattctgcatcttggagttgtttcaggtgttttggagctattggtgctcagaaagaggaaaaacagaacagaaagtcacacttccaccaacatactcgatcacaagtggcagagagggaagcagtcagctcagcagtccatccagacacttctacttgatcccagaggagacctggcagtccattcggccagatatacttgatcacagaggagaggaggcagtccattctgcaattctactctatcgcagaggcgaccaggtagtccactttgccagtccacaatttatactcgatcgcagaggagaagaaccagaccatcctgacagccgacacacttactcgatcacaaaggccaagaagcagcccagaccattctgtcaaccaacctactcgaccaccacctcgaccctctga

SEQ ID NO: 185215 - DNA, 422 bp, Arabidopsis thaliana landsberg
atggagtcaccaccactatacgagatatcctcaagctcttcttctgaaaaacctagacaccatttccaatcccttgatctcttccctaacctcaaccaaaactcttgtatcaacaataccctaattgagcctttaccgcttattgatcgcataaacttgaactcaaacctagacctaaaccctaatcccttgtatgcggaagaaggagagcaagaggaggaagaagaagaagaagaagaccgtgaagtggacgtggacttacacatcggccttcctggttttggtaaaccaagcaatgatgctaaacagctgaagaagagaaatgggaaggagatcgccacatatgacgccggaaaaggcatcgagaatgaactttccggaaaggcatactggatcccggcgccggagcaaattctcatagg

SEQ ID NO: 185216 - DNA, 58 bp, Arabidopsis thaliana landsberg
gttatgtgtaaacgtctttgactcgctgcttcatacacctgtgcaattaaaaccttga

SEQ ID NO: 185217 - DNA, 384 bp, Arabidopsis thaliana landsberg
atgagtggttgtgatgtttttgttttgatgccaaccggaggggggaaaagcttaacatatcaggtaacggcatcttaactgatacgttgaaatgtaattttatttgaaaagctaattctggcttttattctatacacagacttttgcttacatcctgtaaaaaagagatgacagtttaagttgtgttctagggtgaaactataagctagtattctgtcctggtggaggttatacttcagaaagttgctctgcgtctaggacatcaaaaacgtcttcataatatctttttctctgcagcttcctgctctactctgtgcaggaataacattagtcatttctccacttgtttcactcattcaagaccagataatgaacttactgcag

SEQ ID NO: 185218 - DNA, 1671 bp, Arabidopsis thaliana landsberg
atggcttatgaactccatggtctcttggctggaaatgtcagcatcgttaccggagaaaatattaagccttcttacggtggagatgatgaggcatttttaaggaaggtcattacaccaatctaccgtgtagttcaaacggtacaagtttgactgataggtcgatggcattttaagaatcatgatctcgtatacatcatagctaaccttttttatgaactaggaagcaaacaagaatgcaaatggcaaggctgctcactcagattggtccaactatgatgatctgaacgaatatttctggtattttgaacttaagtctgtagattgcacctttacttggtgaggacacctgagtttattatatcatttgcgcattactgttatataggactcctgattgcttctctcttggctggccaatgcgtgatgatggggatcttttcaaatcaacccgtgatacgacacaggtagtctcttgtagttttcatttgctgtttctcttcccccattgatctaatcagtattttttcgattttaaattaatttccagggaaagaaaggatcgtttagaaaagcaggacgcacaggcaaatcaaatttcaccgaaactcggacattttggcacatatatcatagttttgaccgactctggacattctatctattagccctgcaggtaagcaagcaatctggccaatctatagcatgtttcctaataacatgagccagtcaaaatgacatttcgacttttcaatacaggcaatgatcattctagcatttgaacgagtagagctgagagaaatcttacgcaaagatgttttatatgctctctcaagtatcttcatcacagcagcttttctgcgcttccttcagagtacgtgacttcaatgctgtgaaaaaaaaaattatatggagtttcttggtgctcatcatttggttatgtttcctggaaataaatgttaccttgtttcttgcttctatgctaggtgtcctggacgttatcttaaacttcccaggtttccacaggtggaaatttactgatgttttgagaaatattctcaagatcgttgtcagtctcgcttggtgtgttgtgttacccctttgctatgcccagtctgtctcttttgctcctgggaagctgaaacaatggctatcatttcttccacaagttaaaggcgttcctcctctttatatcatggctgttgcactgtacttgcttccaaatgtactggcagctatcatgttcatttttccaatgcttcgacgctggatcgagaattcagactggcatatatttagattgcttctgtggtggtcacaggtatgaaggcttgtttttatttttccctctcttctggtcctgcatgaaaataccattctatttagtcagaaaaccccttaggcatgttaaggttctgatagttgaatttatctgcaactcaggatccattttcttgtgttgctggttagttatatgtatatgcaagtcgagaggaaattttgacttttactctggctatatcaatgtttagttaagtttttgaatatgaattatgctcaggggtatcttatatgttgtttgaatacccatttactgatgtgtcccgtttttccttctcagccaagaatttatgttggaagagggatgcatgaaagtcaaattgcactcataaa

SEQ ID NO: 185219 - DNA, 81 bp, Arabidopsis thaliana landsberg
aaatactttcagaattagacataatggtcgtagaggaggcaactttgatactgcatcctgcaaaataatccgagaattgtg

SEQ ID NO: 185220 - DNA, 138 bp, Arabidopsis thaliana landsberg
ctggctccctctctcctgtgccagctgctgctggaggagcctctggagccgctgcggcgccgatgctggaggagccacaacgccactgttggaggagccgctgctggagccaccactggcctctcccactcgccttag

SEQ ID NO: 185221 - DNA, 554 bp, Arabidopsis thaliana landsberg
atgacggaatttgaactaatggagctgttagatgttggaatgaaagagataagatcagcaatttcattcatcagtgaagctacttctccaccatgtcaatcagtaagctctctttttttgctatatatgattggtttgtttttttaatctaaagttctttttgttcatgtaatgtgttcaaaggctcgatctttactggagaagaaggtcgaaaacgaacatttatcaggtcatcttcctacacatttgaaggggttagatgataccttgtgtggtgggataccttttggtgttcttactgagttagttggtcctcctggtattggtaaatcacaggttagtttcttagaagattgaagattttattatgtctcattgttgtatagttaagttgaaagttggtacctttggtgtgtttgcatacagtaaaaagttttctctgctacgcagttttgcatgaaacttgcgttatcagcttcgtttccagtagcttatggaggattagatggtcgtgtgatatacatagatgtggaatccaagtttagttcaagaag

SEQ ID NO: 185222 - DNA, 268 bp, Arabidopsis thaliana landsberg
atggtcactgacaacggttccgcgaaattggcttttagcaaaatgctaacagtcgagagccatccgattttgcgggatcacgtaatgaatggccaggcggttgtgcctgcagcgttactcatagaatggcttggccattcggcgttgcatgcaaatccaggcttggcgttccacggtttgcaagattttcgtgttctcaaaggattagtccttaaggggcaacagccgctccatctaaaagctttcaccaatgttcttgagcgtcaag

SEQ ID NO: 185223 - DNA, 403 bp, Arabidopsis thaliana landsberg
atgggaagttttaatgatacttcatgttcatatgttgatgttgagattaagtatgttgatgaatgtgaggagaggttaaggagattgtttgatcaagctttgttggtttttcttgaggaagagggtagtataaagcctctccctgcagttataggtgatggcaaaaatgttgatttgtttaagctgtttgtattggtgagggagagggaagggtttgatactgtgtctaggaaaaggttgtgggaagtagtggctgagaagttaggctttgattgttcactggttccttctttgatattgatttacttgaagtatttgaaccggatggagaaatgggcggtggaggaatctaggattgtgaattgggataataaggatagtgaaaagaaagggtgttatagtg

SEQ ID NO: 185224 - DNA, 51 bp, Arabidopsis thaliana landsberg
atgagaggtgatagagaaggcgccatcagggagaacaataggaatgggttg

SEQ ID NO: 185225 - DNA, 3067 bp, Arabidopsis thaliana landsberg
  unsure (1)..(3067): unsure at all n locations
ggcaaccagctttagtgttctccactggaaggacaagcgatatctcttttcctggttccgtaaatttacctccacagcaacctcaggtaatgcataaaccatctattgcgtcttagtaagacaattttagaaacgtgttgacaaaagatgtagaataagaaaactctacatagtattaaatactaaataggtaaactcttttgttccttcgaagagtccgattcaaccatactgcaagacaaaaaatattttatctaccatagggaactagatcactccatttcaaagggcatattttcttatgcagctctgtcatgggagcttgttaataatgtcttaatgtttccctgaattgcagtttggatgtagtagcatgcttgacagttgggaagagaatttgggtataattactgcgaacagaaccacagatgatgagcttgtgattactcatcttggagattgcatgtggaaagaaaggggcgaggtggttctctcccttgttgtgttgttttactttatgaaactttatcatgacatttgaactattgttatgaatcagattattgcggcccatatttgctatttaattgcggataagaactttgatccatactcagatactgccagactgtgccttgttggagcggatcactggaaatatcctcgaacatatgcaagtccagaggctatacaggtgattttttttttatcattctggtttttggttatcatcatactagccggacgattctgttttgagcatatcatagataccctccatgttcctcaaatacgtattgcatagatactccaacgaaattcttggataacaccattcttttagttaatcgtctgattattttttgacttgtcgattgatctttgcatggacagagaacagagttatatgaatactctaagacgctgggaaactctcagtataccctgttaacgtttcaaccatataaagtcatgtatgcccatatgctggctgaagttggtaaactttcgactgcacaaaagtaagatgattcactttccttcatctactcctttgttagactgtataatggcttcctgatgtcgtttgtgctatggctgattcaggtactgtcaagcagtattaaaatgcctcaagacaggccgatcaccagaagtggaaatgtggaaacagtttgtttcatctcttgaagagagaatccgtatccaccaacaggtacaacttctggttccaatccgtatctaccaatagatttttccatttggtttacatctgttagatgtctattccttcaaatggaaatgtaaaataagatttacatctgtgagttttccttcccattaatttaaagtgtgaagaaaaaaagtgggaataatctaaagcttgttcttttctctaatgatgcaacttaaccatttcagggcgggtatacagcgaatttacacccagaaaaacttgttggagtactgctaaacttttttggtagtaagacacatcgtcctgttgggggcatgccaccacctgcaccacattcaaccaaagcactctgacagggaaatgagtattaccatcatgcagcaggaagcttctaagttagcatatagtcaatcggttaatccaatgtcatcattgatgccgcctgcttcagtggaacccactcatgagtagggtgggagtggtaggagaatggcagtacatactataagtgtatcagagccagatttcggtaggacgccgatacaggtctataccagaaaaccataatcaccgctaagaatatttgaaaatggaatttataaaaggtttccctttttttaggaaatggctgactcctcgaaagaaaaggcagttgatggggtgacaaagttgaaatcatctgggtcagtggcaggttcgcggtttagtcgctttggttttggcatttttaaggacactgtaggaagggtcttagctcggtcatccaaagaggtacactgctaaatgctttggtcgtgatgatatctcttgaacttattctaattttttcggttcatgctttgggtcaaggnnnnnnnnnnnnnnnnnnnnnnnttctactatgacgacaaactaaagagatgggtggaaagaggtgtggaacccccagctgaggaagctgcactgcctcctcctccaacaataggcgcattccaaaacaactcattgggttatgaaaacaaatctgatatgattccatctaatgggaactggagttctggtggcccaactccgtcagagaattcttcaggaatcccaccaatctcacacggttcgaatcaattctcagctcgtgggcgtacgggtgtgagggcaaggtaaacaaatagcttaaggcattttagaattataatctgtggagactatcctggattataaatcatgagcgcaattgtaccgtcacattagaattgcatggaggagggaatattagccacacttggtttactaccaggaaagatataaaagatgaaacattcaatatgaaataggcatgattgtagttgctgtttccagctgtgagttgtaaattttcaagtgaacatgtttgcagtcttgttagtgttttactgaagataatttgcatgtttagagctaatcactttactctccttttgggcagatacgttgacacctataatcctccaggccgtggaaactctcagaccatgattccgtcaccttccgtacaaactgcaaaaccaccaatccccgcaaaagcaaagttctttgttcccgcagcacctgcatcgttttcaaacgaccaggcaatggaaccggctgctgctgaaaccagacaggaggagatttcagcagatgaagtagtagcctcttcaggggctccaccaccaatgatgatgcagagatatccaagtatggataacatccaaagaaatggattggggataagcgtcaatggggataatcatcagcctcctacttccagaagaacagcttcatggagtggaaactttaacacctcgtttacgcctcctaccagtccatcaaccttcaaaccagtcctactcaacagtagcagcagcagcttag

SEQ ID NO: 185226 - DNA, 377 bp, Arabidopsis thaliana landsberg
atgagcaaaagcacagaacgtattcaacttttcaaaagggttgtggcagctgaatattatttgttctatgatggtaactaacaatttgtttattttttgttctttatagtgaaatcttttgatttgatttttctttttgttgttgttagttttgttggaagccgtcaaagacatacaaaaattgaaagttgatctaacgatagaagagaagaaatgcttagaaatggtaaatgagaatctatttaacgagacagtaaagatactaaaaccgctcgaagatatgggtatgaggtctgaagaaacaatcattatagatgataatcaaaagatgattaaagagtatttggaggacaccttcatagtttgtcataaaatat

SEQ ID NO: 185227 - DNA, 76 bp, Arabidopsis thaliana landsberg
gccgtgccggcctcggcgggtcaaaaagcttcgtcgctatcatcgcttggttgctgccagccagttgtccctgtag

SEQ ID NO: 185228 - DNA, 99 bp, Arabidopsis thaliana landsberg
ccctagctttagaacattcttcggattttgaaattttctccggatctgttaaaaagcttagtaacaaaagtcttggtatctgcaaagaaatcgtttccg

SEQ ID NO: 185229 - DNA, 59 bp, Arabidopsis thaliana landsberg
ttagatccgaaaaacacaacaaaaatcagtatcgtagaaaaaatctacgagccaactag

SEQ ID NO: 185230 - DNA, 119 bp, Arabidopsis thaliana landsberg
atggcaaccggagaaaacagaacggtgccggacaatctaaagaaacagctcgcagtttcagttcgaaacattcaatggagttatggaatcttctggtctgtctctgcttctcaaccagg

SEQ ID NO: 185231 - DNA, 712 bp, Arabidopsis thaliana landsberg
tttatgagcttcttcagagcctgtcaccgcaccgtgaagaaggccctcttaatgaactcagattaaagattcatggccatgatccatctggatctgctgatgttttaaaggaacttcagagatcgttactttggtgagtgcacctatcatattacttatgcttgaaacactcttatgaaacagtacactcatatcgaatactgtctccccatgaaggttgagagatgagatccgagatctcccatgtacatacaagtgtcggaatgatgctgcagctgatttaattcacatatatgcctataccaagtgctttttcaaagttcgggtaagtcgtttcgtatacttttgagtgacgaaagaatgaatcttgttgaacttcttctgacagatgggtcttgatatgttgcaggaataccagtcctttatctcttctcctgtacacattagtccgttagatttgggggctaagtatgctgacaagttaggtgagagtataaaggagtaccggaagacttatggcgagaactattgtctcgggcagctaatttactggtataaccagacaaatactgatccagatcttacattggtgaaagcaaccagaggttgcttgtctttacccgatgttgcttccttctatgcaaaggcccagaaaccatcgaagcatcgtgtatatggcccaaagacggtgaaaactatggtttcacagatg

SEQ ID NO: 185232 - DNA, 410 bp, Arabidopsis thaliana landsberg
ctaaagaaggcggcgctgacgcatctaaagcggacccgacggtgacggcggtgatcccggcgacgcaactttaccggaaggctccggcgagcccgactaagccgtttgcaaggcctggtactgcgatctcgggtccgctcacggggcatcgtaagcgccgtgacatccgcttgccgatctacatccgcgccgacgctcgcaagagcggaacgactgtgatcgaggaggccgaggatcatatgagccgctgcgccgcggtcataatggacagcctctaccgcgcccgcctcgccgtccccggcggcaccgccaagctggtgctgatcaacgatatccgccgcatggtcgatggcgaggccgatgccatggaagccaatattgaattccgcgcgcgagttatagcgggatag

SEQ ID NO: 185233 - DNA, 686 bp, Arabidopsis thaliana landsberg
atgaaaatgtctttctttaactggtggaacgttagtctatgtgctggtattctaacggccgtgactgctgttgcctatatcgaagaccgggttggttggggcgttgctggcatcatactaactgtagtcatggctatatcactcatcatcttcttcattggaaaaccattctatcgttaccggacaccttctggtagccctttgacaccaatcttgcaagtctttgttgccgccattgccaaaagaaatctaccttatccttctgatccttctctgcttcatgaagtgtccaagacagagtttactagtggccggcttctctgtcacacagagcatcttaagtgagtagaaccaaactcaaaagtcttccatttgttaatttcaaccattctaaactgtttccttgtagatttcttgacaaggcagcaattatcgaagacaaaaatcctctggccctcgagaaacagagtccatggagacttctaacgttgacaaaagtcgaggaaacgaagctgatcatcaacgtgattccaatatggttctccacgttggcctttggcatatgtgcaacacaagcttcgacgtttttcatcaaacaagcaataaccatggacagacacatcggtggcttcacagttcctccagcttccatgtttacccctaccgccctcacattgatcatctaa

SEQ ID NO: 185234 - DNA, 177 bp, Arabidopsis thaliana landsberg
ggtttgtcccaatgggtttacctagaaaggtttttaacgaggcaacatcaagtcatcaaggaatcatttaccaagcaaatgattcgaagatatcaaaagtacatatatttgatgaacttgctaacagaccggctgaactacttactgaactaccttctgaagtaccgcacgaaatga

SEQ ID NO: 185235 - DNA, 380 bp, Arabidopsis thaliana landsberg
atgtatcagcgaccacaaaatgattacttgagagtgaataagcggaagagtaactacgaccaactaaacgctgactctaactccgtacctcagctggcgcaaacacaaccgcgagtgcaagtctacatcatagacaagaacgacttcaaaagccttgttcaacaactaacgagtcctcaaccatgtgaccgtttacctcaaaacattccaaagcatcaagatattagaccagagccgataaattggacctcttcgattcctcccagtgccatggcggttcaagaggatcctgatgtctcattgtatatggcttatcttcaaagcttactcgaagaatcatcaggatctaatggagaccaattcgaaaaaccttttgataa

SEQ ID NO: 185236 - DNA, 1016 bp, Arabidopsis thaliana landsberg
gtcgttgggaaggttagggcttggtcatgtcgtgtacgtgtctgggttatcctgcaaaatcacaaaagagaactggtaagccgtttctcttgctttgaaactgatagatatactacggatccatcgctattgggaaactgatttagctcaaacatgaactgaatacttatcaataagtaacagtaggtattggtttattgctttagcttaaacattaatggagttcttgtttttgggttgagcagcattgagatgttatggcatgagaaagacgagaaagctacattcgtaaaccttagctgcttgcctgcatttctgacctcttcttgtattcacctgatctccactctctcccaaatatcaaaacagagaaaacctgcaataaatgttcgtcttgctctctaaatgattcacagagctttatgtggcgtttcctttgcacgtctggataattcgtttatttttctttattggacagatttgtcgggttaagctggatgagatcgaccaatgccataacatcaacactagactagctcatagcctttgcggccatttcatagatgaagaatcatcatcatcttatggagcgaacctgcattgtagtttctgccgagtaagctgcaacagtaacacagaagtagtgagaacattccacataacgataacacttgcagacgaggaaaccaaactatactcgtggtgtactggtcagtctgcatcagctatacttcaaatatctcctgatgaattctgtgacctcccagaggtaacaaagcaatctgttattatatatatttggttataatagtagctaatatatggcggtaaaatgaatgaataaaagaagcaatgtaaaattattggtggttcaggatgatcagctaatgtatccgtcttcattggagaacgaatggtttctagtgattttagcaaacagcggtagccggaatttgggttccggtcatgaaacggacgacacttgctgggaaatcacacgagctctcaagatttga

SEQ ID NO: 185237 - DNA, 942 bp, Arabidopsis thaliana landsberg
accttgcaagacatgcaccaaacccgaatggtaaaacccgagagtgatcaggtcaatgagttttcaggtgaggatacaattaaaagtggtgattaccaaaaggacaaaaagaaggtggggaacaagggagatatgtgcttaatcgagagtttctttctaatttcaaaaagagtagagactaatcaacaaatgctggaccctaggaatagacgacgtttcgacatcggatttgtcactcacagctaggacacacaacacagttccccttccattctcttgtttatccactttgaaaagattaccttctttttctttcctgtggcattattgagtggagagagagagagaaatagattgagagtacttaactgatgacactagacatcagggagcagatatgatctccaattgatctttgtttcttgattccccaagaaaaagacataactttatcactaataaccgccaagtatgtctctcactgtttaagatattaggatgtgaccaggccgtttgtgcccataaccgaaatgattttgacaggatcaaaaacaagatttttagttcccaagaacctgtgtaaaatatttgtggggaaaaaacctaggcatattttcatttgcacatatgtatatcatcatcctatgaacaaaacaacagactacttgcaaacacatgtgttcacaaacctggacagtaaaacccatcacagtgaatattgaaacagaatagttctagatttctcccttcaattttctttttctttctagattctaatcaaaatatccaagaaaaatgatattggtgtgtgtgtgtgttatagtggaagtcctacttgaacagcacaaggaatggtctttgaatggccattgggagatcgcctctaccattgaaacttgtcagccaaaggagcctgtcaaatacatagatgacgaagaacag

SEQ ID NO: 185238 - DNA, 198 bp, Arabidopsis thaliana landsberg
atggccctaatggtgaacgctaaaggtggaaatggagggaaagaatgggatgatgggtttgattatgagggtgtaacaaagatacatgtccgagctggttctgaaggcattcagttcatcaagtttgactatgtcaaggttggaaaaactattgatggaccaatccatggtgtttctggccttggtatgacacaaacg

SEQ ID NO: 185239 - DNA, 153 bp, Arabidopsis thaliana landsberg
atgtttgattacattatagaacgggtgaaaaaacgaactgcgagttggagtgccaaatttctttctccggcgggtaaagaaattatgctaaaatctgtggctttggcgatgcccgtcaatgcaatgtcatgctttagattacctcttggtgtg

SEQ ID NO: 185240 - DNA, 239 bp, Arabidopsis thaliana landsberg
gattctatttagatcttatcggactgctattgaaatgcagtttgcaagtggagctccctgtatcgaaggaaagcaagagaaggatatttgtgaagggacaaatgacacatataacatcgagaagcttaagcgcgcagtcatctctgctatctcagccgcagcagtaaaagcacagaatcttgcaaagcaagaagtagatcagatcctgacaacgttcgggatcatagatagagaagcag

SEQ ID NO: 185241 - DNA, 263 bp, Arabidopsis thaliana landsberg
agctggaggatggtttccaccaccagaagctggaagaagaggtggccaaccgacccgtgcgggaggtagagccccagctcacctcgctctccgccccagcaaggatgatgaagatccttgaagctgagggcaggaccaagatcacagcctggctcgcttctccccaccatcgaactggtggtcaccgtcttaggtgaccaccggcgaggggatgcagccgggctgcctgatgaaaacccttgaagccgaacgatggctgaaag

SEQ ID NO: 185242 - DNA, 385 bp, Arabidopsis thaliana landsberg
  unsure (1)..(385): unsure at all n locations
gagctgaggatcccgataatgggaatggccgccaggtaaaacagggcaattttccagttcaccgtaaaggcaattaccattacgaaaataaggcccacaacagaggtgaacatgatattgacaaaagcggaaatgaggcgttcggtgtcggtttttactttttgcaaacggccnnnnnnnnnnnnnnnnnnnnnntcttcgaaaagttggtaaggcatgcccagggtatgtttgataccctcggtataaatgtcggtaccaaccctttgggtgatcacattcacatagtaatcctggaaatttttggcaatgcgggagaccatggcggccccaatggccaggccgacaaaaaagagtaccatgttgatgaattcagcggaagaag

SEQ ID NO: 185243 - DNA, 233 bp, Arabidopsis thaliana landsberg
atggtgacagagggcggtcaagagatagctgctcattactgggctcattgggatctcaaaccgtacgggaacgacgggacacacacaagcaaagtgtgggatttgttttgggtaagtccattgtgatattcaaattgaattcagattttgcatttgtaagtctctggtgatcttcaaatttgcagggccaatttcgcgtgtgcgacacctatacttggatgattcatatgtgc

SEQ ID NO: 185244 - DNA, 177 bp, Arabidopsis thaliana landsberg
  unsure (1)..(177): unsure at all n locations
atggacctttctgggccgcaactggtgccaatcgacaccaagagtgtgtcgatcgacactcttgacttgatatgaaagtgaattcgntcttcggcttattttcttcagcttttgctccaaaatttctcattatcgccattcttgtctctctccatagaatatctgaaaagactctaa

SEQ ID NO: 185245 - DNA, 105 bp, Arabidopsis thaliana landsberg
aaatattacacctatgaatctatgattgtgaaggctatggacatggaaatattaactttagaacaactagtgagagtcaacggtaccgacaatagtcaacggtaa

SEQ ID NO: 185246 - DNA, 174 bp, Arabidopsis thaliana landsberg
tcgttggcagtaagagagaatataataagtgccaatggaaatgggaccctaagaaaattcgaaaaaggagataaaattaaaaatagctttcacgtcgatgaatttattattactacattccgaaacaaattatctagagctgagtcgatcacacatgtccacacgcgtacgtga

SEQ ID NO: 185247 - DNA, 63 bp, Arabidopsis thaliana landsberg
ttgaatgtcaatgtcaaactcaaaacgttttgcacattctggcagtttctcgatgtcgtgtga

SEQ ID NO: 185248 - DNA, 276 bp, Arabidopsis thaliana landsberg
  unsure (1)..(276): unsure at all n locations
atgtcnccggtccacccagcaccagacagggatgacggaaggcgcatcgcagccgcgttttatagacactggaagggtgaagatagcttcaacggcttccgagaatcccgtcacggtaagttcggattttgcccgcgccgttccgagcctgaaggacaaaagcttctagagcccaacagcgacacggagaaacgcacggccgagcggtgtgatttgcatgatgacctcattcatgacatcagcatgacgtcgctccagcaagatataataaaataa

SEQ ID NO: 185249 - DNA, 1193 bp, Arabidopsis thaliana landsberg
aggtatatcttgatgatatacttttagcttctggatgtgctaaacgtatagatgtcgctaagttgtttgctgctgaggaagcgattcaaaagctgtcagaatgtatgccctttggaaatagtattcatgaagatagtccaaatgttgtacctgaagatgtgatagcgaagtcgtttgagatttgctccagggaaaatctccaagtacagtctgaattatcttctctgtccactgcctctgagaactctttagctgatgaaatgtcacaagaagaggtggttattgatgaggatagtccaaatgttgaacctgaagatgtgaaagggaagttgtttgagatttcctatacgagaaagctccaaatacagactggttcctctggaaaccctttaacctatgaaatgactacaaaacaaatggttgttgataaggatagtctacatgtggaacccgtaaatgggagaggggagttgattgagatttgcaccaaaaataagtggtggatgccgattttcaggtatatcttattcctacatttttctttgctaattactacttactacttaacaagaaccatgattcaaagtcacacaaatatctttgagtagtctagactcttatagtctcagaaaaggatactgtgattgcgaatccgtggttaaattgttacaatcttgggtagagcagtcacatatatactcgaaaaaactattcttgtaagatcaatgttagatagctatgttttactttgtgcggctcaacaagcacgaatgtgtcatattaatttgaacacttttgttattgtgttttaactctttccagtgttcaggaagaaaaaggaccaaaaaatgagcccaaatttgtttgttcagtaaagattgagatcccaaatatagaaggaacctttcacatgaagggagatgtaaaatcaaagaaaaagcaagcagaaaactcctcagcctaccacatgataagagccttggaatcttttctaatgagtcttgtcataagcaatttacaaaaaccaaaaagttcagatgagaagaataatccattgctcttcagctcagagatggattcttcagtggaagcagtggagaagatcttgaattacagttttgggaacaagaatcttctgaaagaactgcttacacgcaatgattctcctttattccagaggcttatgagcgttg

SEQ ID NO: 185250 - DNA, 360 bp, Arabidopsis thaliana landsberg
atgcacctggtattcaggtcatccgcgcatcccttgcggattttcagcggcgccggggaccgcggcgagaccttcggccacgcgctggtcgggggcgcgcgcgccgggtgctacctgcgcgaactcgcgacaggcggcatttccgtcggcgccgaattgcgcgccggtgcctgcatggccttgttcggcgtgccggccggcctgctggcgggacggcacacggccctggacgacctgtggggcgcggacgccatgcgcgcctgcgaacgcatcttccaggcgggcgacgcgaccggccggctggacgccttcgaggccatccttgccgcacgcctgccgggaccgcccctgcaccccgcg

SEQ ID NO: 185251 - DNA, 40 bp, Arabidopsis thaliana landsberg
atgcacctgatgtcatcttacggctcctatgcacgggcag

SEQ ID NO: 185252 - DNA, 153 bp, Arabidopsis thaliana landsberg
ctaagggcgtcgcattccaccctcatggttgcactgttttcccgggcggtcatccaacgaacaggtccttacggagaggcactccagaaaccgctcgagccccctaaagtttcaccagtccaacatcatgataataatgacaacatcgtataa

SEQ ID NO: 185253 - DNA, 287 bp, Arabidopsis thaliana landsberg
tagtattcacgccactagagcttcctcaatcggttcttcgactagggtgcttgacaaaattcgagtctctagtctcggtactgaagcaaacgagaatgctattaattctgcaagtgcagctcctgtggagagaagccggagttctaaattgagtggtgatcagagagggacaaagaaatatgtagctcggaagttcagttttcgaagaggaagcattgatcttgagcttgagaatttgtttgtgaacaatggggaaattgatgttaactattccgctattaaacccg

SEQ ID NO: 185254 - DNA, 2478 bp, Arabidopsis thaliana landsberg
atggaattggtgagtttctcttggttaatgaaagtctaatacttttcgtgtgagttattgaaaacctcgggttgggtaagtatgaaagttttgtgtttttttgcagacatgtctgagcaaaggagatggctttcactatccgccttgtcatatgctgaatctatgtggtttcaggattttaattgactgccctttggacctttcggcaatcaaaatcttctctcctgttccatctggtgttggttctgaagcttctgaatatctatctgatgagtcgttggatgctcagaatccaattcaaaagaagcaaaaactggagagacagctaacttgtgctgatttggtgtgtgaagaaccgtggtacaaaactgtgaaagccttgcatttgtgggaggcttctttcattgatattgttctcatctctaaccctatgggattgctcggattgccattccttactcaaaaccctggattttttgccaaggtatacgtgttcaggacctaaagttttgagttttctgaatgattttttttttcttggggtgtgtattgtgctgagttgttattgttgctacgatgtagatatctatgactgaagtaacagcgaagattggacagctcatgttggattatattgtctcgatgcacaaggaattcagatgctgtcatggacctgacaactccagttttcctgggtggataaagaatttagatagtgagcaagtaccagccttgcttaaaaaagttgtcttcggcgagagtggtgatgatctgggcagttggatgcgtctgtacaggtaactattattggcttctcaaacaatatgttgctagatcttcaagtactgttgatagcttctttaagttttgtgcaatctttcccacagtttagatgatatagagagttgcatgaagaaggttcaaggcgtaaagtttgcagaagaagtttgttacaatgggaccttaatcattaaggctctaagttcaggtctagatattggggcttgtaattggttgatcaacggacctaatggaagtctaagttatgtgtcagactccatcttcgtttcacatcatgcaaaaagttttgatttccatggtctcaaagaaaccgatgttttgatttactcagatttctcatccctccaatctgcagaagtgactgaggatggttgtatttctcctgactcagataataattatatatcaacaatcaggtactatcatataagacccctctttacatttataagaggatgtttgtttagatcttaaagtgggggatctttctttactgtttaacatttttagcagtgacaacaaggattcattactaaacactgaagacagcttagaagagatggagaaactagcgtttgtttgttcatgtgctgcagaatctgctgatgctggtggctcaaccttgataacgattactagaattgggatagttctgcagctcctagagctattgtcaaattctcttgaatcctcgtctctaaaggtttgatgtctctttcttctttttctttagttttactttcttgaggatatgaagcacagaaaaaagtttattttagttgaaatgattcttagctgtgtgagtctaagtaactctagtttggctctggttaggttccaatggttgtaatatcttctgtggcagaagagctattggcatacacaaacaccatacccgaatggctgtgcgaacaacgacaggagaaggtatacttctgccaattgtttggttatcaatgacaatattattagaaaaatgaatcaaataggataagttttattttatggtattgaaatgtgaattaaaagtatgtatattgattgatgttgcagttaatttcaggagaaccatcgtttggccatcttaaattcatcaaaaacaagaagatccatttgtttcctgccattcattcacccaacttaatgtaagaagaggttataagttttatctcttttatcattagtgatggattattttgcgtaaatgcatagtttgcaaacacatgtcatgaaaatatcatctctgttcaccttaaatcattgcttggttcagagacatcagtaatatacctcacatggaatctgcgaacctgaatattgggatgatgtgattctatatcaagaagtatgttacagcatgcactgattttttaagttatgcgaacagaacgagttggcaggatccatgcatcgtatgtgcttctcgctggagtttgcgacttggcccttatgtccaacttcttcagcgttggcgtggagatccaaaatcattgcttgttcttgaggtttttcaatctctttctctcttccccatctctatcagatgatccagtttgaattcaatatatctgatgataaatatgtgttgcaggatgggattagttcaggtttaggacttctcccttttagaccgataacgatgaaaattctccaatgttcatttctttctggaataag

SEQ ID NO: 185255 - DNA, 278 bp, Arabidopsis thaliana landsberg
tgttttgtattgttgccaatccaactacaattaaagaaaataatggagagagagccacactttacaccaaaaaccaatcaattgaacggtccaaatcctatttgttatccattcgtcacaataatagagttgataacgacaaaaccgaaatcattaacaaagaaaacaataacgttaaacgcggcccagaccgtgcatcgcttccaaatatcatctggaagacattgctgtcaatcccgatgctgctgctgcttcctattcgcgtccctccccataac

SEQ ID NO: 185256 - DNA, 850 bp, Arabidopsis thaliana landsberg
atgaaagcaaaagcaagagaaatccaagttatactgagagggatcgttaacaaaaggttaagggccagagaagctggtgaagcaccaaacgacgatttactgggaatacttcttgaatcgaatttggggcaaacgaaaggaaacggaatgagtaccgaggatctgatggaggagtgcaagttgttctatttcgtcgggcaagagacaacatcagtacttctggtttggacaatggttctgttaagtcaacaccaagattggcaggctcgtgcacgagaagaagtgaagcaagtgtttggcgataaagaacctgatgcagaaggactcaaccagctcaaagttgtaagtaaaagcaaatcataaacctcttggtgacttttgttgtgttttgatgatttttgatgaatgatttgatcccacgcagatgacgatgatattatatgaggtccttaggctatatcctccaatacctcagctgagcagagccattcacaaagagatggagcttggagatctgacactaccaggcggcgttctgatcaatctacctatccttctagtccaacgcgacacggagctgtggggaaacgatgcaggagagttcaagccagagagattcaaagacggtctctcaaaggcaacaaagaaccaagcctccttctttccttttgcgtggggaccgaggatctgcattggccagaattttgcattgcttgaggcaaagatggcaatggcattgatactccagagattctcctttgagctttctccttcctatgttcacgcaccttacacagtcttcaccattcacccacagttcggtgctcctcttatcatgcacaagctctaa

SEQ ID NO: 185257 - DNA, 280 bp, Arabidopsis thaliana landsberg
gcacccattgagatccctgcttcttctgataaattctggtttttgacgaaagatcgtgcattttcacttccttctccgtttgataacaagggaaactacgttattaggtacgtgtagagagatcaatttactactctttatgtgaatggtttagtttcttttgagatgtttagtatttggtggtgcttgtatatacagtttgagccaactggtacgttggctaggaggaaaagctgaggagcttggaacagagatatatcctggcttttcagccagtgag

SEQ ID NO: 185258 - DNA, 64 bp, Arabidopsis thaliana landsberg
atgaggtcaaaattccatcaggccataagttcgaagccgaatatcaaccaggtcatcgaaaaag

SEQ ID NO: 185259 - DNA, 127 bp, Arabidopsis thaliana landsberg
tctctttcgatcaaaaattataataaaaattaaaggtagtggacccaaaacccaagaaccatacccccctgaacttttaccaaaacatataaacccttgtgtcgcaaaaacaccctaccccctgggg

SEQ ID NO: 185260 - DNA, 303 bp, Arabidopsis thaliana landsberg
actgtagaggaattagaaggtcgcagggcccgtgatacagcaactgaggtatacatgtcgtctttggagcgttcagagactcctgatgaagtaagtttaaattcgtgtagcattcaaaaatcacttagatacattaataaaatgaattattcacatgatcatctgcagtcgatgctgttagaagcacacaataaggcagttgtcgaagctctgaccgcgttttgtgaatcttccattggaaacgtcgaagtaaaacagaaatacaaaagagacctttgcagtttctctgcaaaggcgttggag

SEQ ID NO: 185261 - DNA, 1156 bp, Arabidopsis thaliana landsberg
atggtactcccaaaccttagccgagttgtgaagctggtaagataaacattaaagatgcattttactgatatatgtgacttttttttttaaatcgtaaagcacttgtctttgcctgagttgcggacattttcttcttatcccttggtcgtcccttgatgaaaaccgtcaaatgaggacttgcaagttattccacatcttgaacacccgtttttgcaacaagttaattgcgcagtaaattagtcacgtttttacatactttttgcaacatgtgcaggattgtaaatatggatttgaactttccattctccttgatatgactcttgcttggtttctcgatctgtgttttaaaatggcattccttgcgatgtcatgctcttcttgatactattaacttaataaaaaagtttcttgttgcctttgtatatttcagcctcttcccttgaagggcctaactgagggattcacgggaaggggaaaatcagaggagaatgagatatacaagcttttcactaatgttatgcgcctacatcctccgaaggtatgcctaatatctttgagaagctttcatcaaattaacaatgaacttattcctgtatgactttaaacaatgtctgaggagccgtagatgtattgttatacctaagtgagatacatagactagtctgattatgtatgtcgcttggacaatatctcttctcaaattctctttaagaggtacacatccatctgtggtccatgtatgcttttgcaaagcttctatgtcacgtgctatcctacttagcagaggagaagctacttatattagttgtttcttcgagtatacatgctaaaggtaggaggcatatacccatattgccaaaacagtactgattccttcctgtaaaatattgatgtaggaggaggataccctcagattattcaagaaacaactaggagaagataggagaattgtgatatcgcggagcaatataaatgagttgctaaaggtatgtagatctaaattatatgtcgaagagaaaaatttagttgaacgtgtaatgttttcactaatcgttgcatccttaatgtactctttcccaggcacttgaagaacatgagttattatgcacagatttatatcaagtgaacaccgatggggttatattgacaaagcaaa

SEQ ID NO: 185262 - DNA, 409 bp, Arabidopsis thaliana landsberg
atggaaggcgcgcaggaactgcccgaggaagtgtttcacaagctggtgcgcctgggcctgccgcagcacgtggtcgggatgggtgacgtgatcaccagccagctgtacgcgaccggcgtcggcctgctgctgcatggcgccagcgtgggcggcatgcgcggcgccggcgtgatgagttcggtgagcggcggctgggtgggcaaggcccgcagctggtggagtcgcaatttctagttgggatggcatggctggcgcccgcttgggccggccatgcatggaacaggtcgcgcaggaggcgcatcggcggcacgaaacggtcgccaacgccgtccgggaggttccgggcggaaagcggcacaaaccaataacagcaatagattggaggacgggaaatgtacgagctggttga

SEQ ID NO: 185263 - DNA, 387 bp, Arabidopsis thaliana landsberg
atggttcaactagatctgcagagctttattctccgggctcgagtgcttaaactttaccgacaagcattgaagatagctcacagagctcctgttcatgttagaggttcgtgtctttcatgtctcttatttgtctatctatgagattcgtcacatagacaagaaatttgcgttcaccgtagatccatctaggggtttagtagatttcggaggataaactttgtttgattcatgtgttgatgttttgtaggggaactgaaacagactgttaggcaagagatggaaaagaacagagactgcaatgacaaacaaaagattcggtatctgattagtgaaggtttagagagaattaaaggacttgatgaaatgttggatatgcagggccattag

SEQ ID NO: 185264 - DNA, 50 bp, Arabidopsis thaliana landsberg
accaaattcgacccttcaatgaagaagagaaaccaaaggtgccatcatga

SEQ ID NO: 185265 - DNA, 641 bp, Arabidopsis thaliana landsberg
atgaggaacccagaaactttcaaatgtaagtcttttaatatttaatcctgctatcattcttttattagtcctcatttttacatatttctaaagactaaaggttacatgactagcttttgaatgatgtaattcgtttataggttgatccaatggttatctaaatttaaaatacagtttggtatttattgtctccgcttggaattttgtagggatgcttaaaaatcctcagtaccgtcaacaactacaggacatgttgtaagagctccattttacgaacaatttagttgtttccattgcttttaagaatgtctaaactatgtaattaagaaatactcttgtttgtttcttttcatgaatttaggaataatatgagtgggagtggtgaatgggacaagcgaatgacagatacattgaagaattttgacctgaatagtcctgaagtgaagcaacaattcagtaagacaaatctcagtttgtaccaagttaatagtacgttaaataggtctgatactcaatgattgaatctgtatttgtcagatcaaataggactaactccagaagaagtcatatctaagatcatggagaaccctgatgttgccatggcattccagaatcctagagtccaagcagcgttaatggaa

SEQ ID NO: 185266 - DNA, 165 bp, Arabidopsis thaliana landsberg
atggtcgtatacagtgtgcgctacggcaaggagacgattatattgattaaaaaaacttctgcatacagtattgcgaagttaacgtcgacgtttgatatgtctttgtggatagcgattacatgtttaagtcaattgagtttaagtcccatagacgcgtttatgcca

SEQ ID NO: 185267 - DNA, 309 bp, Arabidopsis thaliana landsberg
atagtagctccaatcgttcggccattgacaaatattatcacgaccacacaacaattttgacgacaactgatacaaaggtgaatgtattaggactgaggcgagagccgtcaaggcgtcgggttcgggtgactttgagagagccgccagccagctccgccggccgcttttcttcgccctccacgatcgggttcatcccaatcggaggacaccatggcacaccccaagccgaccgtttcatcgacgcgttcaacacgcaccggccaggccatgcggtggatcagaccgagggggcatcatctgagcaagcag

SEQ ID NO: 185268 - DNA, 32 bp, Arabidopsis thaliana landsberg
atagcgttggacgacttcatatagtcgtttag

SEQ ID NO: 185269 - DNA, 88 bp, Arabidopsis thaliana landsberg
atggtctaccaacttattgggtatagaactagtttcagtggagagtgtccgagtcaaaatgagaatcccaaaagaagaatgctacaaa

SEQ ID NO: 185270 - DNA, 476 bp, Arabidopsis thaliana landsberg
atggctttcacggtgacaacaatgtgttggagcatcatagaatacggtggccagctggaatccaacggcgaacttggccatgccattgacgccgttaagtggggaactgattatttcattaaagcccaccctgaacctaacgttctctatggagaggtaacaataataacactctaatcactaatcactttctttattaattagactaactatttacataatttcaatttggttatggtaattattttgtaactgtgaaggtaggggatggtaagtcggaccattattgttggcaaaggccggaggaaatgactactgatcgtagggcttacaaaattgaccggaacaatcccggttcggatctcgccggagaaaccgctgccgcaatggctgccgcatccatcgttttccatcgctctgatccatcatactctgctgagctactccgtcacgcacatcaggttcttaaaccctaa

SEQ ID NO: 185271 - DNA, 1118 bp, Arabidopsis thaliana landsberg
gtctcagagttgtgccgtcgtatcgacgccgtggcattggatcgattctggtgagaaaacttgaggaatggttcgagtctcacaatgctgactatgcttacatggccactgaaaaggacaatgaggcctctcacggtctcttcatcgggagacttggctacgtcgtctttagaaaccccgcaatcctggtcaatcccgtcaaccccggccgtggtttaaaattgccttctgacatcggaataaggaagctaaaggtgattttattacacattgcattagtattaatctctcattgcgtaatatatattttaaaaatcacccataccacaataagaaagttaaaatggagttggtaaaatttggaacgtttcaattcggttaaaatttggtaatgtattatattttgaatctcttttaaaatttggtaatgtaggaaaactacaaacatttttctattgcataaaattaacacactaacactaaccaaaaaaaataaatgacaggtgaaagaagccgagtcattgtaccggagaaatgtggcagctacgacagaatttttcccggacgacattaacaaaatcttgcggaacaagttaagtatcgggacatgggtggcttactacaataatgtcgacaacaccagaagctgggcaatgcttagtgtttgggatagtagcaaagtcttcaaacttaggatcgagagagctcctttgagctatttgcttctcactaaagtttccaaattatttggtaaattcttgtcattattgggattaacagttttgcctgatttgttttctccgtttgggttctatttcctttatggggttcactcggaaggtccacattgtgggaaactagttagggctttgtgtgagcacgttcataacatggctgcgttaaatgacggttgcgcgtgtaaagtcgtggtggtggaggtcgacaaaggaagtaacggcgatgattctttgcaaagttgtattccgcattggaaaatgctttcgtgtgacgatgatatgtggtgtatcaagccgttgaaatgtgagaaaaataagtttgatttgagtgagagatcgaaatcgccgtcttcgctctttgtggatccaagagaggtgtag

SEQ ID NO: 185272 - DNA, 424 bp, Arabidopsis thaliana landsberg
atgaaatttgtgaaaaatgtaactgattgttatgtaaaggtcggtaaccatggggatctagggtctagagaaaacaacggactcgggactaagtggatacaaatcgtaagcagattcacaggacgaagtaatcgacacgagataatcggaaggtaaagacgatgaccctatctccgccgttttcttaaacctcaattcatcaccgtacgctccagggtctgatatgatatcttctatctcagtctctccttcaagcatcttcacaacttctgacattgttggtcgtaatgttggagacttgctggagcataaaagagaaacctttatcattctctctgcctccatcacatcgaacactccttcaagcttcggatccagaatctcagcaaagctccttcttttgaagacaaatgcctggatttga

SEQ ID NO: 185273 - DNA, 199 bp, Arabidopsis thaliana landsberg
accaacatacacccccggagaaccagcaaacacaccagcaacgaaaaagggcagggaaaagaaacgcaccaaagcccgggcaccagcaacggacaagcgacccacaacggacaaaacaaccaaccccaggaaagcaacaaagacccgaagcgccccgaaacggcggaaagaccgaacaacccgccgcgcagacacataa

SEQ ID NO: 185274 - DNA, 78 bp, Arabidopsis thaliana landsberg
atttgtgtaaacaaagcgttagaagaaaagcaaaaagctgaacaaggtgcagacctgataagtaccttgaaggattaa

SEQ ID NO: 185275 - DNA, 206 bp, Arabidopsis thaliana landsberg
gcgtaaccgtaacggattcgctgcgcacagaaaaaacactgccccagcttactcccatcaaatccttcccctccaccatattcctcgataaacagggccgcgtagccaaactccacgccggcttcgaaggccccggcaccggcctccactacgaagccctcaaaaaagaatttgcagaaaccgtagacagattactaaagaaataa

SEQ ID NO: 185276 - DNA, 145 bp, Arabidopsis thaliana landsberg
gattgacgaaattaatttgctaaaagaaattgttgataaggctcgtaacttgaatgcctacttgatgcaaattctggatgattcagactgttatcatggagaagatcttactgtcatattcaaatctcttttagttgctctcaag

SEQ ID NO: 185277 - DNA, 583 bp, Arabidopsis thaliana landsberg
atgccggagcttcgccgtggagtccgccgtggccgtgttactgatgctgtagctcccaatcagcttccgcaaacacctacagaaaagaaaccgaagaagagtaccgttaaagctccaaaaccggttgccggcggagttacaggagttgcagagaggccgaggactagattagcggcgaggaaattaaaggaggaagataaagagatacctcaggagattccggttgttgtgccgtctaaggatagcgatatcgataaaaacaagggtaaagaggtagtcgttgaagaagagaagaaagatatggctattggtaatgatagtggtggctctaacaaggcggctgctcaggaagaagaaggaaatactgctcctttccctgagagggtataattgatttgcatagtttttgtgttgtttggggttattgaacttttcattgtaggcttgcttatcatctttctatggtaatgactaacgattccgtatcaggttcaagttggaggatcaccactatataaagttgagagaaagctggggaagggtggttttggacaagtatttgtcggacgtcgtattagtggcg

SEQ ID NO: 185278 - DNA, 911 bp, Arabidopsis thaliana landsberg
atgaagaaggggaacttggaagcgaacacaaagacagtaccgttctacaaattgtttttcttctcagattctaccgatgtgttgttgatgatcgttggttcgatcggagctatcgcaaacggtgtttgttctccgttaatgacattattgtttggtgaactcattgatgcaatgggtccaaaccagaacaatgaagagattgttgagagagtttccaaggtaagaaaatgtgttactaattagaacctaaaaaacaaaacaatcttttgagttgctatttgatgttttactttattatgtttaggtttgtttgagtttagtctaccttggacttggagccctaggagctgcctttcttcgtaagatacatttttttagttctttttttttatcaaatggagaaaaacaatttttcgtttttttggttatagaggtggcttgttggatgattactggggaaagacaagctgcaaggataaggagtttgtatctgaaaacgattctaagacaagacattggattctttgatgtcgaaatgaccacaggagaagttgttggtcgaatgtctggtgatacggttcttatacttgatgctatgggtgagaaggtaaacaaacgaaaactgccacacaaaaaaaaaggtttttataatagattgatgattataaagttttgaaaatttctcgcaggttgggaagtttatacagttgatttcaacatttgtgggtggatttgttatagcgtttttgagaggatggttacttacacttgttatgttgacctcaattcctcttctagctatgtctggtgcagctatagcgattatagttacaagagcttcttctcaagaacaagctgcttatgcaaaagcatcaaatgttgttgaacaaactttggggtccattcgaacc

SEQ ID NO: 185279 - DNA, 224 bp, Arabidopsis thaliana landsberg
ctggaaataagcctttgagcgtgaatcctttttacgaatctttgcctcgagtgtttttcacgagtggttctatgaagagtaaccgttttgacgaggtaaaaggaagagcaatgagattagctccagccttagtggattgtgttggaaaccaggatatcctcaagtttgtcggtttgccatctggattttccaatagtcggactgagtcgaacctgcagcattaa

SEQ ID NO: 185280 - DNA, 791 bp, Arabidopsis thaliana landsberg
atggagacgaatcctagctttactcagttgaatagagggagggatgtttcacagaaggggatggttggtgagagtcctaggcgtcaaagacatcttaggaggatttcccctactggttcatcaagttcacacttgggagcatctaaagaactaagacctgatgtttttgttgattccccgaggtcccaaagctacagctctaagaaaatggaagatgtctcgtatacagagaataataatgctaaagatgacttgtcggaaataggagatgacatgagtgatagagtttataccattgattctgttcatcacagcagtgtggctcatagtggcggtgtagcggagcagaagattgaggatggtgcttctgatggcaatgttgttttcccgagagaacacacggatcttggtgatcctgatataacgaaactctacatgaggcttcaagcactggaggctgacagggaatcaatgaaacatgcgcttctctctatgaggactgaaaaggctcaaatggtactgttgaaagaaattgctcaacacttgtcaaaggaagttgtccctcaacggagattgcctctacgtaaagcatctattgctgggccattgacttttacgccggtctttaaggtgattgtcatgtttctgtatgatcacaaagcaacttcgtctaaagctgtctcttgttttctactgttctcactctaacttgtttctgtaattttgattcttattcctctgcagtggatcacatcttttgtttcctggaaaagaaaggctcgtcgaagcaa

SEQ ID NO: 185281 - DNA, 108 bp, Arabidopsis thaliana landsberg
atgatgatcaatgaagatgaagaagcaagagagagaaaaatggcgacttttgacttcaacacgcaacagcaagtagtgggtattgttttaatgcaagcaaaattctag

SEQ ID NO: 185282 - DNA, 72 bp, Arabidopsis thaliana landsberg
cccgtgctcagcgtagctttccccgcgcagccggagagccgccgccgtcgacccaagccctcatcgttgtaa

SEQ ID NO: 185283 - DNA, 1520 bp, Arabidopsis thaliana landsberg
atgagagagagtgtggtgatgtgtgcgaaagaagagactcgatttagggccacgaattggcgcgaattcgtagggaagaaacaccgaactcggcgaagaagaagaacattatgccactctctgaatttttcattcactattctctcttcccgttttttccgttttctacacctctttcgatcgaatctcagttttttggtgactcgatttcgtttaattttgttctgctttaccctaattctcgaggctctgtggacttatgcagttgtttcgtttcgtttttgggtaatttgagtggtgttgaattgtgattttggggtttctcgatgtgtttatttaggaatttacataatcttatagcttccttgtgtaacaagtcagtttctgtgaaatctacccatggatagggtttcattaaaatgagcattgcatttgaagcttccaaatggtatgtcattcattcattgatttaaatatgataatgcaacattgagattcgaaccggagatttttcaatttctcgattagtagcatgtaggcttgaaatctaagagtggaagaacaatgagatgagaaattcagtgactctgttcttagattagtatattactcggtattcacattgagtatctaattactaaatgtcgtagatcgcctatcaaaacgctagttctttgttcataaaattgcagggaactccggttaacatcattgtaggctctcatgtttggattgaagattctgatgtggcttggattgatggtctggttgaaaagatcaatggacaagatgttgaggttcaagccacaaacggaaaaaaggcgagttaaaaacatatttgagtttccatataattgaagcctggaatacactgaagctgatttgctaattttttgtttctgtgtagatcactgcaaagttgtcaaagatatacccaaaagatatggaagcacctgcaggtggagttgatgacatgacaaagctatcttatttgcatgagcctggtgttcttcagaacttaaagatcagatatgaacttaatgaaatttatgttagtacctaaattttttctttactttttggatcttaagactctgcctttcttgacagtttcttgcattgtcttgacagacgtacactggaaatatccttatcgctattaatccatttcaacgactgccgcatatttatgatgcccatatgatgcaacagtacaagggagcaccatttggagaattaagtcctcatgtttttgcagttgctgatgttgcgtacaggtgctcttatttgtcagcttttaaccttattatatacttgtggtttgtgttgtaagctgagatgcgatatttacgttcagggcaatgatcaatgagggcaaaagcaattctattcttgtaagtggtgagagtggagcaggtaaaactgagaccacgaagatgcttatgagataccttgcatatcttggaggtcgtgctgttacagaaggccggacagttgaacaacaagttcttgaagtatga

SEQ ID NO: 185284 - DNA, 515 bp, Arabidopsis thaliana landsberg
gagaggagtttacattcctaagttcagacagtttagacccagctgacattggtggtagaaataatccggcattgactcctgactttttgaatagtgttaaagtttcaaggttgcctaaccataagcttcgtctaaagattggttgtcctgtgatgttgttcagaaatattgatcctataggtggtctaatgaatggcacaaggttacgaatcacgcaaatgggtccattcattttgcaagcaatgattctaaccggtgacagagctggtcatttagtattgattccaagattgaagctagcaccatcagacacaaagttgccatttagaatgcgaagaacacaactacctttagctgtttgctttgcaatgactatcaacaaaagccaaggtcaatctttgaaaagagtaggaatttttctacttaggccttgcttttcacacggccaactttatgttgccatatccagagttacatcaaagacaagattaaagattcgattgtggatgatgaag

SEQ ID NO: 185285 - DNA, 435 bp, Arabidopsis thaliana landsberg
gacgcggtacgacgcatcggcttgcgcgtggttctcgtcctcggcggctacatcctgctcgccgtgcttgcggttgcactgaccaacagctggatcaaccggctggccgatctcaacctgcatatcgtgcaggccaaggatgctctggtaacgctggaacagctgcgtaccggcctgatgcaggccgagagcatacagcgcggttttctgatcacttcgcggccgggctatatcgcgccttacgacgacgcggtcaaacaggtggatgccagcctggacaagctggaagcgcaactgctaccggccaacggcgaagagcatgcccgtttcgatgagttgctgaaacgcatcaccgccgccatcgagggcaaggtcaccgaaatgcagatgctggtgtcgctggtgcgcgacggcaataccgaaggcgcggtcaag

SEQ ID NO: 185286 - DNA, 155 bp, Arabidopsis thaliana landsberg
acatcttgatgcagcatcggttagaagctggtgaagaagaaactcttttcgagatcttcgaggaacacgaaaaccccaaagcagttcccgatcctgtaagcgtcgccgacatctttgatctgaaactcgctgtctctggcggtcggagttggtaa

SEQ ID NO: 185287 - DNA, 96 bp, Arabidopsis thaliana landsberg
cggccaacggtgataaaactggagatttctcagattctacagatttagcggcgtcgatcatcggtgatggtgttggttattcaaaatctgggtttt

SEQ ID NO: 185288 - DNA, 190 bp, Arabidopsis thaliana landsberg
atcgttgttgttgttcacggttttggtctttttgctacgtgtcctcatgatcaatcgctatagtttcgaaaccctaaatctagaatctaccgcgcgtgtcctcggaaatgggcaaatcaccaaaagaagatcaaagaagagaaatgatcatcttaggacaaatggatctgatgatgataaacgactgtaa

SEQ ID NO: 185289 - DNA, 450 bp, Arabidopsis thaliana landsberg
atggggattcaaggcaccatcgaacctcagagaagcagtcaaggaagaaataacctgagagacgagacggttgaggttggtgtaggtaggtctctcaatgttaagggagcgtctacagatgtcatagatagcttcattgtcgaggaggatggagacatcagtgtgttccaagagagagtgagtggagaggacactgttgtaaggctcaaccacagaggtagacacctgtggagatgggtaaacagtgaaacccaacttggactttttcccatagtcaacagaaagtctctcaaggagaagagatccaagaccagatccagtcccaccaccaacagcgttgaaaacaaggaatccttgaagaccagtacagttatcagcgagctttctgatccggtccaagcagagatcaacaatctctttcccaatggtgtaatgaccacgggcgacatg

SEQ ID NO: 185290 - DNA, 114 bp, Arabidopsis thaliana landsberg
gttctactaaagaagggctttcgttctactgcggacctactgaggttctaccgggattaccgggagcggacttcggaggatatttgccccgaaggatcccggaataagttctga

SEQ ID NO: 185291 - DNA, 92 bp, Arabidopsis thaliana landsberg
ttggttcttgattccaacgacctgatgaagatccctattcttaatgactatatcacggaagttactcgcgaccccaaccaatttaaattgag

SEQ ID NO: 185292 - DNA, 90 bp, Arabidopsis thaliana landsberg
atgcccgataagatacccgctttgtacagcctcatgaaccatgcagatatccggggtggaacatggtaccctcagaagggaatgtatcag

SEQ ID NO: 185293 - DNA, 391 bp, Arabidopsis thaliana landsberg
atgccggattctagaagacgtcaggctcgcttgctcgccgagcgctgcacaggtacccaatgtgggcgcgggggcggggcgcacagtgcgtgtggttcttgccccgtgttcaagaagccccgccagacgcggctgtgcgtggatttcccgggtcgatcttcggcgcgctcgccgctggtttcgccccggcagggggctcctcgcgaatccaggtctgcgtcccctcgagcagctaaaacccgattaaaccgcgcaggtccagcttgtcgccatggtcgcccatcgacagtttcgagtagtagacctggccgttttcgggatcaaggatctgtccacggtccctttggtggccgtccttcttcacggccccacaggatttccatacccatga

SEQ ID NO: 185294 - DNA, 251 bp, Arabidopsis thaliana landsberg
gaaatcatcaaggagaaaccaccagacaaagtgttaagcacttatgcctatccatcgagatcctagctcgagaagtccccactcgacctccgatcaagctagccggtcgagcagtctccactcgatctttgatcgagtctgttggtcaagctatacactttgttaaacagttaagtctaacgttggcttcgtttgtatctcttgatgcgacatccatatcaaagagtttactaaatcatacaagagcataa

SEQ ID NO: 185295 - DNA, 156 bp, Arabidopsis thaliana landsberg
atgaaaggcattcccgttgttgcttctgctggaaacgaaggacctaacgctcaaaccgtcgataatgttgctccatggatcataaccgtcgccgctacatccctagaccgttctttcccgataccgataactcttggaaacaatctaactattctc

SEQ ID NO: 185296 - DNA, 352 bp, Arabidopsis thaliana landsberg
atgggcttctgccaggcccatggcgaccgaatcggaactgaccgctggtcccagcaacctgggcgcggccgtgagtagacagagagatacgaagcaatagcgtccttgatcggtcgactaggctaggtcatgatggtgaacgcgtgctgtcagtgtccctgtcaaggtcaaggaagaatggcactcgatggagaactcaccatctctgaaccggtcacgctattgttctggacgctctgagccgtcatagtgcttctcattagcctggccatcgcgaccactgcgcttcgacatggtcaattggatgcagctgcacacgcctcgcgcaaaccggccacgcttcgtgaaataa

SEQ ID NO: 185297 - DNA, 377 bp, Arabidopsis thaliana landsberg
atgtccgatccggattctccgatgaaccacgatccaattccggatccatcaccgttagctctcctcccgccaccagtatcttcctccgctcaagacgatgcctcaaccgaaccagcttccaacacagatctgaagagcgcctccatccccaccgcgtccaagaactctaggcggttacctccgccgtgctggtctctggaagagacgatcgcgctaattgacgcgtacagagacaaatggtacgctctgaaccgtggaaatctaaaggcgaatcactgggaggaagttgcagaagcggttggtgctaactgccccgacgtgattctgaagaaaaccgcggttcagtgccgtcacaagatggagaagctccggaaaag

SEQ ID NO: 185298 - DNA, 227 bp, Arabidopsis thaliana landsberg
ggaatgcaagctttgcttgatgttatttctgcttctgacggttctatcgctgattctgccaaattgctggggtaacaaatccttcttgaacctgtgtatttgtcttttgcttaactttgacttatcttgttatgtggtttttcagtttgagcactggtggcttatctcgtttgatactctcccatgatggtcttcgtatggctgtcaatagcatgagagcagccaag

SEQ ID NO: 185299 - DNA, 57 bp, Arabidopsis thaliana landsberg
gatttgattgaaatcatcaaaattccttgtaaatttggaaccaataacaccccctaa

SEQ ID NO: 185300 - DNA, 143 bp, Arabidopsis thaliana landsberg
gttttatcctaagactcttaagcaaattttgatcattactctcccaccgtttcttttttttctgattcactcgttgttcatcaaaagacgatcattactaacaaatttggaggatccacaaaaggacgagcaagtacttgaag

SEQ ID NO: 185301 - DNA, 659 bp, Arabidopsis thaliana landsberg
  unsure (1)..(659): unsure at all n locations
atggacaccgaactgaattctcctccgcatnnnnnnnnnnnnnnnnnnnnnnnnnnntttcgaaagccttccaatgacgggactagcagaaaatatcgccgtcgagctttagctgacgatggctcatcttcatctgatggttagtctcatatctcgaaattttcattagcttaattattatatagactgtaacattagcttagttgattggttatagcattttaagtgatgggtcttaagacctgttggttatatagcatctcctcttttagttgtagccatagcttaaattagaactgttggttcttgttttgtaggaagtcctgaacgtaatcagagccctaatccaaagcattctaggaaagattctgaaccagttcatgtgaggaaagaggatagatgggaatctgatcgcagtcgttatggtagaggaggtgttgattcacatagacatgataggtactctagggatgataattacggatataagcgtgatgagtataacagacatgggagggatgcgcgttctactagccgtgattcaagaggtggcagacattctgaccgtagaagagtggagactgaatatagcaggttaagaaatgactcagacagaagttcccgtgataagtatagcaactctggacatagagtcaaaa

SEQ ID NO: 185302 - DNA, 231 bp, Arabidopsis thaliana landsberg
atgcccttgttggccaggtaccctaacgcagaccggaccgtcggtcgggacaggcccaggtgcgcggccagctcggcctcgatctccagccgggctcccgtcgacagcgcgcgggactgaatctctgcctcgaggagctggtcgagctggaagactagtggcaccggactctcacggtcgatggcgatgtcaccgaacgagcgggccgcctacgggcgtgcagcgctcacg

SEQ ID NO: 185303 - DNA, 711 bp, Arabidopsis thaliana landsberg
atcctcattctgaatgtattagcttgtttgaacggccttcttctgagaacaattatggcaataaggtttgttcaccagcaaagcaatgcaatgatttgatgtatggtcgaaggttagttagtgataattcattagatgctccaatccccaatgcagagctggaggggacttgggaacaacttcgcctgaaagacccgcaagataacaatagtttacatggtatcaatgatatagacggtgataggaaatgtgcaaaggagagttctctgggagcaactgggaaacttccactgtggaatagttctgggagttttgcatctcagagttcaggttttagtcattcaagtagcttgaaaagcttgggggctgttgattccagcgatcggaagattgaggttcttcctaaaattgttactgtgactcaatcttcttcaggagacgctactgcctgtgccacaactactcatctttctgaggagatgagttctagaaagaaacaacgtctcgggtggggtgagggacttgcgaaatatgagaaaaagaaagttgatgttaacccaaatgaagatggaacaacattgatggaaaacggtttagaggaactacattcgttaaacaaaaatattgctgataaaagtcccacagcagccattgttccagattatggttcccctacaacaccatcctctgtagcttgcagttcatcaccag

SEQ ID NO: 185304 - DNA, 3587 bp, Arabidopsis thaliana landsberg
attccagttccgtgtgcaacgggaaaagagcctgtgcaagttggtgaagccccaacagaagagttgccatcaatggaggtagatatggacatttgtgacacaccacctcacgagcctatggcgtctgattcatccttggggaagtggttttatcttgattactatggcacagaacatgggcctgcaaggttatccgatctcaaagctcttatggagcaaggcattctgttctccgatcatatgataaagcattcagataataataggtgggtcactattgaaaatgcaacatctcctgcggtcaacatgaattttccatcagtcgtgtcagatgcagtgacacagctcgtaaatcctcctgaagctcctggtaatttattagaagacattgcagatactactgaagcagtttgtattgagcaaggagctggagattccttgcctgaattagtgttcgtacggaccctaccagatggtaaagaaatttttgtagagaatcgtgaagatttccagattgatatgagggtcgaaaatctcttggatggtcgtactatcactcctggcagagaatttgaaacacttggaggtaaaagatgtacatatgtttgctttccggccacaaaattgatgcttttccagcccaaaatgatagaacatatcgagagcattttttttaaacatatttagctgattttatcccgacacttctatgccttaagataagcttattttcatcactttgcagaagctctgaaggttaatgttgagtttgaggagaccagaagatgtgtgacatctgaaggtatgtttcgttggcaccatttgcacttttgtagcatgacatgattttacctatctgtttctattcctttctggtagttttcgccccaacaataccaaattctccccgaagcagaaagcagaaccaaacaaatgtttatatctacttgttatatatgtttatatctatattagatcgtttctagtgtttgaagtcgtgcaaatctgggcatttggcacgaaagtatagggaagtgtttgatgtttgttaaagatgtaataacctacttgccatatgatggtttgtgcatgagcatgaagattcatttagacgacatcaactttgaatacttcatagcgtcttgcatagctgcattttttgcacaactgtatttagaagttctactctgggatttgcaggtatcacctggcgtcactatccagaggcgaaacaatgggatctgatggttgaggagttgttgggatgttccgaccccatgaaaagggcgatcgaagaatttaagtcagacgatgtttatggttccgagagtgatgagataggcagctggttttcaggtcgttggtcttgcaaaggcggggattggataagacaagatgaagcttctcaagatagatattacaaaaagaaaattgttctgaatgatggtttcccgttatgcctgatgcagaaacctggtcatgaggatcctcggtggcatcacaaggatgatttgtattatcctctcagtagctctaggcttgaacttcctctgtgggctttttctgttgtagatgagagaaatcaggcgaggggagtaaaagctagtttgctgtctgtagttaggctgaactctttggttgttaatgaccaagttccaccagttcatgatcctcgagcaaaagttcgtagtaaggagaggtgcccttcaaggcctgctcgtccatcccctgcatctagtgattccaagagggaatcagtagaaagtcattcccaatcaacagcttccactggtcaagattcacagggactttggaaaaccgacacatctgtaaacactcctagggatcgtctgtgtacagtcgatgatttgcaattgcatataggtgattggttctacacggatggggctggacaagaacaaggacctctgtcattttcggagctccagaaattggtggagaaaggtttcattaagagccacagtagtgtcttcaggaaatctgataaaatctgggtccctgttacttctatcacaaaatctcctgaaaccattgccaagcttcgggggaaaaccccagctctgccttcagcttgtcaaggccttgttgtctcagagactcaagatttcaagtgttctgaaatggacacaagtctaaactcgttccatggtgtgcaccctcagtttcttggttatttccgtgggaaacttcatcaattggttatgaaaacattcaagagtcgggatttttctgctgccataaacgatgttgtagactcttggatccatgcaagacagcctaagaaagagagtgaaaagtacatgtaccaatcatcaggtatccataactaccagaatttaaacgtgatcctgtccctcctattaactagtactttcttgttggctcagtttcctttaacttattggtttctgaacttgggtggttgtctccttcttttcttcagtccttctaggttaacctatgttcaatttgtgcatcttaattttttttaacatttttcactcctcggttttgctttggttcataaacatcagaattggattcttgctatacgaaaagagctcgcttgatggctggtgaaagtggagaagattctgaaatggaagatacccaaatgtttcagaaggatgagttgacatttgaggatttatgtggggactttaccttcaatatcgaaggaaatagatctgctggcaccgtggggatttactggggtctgttggatggccatgcattagcaagggtgtttcatatgttgagatatgatgtaaaatcacttgcatttgcttccatgacttgtagacattggaaggccactattaattcatacaaagatatttcaagacaagttgacttatcttctttgggtcccagctgcacagattctaggctcaggagtattatggtgaatactctatgctttccgtttacataatttgaggtatattagtattttcattatttgacatgacattctcttgcagaacacttacaacaaggagaagatagactctataattctggttggttgtacaaacgtgactgccagcatgcttgaggaaattcttcgtttacatccccgtatatcttctgtagacatcacaggctgctcccagtttggagatttgacagtgaactataaaaacgtaagttggctcagatgcctgaatactcgatcaggtgaattacattccaggataaggagtctgaaacagactacagatgttgctaagtctaagggtttagggggcgatacagatgattttggtaaccttaaggattactttgatcgagtagaaaagcgagactcagccaatcagttattccggagaagcttatacaaacgctcaaaattgtacgatgcaaggagatcatctgccatactatccagggatgctcgtatcaggcgatgggcaattaaaaagtcagaacatgggtataagcgagtggaggaattccttgcttcaagtcttcgaggcataatgaagcagaatacttttgacttctttgcattgaaggtgctttctggtacttgtgtctgctatcttttctttatcacctgttaa

SEQ ID NO: 185305 - DNA, 62 bp, Arabidopsis thaliana landsberg
tacgaagaggtgatgaagaaggagccatctatggagaaatagagaaagcagtagtgaagtga

SEQ ID NO: 185306 - DNA, 735 bp, Arabidopsis thaliana landsberg
ttgggtagttcctcgctgcgaaaccagaaagttcctactgaaatcgaagcattagctgacaaaaagatagtcttcatcgctagtggaggttcctcttctgcagcgataacaggtatatttagctatagatatgttcatttgacatgataaataactcaaacaaaaccaaaaggatgggattggtttttgacagatgggggtgaactctggatgtggggaaacgctaaagatttccagctaggagttccaggtctccctgagatccaaactactccggtcgaagtcaatttcttaaccgaagaagatgagtgtcaaccacacaaggttatctcaatttccattggtgcttctcatgctctgtgtttagtctcaagatcaccttaagtaacacttggataggcggtaccgttccttagaaacgcagaacattatggttcagctcaaaggttgtttgggatatacatttgatatggaaacgcagtggtattcaatatggtttaaggtgtgtgattatacaaataaatgaacaagatcttcacatataacaacaaaaaagaaatgaacaagatcgaccgtgagaccgattcttgaaagtcgaacgtaccatcaatttgagcagcaaccaacctttttcaccgcagagacatcgtctttcgatccgacattgatggtctgtcctttgggaagagcagccgggtcgtctcctatatccaacgctttccggctaaccacacg

SEQ ID NO: 185307 - DNA, 378 bp, Arabidopsis thaliana landsberg
atcgattacgtcaccgcgcacgaggaagactgtcatgtcatcgcccaggcgaacactccgatcgatggcgagggcaacttcacctccgaccgcgtgctcgtccgccggaaggtcggcgaggtcgagcagatcccgccggacgaggtcgactacatcgacgtgtccgcgcgccagatggtgtccgtggccaccgccatgatcccgttcctcgagcacgacgacgccaaccgggcgctcatgggctccaacatgcagcggcagtccgtgccgctgctgcgggccgagtccccgctggtcggcaccggcatggagtaccgtgccgccaccgacgccggcgacgtcatcctcgcggagaaggcggagtgtcgtcgaggagtc

SEQ ID NO: 185308 - DNA, 449 bp, Arabidopsis thaliana landsberg
atgacgaaggacgatcttgcagataggcttgcgtataatagcctgaaggtatgagaactgcgtgtttggaaattttataatttgcaaatcattcttttattcttataccaactctttttacatatagggtttaatactaagcaacgcgttgagagcgcaaaagaatgccgaagacgagagctatgatattgctttcaacaacctacgatcagaggttattaagctgagaaacgaagctctggaaaaggataaaattctgcttacattggtggacaagataaaagaggacgaagctacctctaaggctcaagctgaagcccaaaaacgcgaaattaaagatcttcagaaacagctagctagagctaaggaggagcgtattcttgaagagacaaaacgagagcttagtgatcaatgggccaatcatttagaaataaatgttaaagagcttc

SEQ ID NO: 185309 - DNA, 93 bp, Arabidopsis thaliana landsberg
atggattcagttgttgtggtgcagactcggtatgtaatgaagtatagacgctgtgccggcaagttggttcttgaggttactgataacaaagag

SEQ ID NO: 185310 - DNA, 360 bp, Arabidopsis thaliana landsberg
gtgaacaacgtggcgctggccgcgctgttcaagcgcttcaaggatctgaccgaccgtcgcggcaaagtctatgacggcgacctggaagcgctggcgcaagggctcaatccggacgatgccggcccgtggcgcatcacacaattgcacaccaccgcgcacttcggttccggcgcctcgacggcggtcacgctgacccacgaagacggccgcgtggtggccgaggccgccatcggcgacggcccggtcgacgccgtgctgcgcacgttgcaacgcgccaccgcccaagccgtcgagctgaccaactttcgcgtcgatgcgtccagtgaaggcgaaaacaaacaaggccgggtgacgctgaac

SEQ ID NO: 185311 - DNA, 412 bp, Arabidopsis thaliana landsberg
attgtaacggtttctgcaagctatttcttgggcaacggcaataacgcaacgctggagaatgtggccaggaaatatttcctggatggcattcccaattacaaccaggtaacggaaggcagcagccgcaacaacaaccatcgcttcaatatgcggctggagtatgccatcgattcatcgaaccagctgatctttactcccagcctcagtttccaggataaccgctcgctgcgcaatgtgaatacttcattcatcgatcccggtacgctggctactaccagccgaacagtaaataacaacaacagcacacgctcgggcaataacctgaacaacaatattctctggcgtcactccttcccaaagaaaggacgcactttatccatcaacctgaatacatcctataaccagcagaatg

SEQ ID NO: 185312 - DNA, 824 bp, Arabidopsis thaliana landsberg
atgtgcttcccttatatcgctcttgtggtgtgcgtaagagtgatgatgttactgtatttatggattaacgaaactctcgtttttttattgcaggtttgagttgcttttggagtgaagcaagtagaccaaagggcataatgctaggaactagctagaaacagagctatcctggtaggtctgtaagcaatcaacccaagacatacaacagctaaatgaggcatcaagttgatgtcagttagatccgagatcacacaaaagtgagtaaatatgcatgtagagatggaactatctcgattaaggctgccttgaccagtcaccgactcgatatcatcattgcatggctgtcgaacatgttcaactcgatatctgcgttttcaatttattctaattgtttataattttttgttgttaaaatgtgttcaatatacataaacgttcaaaatcttagttacatggtagtgcagattaaagaatatagtgactaacaaagaaaaaacttttttaatccagatttgcctttttctgtttggtaaaattatatatatttaggttttgatcaaagtggatgttgctcgtgtttattccgatatctaaagaaaatagataggttccggcgagaactccaaagagatatcatgcgaagaatttacggggatgaagagtttcatctagatatagggaaaatttctggacttgaaaacccgaatcggatcccgtccaaatttggaggtaccaaaccaaacagaaataggcctaaatgccagaatgggtataagacttcaatatccgaagaaccgttaccaaactcgatatggatattctaa

SEQ ID NO: 185313 - DNA, 2245 bp, Arabidopsis thaliana landsberg
  unsure (1)..(2245): unsure at all n locations
atgaactttacaaaagaaaattgtcaatttcgaaaaatgttgagcacaagctctgatcttcatggccgtcttctccggtgagtgacatctctctctggcctctgtttttttggcctttaagtgcttttttcttgaagaaccctaattttgatttgttttgaggattcagattatcagaaccaatagcagagattcttagacgtacacagtacacaccgcaagagagcagcaaagtatccaccaaagatatactcttgtccttgttaccaaacacttcgtcttctcgtctcgccaatgaagaatcgatcaaaagtctcgcgcttgcttgtgcccttctcgcttcttcacgttcatccactcacgaacttctctcatggattccagaaaacctctctgtcatgggggaatctacattttgggagatttcaagggattgtttcagtgatttttctagcaacagtaatgctgagaagcttgtggaattggtagaggatagtgagaagatcgaaatgttgccgatagttttgccggagttaaaagatggaatcgaaaagagttcacttggtaaaggcagtgatgcagaggatgtttcagctgcnnnnnnnnnnnnnnnnnnnnnnnnngctatacttgctgctcaccagctcaggtggtttgttactcaggtctgaatttctaaatattaagaaattgttctgttctgttgtgaacatatccaactttataattttggaggtgttgatgtctttttgtaggttaaaaaaccgaatttggtgaaattttgtaacttggtggttccttgtgctttgacagcacttgatcattggtctcctgaagtcaaagtaagtctttggagatgtagattttgatggcgtctcttttgttagttgtgtgacttgtaacatcgataacatgttgtgtgacttgtaacatcgataacatgttgtgtgacttgtaacatattgcaaaatttaagcttttatctactcgtatcttaaggtatagtgagattgatgttctatatttgcttgatgacaggggcagggtatgataacctttgttcatcttgctaaaaatgtgagttccggtgatcttggtttgtatggagatgtggttcttgatgcgtgttgccagaatatagcttccgatgatgagatttggatacatgtggtagagttatctgtgcttcttgttactaaaatccacccaaataatcctcgaagcccgtggtaaatctttctttctcttatcaattggcataggttcagaagattgagagataaggagaaaaagttgctttaaagatcgttttcatagcgtcttctttagtttctacatttcttccatttgatgacttttatcattctcaaaacccaagtggggaatttctttgcactgcatccagtttaactccttttaagaagatcatgtcatttgacagattggtttgatcgttccatctttctcagctctattttgctcattttgagttttttttttttgccttaggtatgagaagatcatgaatgagatgctcgggcatttggaacgccaaccaagaaataaggagcgacgtatcacttggctaagatttgttgagccactcttgaactctctagggcttttcttacttgctcattttcgacgtatcttccctcttttctttcagtggatgcattcagacgacgccgaaacagttctgttggtatggtcttgtttcaatcctcacagtttataagaaatgttagatttcccaactcattttggtattctttaagataaacatgaaagtttcattacctgctaataccatataggttcttgagagactggagacagttgtgaggttgacgtggattagacactcacctgtgttcccaaggtttaagcctctaaacacttgagagtagtaacttttagatgcttcaactcaaactctttctctcttatccgttttttaacattaatcatctcatgattttgaaccttcagattggtggatgagcttgtttccttgtacaaagagtcatcgatgcgtaaggatcgcgatgatattagacctcttatcctccgtatcttgatgctactccgccagtatgtttctgtggcttatcaattgcactaccaaagattgttcacattttcgctgttttatttaataagctccccccactttctctccacaggtgcaaaggtctacggtttgagtcagcgtggagtcaataccaggaggatccaaatctga

SEQ ID NO: 185314 - DNA, 616 bp, Arabidopsis thaliana landsberg
atgactttctcaaaacaactcttcctttacctcttcttcctcttccctctcctacacgcttcacacccacaacaatgctcttcctcctcatgcggtcgtgatgatgtccatgtccgtttccctttctggttactctcaaaacagcctgagctctgtggccatgccggatttaatctccaatgcacagctagtcccaagacagctctcaagctttctaattccggaacatttcttgtccgagagatcgactttttaagccagcacattcgtctctatgaccctgaaaattgcttggcaagaaagcttttgaccttcgacatatcaagatctcctttctctgctctctaccctgtcagctacacgttcttgagctgtcctaatgaggttgcaaagccgtccaggtttgactccatcccatgtctaggcaattcaacgacctcgttcttggctacaactagtttggatctcgcgaaatctatgctgccttcttgtcagatcgtcaagacattagatgttccggtttctcggcgagttattgccaagaaatcaagattctcgactgatgtcaacgataaagacctttggctgaaatgggattctccaagttgtagcgatt

SEQ ID NO: 185315 - DNA, 321 bp, Arabidopsis thaliana landsberg
  unsure (1)..(321): unsure at all n locations
gctcgccgtctggttcgcacgactgcgagcctccttgatttccttgccacgggccagcgccacacccatgctgtggcgaacgaattgatcgggcttgccgaacagacgcaggtcagacttcggcaccgcaagcgcggcnnnnnnnnnnnnnnnnnnnnnnnnnctgttttccacgccaccgtatatcacggtgctggcgccgggcgccgtcagggcgacgttgaccggcaaacccagaatggcacgcgcgtgcaggtcgaactggctaaaacgctgactggtcatggacaccatgccgtgattcgtgcggacgcggactga

SEQ ID NO: 185316 - DNA, 126 bp, Arabidopsis thaliana landsberg
atagcatgtagatcaaaatattcaaaaccaataaaaaaacgtcaaaagtataatttagaagaaagaattagatacgaacaaagagctctccgacttggaaccggacggactcagcccaatggttga

SEQ ID NO: 185317 - DNA, 465 bp, Arabidopsis thaliana landsberg
  unsure (1)..(465): unsure at all n locations
atgaaaggtgagaatcatgccgagaaataataaaacaaaacccattaatcaccagagattgaccaaagagactcggatccagataaacaataacgacggcttcgtccttatannnnnnnnnnnnnnnnnntagtggaattcgattgtggcatctggagaaagattccggtcaacgaagatattgatcaggaggaggaggaggagagaaatctgaggaaataggtcttcttcctctccctatttccagattttatattccgacagaggatgatgatgatggagtcgagaagaagcaagaatcaaggaatcacgaatctgacaactaatgaatcccccaaaattgacgaatcaaattcggagaatttccggagaaaaagtcgattaagaagaacaattgactatacgaagaaaaaaccttggcggaaattttccgggaaaatggaaagacaggggagagaagagtaa

SEQ ID NO: 185318 - DNA, 316 bp, Arabidopsis thaliana landsberg
atgactaaactgcgcaagaagatgaagaagaacgccgtttggcagccaagccatgttatgatacagcgtgagttagcactatcaggccgtggatgggaaggatatcgggccgcgaaatcgttggcaaccgagaatggtaccaaggtcatcgattgcgacaacatcgaagtcactcatgccgaggagatgcagcttgagaatataggaaatactcagctcagcaaccgaggcatgaaactgaacgaggccaaaaaactgaaacgtgaagcgatggcgcgagaggaggcggctaatgggggtgaggttccagtgacag

SEQ ID NO: 185319 - DNA, 706 bp, Arabidopsis thaliana landsberg
atggggatgctctgtcaggattttccggaactaggagagctgcaacgagagtatggcgacaaagccgatcctggaccatctagtcacatttttgcagactattccctgaaaaagctattgcatgatcctgatgttcctcgtgggtgtgatcctaactctccagagtacgtaacctatgagtcaggggattctgtttctttctaactgttatatacagttgaatctgatctatttctttcaagcttccagttttcctccaagcttaatgttctgtgttataattaatgtgccaatttgaagttgattgtatgaatgatcattgagtcaaataatcttataggtttgatgtgcaagctggagtgaatcccagaattggatctggtgatagggatgaggcactatctggattcttaggaaatttgacaatggggggattaggtcctaggtggatccgtccatgtccaccaaggtacccagttcatcagagcgaggtaaaaataagaataaccccttattcaactggttcagaaaattatcgaactgacctaaatggttcaacttcttacagttgctttggattgaccctgataacaagcatgagcttgtttgggacgataaaatgtgtgctgatactagcagtggtgcaacagttagagacttgcttgttaagggtttaaaggtgacactttcacctacggagcaagag

SEQ ID NO: 185320 - DNA, 251 bp, Arabidopsis thaliana landsberg
atgaaaagattaatgacaagtatttatattaccgtaaaaagcaatgaaggtctaaagccgccgtggtcggcgggcccgacgccgtccgacagggtggcgctaccgatcgccggcgtgatgcgcatcgaccgcaccaccgcgagcgacctcgtcctcaacgacccacggatgtcgcaccggcacgtccacctcaccgtcgaccacgccggccgggtggcggtcaccgacaacggctcgcggaaaagaacatg

SEQ ID NO: 185321 - DNA, 382 bp, Arabidopsis thaliana landsberg
gttttttttagtccaagtgccgaattccccccttacctatggggtggaattgctacactccgtggtctggatgaaaagatgcgtacaggtgtgacagttcgtcagtttctaggaaacatggcatctctttgtgttgacaaatataacaaacgaaaggtaacaacatctctctactttggcttttcagagtcctagctagtttatatttatgagatatgacccattaattattcttgtctcttttttccagggatttaatgtgaagttggatcatgttttgagggctaatttcaacccagggggcaggacaacgtactacatcacttttgctgcaagagagtctgattctcctgatgcacctctagtggagtatcaagctaag

SEQ ID NO: 185322 - DNA, 89 bp, Arabidopsis thaliana landsberg
tggtcttcgtggccatcagccacccaccgacatacaccgtaatcgctatcgttgtgaccataaagaacgagccacaaccaatgggctaa

SEQ ID NO: 185323 - DNA, 335 bp, Arabidopsis thaliana landsberg
atggactggctgagcgaagaggccgccggccacgaattgtttcccaccgtgtcgcctgtgcaaaccacggcgcgtgccatttccgtgccgaaagatttcgtgcctctggccgaaagcctgatctgtcacagagatccgtcgcgtttcgacctggcctaccggttgctgtggcggctgcaagaagaaaaagacctgctgcatatccgctccgatccggatgtcgccaaggcccacgcctttaaccgctcgatccatcgtgatagccacaagatgcacgccttcgtgcgcttcaagaaggtgccgtcagaaacggagcgccgcgccttcgtggcctg

SEQ ID NO: 185324 - DNA, 272 bp, Arabidopsis thaliana landsberg
cacggacgtgattgttgagatccttgtaatacccagtgtagtggcagtcaagtatggggcaagaacatggggtgaaaacacatacctgctcatgactaaaacggtttccataggaggtactcttcttgcacccgtatttggcatttagacacgagactctagatgcttctataaccttctccatagctctgcaacgaacattacctatcggttttgtacacgacgggcatctgttcctcactttggtgcagcacaaagtacaagccagatga

SEQ ID NO: 185325 - DNA, 511 bp, Arabidopsis thaliana landsberg
atgaaccgatcgggctacaacgaagacaaggagtatgacgaggagttccagtacaacatctacaactgctacaagacagacggcattgtatttgcgtgtatgtacgcccgtcagctcatcttcacagaggctcggttccagctacagcgcctacggggcggccgacccggcgacttgttcggcatccaggatctaagcatcttcgaaaggccgtggcccaacgcgactacgggcgaacttctttcgcgcgcgatccaagacgcagacctgggcggtaatcactacgtggtgcgagagggcaacaggcttcgccgactccggccagactgggtggatatcatcctaacggccccgccggaccaggccgttgactctgacgttgccggttacgtctacatgccaggcggccggggctcttctcctgacaactgggagatttacccgataaacggtagccgtggggtagttgcccactggtctccgatcccggaccccgatgcgctgtacaatg

SEQ ID NO: 185326 - DNA, 102 bp, Arabidopsis thaliana landsberg
tcacaaattgtaattgtcctaaccagtcaaccgcttcgaacagtccttcataaccagaaccaattaggtggcaaaatggacggtagagctaagcgaatttga

SEQ ID NO: 185327 - DNA, 376 bp, Arabidopsis thaliana landsberg
atgcccggccgtggccgctgccatcaatccggccgcaccggcgccgatgatcacgacgtctgcttgtttggttgtcgccgttgtcgtcatcgagggcttgggttgcggaagaagcatgccgtcggcatggcgccttggcttgtccgcgtgatggtaacggcaagccgaagcgtgcgttgcgccaggagccgtttgcgaatctggattgttggggcgacccgtgcgcggctgcgggcaggcaaaccctgcgcaagcaccttgagcgcgatggtttgttgtaaacgggcgccggttgggcgcccgtgggttcggttgcgcgggatggggccaggtgtccagacagcggaccgcttacgccgtttggcgttgcgccatg

SEQ ID NO: 185328 - DNA, 438 bp, Arabidopsis thaliana landsberg
atgaacgtgttcttaccaatctcaatcacattcagcgcgatgagatgtgatggagcaaggatacttagccagttcaatgacatcttcttcaacatcttcctaacatttcttatacttgtcataaaactcgtcgcatgccttgcaccttgcttgtactacaagttacctctcagtgaatccttggctgtttccttcatcttgagctacaaaagttttgctgattttgttctctatgaagctgtattagacgacacggtaacctcctaactcgcaaatagtcgattattggtatcatttgccattaatctaaacatttttttatggtttggttttgcagtacatatcgcaagccacttactcgttcttaatcttatattcgctactaaatgccgggattgtccctactgtcttaaggaggatgtacgatccaagaagaaa

SEQ ID NO: 185329 - DNA, 303 bp, Arabidopsis thaliana landsberg
aggaaagaaaaatgccacgtagaaaaaatatggatcggaagatcagcatatatggaccccgctgttgaccgacatcgacgtggcagtttcaaagttgggaatgccatcataaagtaatgaccaccgttgatacgctctctttctatctattcccaagtcagctctctccctcatctctcttctctcttctctctcagcctctgctttccgttacgggttgcacttttcggccagttcaagattctaattaagttattgcgttttgcattgtttatttcattcgtttcccatatgaaaacgtga

SEQ ID NO: 185330 - DNA, 147 bp, Arabidopsis thaliana landsberg
aaactctagtcaaatatgcaaattctcaattgatatttcgtatatccaataaaagcctcacaatcaagactcttgccaccgtaacatctaatctaagaatatcaactacaaacgatcgaaagcatatcgttggtgatggaattatca

SEQ ID NO: 185331 - DNA, 1325 bp, Arabidopsis thaliana landsberg
atggaggtaagtttgacggcgggagcaatcggtaagataatgaatggagaagtgacgactgaagcagatatgattccggtgttgcaagtgacggatttgaagcagattatggctcaacaagatccaacaagagagaggtttaggatggtgttatctgatgggacatacttgcatcaaggaatgctaggaactgatctcaacaatcttgtcaaagaagggactcttcaacccggttctattgttagacttactcgtttcgtcggtgatgtcatcaagggtcgaaggtaattggttgtgaacatgattttgaagtttggatatatagccaatgatagttgcttcatgttagagactacattaccaaaatttcacataatcttataaagttttgtttttgatgccaggattgttattgttccgcaactggaggtgttaaaaacgatttctgatataatcgggcatcctgttccaggaggaaagcataatgatcaacgtggatcagattctggtattaagtttaatacaactgagcaacatggtagtggtgtccgccaagtaatcaatatcgagccagggagaagtaatgcagctatttcacctcaggttggtggtactggttctagtgttcctgcatcaacaacaccttccactcgggcatacagcaatccgtcttcaggtaatggagtcactaggcaggactatgctcgtgatcctccaacaagttatcctcatcagcctcaaccaccaccaccgatgtatgcaaacaggggaccagtggctaggaatgaagtacctcctaagataattccagttaatgctcttagtccatattcaggtaggtggaccatcaaggccagagtcacgaataaagcagcacttaagcaatacagtaatccccgtggggaagggaaagtgttcaactttgatcttcttgatgctgatggcggagaaatacgtgttacttgttttagcgctgtggctgatcaattctatgacgagattgttgttggtaatctttatcttatctcgaggggaagtttgcggcctgcacaaaagaactttaatcatcttcgaaatgattacgagatcatgctggataatgcatcaactataaaacaatgctatgaagaggatgctgcaattccgcgccatcagttccatttccgtaccattggggatattgagagcatggagaataacagcatcgttgatgtaattggtattgtgtcatctatcagtcctactgtaacaataacgaggaaaaacggaactgcaacaccgaaaagatcacttcagttgaaggatatgtcaggccgaagtgtgag

SEQ ID NO: 185332 - DNA, 91 bp, Arabidopsis thaliana landsberg
atgcgggcgccgcggtcggctgacagcgaactggccggtcgagcggccgaacgcgcacgctggtcgagtgccggaggagcgaagcggggag

SEQ ID NO: 185333 - DNA, 796 bp, Arabidopsis thaliana landsberg
ggctcctttaggctataatgctgaagggaaaacgaaatatgtcattagaccgtaagttccgctaaaaaactttttaccagctaaagctttgcattgtatttcatgtctggacaaccattgctagcctatctgtcgcattttttttcacttttgttctgttagcttatctgtaactttgcatttttagtttacgcattgtgccattgtctgcaacttaaagttgaaggctgatagctgtcattaagaaaataaatagatagcttggaaaagatgcagattttatgcagccatatctctaagaataggttacttgattctaaatttgagctgctgaagttaccacttttgtgctatctgccttctaatttctaaatatcaacccactttttcagtatacaaactattcttgcaaataaatcttccagatcattatttttcttgctttctacgataaagctctttaatacttgtacttatgtacgtgaggcttcttttgaccttatttatcttatatttgtgaattatctcagttacactcctatatcagatccagaggctaagggctattttgatttactgattaaggtatgagtgtcctgttaatatacatgtgcttctctctacttctactgctattttcgagaaacaactagatatattatgattgcatttatttcctcgacttgttttgaatttgttgtgatgtagttcattgctttttgcaggtatatcctgacggaaaaatgagtcagcattttgccagcttaaaaccgggggatgtgttggaagtaaaagg

SEQ ID NO: 185334 - DNA, 228 bp, Arabidopsis thaliana landsberg
atgagttccctttatactcactgtcgatgtcacggacaatctgttcttctccacctcgaatcgagagtcgtttgtagtgtaagccagaagagtgaggagaatcagccatggaaggtaactcagaagttgcttcatctagaagatctccgccacaacgaagagcagattcgaaggacaagttggatgatcaaagatgatatgatagaatttgaaatatattctcggaag

SEQ ID NO: 185335 - DNA, 571 bp, Arabidopsis thaliana landsberg
accctggagatcacgccacctgcgccgtttgcagaacaagtgagtaatatatcagttcattggttttgaaatgctccaaagtccaaatcaagacctgattttaataaacttttggattttgtaactttgattggacaggattttctcaatatgttctttgagaaagtgtacaaacccatccctttggtatacaatctggttttggctatgctctggcgtcacccggagaacgtggagctggagaaagtcaaagttgttcactactgtgcagctgtaagtagttctgtctttgctttcaaacccgagccccttaagcttgttgctgaaatttgattatttttcatgttgatagggatccaagccatggaggtacacaggagaagaagctaacatggacagagaagacatcaagatgttagttgataaatggtgggatgtctataatgacgaatctctcgatttcaaatcgaaaatccctgcagatgcggaagaaaccgttacaaaatcaagcatcttagcttccgttcttgaaccagaaatgacctactttcctgctccttctgctgcttga

SEQ ID NO: 185336 - DNA, 313 bp, Arabidopsis thaliana landsberg
  unsure (1)..(313): unsure at all n locations
ttgggatcagatgctgtcaaccaaaagaacatgatacttttgaggacgattcactgacttttcatgcatcgtgttatgtagcaaaagtaaggaaatgataactaacttgcttgatttggcaacaatatgctttctatggttacacattttagtctacaattaattttnnnnnnnnnnnnnnnnnnnnnnnnnnctttatttgttctgtttctagatcactttgaaagcattggaagggatgtttgaagctgcaagagctatcaagagttggtttggtaattgtgcaagagctatcaagagtctcgtttggtga

SEQ ID NO: 185337 - DNA, 937 bp, Arabidopsis thaliana landsberg
atgaagcaaacagttatcgactctgtggttcagtcttctaaagttggtgttttctcaatgtttagtatggattacaaggcgccaaggaaatactcacacggaaggaattttggagttgcgagacagcaagattttgcagcagatatagttacgagaagaccttatgccccgtatgacaatggtatgaagaaaggtcctaataagttgtcaaggaatctggtttggacgtcaaaagagtacaaatcaccagagggaaacaggccaaggcagaatgcagccaatgggtcagcgaaaccacaagttataggcacaggacatcgtgtatcaaaccagccgaggaagaatgctgtgtatgggccaaggagctcttctctttcagacaccagaggttgtgggccgagactcaatggcagtcccaaaaagagtgtgtgtaatttttggaaagatggaaactgcaaaaagggcgagaaatgccagttcttacactcttggtcttgttttcctggactggccatggtagctgctcttgaaggacacaagaatgatattaagggaatcgcccttcctcagggttcagataaactcttttcagtcagtggtgatggtacattgctaatttgggactgcaattctggtcagtgtgttcgatccatcaacctccaggcagaagcagggtctctaattagtgaaggaccatgggttttccttggcttgccaaacgctgtaaaggttagtttaaggcgtctcttaacacaaatattcttctgttatcttaattctgttcgttaaactcagttgattctggtgttaaagtttttgtttatcaattttgcaggcttttaacgttcaaaacagtaaagatgtgcatcttaaaggggccgttgctcaggtgcatgcaatgactgctgcaaacggaaaactttttgctggaacaagt

SEQ ID NO: 185338 - DNA, 164 bp, Arabidopsis thaliana landsberg
caaacattagtatgacggaatctcttcaacaaagtcttcgatttatcaaacttgctaaaatcaaacactcaaaggagcctcttttattcctctttgaaaattattgtgctaaatttacgttagatttatttgaccaaaaagaggagaagaagacgaagaaatga

SEQ ID NO: 185339 - DNA, 1009 bp, Arabidopsis thaliana landsberg
atgtccaggataggtgtgttcttgtaatagggcttctggtaaaagaaaaagagagacttttccacatgagcttaaatctgtcgcattttactttctgtgattgaactttatatgcaaaactgtccattaaaagttaatttctgcttgatgcttgtgttggagtatggcttatggttccagtttggctaaactgtgtttttctttatctttggcatagaaagaagatccctgtttctggttatgatgtctcgacagagtcagttatttacattgcttaggagaaggtttcattcaccgtctaatgatgcgccaacggagaccttaagaaagaagatagccgatttgcaaaagagtaagaagcgaaggaacccaataaagaaccagtttctagttgaggttccagaatcaagatcatatttagacacagcaacgatgcctatgttcctcgctgttgtaggtatcgcattgtttgcaaaggtgctaatgatggtaagccttcctttgtcatctctttgaatgcgtctttcttgtcagtgactttagcagctgttaagtagaagttgtttcgtaattgagctgttagattgctttatacttttttgtgcaattgaattaggaaggatctgtggaaattgctgattctcagtattggtttgttgttagatcgatgattcgaaatcgcaagaaatgattgaacgcaagataaagaatgcaccacaggggcaaggcacggtacgaatgatcgagcgtgaggagtgggatgagtttagagaagtaaggccaagaacaccttttgagtcaaagcttgctcgcccaaatgcacaaataagaactggagaacctgtgcgcaaggtaaaccgctctattaaatcaccaatccttgcagtatcttaccaaatcatatcgtcactcgatgaccaaaccttttgcttgtttcctttttaatcaggatgacttgaaaaactggacaatagacgtgctgacaaatgctcttgaacgaaccgaataa

SEQ ID NO: 185340 - DNA, 162 bp, Arabidopsis thaliana landsberg
ataccggacaccctgagccatacactcttggccctaaacccttaaacactctaccgctcaccatatatgtcaaagtttataacccagatgcgaccataggctatcggaacccgcctgcggctgtagatctgatgctcaaggatccccacagcatcgagccat

SEQ ID NO: 185341 - DNA, 66 bp, Arabidopsis thaliana landsberg
atgatcaaagaggagaccgtttcatacttccaaactttcgatggtgttatggcagaatctgacaag

SEQ ID NO: 185342 - DNA, 323 bp, Arabidopsis thaliana landsberg
gtgagtccagagctctatggagataattacccaagattctttacttactggactgtgagtagttcctcctatgctaagcctttcatttttataaataataattatgctttttgtatttaaattctatatagttttaagttttctataattaattagttcttatgttttggcaacagaacgatgcatatcaagcaacaggttgctacaatctcttgtgttccggttttgtccaaaccaatagtgagattgcgattggagctgccatctctccctcgtcttcatacaagggtggacaattcgatattactctgctcatctggaag

SEQ ID NO: 185343 - DNA, 1673 bp, Arabidopsis thaliana landsberg
cctttactagttctgctttgtggaggatcagaaaagaacagctatatgcgaaagcaagcaagtgcacgggctattaaaaaacacatgcggaatggaggaacaaatagttttaattttcatcctagtccaaggatggtaagagcttttcttttttgataatttgttttcctaaccatgttgcttcagttttcaacttctcttaacttcagatatctctgtcatgtgttattatagattccccatgtttataagccagaagttcagcatgttgagttttcaatcaagcaattcgttccacgtggaaagaaactacaagaggagtatgccactgagactccagctttccagaaaaagcttacacctgcagagacgcatatgctcgctaagtattacaacaaccccgatgaggaaaagttgagagtgtccttaattgcgttccctcacttccagacattgccatccaaggtgcacaaagtaatgcattcacgtcaaacaggcatgttaattgacgctatgcagcacttgcaagagccaactttttcagaacagagtaaaagcttcttcactgaggtgtggttcaaaatcctggtaaactttggtttttccttgctttctgtgaattcatttttcacttacgtggaatcacttactttaatagtttcgagctcctttgggtgaaagagaagagcttgatacaggtctgagggttactaatgatccgaaaggtaaatatagtctcattgatcttgccgaagtatcaattcttaaagtcgcatggatatatattcattcctaaaccagctcgtaggaggtctgtatgcttataagctatcagctagttttttggtctataggctataagctattgaacaatgaccaaaaagcctattttaggatatactatctgctctttttaggtattttatatagcttcatgtcacttctcatcaacccaaatgaaattgccaataatttataggaaagatgcttatagactttgatcagatagcttattgtctggtcaataatgtatctttgcattgcatatatatgaaaatcaggcctttcgttgtagtgttgaaacacatccattctattgtattaatgtgcagatctacactctgtccgtgatttggaagtcaacacatcacagagaaaggcaaaacaagttgaatctcccacaagcaccttagagacaacagagaaggattacgaagaatcttcacccacacaccgttatcttttcagttcagaatgtgcatccgttgatactctggggaacgtcttcgtaatgccaagtcctcttttattcttttctaatgttctggagtcagacaatacgcctctgcctaaaacagaaaaacaacattcttgccggaatacatctcacattgacttagttccagtagatacttcggaaaaacatcggcaagataatatctcatgcaagttaaaggaaagattctcgccagacggtgccagcgagacactagagactcatagccttgtgaaaaggaactccaccagagtaggtgaagatgatgtagcgaattctgttggagaaattgtgttatcatcggatgaagatgactgtgagggattggagcttagtccacggctcactaacttcatcaagagcggcgttgttccagagtcacctgtctatgaccaag

SEQ ID NO: 185344 - DNA, 94 bp, Arabidopsis thaliana landsberg
gtattatctttctccgacttctcttcgatcgattgaacaatttaaagacaatgacaaagaaagaagaacacagatcgatcaattgaacaattaa

SEQ ID NO: 185345 - DNA, 152 bp, Arabidopsis thaliana landsberg
gcctagcatttccgtgcggcccacttcttccaccccagcctatgccgatgctacgctgccagtggggcccacataccagccatgcatctccttcttgccttcctgtgccgctgacaatgtggggcccacttgtcacgttcatcttccacccg

SEQ ID NO: 185346 - DNA, 998 bp, Arabidopsis thaliana landsberg
  unsure (1)..(998): unsure at all n locations
atgtgtgacgttggaccgatcagtccgtctttgtcgcctgatcagtgcggactgatcggtctaatcatgtaccgatcggtcggtccgtctctgtcgcccggatcagtgtatggactagaccgatcggtctggtcctcctttgtcctcgattcaacttctctcgtcctttctcgacccgaacaagctcaaaaccatcttttcacctcaaaagttcctaaaacctgcaaaagactcaagacacaaccgaaaacacacaaaagacggactatgacacgacaaataactcanaacgaatggactaaagacatcaaaaacacaacatatcaacttctccagacttaggtctttgcttgtcctcaaggaatcaaaaacctgtatcaggagaagaggtttgaaaacacgagaattcacattttcttcgaggtcatgctcttatcaattgcctgcaaaccattcatcacaaaactcatcaacccgtactagactgtacttcgccataaccgtagcgacaaaattaaatcccaagatctaaaagaactttcagagtcatagaacttcatcttttaacattcattagcagaggcgtatactctcaccaagggggtatcgaacacgttatgggcttggtcaaaaaggctaatatatggtggttcaaagtgtttcggattctcaaacaatataaacggatgcatgtcattagcgaaatcacagtgagacacagaccaattaggtggtacatagcttcccttaagttcggatcaaaccaaccaacacatactatcccaatcaaatcaatgagttcctatgatgcttaacaatataaccaataataactcaacatatctggttccttgatctcctttcccgctctttctctttttttcgtttttttttttttttttattctcttgttttttttagagcggaggagtggaaccggtgtctcacaaaaatctgcattaggaaaactcaacaaatgtaacatcacatacccatga

SEQ ID NO: 185347 - DNA, 46 bp, Arabidopsis thaliana landsberg
atgattcttaccgtccaacggagagatgcgtggatgcgggcccatg

SEQ ID NO: 185348 - DNA, 134 bp, Arabidopsis thaliana landsberg
cctcggcaaaagcggaaagggagaaagggtttacaaaggaaattgcggcaacagagcgccgcctgcagatagagatctatgagaacggacagaccgatcacgatacagcaacgcatgacccgaacgggaagaag

SEQ ID NO: 185349 - DNA, 1081 bp, Arabidopsis thaliana landsberg
atggagaatctcccaccgaacagaggaatgtggaaccaagagtacagtcatggtcggatttctcaaagcttcaggtcggccaagccgctccttgaccggaaaagaccaattgaaaatgcacctaattcctccaatcctttacctcagaggtccaatactttcttccttgcaatttattcgaatattggtttattcttagcttctttgagccattgaactcagttttacaggggttctagtgggtaattcttgtccaatttctgatatcatcgtatagtgacctcttgctcctacattttgccataccttaggatttggtattttgctattagtataatatgtttggttatattaagctctcccttaaattcaagttactgtttcatcctttatctgatcatcggcattgcttcatcagatttgatgtgaaatctgataaatttcgctacctggatgttgcagaatgaaggaatcaatggatactgaatccgtttctcacaatataaacttcaacagcactcctcttatggagttatctgctaatacaccatacaaacgcctaaaccagagattgagtcatatgctgatggtcattcttgtggcttgagaacccctcctcctaggtttgatctggataaggagatcattaatggatttcagaccgatatttatgcggacgttggatctttatcagaagcttttgttactcccctgaaagaaccagaaagagttacactaagcaatggttgctctacttcttcaattcttgatgatgactttgatgattccattttagaagagattgacttaatatgtgaacagtcagcgagaaaagcagcttgtcaaactccaagtaccagcatatatcagactccgtctaaagataataagagtagtgatcccaaggccagcttagattttagggatgttgaaaagtttgaaccagactctaatgttaaattgaagcttgatgaagagactcctaccattgctgctgatcctgcacttctcaattccatgcctgatgagtgctccaaacatatgttgtctttaaacgatagacagaatgatgaagcttgta

SEQ ID NO: 185350 - DNA, 62 bp, Arabidopsis thaliana landsberg
ggccttcatgtggaccacgaacatcctcattacgattgcagttcaaacggtccatagattga

SEQ ID NO: 185351 - DNA, 38 bp, Arabidopsis thaliana landsberg
gaaataaaataactgtttttgaagaaagggacagttga

SEQ ID NO: 185352 - DNA, 402 bp, Arabidopsis thaliana landsberg
ctggaatggcatattcacgccgatgacgcagccaaggccgggttgcagagcacgatcatcgacgccatcgcagcaggggaggcaccgatgttcgcagagtcggaggcctgggacatttataccttcgcccgacagatgcagctgcatggcgacgttcaggaagacgtgtacgagcgcattcatgcgcgctggggcacggtgggcgtggtcgaattgtcatcggtgatcggctactacacgctggtcgccatgaccctgaacgtgcaccgtattccgctacccgatgaggtcaaggcgcccctgcaagtggcaacccatgcccagtgcggcttaccgcgtctgacagagcctgcgccggcggttttccaggctggcgcacaccctgcgatggaagagaactga

SEQ ID NO: 185353 - DNA, 148 bp, Arabidopsis thaliana landsberg
agaaagagaagtaaccggaaattccgatgtcgtaaccgaagatcaaaccgcctacagcggcaatcataacgcagatgaatacatagacagtcatcttggcctcaaaggccggagcattggcattagacacaacaacagccatgtttaa

SEQ ID NO: 185354 - DNA, 228 bp, Arabidopsis thaliana landsberg
atgacagccacgcctgtccatgtttctcatgtgagtgaaaagcgtcttgaagaacagcttgttttcatcgtggttaaactccaaccggcagttaccctggaacggagtgaacataggatgccacgcacgctccaaaccgtacaagcattttccaatggaatctgcagccatatcattctcacctacaaacttaaagtaatccgccatagttatgagcgactcaatatg

SEQ ID NO: 185355 - DNA, 943 bp, Arabidopsis thaliana landsberg
atgggcggtaccgcaatcatcattctcctactacagcttatgggcatctttggactagtccattggacgcacaaaaccgatgtcgtatcagttctccactcaatcttagacaaccgggctgaggtcatctctctttctttttctttaaaaaaatatataaatctaagaatttgttaccagtggctaattgtgttatcctgggagggtgttacttggtgcagtggaagtggcaaagtaccttggctggtgtctgctttcttgtatttctacaatccactcgatacatagtaactttcttcttctctttttttcatttgtttaagtcttttatccacttagtagggacaaaaccattggatttggaccctctcaaaatctttcactttttatttttgtaatcattcctcaacttttcacataccactttgagttggatttttttgaataacaatgatttagatacgatttgtccttattttcacatagccaccctttcacatatgttaaaagtcaaatggcttctcaaatgcttaacaagaattaacatgtttgaaaacttgttactattgcagaagcaaagatacccaaagctattttgggtatcagcaatgggtccaatggtggtcgtcgttgtgggttgcgttgttgcttatttggtgaaaggaacagcacacggcattgctactgtgagcaatgcagtcatatacacatatttatatactaacaaataacaatcacatgcaaacataattaaacttaattaagcgaacaagttttaaagcttgagcatcaagggtttctattaatagtatgtttcttaatacaggttgggcctttaaagaaaggactaaatcctccttctattcaacttttgaactttgactccaagtatctagggatggtgtttaaggccggaatcgtcacaggactcatcgctttggcc

SEQ ID NO: 185356 - DNA, 152 bp, Arabidopsis thaliana landsberg
gcctgggagttcggtcatgtcgggttaatcgggtcgggttaatcggttttgggaaaattcggtttaccaaaaatttcaccgaatctcaccgaaataaatttcggttcgggtcggtcggtacacgggttattcgggtcggttctaggctttaa

SEQ ID NO: 185357 - DNA, 25 bp, Arabidopsis thaliana landsberg
atggggtcttccagaaaggactctg

SEQ ID NO: 185358 - DNA, 189 bp, Arabidopsis thaliana landsberg
ggattgggcaacgaactgattgagaagcaggcgaatccgaactttaaaactaggctagcaaacgcgcttcaggtgctcacaacgtcaaaccagctatcctcatcgttggaccgtctcaactaccaaagattcagaaagaacctcaacaacttccttgtcgaagttcgtgggtttctgaaaactaggtga

SEQ ID NO: 185359 - DNA, 657 bp, Arabidopsis thaliana landsberg
attcaactctgaagtttgagattgattggcaaaagaggttcaacatcattcaaggtgttgcacgtggacttctctatctccaccgtgactcacgcctcagggtaattcaccgagacctgaaggtcagcaacattcttctggacgagaaaatgatcccgaaaatatcagatttcggattggctcggatgtctcagggaacgcaataccaggacaacactcgcagggtcgtaggaactctgtaagaaccattcttcgaaaacattctctacaagattcatagtcatgatattccatataggtgaacctatttgatgtttgaacagaggatatatggctcctgagtatgcatggactggggtattctctgagaaatcagacatctacagctttggagttctactgttagaaatcatcattggagagaagatctcaagattcagcgaagagggaaaaactcttcttgcatatgtaagttttttggtaaacttgcatatgtaagttaagacttaggtttcctacacttgcagagtttcttgctctaatattcttaggatgtgaaactaaataacaggcatgggaatcttggtgtgaaaccaaaggagttgatcttcttgatcaagctcttgcggattcttctcatacagctgaagttggaag

SEQ ID NO: 185360 - DNA, 425 bp, Arabidopsis thaliana landsberg
atgctcgacctggccgcctgggtgctgggcggctccaagacctcgcgcctgtaccagcgcctggtctaccaggacaagctggccgacgacgtgtcggtgtaccagggctccagcgagctgggctcgcagttcaagctgagcgtggacatcaagaagggcgtcgacccggccaaggtcaaggccgccgtggccgacgtgtggaagaccttcctcgccgacggtcccaccaccgacgaactggcccgcgccaagaccgatgcccgtgcgggcttcgtgcgccgcatcgaacgcgtcggtggcttcggcggcaaggccgtgctgttggcctccggtcaggtgtacaacgatgacccgggcgcctggcgcaagagtctcgaaaccaagatgcaggccactccggaagccgtgctcgccgcggcgcgcac

SEQ ID NO: 185361 - DNA, 392 bp, Arabidopsis thaliana landsberg
aaccctatcgagaacagaaggatccgagaagataacgaacccaaaacccctaggtcgacctgtgagcttgtctctcatcacaatagcctgagaaacctcttcatagttggagaaatgttctctcagcttatcttcatcagtttcccatgaaataccaccgacaaaaagctttccttgatccgaatccatgaatttatattccactatcttacttctgacccagaatcacaaatccacctcaatctacgaaaccgtgaaaaccgactgcagaaacttccagaaattacgaaaaggctttagcttttccaatggctgtagccgatttgagaggaggaagaggaagaagacagcgaacgaatatttctattggtttggtattgatattcgcgaag

SEQ ID NO: 185362 - DNA, 73 bp, Arabidopsis thaliana landsberg
atggcgattatgagggtttcgcttcgcatggttgcctttatccctctttcggtcgtgatcgttgggaaccaag

SEQ ID NO: 185363 - DNA, 309 bp, Arabidopsis thaliana landsberg
atgccgactttacaaagcctttatcatcgaccctccctcttttttctcttacctttggaaggtaattattctataaccctaaacccattaattacatattattaattctctaattgtgatttagtatggataagctcaaaagtacgttttgtttgttcgtaccaattgtcagggtgttcgtccttttgtggagctctcaacggccacgatgatactgtcgtctctagactacgacgaaccgctagatatcacccacgtgtcatcaaatcctcgatcaacatctttaagattcgacgcatcgtcgattaa

SEQ ID NO: 185364 - DNA, 163 bp, Arabidopsis thaliana landsberg
atgaatttgcagagaaaggttcagacaatcattagatgcaaatcgatcgcgccaagcttggtggacggtctgatcgtcgtccaaaataaatatcttcgaatacgctcttacggcgagatggcgctgaactacgccgggcgtcggtactatcggtattcgaatg

SEQ ID NO: 185365 - DNA, 74 bp, Arabidopsis thaliana landsberg
cccaatttgctactgaaatatcaaatcgtgtaaatcttgttcagaaacttgcgtgggctcgaatttggatgtag

SEQ ID NO: 185366 - DNA, 411 bp, Arabidopsis thaliana landsberg
atgatggagcttgtccgcccgacaggttcgaaccgcatccagcttgccgggctcgcgcacacgcactgggaggagatcgaccgcaagagcttccagagcttctgggaagccgaagtgaccgaggcgctcgacaaggtcgatatcgagacgatcagtgtcgcaacgggtctcctgctccccgtctggaacaaactgccgcaggacgacgttcgtgtctggcggatcgacgacgcggcggggacgtcgatcctcggccgcatcgtcatgcccggggcgatcgagaagctgcaatcggctttcggcctcacttcctcgatcatgctcacgcctggcgaactgatcgaggctgcccggcatggcgacggcgccttgatccctgggctgcacggcgcacgtcttgtgtcggcgatg

SEQ ID NO: 185367 - DNA, 610 bp, Arabidopsis thaliana landsberg
agcaagtaaaaggaaggaaggaggttgcagctgtagtgatcaagaaaaagcctgtcgaaggaagctataccagcttcgaggaaactagtgtgataattccaggcggcgttcacagcttccccgagaaaggagcaccgtcgccattgattagccggtggaggtctggagggttatgcgactgcggtggctgggatgttggatgtaaactacatgtcctctccaacaaaacagtcctccataaattcaaccaaagcttcacacttttcgatcaggtaatataaacataacttaaccaaaacctttttctaagattttcctgcaaacccatttcatataaaaaatatgtgtttgcttttctattttttatgccgtgttcttgagagtagtcgttttacatttgcaggaagtgagtgaacaagactcgagtccagctttggcgatgacagagctgaagacagggatctatagggtggagtttggttcgtttgtttcaccgttacaagcgttttttgtgtgtgtgacggtactaacatgtgcttccaaggcaaagaccaccggaaaatcttcttctcctatggctccgccgctatctcccgttggtagagtctaa

SEQ ID NO: 185368 - DNA, 1174 bp, Arabidopsis thaliana landsberg
atgagaaacgtagggagttcgagctctggcagcaaaggcatagcggccgtagtcggcgttggtccaaagctcggtcgctccatcgctcggaagtttgctcacgaaggctacaccgtcgccatcctcgctcgtgatcttggtttgattccttttctttctctcttttcattttgttttttgcttttctttttatccatatctttatctattcatacactatacacacccacatgtttccatgtataaatatgattttttctatatatgttcccatgggaattttcttcttcatttttattccaatgaagaaaaggaattgcggcagttttcttcgcaaaatgagttatttttgaagccttgaacaaacaaaaaaggagagttatttttagaatgttttcttcgctggatttctgcttttggcaaatattaatgtggctgactcacaccacacaagttcacacacacactgacacacatacatgcatattaatcaatatataatttatagtcaaaaggtgcattttaaatgtatatttggttaaaaaaaaaaaaaagattttgggtttatacatcagtattcactattcagtacttcactataggcttaactggttcgtaagacatagtactaatagtggaaatttttcagtgtaaataaatgtgtcgataaattcagctttttaagaaccagtacagtgaaaacttatttgattaaatttaaataacttttgtttttgtttgacacaaaagatactttttcattctgttcggtgataagaacattaaactggtttccatttgactataataataaatagttttcttcatccctccatgtatatgaaatagttactaagtcacgcccatcagctaatattaatcacaaaacggtgcacttattgccgatccactacaaaaaatatatataacacttttttttagtaacacttaaggatatactcaggttggtcactctcttaatatagtcgggtaaattgtgcaggtaggttatctagagtagcagaagagatagcaagagaagagaaagcacaagtgtttgctataagaattgattgtgcagatcccagtagtgtaagagaagccttcgaaggagtaaagtcgttagggttaatggaggttttagtgtacaatgcttatcattcgtcttacgcaa

SEQ ID NO: 185369 - DNA, 337 bp, Arabidopsis thaliana landsberg
atgttggcagtgcttttcgctagagcgaatgaggaacatcaattcagtggaattataccgcacttgattgacggaggtttatctatccttcaatatgcagatgatacggtggtgtttctagatcataacatcgaacatgccaagaatgtaaaactgcttctaactgcgtttgaacaaatgtctagccttaagataaactttcacaaaagtgaacttttctgttatgggatggctaaagattgtgagtcccagtactcacaactctttggttgcgacgtaggcacaatgcctttcaagtaccttgggattcctatgacccaccgaagattgagaaata

SEQ ID NO: 185370 - DNA, 828 bp, Arabidopsis thaliana landsberg
atgaaccaagataacatgttcaacaaagcagcatctaaaccgcgaatgacgtggaccgaagttaatccaccgattcaagcaaaagagttcggccaactcaataactattcccaaatcatgaaccaagatagcatgtacaacaaagcagcaaccaaaccgcaattgacgtggaccgaagaaattcaaccggttcaatcaggtctggttcaagccaacgagttcagcaaagtgaatggatattcccaaatcatgaaccaagatagcatgttcaacaaatcagcaaccaaccagcgattgacatggaacgaagtacttcaaccggttcaatcagatctggttcaatccaatgagttcagccaattcagtgactattctcaaatcatgaacgaagataacatgttcaacaaagcagcaaagaaaccgcggatgacatggagtaaagtatttcaaccggttcaatcacatctggttccgactgacggtttagaccgagaccactttgattccataaccataaacggaggtaacggcatacaaaacatggaaaagaaacaaggaaaaaaaccacggaagccgcggatgacgtggaccgaagagcttcaccaaaaatttctggaagccatcgaaataattggtggtatcgaaagtaatcaaacttttctttaatctctagctaactctttcattaatctcttgattaatgttggttcttatttaattatttttggatttcaaaatgcagaagctaacccaaaggtacttgtcgaatgcttgcaagaaatgaggatagaaggaattactagaagcaatgtggcaagtcatcttcag

SEQ ID NO: 185371 - DNA, 98 bp, Arabidopsis thaliana landsberg
gcacaagtcaagaaccggaggtattgtttagtaccaagatccgcaggacgaagacaatgagggcaaactttcttggtggctttgatcgaggagagagg

SEQ ID NO: 185372 - DNA, 70 bp, Arabidopsis thaliana landsberg
atactttattcccttccaccagttcatgctgacgttgcttttgcgtttacgaagcccttcttataactaa

SEQ ID NO: 185373 - DNA, 557 bp, Arabidopsis thaliana landsberg
taacattcaccgagcagcatccacagctggtactggtactagctgcagtggtgcctgcagtggtgcaagatcttttgccaacaacgttggcggaaattcattggatcaaacatctaacgtgacttcatttgttgaagaaatgcatattgacactggtcgtgtaagggatacaacgactcatatatatggttcagattcaggcggtgtagcagcagaattcagtaatatggttgtcgatttggaaggcccttctgtgctgtctacaaatacagagaaacctttcacatacttagccgagttgtctcaaaaatgggcagttatgaaagataccatacattttgttcaaggaaggatcaaggtactactaacaccactaattaaagcactctcagtcttcaatcaatgatgatttcaactcttgttattaaagtattcattttttgcagtgctttctaactggagtgaagaaattccagttcaagcaacagtctacgtatgagcttctatgctatgttgatgatggtagtctcatctgtgagattttgctccataacgac

SEQ ID NO: 185374 - DNA, 59 bp, Arabidopsis thaliana landsberg
gtgattggaaacaaatgggatcagtatcttgatcttctccagctcgactacactgaagg

SEQ ID NO: 185375 - DNA, 146 bp, Arabidopsis thaliana landsberg
gtgtgaagaaagggattgtcgaaagttgggaaaaacatgaagaaagtgagactgatgaagacgatcttgatataggcattagtcctaatgcctcttctgagaagaagaagaagaaggagtcttggcgtttagatggtcgaggaaag

SEQ ID NO: 185376 - DNA, 946 bp, Arabidopsis thaliana landsberg
atgctaaaccactcatttgaaccaaactgtttcctacattggcgtcctaaagatcgcatgctggaggttatgtcaaatgctggtcaagacattaagaaaggcgaagaggtaagagactcaaatgttcctaagtgtcagcctcacttcactgctttatctatcttcttataatgcttttcacagatgacgattaattacatgccaggccagaaaaacaacatgcttatggaaagatacggcttctcaactcctgtggtaatgctttttacgacaatcacattcatcttacacaaactatgtttcctttgcaagttttctcgtttattcagtttttctggtctgctgcagaatccgtgggatgctataaagttctctggagattctcgcatccatttaaattcctttttatcggtcttcaatatttatggtcttcctgaagaatattaccatgacagtaagttccttttcttctgtttcctctctattccttgacaaaagatggagaaatgagcaccaatgttacctaaatctgtggcaggcgagttatcgaggggcgatacttttgttgatggagcagttatcgctgcagcaagaacattacctacttggtcagacatagatcttcctccaataccgagtgcggaaagaaaagcagttaaagaattgcaagatgaatgtcgaaagatgcttgcggaatatcccacaacagcagagcaagaccagaagttgctaggtattacactaaagataaatacaccaatgtgttattatctataatcgctcatatactaaaacttaagctttccctcttgttgttgtgacagattcaatgtcagaagcaaggacaacatttgcaacatcggttaagtatagaatgcacagaaagatgttcatcggaaaaattatcaaggcacttgacatctatcaagaacggttactctattga

SEQ ID NO: 185377 - DNA, 739 bp, Arabidopsis thaliana landsberg
atggactaccgactagcatgccagttgggaggggtggacgatgacaacctcatcatccgtaatctaccccttttcctcttcgacgccgcccgagcctggctggagcatctgcctcctgcgcagatctccgactgggacgatctggtcaaggctttcgcgggaaacttccaaggcacgtacgtcgccactgggaactcgtgggatctccgaagctaccgccagcagccaggggagtccctccgagcgtacatccgacggttttcgaagcagcgcaccgagctgcccaacgttaccgactcggatgtcatcggcgcgttccttgtcggcaccacctgccgagacctggtgagtaagttggggcgcaagacccccaccagggcgagcgagctgatggacatcgccaccaagttctcctctggccaggaggcggtcgaagctatcttccgaaaggacaagcagccccagggccgcccatcggaagatgctcccgaggcgtctactccgcgcggcgccaagaagaaaggcaagaagaagtcgcaagcgaaacgcgacgccgccgacgcggaccttgtcgccgccgccgagtacaagaaccctcggaagccccccggaggtgctaacctcttcgacaagatgctcaaggagccgtgcccctatcatcaggggcccgtcaagcacacccttgaggagtgcgtcatgcttcggtgccacttccacagggccgggacacccgcggagg

SEQ ID NO: 185378 - DNA, 130 bp, Arabidopsis thaliana landsberg
aagcagtttgacacgtttctggtttttgtggttcagagcattctttcgttacgtggaggttcaggttacacgacaaagatgagagactattctcggtggtctaaaaaacgactttgttttagacaaaacg

SEQ ID NO: 185379 - DNA, 348 bp, Arabidopsis thaliana landsberg
ttgctaaggtttgatgatgaggatgtggaagagagctatgtaaggtctgagggaaagatatgacgatgttgaatcacatgtatatttctcctacattttatcatcaaacttgctactcttttccttcgatttcgttaagctaaattttgttctgttttacagcttggcaatggaggagatggtgtgtttaatggaccagatgaggctcctatgtcgtcacttaacgatcacgtgcctgagttaatggagaaaggtgggtttgatgagattgttgataaagagattttgaatgatttgggtggggatgatgatttggttctgagacggtcacatgttaaagtgttctga

SEQ ID NO: 185380 - DNA, 350 bp, Arabidopsis thaliana landsberg
atgaatctttatcagtcatatgctagtgttcctaaaattgattttgacttggatgcattgaagaaaagtgtagaagatgcacttgtaataagtggcaggatgagcagttctgatgaagaaatatcaaaagcattagtgattcccactcctgaaaatgcatgcattcctatcaaaccacctcggaaaatgaagtattataatcgactaagaactgaacatgtggtgtaagtatctttatgtaaatactcattataccatataatttatatgcattttttgggaatatataatctaatacttgttttttttgcagttatgtgcttcctgataatcatgagctgctacacgat

SEQ ID NO: 185381 - DNA, 61 bp, Arabidopsis thaliana landsberg
atgtcgctaaactccatgcgttccaagctgaatcaaaagtgtttggttatcgaattgacag

SEQ ID NO: 185382 - DNA, 123 bp, Arabidopsis thaliana landsberg
ctgtatccctaaaaacgaaaattcacattattagcttcctcattgcgaatattacattgcgagaagccctagaaaaaacagcatttcttaccatagctgcagacgaacagttcgatcttcaag

SEQ ID NO: 185383 - DNA, 255 bp, Arabidopsis thaliana landsberg
atggcatacatcgagcatatccccgacgaccagtacgacaaagccaagacactgcagacgatcctcgagacgctggtccgcgcgggcgcgagcaccgaggcgcgcaacaggcgcggcgagacggcgctgctgatggcggcgaggctgggcaggaaggtggcccttgcggcgctgctcgagatgggggctaatgtgcatgcgagagatgtggatgggagaggggtgctggaggtaatcgatgccgagatgggaggg

SEQ ID NO: 185384 - DNA, 56 bp, Arabidopsis thaliana landsberg
atgaagacatatccgagactggctgtagtgcgaagcaactgttctggagcctcaag

SEQ ID NO: 185385 - DNA, 310 bp, Arabidopsis thaliana landsberg
atgacatggcctagtgttggcaagtacaaagtggacattgcatccttcgagtctatagccttgcctgagctacaggtgttctgtcagctcatcatttccttgataatttggatagatgaacactgactgactggtttagcattggttttcaaggtcaaagacgataccaatcttttcatcattgatgaagttggcaagatggagatgtttagtccatccttttttccggctgtcctcaatgttttggactccaacgttcctcttcttgcttccattcctagcccaaaatttggtcgacatcttcctgaag

SEQ ID NO: 185386 - DNA, 69 bp, Arabidopsis thaliana landsberg
tctcttgtcgatcgttcaacccaacgaaagaaaaagcttatccgtatttttcctgatatagttgattaa

SEQ ID NO: 185387 - DNA, 322 bp, Arabidopsis thaliana landsberg
atgaaggtgtgaatggattgtctcatctaaagccttgaatgtgggaaaaaggccattgttgttcagccaaggatgacttgccggtagcttgtattatgattactctatattcgatttatattatggagatgatggtttatatatatttacttatctacatagttttagttgattttttttcgtacgtaatataatacgaaaaagtatttacttatttatatatgtgtgttggggcaaaaagtgtaaccaagctagcccggcaagtcatctatgactatgcagctgtctcttcctctcattataggctttcgatgacacgtaa

SEQ ID NO: 185388 - DNA, 154 bp, Arabidopsis thaliana landsberg
agctttatgagcaagctattaagtatgagaaaggttcgtttattacttctaatggagctttggcgacgctttcgggtgctaagactggtcttgctccgacacacaagcgtattgttagagttgcggctactaagtatgagctttggtggggaaa

SEQ ID NO: 185389 - DNA, 86 bp, Arabidopsis thaliana landsberg
ctctaagcgtcaccgacctcgtggatcaaacgacaccgacacgtgctgatgtcttagtagatctcgtaatagaagtgggaccatag

SEQ ID NO: 185390 - DNA, 237 bp, Arabidopsis thaliana landsberg
tatattccagcgcgacttcctgcgcgcgccatcggaagcactctggatcaccagggaacccaaccctacagttcgtgccggtgtacgccgctgacggcaagctgtccgagcatttcatcggcgtggccaacatcgaaccgaaagagccggcgcacattcttaagggctaccagcgcacgatcacatacacacatgatcctctctcttttcccacactcagaagaccagaaaacaccg

SEQ ID NO: 185391 - DNA, 188 bp, Arabidopsis thaliana landsberg
cattcaacaccttattgggtaaaagtggagaagcccaacatatcagtcccatccacgaggacctgcaatatgtttcggtcagacaggtatttgacatcattaaaaaagaatcaggatttacttttgtttataatgcagaggacatcaattctcatcggaatgttaatatccggggtcatgacctgaag

SEQ ID NO: 185392 - DNA, 9 bp, Arabidopsis thaliana landsberg
atggagaag

SEQ ID NO: 185393 - DNA, 184 bp, Arabidopsis thaliana landsberg
cctgtcgggggaaaagcccctgcctttgtatatggatggggtcaaaaaaggctacctgccttatatccgggctgcctatgaccggccgctggactttgccgacccgattctgaaaaggacggccctgccgcttgaatttatgatcggcacgcatatttttgaaagccgagatattgacggccag

SEQ ID NO: 185394 - DNA, 70 bp, Arabidopsis thaliana landsberg
atgttatacaatattgtgtacgccttaatgaatatgacctttaagataagtatccatgattataaacagg

SEQ ID NO: 185395 - DNA, 674 bp, Arabidopsis thaliana landsberg
gaaacacggtcagagttgttttttaacttcaaatctttatcaaaatctcctgtctttcaaatttcttccgtggagacaaagggatcaagtggtagctcatccaacaacttgttctacgatataataataagtaatgcattgagtattggtgcaaagtatcagccaaaatgtggagatcttattgctctaacaaaggaaaggcctagacggatcgatgacttgaatcctttacttctcgcctacgtttcctcggatggtgattttataatcactattcattcgtctagatcgatgtcttatcttgaaatggaccaccaattcaaggaaacttcacttcagtttggtgttttcctaatgactttaacaacaaacactcgaatttggaatgctttgcacaacgaagctgacatatcgactctaaccaagagtgtgcttcaggctaatactgagggtacagaacaatgtttttgttctgaaaatgatgggagatctgaccttgttttggatataatccgttcaacgaaattgaactcttcccaagaggatgcaatcttgggctgccttgaaacaagaaactgtacccataagaacagtgtgaaactgatatggggacctcctagaacaggcaaaacaaagacggtcgcgactcttctctttgcccttctcaaactaag

SEQ ID NO: 185396 - DNA, 432 bp, Arabidopsis thaliana landsberg
atggaaaacagctacaccgttgatggtcaccgtcttcaatattccgttccgttaagctccatgcatgaaaccagtcaaaactccgaaacttacggattatccaaagagacaccattggtctgcatgcccttgttcgaaaccaacactactacttcgttcgatatctcttctcttttctcgtttaacccaaaaccagaaaccgaaaacaagcatcagcatcgtgtcatggacgattccatcgccgccgtcgtgggcgaaaacgttcttttcgggtgttaaaaacaaagtctctgatcacttgaccaaagatgctggtgtgaagcgggggcggaagatgccgcagaagaccggaggattcatgggagtgagaaaacggccgtgggggagatggtcggcggagataagagacaggatagggcggtgcagacactg

SEQ ID NO: 185397 - DNA, 433 bp, Arabidopsis thaliana landsberg
atgcagtttgagattgaccataaaaaagatgaacaacttgtatctgttgagggttattgcaagcccgggtcggatttgattcaaggagttcaattcaaaaccaacttgaggatttctgaaatcataggatttgaaaaagctatatttggtaatcctactacgttttcactagctgaggatggaaagaagatcatcgggtttcacggatattccatggcaaacctaaactctcttggagcatacttcacttggatttctccaactaagatggaagcaaaaggaggaaaaggaggcacagagtggaacgatggagctgaacatgaaggttttacaaaaatatatgtacaaggtggttgtgatggtatacaatacatcaagttcgattatgtcaaggatggacaacataaatatgggtcaccccatggtgtcaagg

SEQ ID NO: 185398 - DNA, 154 bp, Arabidopsis thaliana landsberg
atgagttcgagtagcggggttttgagtgaggatttgatatcttttggtaatgagagtcaactttctccgcaacgagctgttttcggatgtgagaatgaggagactggtgatctttttagccaacgtgctgatggtataatggggttaggtcgtg

SEQ ID NO: 185399 - DNA, 249 bp, Arabidopsis thaliana landsberg
atgacacctttaaacctaaccggatacgtgggatcttcttcctatcaagtcctttccgagagccgtaggggcatggatcccttgacttgttttctaattaatctgtcttgtgatgtagtaaccgctcttctgatttgttggggtgatcgttcgtgtctttatggagccatctcttctcgtatcattcgtgaagccctcccattctttgtcaaagagtcggagctgctgatgtgttcatctcatttggtg

SEQ ID NO: 185400 - DNA, 1691 bp, Arabidopsis thaliana landsberg
atggatgtttctgatgaaaacatcaaacgggaagctatgaaaattgtctggatgtattcaggtacaccaacacaaatctatctttatgttagtgaaaccaaataaatcaataagtaagttaatctattttggctataaaaatgaagtaataatatttgttttttattaggagttactttcgtagatatcaaggaaaaaggtatactaaaggtgaagggaaaatttcaaaagattcaaatggggggcaaactctatgagatagataaatctgttgatataatcaacccaacgggaaaaccagggaaaagttacatgccgggtttaaacacagtctacaattatgtcaccactccaaaaatgcaggttcgttttttctaattttcagattatttttaagcaattttgtttttgtgcaccatttttagcaattaatttttttttacactatgcatatgcattatgcattatgtagatatacattaaaattattacttataccatgaattgctattttacaggagatacttatattcaagtttgaagttcttaatgaacacatcatacaggatgctatggaagttatatgggagttttcaggtacgtatacaccaacacaaacttatgtttatattaaaccaaataaatcaatgattgtaggaaatattcagtttacatcattttgcattgtacgatgtttgttgttaggagttacttcggtagaggtcaagggagttgataaactagaggtgaagggaggagaatttaataaaatcgcaatgtcggcaaaactaaaggacatagatgaatccgttaccgttatcatcaaggagggactagatgtacatacacctaatattggaagctcaaatgggacaaattttaatatgaaaaacgtgctatccgctttccgtgtgcctgcgcgtgtgcgtgtgcctccgcctccacctgtgcgtccagcttcccctgtgtatgctgctgggcgtggaaaaaaatttaaccaaggaaatgagtttccaacatataagcagccaattttcaatgctattgctgcgcaagttcgtgacttattacctaaagcaaacgcgaataagtctatgttggggcaacataatgcagagatccttggaaggaagaaggcacaacctgaagtcaagcagcagaatcataaaggaggcttgaatgcacaggcccctgataagaagaagcaaccacctgaagttaagcagaatgaacaagaaggaggattctttggattctttggtaagaaaaagcaacaacctcagaaggaaaaagtcgtcagtgaaatcccaaaacctcagcgaacatcgagaaaaggtacaacactgaactcatgtgcttgtgtaaacatgccttttctagtttgaagtatgttttaaatggaagaatttgaggtggtgattggtttgagctccatggactagaaatgtcatctctcatcttctaagataaagtttgtctcattatttgttgtggggctttatcacacattggcatattcttttgtttctattaaccttaaagatttgtgttaaaccatctaatgcagaaggcgaaacgtcacaaacacagacacaaagttcgtggaccgactcatcatggcttacgggcttaaccaatacgttgaatccctctcaatacacaaaatcaagcagtcagacgacatcctatga

SEQ ID NO: 185401 - DNA, 518 bp, Arabidopsis thaliana landsberg
ctgcactcagctcagcaagcccccgtgaccatcctgctgagacgagcaagccggcaaatctcaggtggatccagccgtgtcataatccacgctacaccattatcaggtgcatcctccaaccttagtttccacaagtacgcgtcatcgatccggtccatcaccggtgagcctcccgagatattcgcgcccatcaaacaaaatgaagtccctaaatttgcatggtcgcggagaatcgagaacaaattgatatgacaggatttaaaccaatcaatcgacgaaaactcagaaaggaagcttttgttttttttttttttttttttgccaaagggtgatattatttataagaaacatatcgtacaaccattcatgatacagagagcatattatacaatccaaagacgtctaaagaaagaaattacaaagaactgagtcaagactataaacatcaaaagggagaagtctggatgctcgatgatcaaccaccagagaagaggccaaactatggtagcagtgtttga

SEQ ID NO: 185402 - DNA, 89 bp, Arabidopsis thaliana landsberg
atgagaaggcgatgtggaatacatcgtaaatctcatgatggtcgcactataatttttgttgcagatgatgaacttaaagactcaaacag

SEQ ID NO: 185403 - DNA, 1049 bp, Arabidopsis thaliana landsberg
atgaaggaagtggaagggaaagtgaagttttcaatgcggatttcgacaatgatgttacttgttcacaaagcaatggacaaagcccatgaaaagatcaaaaccaaacacggtcttctcatccgtctcaatgccatatccattttctacgagctcgctgtgatacagctagagagctgtcttagttttgtcggacaagagactgataaactagagagtaaccacgaggaagtggttcgagatctgagagagattaaagacaggcttcaccaccgtctcttagagactgaaatagcgattcttgagaaagatagacagttgttagagatgtctgagaaccaagagtctctgagaaacgtgttggagagtaaagaaacagagttggttcatttgcaagatcttgagaggaagagatttcatagtaagattggggattttatcaaggaagatgagttttctgagctgaagagctctgttgatcaacaagtgatgaatcttagacaaaagcttgagacagagtacgatgaattgagaggagaaacagaggatccttcagcggttgatattgatgttttgaaagggacaatggatcttgctttcaacaagatgcatcacgcgatattcttgtcggaattgggtcctattgagcagagttggagatggtctatagagagagattcaatggcgttactgataaaaggtttcatgaatggtttagaggagaagatggagaaagtaatgatagttgtaaaagattatgaatcgggttttaaagatcgggttggttcgattcgtagagagttagagtgtttagaatctcagtctgatcagatcatcgtccataggtcatcatctcctagatcatgtgtagcaacagcagcaacaatatcatcatcatcttcaatagataatgaaattggtgatgataaagaagcaaaagaagatagagaagaagaacaagattcaagcaattttcctgtttcgaagttgataaagagtcatgaatcaatcattaggaggaaaagcgaagagcttgctcctcctaagatcga

SEQ ID NO: 185404 - DNA, 75 bp, Arabidopsis thaliana landsberg
atgaaagtgaccaatggagtgagaacgccagcagcagaggtgaatgttgctgacgttagagctagacccgtaatg

SEQ ID NO: 185405 - DNA, 525 bp, Arabidopsis thaliana landsberg
gtggcgcgctccgattcgtaacaacaccgaggcggccgcccggttgatcagcggggtgggagggcttttcgcgctgatagaggcgctctatatcgtaatgttgctgctgggggccaaccaggccaacggtttttttcgcttcatcaaggggctggccgagccgctcgcgttgttctttccggggttgttcaccttctccagctccgacgtcaccgtcatcgtgacctacggcctggcagcggttttttggctggtggtcacgggattcgtcgcccggctcatcggttagagcccgcaggatggaatgccgtcagcgcgccatcggcctcggccaccacgacttctccgtgtggacccaccgaaatcgccgcgccccgtggtttttgcgccgaaaccgtttgcaccgccgatgtcccgggaagcggatggtcggcgatggtggagccgtcgcccgtgttgatcaccagcaggctcgcgtgggccttaccgggaagtcgcgccaccagataaccggtgtccccggag

SEQ ID NO: 185406 - DNA, 283 bp, Arabidopsis thaliana landsberg
gtactctcatttatcaacccatgatttctctgattcgatgccaactctcccaccagacaatttgcagaactttgtggctgatccaagaatggtgggaggagagcaaatggctgaaggtggcgggagaggtcaacaccaagcaccaccaccacgtccacgtgatttggcaaatcggagtccattagctgtgttgattgagtcaatacttccatgggctaattttggagatggagaggatgagattgcacatgatgctcaccaccaaccagacaacaatggctaa

SEQ ID NO: 185407 - DNA, 349 bp, Arabidopsis thaliana landsberg
atggatctaaactccggcaaggcaaagaaggacgacaaaactcttgttcttgagttccactttaagcctggagcattagactatcttcctgagggtggtgttgttactgtagcggataataagatccttcactggttccctggtcaatacagtcacgcacagtatcccttcgcgcatatccgtcacatcgagactggaaagttctacggagattccacgatcgtcgacttaattcctctgcaacgtgagtacaaccgtactcgcggacagattattgagtcgaagaaccgcatggctaagccgcaacttgctgctgagattggttctgttgatcctaataagatcacta

SEQ ID NO: 185408 - DNA, 660 bp, Arabidopsis thaliana landsberg
tgcagtattgattccttgctagagtgcacgatcaagcacatgctcttcctgcagagtgtctctcagcatgctgacaagctcactaaaagtgcaagttcaaaggtacttaataatttctagtcttcccaaggaaagttgctttatattctccatagtttgtgaagagacgtttccttttattcatgactgattaatagatcatttatcaaattgttggggaagttttcttaaaagcttatacatttgaagttacagatgcaacacaaggataccggcaccctaggaatatcaagcactgaacaaggttcgagctgggcagtggagattggaggccatctgcaagtgtgctcaatcatggtggagaatctggacaaagaaggagtgatgcttattgaggtgtgcattattttctcgttacctttttcatgtatttgaagcactttgtcagaacgactggcgaactctgcatttatcatcctgaattttgcggttatatgcaattccttgcttgagtgtgttttggatgttgaacagatgctatgcgaagaatgtagccactttctcgagatagcgaacgtgataaggagcttggaactcatcatcctcagaggcaccactgagaaacaaggcgagaaaacatggatatgttttgtagtggag

SEQ ID NO: 185409 - DNA, 2006 bp, Arabidopsis thaliana landsberg
atgccgttggggaagcaggaatttgatcggttctgtatcaagttgggcatacaagatttgcacgatccaacttgcgggagggtattaacgactcaacggagttggcggaccaagtcatgatcccgacgatcacgtaaccatataaggaagttgctctgtttttgatacaatctgtatacgattgatcaattgtgattatgcattgattataatttaggattttctatgatctcttctatagcctataaaagacatttaatatgcatcaaagtaaatacaagaaacaatttacagtttctaaatctttataatggatatagttgagtgctttggtatcgaatctaggttattgtgtgggctagcggagaattacatagtggtcaagatttgactagaactatttagtgcatggatttggtttgtatgatcaggataataagctagagagattgggagttcctgtgttttcaaacatcttccaggggtttggcttttgtgttttgcttgagggccaacaaaagctaagtcttggggagtttatatacctcgattttcactgcttttagctatgatttaggtatagtttttaaagtcctttcgttatttgtagagtcttttctagtctttttcaggtctttacatgtttgggatgcatttggagattatggagcattctggagcaaaacagacaatttaagctgcagcagcaatccggagacaaaaattgacgtaggtgtcgatcgacacaacccctgatgtcgagtgacaccaacacctgacggcaattcaattgcgcaacttattcgtgttttgaaaatttccaaattcggctcagaactctctcttatatccaaaaaaggcccaaacgtttttaggacttatatattgatttttatggtcattgtttagaggcataactcttattatctcttttattcttgagagcaaaaccctgtggagactccctttagagaagattcttctaaactcttttctcttattaatttcatcattgatttcttattcaataatgttttgttcttctatgatcatgcttgagtagtcctcttgttgggtttagggattctcattagtgataaaaataaattagtagatcgaaaacccttttagggtaatatatttagaattcttcatctttcattgctcttaatgctactttaagagtaactaactagaacttgattttaggataataggtatgcccaccataggtatctattactggaactatcctagatgagcctagtatttagatgcgtgctagcgtccattacttaggtgaacttatcaaacctgattataatgcttgcttagttctagggatttacaagagagttaggatcaaaactattgagcatagtgagtttcgcggaacaccaccggttactttatattagtgatttgtgttctagagtggttcgataataatcctaatttactgctagatatactattctgatatttcctgagaatttccctaaacccgacgtcttaatcatctgaatctacaatctcttttatttcttgtcttgtcttttacttttattacattctctgtttagctttattcgaaactattaatctactgtgtgatccaataactttgtggaattcgatccctaagtgctataacaacctctttatttgagagagtagtcattagggtaatttgactcatatcaaatttggcgccgttgccgaagttctcttcgattcaccattagattaggtgtagaatttagtctaagcttttcttttcttttgttactcacgcgtttttatttcttcttcttcttgtgtttcaggagtttaaggaattcaaacgcaactacaagatgctgatagtaatacctgatactgctggagtgttacgcgatagagctggtcagacatacaatgaaaagggtcagaaaatagatgaacagggaaacctgataccagaaattgccgattgtgttgatcgacgacaacttggaaagcaataa

SEQ ID NO: 185410 - DNA, 305 bp, Arabidopsis thaliana landsberg
atctttatcgcttgccgtattctttccggcatcggaataaagtgcgtcgcttccggcattaacagaacgcagacgaggctatcaactgattgtttcctgatgccgtgtctttaaaaggatcacttgccgtaatgattttatttccgtcgtctgtcccccaacaggttttccaggaagaaatgcctgctaccaaacagcttttaaaagctggcagtcttatactattgactgatcttgaaccagaaggagcggtcggtctgtttacaaaacctgtggaagaattaattgccgaggaagaggaatga

SEQ ID NO: 185411 - DNA, 444 bp, Arabidopsis thaliana landsberg
atgcggattcttcagctggtggctcctcagaggtgatggtttcatatgtttacggttctgatgatatttcctgtttatcctttttagtgcattggttatcactaatagaatagtgatattctatgttccaatgtttctcccaaaggtgacctaagaaattataaatgaggttaatacaggaagcaatttgaatcttttatcaacaaaaaggtcatatggagaagaacatttttttctggaccacttgctgctagagatgacgaatgatgaatgccatttaaaatagatcggttgaaattgtttagattatcagtcttgagtaatttgaatcttgtgctattttatttcttaaacccgtttgcttaataaatgtttgcctaatgcatgcagttgggtaactcagacatcacatttccacaaattggaggaccatatactgcacag

SEQ ID NO: 185412 - DNA, 357 bp, Arabidopsis thaliana landsberg
cgctccaacggcgagtatcccgtctggtacggcggctgctcgggcgaggcggtcagcttctgcctcaaggcccttcttggcacgcgcgacgacaagacgggatcgggctcgctcaactacggcaggtacagcaatcccgacttcgatgcgatgctggcgagcgccctcgacatggaggacgggccgcagcgcaatgccgcaatcgccaaggcgaccgagttcgtcatggccgactatcccatgctgccgctctaccacttccacctgatcgtcgggcacggccagaaggtcggcgcctatgccgtccatccgcgcggctggacgacggccatgcaggccgtcccctcgcagatgtga

SEQ ID NO: 185413 - DNA, 260 bp, Arabidopsis thaliana landsberg
atgactacattgcaggtaagttagtctgatctcaactctttgattcataagcacaatataatcaaatctaattccttcttcgttgtctgaaaaataaaaagcttgccagcatcatgctctcctgcatttggttctcacacccgcttagctgggagcagtgtattggatccgtaagctcttccaatcctctctttacttcgtcttccctctttttcatctatccttgtacccgaaactaaaaccacttttcactggcgcag

SEQ ID NO: 185414 - DNA, 1819 bp, Arabidopsis thaliana landsberg
atgaataaattttcccaagaggtggaacttggaaaatccttgagggatgaaatatggtttggtgaagaaggaactcaacgcttagatttcaccaaaatgtttccaagaggtggaacttggaaaaatccttgacggatgaaatctagtcttgtgaagcgcgaactcaacatttagatttctctgaaattaatatatttttccatgaaatggaacttggaaaaatccttaagggatgcaatctagtcttgtgaaaagccaactcaacacttagatttcaccgaaatgaaaaaacatttccaagaggtggaacttgaaagaatctttaaggaatgaaatatattcttgtgaagagcaaactcaacacttagatatcgctgaaatgaatatattttttcaagaggtgaaacttggaaaaattcttgagggatgaaatccagtcttgtgaagagcgaactcaacacttagatttcaccgaaatgaatatatttttccgagaggtggaacttggaaaactttttgagggatgaaatcttgtcttgtgaagagcaaactcaacacttagatttcacaaaaaggaatatatgtttccaagaggtggaacttaaaaaaatccttgagggatgaaatctaatcttgtgaagagtgagctcaacacttagatttcaccgaaatgaatcttatttttccaagaggtggaacttggaaaaatcttctcgggatgaaatctagtcttgtgaagagcgaactcaacacttagactccgccgaaatgaaccaattttcccaagagtttgaactatgattggatgaaacatagataaggtcgcagcttccaagttgaagtgactacatcaagagcaagtttctccattattgtgtaacttaattccggactggttgatgacttgcccaagtaacgaatcggctttcactctcctcggtcttcacaaattattactccactaacggcatgatttgaaaatgagatgtataagtataatttttcatcggcttccggcttcagagaattagagacgacatttaagtatgtctttagttgaccgaaagcatctttcacatctttcatccaactaaactccttgttcccttttagtatttgatagaaagagaggcagttatcggctgactgagatgttaaccggtttaacgcggtaatcctaccaaagagtctttagacatctttgatgttccttggggctagcatgttcaaaaagagcgttaatctatcttgggtttgcttcggtttctctctttgttgctaagtaaccgagaaaatctctggatgggactcagaatgtctacttggcaagattcaacttcatctgaagcttgttcaagatattaaagcattctcccaagtcttaaatgtgaccgctctcttttgacgatttcacgagcatgtcatctgtatagacctccaccgtttttcaagatgattatcgttggtatgtcacacctacatatttagttcacacgacatgatcgtaaaatagtatatacctcggttggtgctgaatgaaatatttttcttaatcattaggattcattgatatatccctatttttaccgtttttaactatgttttaggtataggctttagagtctaattgttatttatagagttttttctagtctttttcaggtctttacatgttttagatgcatttgaagattatggagcattttggagcaaaacatacaatttaagctgcagaagcaatccagagacgaaaatgcacgtaggtgtcgaacgacaccacccctggtgtcgagcgacaccaatatctgacggcaattga

SEQ ID NO: 185415 - DNA, 357 bp, Arabidopsis thaliana landsberg
ctgatctttacaatgcaaagcatccattgattctatgcactgatgattttggagtattctccactagcctctccaacgagtacgccctcgctgttcgttctcttggtgagcttccagaacctgagctcaaatccaacagttacagagcttttctgatttttgagaattgtgattaagtttagattcacaaagaaactacatttccaaataatctaattttgtttcttctgtgaaggtcttagtaaaagtgaaacctttgcattggctagagcagccatagacgcaacatttgcacaagatgaagttaagcaacaacttaggttcatttttgatttagcctctccagagcacgtttag

SEQ ID NO: 185416 - DNA, 787 bp, Arabidopsis thaliana landsberg
gataagtggaagtagtaaaatctatgtaccaaaaggaacattttacctcggtggtgtagagtttgtgggtccatgcaaaaatcctattgaattcatcatcgatggaactttattagctcctgcaaatccaagcgacattaagcaagacacgtggatcaactttaggtacatcaacaatctttctatctctggttctggtacacttgacggccaaggaaaacagtcttggccacacaatgactgccacacaaaccccaattgtcctaaactagctatggtaagatttttcatcgagttttcacttatattattattatttacatttaaagcgtattacaaaatgtttgatatgatacttatacaataataaaaagtgatattcaatcattatttatcatacataacttattaaattatcttgtctttttttgttttttatttgagaaagtaacaagtcgtttaataaacttgaaatgttttatagactatgggatttgcattcgtgaacaactcaaatatcaaagacataacatctctcaatagcaaaatgggacatttcaacttcttctccgtccatcactttaacattaccggtgtcactataacagctcccggcgatagtcccaacaccgacggtatcaagatgggttcatgtagtaacattaaaatctctgacacaaacatcggtacaggagacgattgtattgcaattctctctggaaccactaacctcaatatctctaacgtcaattgtggtcatggacatgggattagtgttggaagttag

SEQ ID NO: 185417 - DNA, 183 bp, Arabidopsis thaliana landsberg
tatagcgtctcaagaggagtttccgccacaccaaccttctacgtgaatgggttcgagctgcctggtgctggttctcccaaagattatgaaggatggagagacaccatggatcctctggtaaaaccacaagaagtagacatacgagacaccttcctttcattcctcacgcaaccatcttattag

SEQ ID NO: 185418 - DNA, 517 bp, Arabidopsis thaliana landsberg
ggatatgaatcatcggagaggaataagcaacaaatagcaatcgaaaagatatccataccatcgaacatgagtcttgggtgagtacactcttgttctgtagttactgaggtgaagttttttcttctattcttttattgcattggtaataaaatttctgcgtagctaagaagcttctggttttttttgatcatcaggcttgtaaagaactatttgcttcattatgggtatgaagagactcatcatgctttagacttggctactaacagtacacttcctcctatcaatggagctcaagaaaatggtattgatgatacatcatatgcattgcatgagagaaaaattcttagacaggtattgaattagactgctatcttgctcgttactactactacatctctttcgttaagtattgaactgatccatacgtcggttggtaaagcttatacggaagggtgagatcgatgctgctcttgcgaaactccgagatagctatccccaacttgtacaggtggattga

SEQ ID NO: 185419 - DNA, 15 bp, Arabidopsis thaliana landsberg
atgtccgttggacgg

SEQ ID NO: 185420 - DNA, 340 bp, Arabidopsis thaliana landsberg
atgtctgaatgccaagaaaacaccacagatgtattgggaaagtcaagtcctgtatctgtgcttgagcctttctttacagatgatgacactagtccaaacagctccaggttctcttcaggtgtgcctagaaagaatttgcaacaccatttcagcattctagtaaaacttttgttcaaatcttagtctctgaccttcttcattgcctcatatagccgaaatgcggatgcaaccactgtgcataagattcgacgaacctgattttccaggaccggagaaagacaatgatgtcaaaacaagaatggacgacaaggaactggcacttgaatacattcaagccgtg

SEQ ID NO: 185421 - DNA, 51 bp, Arabidopsis thaliana landsberg
atgcgagtactgttccgcccatcggacccacgcgccagtgagctagcgcgg

SEQ ID NO: 185422 - DNA, 145 bp, Arabidopsis thaliana landsberg
gcatttggtaataattttcaaaggccacctccactacaaccaggtcagggtgcatatctcgctgcacaaaccaattacagaggcggataccataataacaacaacaacaactactactcaaactcgggttatggttactactctg

SEQ ID NO: 185423 - DNA, 318 bp, Arabidopsis thaliana landsberg
tacttaaataaaattaatattcttatcgaggttctattgaaagaaacctatctttggtatccagtaactgaaaatggacttcggttttgcttcacgacttttgtccgtgtaaagagttctgctgatgaatcttctgatgaaagcaatgggtcacagtctcttcaatttgatgggaagaagtttttgtttcttcctaagatggtttttgatcagcatgaggagtttctgtatttgaatatggttgaagatattatctctaatggcaatgtgaagaatgataggaccgggcctggtcctttgtcggactttggttgccag

SEQ ID NO: 185424 - DNA, 342 bp, Arabidopsis thaliana landsberg
atgccaccccagcacggccgcgccgaagtgcggcccggcaacggcagcacgctgaattgcgtgcctttcgcgcgcgacaattccagtgtgaagattttcggcgatgcggtgacctgttgggaccaggctggcggccactatgcccgcaccgaggcacccaccctgggctcggtgatggtgctgcacaattatgccggtcccaagcatggccatctggcggtggtgcggacattggtgaacagccgcgagatccgcgtcgatcacgccaactggctgaatgatggcgccgtttatatcaacgatccggttgtcgatgtcagccagggcaatgactggtcacag

SEQ ID NO: 185425 - DNA, 169 bp, Arabidopsis thaliana landsberg
atgccgctgtctttcggcactgtgcccaacgcgcgaagtgaacaagtcaccttcaacatcgtcgatatggtctatccttacaacgccataatggggcgaggatccatcaacaagtttgaggcatcaatacatggactctatctatgcatgaaaataccaggccctcaag

SEQ ID NO: 185426 - DNA, 448 bp, Arabidopsis thaliana landsberg
gaaaaaaaagtaagtaacaaaagggacgagctacgggaacttgttgaacattttaatgtgagttttggccgttcattcaaaattttagaaagtattaagtgatatcagatacttggcatactcagtactgtattcttattatattttacatgtgtagattgatgttgaaaatccgtgtgtggtaatgagtcaagacaaaagcagggagttcttacattctggaaatgacaaagataaattcaaggtatgtcacgtgaactgatatatatatcaaagtcaaccatgttgttattatggctgaaaattttcgctatctagttcttttttaaggcaacccttcttcagcaagtcaatgatcttctccaaagtatctacgaacacttgacaaaagcaactgctatagtcgatgaattggagaacacaattaaaccaatagaaaaggagatca

SEQ ID NO: 185427 - DNA, 208 bp, Arabidopsis thaliana landsberg
ccttccaagccgtcgccgacgccagatcgtgacgacggcggcgaccacacgccgctcccccctgccgcccgatccgcacacgcaaatacacgacatgaaaggtcttccaagcggcctgcaaagacgagcgttcgctctcaggacgtggcggttcggatgccgataacttccggggcggttgcggggatccggaaccgccggccggtcg

SEQ ID NO: 185428 - DNA, 263 bp, Arabidopsis thaliana landsberg
gatatgacacaagctactcctactcaagaacttgtgactagagatcttcatggctttgaatggaggtttaagcatatattcagaggtattgattctaatcttggtgtgtttttgtgaaactgtgtttggactaaatgagacattgactcattgagtgccgtttttggtttaggacaaccacggaggcatttgcttactacgggttggagtacatttgtatcctcgaaaagacttgtagctggagatgcttttgtgttcttgag

SEQ ID NO: 185429 - DNA, 285 bp, Arabidopsis thaliana landsberg
gcacaggaggatgccgacaagctgtttgcccggaggaattttgacgaggcctataacgcttacagccagtacccggttgaaaaattaactgaacagcaattgtataacctggctgtttcggtgctcaatggctccaatcccgataagtccgaggctgttaaactgctggaacagtacctgcagaagcatcccgatgaaggcaatgctgtttacctgtacggacgcgcattggcttattgcctgcggcttgacgaagccgaaaaacagttcacgcgttgcctctag

SEQ ID NO: 185430 - DNA, 1841 bp, Arabidopsis thaliana landsberg
atggaattgattcaaggggatatccttttcattcagaccgagaaaactaggacggagctggaatcagacatcaaagagtatgaaagcaacttactccttctggatcaaactcacgatgaggacttctccgtagaacaagaaaggtccgaactggaggctgctttaaaggaaaagcgaactcgcttagctgcccttccaacttcatccttcaatccccagcactttgaagagttctttaccgaatctcctcctttgagtgaatcaggcttagattgggatgttaagcttttatatcttaaaccttattacctattattattgtaatcacgtttgctaatttgcaaaactcgcttcaggttctagggaacccacagaacccgaggtgtaccccacaccgataaaaccaaccgagctagtcaccactctacctgaggtcccgtcgtctataaacaatgagacggtggtcattccggatgacaagaatgaatatggtcccgagccgggggtctccaccgagcaacctattgctgattaaacaatcgagccggagcatgcttccatcgaccatcaatcctgagctagttcacgttgggtccgagttgactgaagactcatagtggctgtatccacttaatgtgggttgtcccaaaaactttgaagttattttttgaactaatttgtttatcgctattcataggaggcttcttattttcgaacaagtatttgcctgaagaggcttttaaacctttatgactatgatcccgaggggattattttatatagaaagcggatttacaaagtccgttcttttaagtatattatggccatgtggctaagtttcaagatatttgggttgatcagacctttctcttaaaacgcgagaaccgagctcgcttttagatgcgaatttcccaactcgggtttaatcaatttggctctttactgggcttgggcctcaactattcttctttgtatttaatgagacttttgtctttaatgcgaccgttgccatttcctttctcgaaaaacaggagaaagcttcacgcttctaaggcaataattgccttttcctcgatcccaaaaatggataaactcattcggatacgccacaattattaactttgtggtttcgagtaaaaccctaaatcactataaataagggcataaactttcttaactctcgaaagacatgttcgcagaaatttacttgaacaacacctatagaatggaacgcgaaggagcaaccaccgtctgcccccatgaccccgggagtcccttgtttttgcccggcgatggcttcgagcccgccggtgtcctctttccacacgcttgtttccactttccttcgaaggaaaacaagcaggcatacgactttatggacaaggtaaagcctctcttgttctctttttcggaacgagttctacttgttttctaaccagttcgtactttaggtcgtcgataagcatcgccgcctgtgcgatgaaagacagcgtttaggcctcaagaggcaaacgctcaaggcccaaattgctcgcatcgagaggaagataagggccatggagagcgacccttttcagtgggagtggaggaacttcgactgcgtggcgaagatcccgcacatgctccggatgtacctccgtgctcgaggccaagtctccggtcctgtaaacgttccggttcaagtgatcccgtctgacagtgaggacggtgacgacgaggaggaggacagtaacccctggaagcgcgtgaagaatgaacccgacgtggacgtcaaaaacgaggcgtccacttcgaaccccgaaccggcgatgaaggagcctgttcctgagccccttccctaa

SEQ ID NO: 185431 - DNA, 94 bp, Arabidopsis thaliana landsberg
gggacgagatctagattccagcaaagaggaggaagacgaccctattgccaggtcgcggaccgtccggcccagagctgcggaccgtccggcgtga

SEQ ID NO: 185432 - DNA, 102 bp, Arabidopsis thaliana landsberg
gttagtgtccgtttacatgaaggacaccaaacatcacgatggggttcgtttggatacccggttatatttatctttaaccgggatactaatatacgtgattga

SEQ ID NO: 185433 - DNA, 217 bp, Arabidopsis thaliana landsberg
atgaagagcagagtcattcttaaccatagagacagaagagataagaatcataacaacaacaacaccaatcattacacacaggttgatactatggagagaaagcctcttgaggttgagccatctactacgacgactaacaccgatgtggtcgattctttcgaggaagagcagagaaaaatcgtttatagaggatggaaagtcatgccttttatcattg

SEQ ID NO: 185434 - DNA, 167 bp, Arabidopsis thaliana landsberg
atgggtcaagattggattactcgagaaactgaggaaaaagaagaatacgtaaggagttgaaacggaacgtggactatgtcagcccgaagaacacgtttaatgactatggccccatgcaggaccattcccccctttctttttaggtgttagatccatatttgttttga

SEQ ID NO: 185435 - DNA, 159 bp, Arabidopsis thaliana landsberg
ataccaaaagacaaagaagaacttgaagccttacaggcaagaataagaaaacgtttcccagtggatgcatacaacaaagcacgtagggagctggacccaaatagaatcctctccaacaacatggtggaaaagctcttcccagtctccaccactgcttaa

SEQ ID NO: 185436 - DNA, 177 bp, Arabidopsis thaliana landsberg
atgatcgggggggggactaataagagtgcagcctacaacaaatcggttcaccgtctcctgctggctggggctcttgcaaaggagcgtgatgagatcactcatttgaagcggacgctttcagtgcacataggaatcttccagggctcaaaccctctggccgttatgataacagctgag

SEQ ID NO: 185437 - DNA, 117 bp, Arabidopsis thaliana landsberg
acatttcatcgaacagttggtgtacaatattcaaccccaaaagatttggatcaaacagagaagcgacgattatattcaccagattggcgccataaccgaagtagcgcgcgcatttaa

SEQ ID NO: 185438 - DNA, 459 bp, Arabidopsis thaliana landsberg
  unsure (1)..(459): unsure at all n locations
atgcgcaaatccttcngngggctgagcgctctggtccgcaatcaactcaagcaagatccgctcagcgggcagtattttgtcttcgttaaccgtcgcaagacccaaatgaagatgttgtatttcacgcccacgggctactgcctgtgggccaagcgactggagcaggggcagttccgggtacggccgtcttcttcgggacagcgccccttaaacctgactgatctccagttgctgattgacggtatcgaggtgcaaaagtaccgtcagttcaagcgttttcggggcacgtagcgggttgtgttccggtataatatcggccatgaattcaatggcttccgcgtcctattccaacgccccttcctactcggtactggccgaggagaatgccctgttgcgtgagcagctacaggtcatgcagcggcagctggactggttcaagaagcagctgttcggcacaaa

SEQ ID NO: 185439 - DNA, 96 bp, Arabidopsis thaliana landsberg
gtacttcaggcgtcgattgagtcgtatgtttgctttaagctcgctgttgaggaacgtctctggaacttaaaagttgctgctaatcttgtgatttga

SEQ ID NO: 185440 - DNA, 439 bp, Arabidopsis thaliana landsberg
atatgcagcggcttggttactttggcggcggagtcctcgtgtcccggggatggaggaagtccccgagccggaagcgagttggttgtgttcgaggcgttctttgtcgctggtctctgcctgcctgcgcaccgatttgttggagaagtcctgcgcagatttaacattcagatccatcagctgactccgaatgtcgtggtggctctgtcgaagtatgtctgggcgacgacttcgtacggcggacggccatcagtcgaagtcttcacgaagtactattgcctgcactggcagaagaggatgattggagatgatgttgcccagtttgggtcctgtacatttacgccgaagaccggcaagaccacgatggaggtagttgagttggttccttgcgcccgcaacaagtggggcaattggcatgagttttggttctacgtcgcggagg

SEQ ID NO: 185441 - DNA, 217 bp, Arabidopsis thaliana landsberg
atggttataaaggatgatgtaagcgagctgtttcatacttggccagataaaataaaagacccaacacttgatcacttggtcgaatacagacatgggaataagtttgttaaaggttattgggatgtgaagaggaatgagaagaaaaagaagaaaaacgtaaaagataatgcagcggctatgtctgaatctcctacaaagaagcagaaagtctctcacg

SEQ ID NO: 185442 - DNA, 162 bp, Arabidopsis thaliana landsberg
atggcgtcgatgatcagttcctctgatcaccgtctttcgacaagcaagagacgtttgaagccattgctgttaagagattacttactcgatgatctcagttcttgttcatccaacggtttcaaatcattcccacgtcgtcaaactccttctgcatcttccacc

SEQ ID NO: 185443 - DNA, 105 bp, Arabidopsis thaliana landsberg
ggagtgcacattcttgtgatcaactgtgtaatcatgaagctgatagattcttcaacagattctaagttccttcccatcgatattaacttcttcagtgaagcttga

SEQ ID NO: 185444 - DNA, 1474 bp, Arabidopsis thaliana landsberg
ctacggattcactcgtcggatgatttgaaagtttctgaatcaaacagagtattctcaatgcagagaaccatctcacttgcggctgctaagtcttcttcttcgacttcagttctgtctcttcatcctctcatggctaaggtttgtgtttcgactcttacgctggtgagatactgaaatgttagattctcaatttaaaaagtttggtattttatggctaaatcattatactctcgtcgttttcgtattgaaatggagtcgaatttgtttcagtgagcttcaatttttcgtttatgttatttagatgtgtttgaaaattcatcagtagaactcatggagattctgacgattacttgtttctttgttgttgcagttgcagtgcagggcgattcaaaatttcccagcttcctcttcctcttcagtagttcgggtcgatagagtgtatagaaatgtatcccagcttcagtttaaaagagaaaattcaagttgtcttaagttagcttgtgcacttccttcgcatctaagtcttctcggttctcttagttatgcaacacattggagcagctccacttcaagggcctttggatatagtttcagaccgtttgcgaggagatatttttctcaagtcgctagtactgagattaaggatagcattgttggtggtgttgaaaagtttggtgggaataaaataggtttcaagaaattcaataagaagtggaagaagcatagggttttggcttccacaaaagctgaagtggtggcttctactgaaccagttattggagatgttaacagtggcatcaaggcgaaactatcaactgcagcttcacctgctagcaatgctaagcaagcctctactgtcaaaacaaaacggcagccaaagagcaagaaattcgaagataaatcttctccaacggtatcggttttggagaccgtctctgtagacgagagtttgcaaagctttcccaagcctagacattcgggttccggaaatcggaagtcttcatctgctgaggtattaaactagtaaagttttttgaatcatcgtcttacccttgctcatatcttctaacagtacagttctcagaaggaggtggtaaaaaaaaccaatgtggaggggcccaaaagttctactccatcgaattccatgtcagaacaacagcattggacctcaacaaaagcaagcaatgcaccaaaacaggagcaggataacattgttggtggtgatgagaaggctggtgggaataaagtaggtttcaagaaatttaacaagaaccgaaagaagcataatgtgttggcttcctcagaagctgaagtggtgacttctactgaaccagttattggagatggtagcagtggcatcaaggcggaactatcaacggcagcctcacctgctagcaatggtaatcaagccactactgtcaaatcaaaacggcgccccaagaacaagaaagtcgaagataaatcttcttcagtg

SEQ ID NO: 185445 - DNA, 291 bp, Arabidopsis thaliana landsberg
aggtggggccgggtggactggtcccaatactgcgaccgcgcgccgacggaatacgagcttcgtagttggacgcgctggccggacgctggcctgtgtgtggcgctcgggatcaacaacgtcatcgcgatcgacgtggacactgatgacgacgcgatgatttcggcgctcgctgccgtcatcccgcacagtacggtccataagcgcggcgaaaagggcttcacggtgttttaccgcggcagtcgtgccatcatcccgcgccacttcgacatcaacgagtctcagcgtcgttga

SEQ ID NO: 185446 - DNA, 535 bp, Arabidopsis thaliana landsberg
caaggtcaacagccagaagggagtcaatacgctccacagcagagggacttcagagaacagtccgaagctcgcacagtcaacagcactgtgccagagtcgaagcacatttattgacatatcctacctttgaagtatttatacgttctatgtcgttttgttttccaataaggaacaagtaatgtcaatttagttttatttccttgtaatagtttcacttctattaaaatgaaatatatcttcttcacagacttatgaagcttaaaaattgccgaagctcaaaaagtcattccaaagggaatgctgagctagaaaactaccgaagctacaaaaagacgttcctaagggagcgcagtgtaagttgtgacgaagctacaaaaaagtcgttcctaagggagcgcagtgtaagttttctgctcaaaagtcgttccaaagggaatgcagagccaaataccgccgaaatataaggcgaagcgcgaaaagtcaacgagaatactgccgaaatagaaggcgaagaagttcaaaagacgttccttag

SEQ ID NO: 185447 - DNA, 70 bp, Arabidopsis thaliana landsberg
atgactgtgcgtaaagtattgcaagacatcaatatccgggggtcacactcatcatcggttatggaggggg

SEQ ID NO: 185448 - DNA, 1102 bp, Arabidopsis thaliana landsberg
aaacatatccaaaaacctcaagaaatctccttccatggcggaatcaagctctcctctccctcctctttgtgaaaggatctcacacaaaagctatttcttaagagctgtggatctcactattctaggtcttctcctttctcttctattgtaccgtatcctacatgtgaaccaaaaggacaccgtttggatcgtggctttcctctgtgaaacttgtttcaccttcgtatggttgcttattaccaacataaaatggagtcctgctgattataaaacatatcctgaaagacttgatgaaaggtaccattttcctatatatacacaaaaagcaatattcttatcaaacttgtatcaagtcctaatatatcatttcattttagttgagtagaaaacattcgaaactaaaaatttgaaatgacatagcaacttttcatttcagggttcatgaacttccaccggtagatatgttcgtgaccacagctgatccagtaagggagccaccgcttatcgttgtaaacacagtgctttcactgttagctgtgaattatccggcgaacaaactagcttgttatgtgtcggacgatggatgttcacctctcacttacttctctctcaaggaagcttctaagtttgccaagatttgggttcctttctgcaagaaatacaacgttagagttagagctccttttatgtacttcagaaactctccggaagcagcagaaggttctgaattcagtaaagactgggaaatgactaaggtaaagggtttgtttgtcttttacaaattcttcaaacaatgtttatctataatttttttgaaaattgttgtgattgataaaaatataaacaagttcttcagccaattaacacaatgacatttgaattttaaaaaaactgaaaaaaatcaagattcattcatttcttttcgtaataattattgggaattttcttgaaattgtgtttttgtattaatataaagagggagtacgagaagttaagccagaaagtagaagatgccactggaagttcccactggttggatgcagaagatgactttgaagctttcttaaacacaaaatcaaatgatcattcaactatagttaag

SEQ ID NO: 185449 - DNA, 1203 bp, Arabidopsis thaliana landsberg
ttgtgtttagtttatcgaatgaaagcgaagggcaaagtctggattttttaaaaaagaatatccggagtaaagttcggggaattgaacccgacgtgaatcgaacacgcaaccttctgatctggagtcagacgcgctaccattgcgccacggatcctcaggtgattacatctatacgtttacttatttatactaacaattagtgaatgataaaaaattaaaacccccttccgattctaatttcctggcggagcaaatttagggtttatcatttgcatcggtctcgcgtctcgtttcccacagacacatctctcgaatcttttgaaggccttcattgcaatagattgctcgtaagggataggtaggcctttgtgttctgccgcttaatttcttcgccggattctgtttgattcattttaaggtgagtgaccccatcgcttttagattacagataagtatgtgtttatggtttgaatgatgcttattgtcttgtttttagcttaggttttaccttcagccattactttagtattaatacgcttcggttctacttgttttaagcagttaaattctttaatctctgaatctttgaaacttgcctcctctcttagcaattaggatggaggaattaacccaaatcttgaagaacaatagtacagatgatctcacttggttttgctctctctctgaatctgaactggtaaattctgcttcttccgtcagtcaagcaaacattaatcgatcgatgaattaccgagatatccgctgaacttgttttgcaggatttgctcatcagcttaaagaagctagccattcaacgcgccaaaataagtggtcaccaagaactagctgacaaatttgatcttaagttgctccgatctctcggttctcttcttgcttccttagacttttcaaaatgttgcacaatcatgaaaattcttctatgattagacatcagggttgctttgtgaagctttccatctttgaccttatgaatccagtatgttattctgcagggcttgtgctaatggagcacgcgaggaaaagggtacaaaatgatacttctcttgctccgagtgttgttcatcaactcaggcttttggataactgcaatttgttgaaaacgcatgtagatgatgctgtagacattgaggagattctgactcaaatctgcgacaacaaatcaaaaaagaaagcacggaaaag

SEQ ID NO: 185450 - DNA, 443 bp, Arabidopsis thaliana landsberg
atggctatgtatccatctcagagtgatttggatgtgtctattaactttggttatggatcatctgagattcctcgtgaaaagaagctcgagatacttaaaagatttgctaagaagctccgttctctgcagggtaagatatttgttccattcttgttgctgttaaggtgtatgccaattccattattgttttccatatataccaaaaaccccaacagtctctttttagtatatcggtgacacgtgaatacgacattcttaaactgatgagtttcatatatacttattttgtaggagaagggcaggttaagaatgttgaatctatcttctctgctaaagttccaattgtcaaattctttgatcaagggactggtgtagagtgtgatttgtcagtcgaaaataaagatggcattttaaattcacagatcgttcgcatcatatcttaa

SEQ ID NO: 185451 - DNA, 1201 bp, Arabidopsis thaliana landsberg
gttcattctcatgtggatgtgttcaatttcacagacaataagtggtgtgacagattccacactcctaaagaaatggcgaattcgcacctcgggattgtgacggatggacggtatgtatatgtggtttcagggcagcttggtccacaatgtagaggacctacttctcgttcctttgttttagactcattcacaaagacttggctcgaatttccttcactaccagctccaaggtaaagactttaagtcagaagatatatcatgttaaagtatagtggactgcgattgccgagctctgttttgttggactcaggtatgctcctgcgactcagatatggagagggaggcttcatgtgatgggtggaagcaaagagaatcgcaatgccgttgcttttgaccattggagcatagctgtaaaaaatggcaaagcactcgacgaatggcgggaagaggtccctattcctcgaggtgggccacacaggttttatatagtcttgaatcaatgcctgttttgccgtttgttttagtacccatagggtgcaaccatcgcggttttacggtgtgtagggcttgcgtagttgctatcgatatactacttgtaatcggtggccgagaaggtgacttcatggccaacccttactcagccatcttcaagtgctcacgtagacgcaaggtttaccatcctccttagtcaatactgaaaagatcaaaaaaacgcctctagcttataatgtttggtcgcatttcagatctttaatggtgaggtgtacatcatggacgaggagatgaagtggacaatgttgccaccaatgccaaaaaacaattcccacattgaatctgcgtggatcattgtcaataactccattgtcatcgttggtggtaccgcagattggcatccactgtcgcaaaggcttgttcttgttggagagatattccggtttcagttagatccgttggtcagtatcactatgatatcagcatcatctcaatcatagatatgctcctctgattcttaaactgaatatgaaatattttgcagacttggtctgtgattggacggttaccataccgtgtcaaaacagcgatggccggattctggaacggttatttgtacttcacgtcgggacagagggatagaggaccagataatccacagcctgggaaagttattggagaaatgtggagaaccaagttgaagttttga

SEQ ID NO: 185452 - DNA, 557 bp, Arabidopsis thaliana landsberg
ttcagaaacatcctgaagtcgagaagagaatcctaagagaaatcagagagattaaaaggaaacttacaacacaagaaactgaagatcagtttgaggctgaagatttcagggaaatggtgtatctgcaagctgctttaacagagtcactgaggctatacccttccgtgccaatggagatgaaacaagctttagaagacgatgtgttacccgatgggacaagggtgaagaaaggcgctaggattcactactcagtctactctatggggagaatagaatcaatttggggaaaagactgggaagagttcaaaccagagagatggatcaaagaaggaagaattgtgagcgaagatcagttcaagtatgtagtgttcaacggaggtccaaggctgtgtgttgggaagaagtttgcgtatacacaaatgaaaatggtggctgcagcgatcttgatgaggtattcagtaaaagtcgtccaaggacaagagattgttcccaaactcaccaccacattgtacatgaagaacggtatgaatgttatgctccagcctcgtgactggtaa

SEQ ID NO: 185453 - DNA, 294 bp, Arabidopsis thaliana landsberg
atgggggtggctcaagcaatggaagccctaaccgagcgagcaagtttgatgaaagagtctttgcataagagccagaccatcaccgataacatggtcggaatcttaggttctttcgatcatcgtctctcggctcttgaaaccgcaatgcgtcccacacaggtcctttcttcatgatctctctgttttttggatttttagagtctcaaggttgtggaatttgagatctatcttctgttgaaattgaaatgtgattctggatttggtgataaaatggttggcttcttcgacgtttaa

SEQ ID NO: 185454 - DNA, 1952 bp, Arabidopsis thaliana landsberg
atgcaagagaccgagaccgagaccactcaggaagaagaagatgatgcggttgttgtagattcgacaccgaatctgcgttctgagagttttacagctccgaagattgaggttacgggttcgggtttgagtgagggttacgatgctaggttgagtttgaagggaagaaatggtagtggggttttggtgttggagcttagctcggaggttttggctgcgaattctgatgtgttctcgggtttgattgcggaggagaagaagtgttcttcttcttcatcgtctataggattgaagaacacatgcaggattgaagtatgtgatgtggagaatcttggtgtttttagggaaactgttgagctcatgtttgaggaaagtaatgttattatcaagaagtttatgaaaatgggtgtctacagagccattgatgtacttgaggtttggaaagtttcttccttggtactgaattgagatggatattgatttccttgatgtgtttgttgttattaccatatatgttttagttactatagtcgatcttagtgacttaagactttgcctttttacctattaggctaaacccttgaggcttagattgttctttaaagcatagatatggaaagacctacaatttgataggatgtattagattacactgttgacataactaatttgattttttcgtctatgaggtattgtgaaataggcgcttattctctagcttttggctagtgactagtctgtggtttatgattctaactccaccctgccatttcagtgaactattattgatcttgtggaggcctcaagaaatgtttgtgaatgctgctacagctaatttttttctacgaagatactttttgcatgtgtttgttgacatatctggtttttattcatgtagtatttgttgtcgttaagtatgaacattgttgtgtggaactttgatattttttctgctctacgtgttagattgtttctcattgtttaccttaaacaaatctaacagattggtggagctaacacatcttcttaaccataaacaggtggcggctggaatcaaattttcaagagccgtcttgtcgtgtctgaaatatcttgaagctgttccttggactgaggatgaagaggaaaaactgaggagacttcttggaatttatagctttgatgatgctgcagttagtgaaattttggcaagatttaattcaaacgagacagaaaactcgcaagacagcttatcgaagaaactggtttggtcaataacttcctgcagtgatgtaaatcctagaaacgagctcaaatctttggtgaagggtcttctttgcaaaagctcagtgtacgagaaagaacagcctgagatcaacaaggaagacatatatagagcaggcaagtgttgtgtggattcattagctaagctgtttgaagagggtagtagtagtactagtagcaagaaagaaaagccattgattgaaagtatttcgagggaggttgagaacataaactggctgctggagatcatgatagatcgggaaatagcagaggaatttgtggagatatgggggaagcaaaaaaggctagtggagatgcatgagagagtgtcaccaatggtgaggtatgaagtaagcagagtaacaggagcgatatttattgcaatggggaaaaggagagtgcaatgcggaggagaagcaagggcggggctagtagaagcgtggttcaagccaatgttagtagattttgggtggctacagagatgcaagaaaggactagacatgagggaagtagaagaagggatggggcaaacgctgttaacgctaccagtaaaacagcagtatcaagtgttcatggaatggttcaggtggttctcaaaacatgggactgagtgccctaatctcagcaaggcgtttcagatatggtggcgtaggtcattccttagaggtgtagaatcatctacttgtaggtaa

SEQ ID NO: 185455 - DNA, 758 bp, Arabidopsis thaliana landsberg
atggatcagaccactgttgaagatcttgctgagctctcagagttagagaatcataacattggccaggtttgtgcgtgtttagttatctatgcaggaaacatatttttgtctactctttcactgttatgaaccatgtgaagcaccttcttatatgagagattataggcgtattttttctcactccgtgtaatggatgcagattcgtcgttcgcgttctgtctcaaacattgataatactccagaatctttcttggcctttgtcggaaatgagagcgtacatggattgtatgatcttctgttaaattataggtgcgtttgaacatcttttagaaacaaaaaaaaaattcatattgtgcacatgtaaatcttgttaatgaactttgattatgattggaagtttgtaaccattgtttctcaatcatgtgtaggtcttcttttgaatttcttcctaccgcagatgttcctgtattatattcaccagtgccatttcagaatgctgcactgtcttctcccgaggtagattcacacattcgatgctttgctctgtatcctgtggttctcttgctgtgacatccttagtctatgataacacttcgaggttattttttcttcgatctccagatcaaatgctctgagatggtaaaaacagaacatacaagttgctacatggttgagattaaaggtgaatatattccgccgtggattattagcaatatatgtgcaaatgtgggtgctaatggacaaaactttgaagccag

SEQ ID NO: 185456 - DNA, 65 bp, Arabidopsis thaliana landsberg
atggggcaagtcgaggtccgagaaagacgtgtgttccgggaggacgaagagcttgcatgtctttc

SEQ ID NO: 185457 - DNA, 1084 bp, Arabidopsis thaliana landsberg
gctgagttcaaaagattaaggaatgtgaaagagctaagtttgaagtcagtgtcaaagatagagactgcttatgaggagcatagagatgaagagaagttagagaagcaattacaagcttggagagataatccctcatggatagatcagcctcctaaagtggtggtaagattagaaccaaaaataaatttaaacttagatttggtagaatttagaaaaaaaatatgattcttcaaattttcttgtttgcaggtgaaatcacaaaatggtttgttttgccatttaaacattgaagcagacgtaggattgcctcctgaattagtatacaacattttcactcatccagacaacaaaagatacttcaaaaacatcaaggtgcttgtgcatggtcttgttttgtttgatttgaattgagtattacagcaaatatttgagatataggtcttaatcctaaataggaaaacatatcaagaaaagttttgatcgacgaagggccaaagcagaccgtggaagtgaagcaagccgcggcctggaagttcctttggtgggatggaacttgtcctatacatctcattgtcgaagaaaaccggaaaaatctcactgtaagatatattttctaccgcaagaatcaatccttttactctatcttcacaaactcaaattgtttttttatcttgaggccagtcaaaatataagcaagagacaacaatgttcatgaaagtgtttgagggttgttggaaagtggaaccattatttatagacgagcatttgtgtgaccgctcaaagccaaaatctcaaaaagattaccatagctgtagcaacggacgaggaaggatcggatcaaaggtgacaatggatcaaatgtttcagccttcagctcttctcactcctccgccactttcttggtacatacgtgggatcaccattaaaacaacagagagtatgatcgaagatcttttcgctgaagctactagacttcggggaggaaaaggaggaggctatatggatgatcaaggagaaaacaacgtcgtaaccgagaagagcaaagctgatgacattaaggaaagatggagatcgcataggagaa

SEQ ID NO: 185458 - DNA, 90 bp, Arabidopsis thaliana landsberg
aaaacagccacaaaaagggttaaacggaaaagtcgaatgcttcaccggagagaagatccggacctgctgatggacggaggcaaagaatga

SEQ ID NO: 185459 - DNA, 736 bp, Arabidopsis thaliana landsberg
aacattctacttcatcgtcgccgttataccttactggttacggtttcttcagtgcatccgaagaatggtggaagacagagatctgagtcatggctacaatggcatcaaataccttttgaccatcgttgctgcttctcttagaacagcttatactctaaaccgaggaagcaactggaatatcacagcttgggttttctcaggagttgcaacgttttacggaacttactgggacattgttcttgactggggattgcttcaaagaggatgtaagaatagtttcttgagagacaagcttcttgttcctcacaaaaccgtgtactacgctgcaatggtgagagcaaacagaaaacagcaataacctctgtttttgttttttctttatacatatatggtgaagattgttgcttcatgtacttggcaggtcctgaatgttttgttgaggttagtgtggttgcaaacagttttggatctgaaattctctttcttgcatagagaaactatggtcgcgcttatggcttgccttgagatcatacgcagaggtatctggaacttctttaggtaagctccgagactgagaagatggtgttttcatgcatgaatctacacaaaactaatgaaatgtaattgttgattaggttggagaatgagcatttgaacaacgtggggaaatacagagccttcaagtctgtacctttgccttttcaagaacttggaggaagtaagagcgtgtaaataa

SEQ ID NO: 185460 - DNA, 696 bp, Arabidopsis thaliana landsberg
atgatccaaacaggtgaagaagatgaagaaaaggcaacgtcccttgaagttgagtttgcttctggaaatggtgttgatgatgaggaagagcttcggttgcagtgggcaacagttgagagattaccaacttttaaaagggttactactgctttgttggcaagagatgaagtgtcagggaaagggcgagtcattgatgttactagacttgagggtgctgagagacgcttgttgattgaaatgctcgttaaacaaatcgaggatgataatctccgtttactcagaaaaataaggaagagaattgacaagtaagtcactgcacgactctactgtgtttttttatgtcaagtagagcaacatttgttttgtaaattgtatgtgcatgttagcaactattgaaccttcatgtaattgtagagttggtatagagttgccaacggtggaagtgaggttcaataacctttctgttgaggcggaatgccaagtaattcatggaaagcctatcccaactctttggaatactatcaagggcttactatctgtaagtactcaaatttatttgctgcatcgatctgaatatggagcgcttttctgctctcaatgttctttattcatgtttttctgctttccatgttacaggagttcatttgttctaagaaagaaaccaagataggcatcttgaaaggagtgagtggaatc

SEQ ID NO: 185461 - DNA, 74 bp, Arabidopsis thaliana landsberg
atgccgatcaggacgcggtggcggaggattgacagctgcggcctgctcgacgtcactgtcacctgcggcgccgg

SEQ ID NO: 185462 - DNA, 60 bp, Arabidopsis thaliana landsberg
atggttaaaaaagcgaaatggctgaaaaacgttaaaaaggcttttagcccagattcaaag

SEQ ID NO: 185463 - DNA, 315 bp, Arabidopsis thaliana landsberg
atgaacgaacccatttggatcggccatatcacaaacataatcacaaaaacaacaacaagaaggaaaaaaaacgataagagagtttggttcctgatcaaagaaatgtgagatcttttcttccgatttgcagtaaagaagattacttgcaagaggaagcaaagaaaagatcaatgggtttcgatttatgcccgcaacggaacaagaacagcattgtaactcgctgctctgatctctcaaaggcacttggattctacccttatcgcggggatgtttatttataagcagcatgaggaagaagaaaaccttcagtattga

SEQ ID NO: 185464 - DNA, 224 bp, Arabidopsis thaliana landsberg
tcgtgccatgccacatataaagacgttcacacgttacaacgaccagaagattgcgtaaagttcatcaagtctcaatctgtagttgctctgttagtaccttttgtgattaatgttcttgttttgcttccacagatggttcttactaacctcatcgaatcttagcaagccggcctgggggagcacttcagaagaacaattcacagttgatgattcgttcctacgag

SEQ ID NO: 185465 - DNA, 366 bp, Arabidopsis thaliana landsberg
ggtgaaaatggaaatggatgttataatacggcatgtccagggtttgttcaagtatcacaggaggttcccatagcccagcccttggaccagccaaaggaagatttgttgcattactccatccatcaggtaatttttcaagatttaaatattttatgtttttcatttttaaatattttatgctatttcattcttcaatttttaattttttttattatgattattttcttatacacaaaaaggataaacaaacaggaaactggtggattacaaaactgataccaaatgcacctaacatagatgtcggatattggccaaaagaattatttaacctaataggtaatggtgcaaatatggttggagttggag

SEQ ID NO: 185466 - DNA, 220 bp, Arabidopsis thaliana landsberg
caccggatgcatccaaggacgatcgtagccgtcaatcacgctctagccgcacggtcatggttcatcaaccagggtttaaggcctgtctcttgagaaatcaaggaaacagaggtacgagcctatagaacagatcctgttcaagtaaggtcgtgacccttgatgctttctatgcatatataaagaaaacgtttcttcactagctcaccgatgtgggacgtaa

SEQ ID NO: 185467 - DNA, 220 bp, Arabidopsis thaliana landsberg
atgagccggttccgacgccatgggtcgcctcagttccacgcgctaatgttcatgaattactccggcgacctctcgatgatcgacctttggtacgactggaccaacggtcgtaatttcaatatcatccaggagcagctcggtggtattacctacgaccttgaatggaataatggtacatccttcttctacacgctcgacgagtcaaaatcgtgccgctccg

SEQ ID NO: 185468 - DNA, 282 bp, Arabidopsis thaliana landsberg
catctgtcatatcatcgcacaaacgactaagtatctcaattttcagattcacgggttgtctgaaataatcgtttctgaaaaagttcagccgagtaagatccaatccagggttgtctttggacccagaacatagtaggtattcaaccacaaaaaggggatatgtaaccacatccaacgtatcccaatcaagactcctgcattcaagataccaccagcaaagcatcagaaccaaaacaggagaagctttatatccataaaacagcagtaaaactaaagtactaa

SEQ ID NO: 185469 - DNA, 322 bp, Arabidopsis thaliana landsberg
gagacaaatatgagaatggagtgatcacacctgggcctgttcctgtccctactaaagaggggtttgattctttaaagaaggagagtaagccggagccaagaggaagctgaaataattctaacgcctccagatgagggtaaaacctcaggacaagtgcaaggtcaaggaagtctaacgcttccagatcagaggagtgtcaaggaaagacaaggagctcgtgctctagtacaaggccaaggtcaaagaagtggaatgtctatccttggacaagggcaaggtgaaggaaggcgaatgtctattcctggacaatggcaaagtcgag

SEQ ID NO: 185470 - DNA, 171 bp, Arabidopsis thaliana landsberg
gccaagaagaaactccgtcaacaagacaacgacctcggttcagagaataattcatgctcttcacaagagacgcatggatcacttaaccaactgtctacagaggaaaccacttcttcagagtttcacaatcaaggttattactacagttctcaacgctcagtatattcttaa

SEQ ID NO: 185471 - DNA, 65 bp, Arabidopsis thaliana landsberg
atgcccagttccagacccccgaccatggtccggggtgcctcggatgaggtccgatgccggaacag

SEQ ID NO: 185472 - DNA, 136 bp, Arabidopsis thaliana landsberg
atggatgtgatagcagaatctacaaaagctgttgtgaaggcgttaatatcaagtacatgtggaacgggatacaagagatgcaaacgctcgcctacattatacagtccaagccctctgccatttgatgcaggcatag

SEQ ID NO: 185473 - DNA, 356 bp, Arabidopsis thaliana landsberg
atgacgcggacgagcgacgaactgtcgccgaaaaggcgccggcaaggtctttctgctggacgggcccggaagcgcgggagatgtgcagaagcggcagccagctcgcctcggtgaggccgaagggctcaagcctggtgtcgaccgcgcgccgccacagcctgagggcttgagaaaccagcgagccgaacaggttcctgagatcgtcgaggggaggagagtccatttgcatctgcatggcatacaaatgattaggatacaaactaaggggcgcttggcagccatgcgcctttggactggcgctcctcaaaagcttccggagccgcgccgaggaagaaatgcggccgcgtaagaaaaag

SEQ ID NO: 185474 - DNA, 423 bp, Arabidopsis thaliana landsberg
atgggcatatcaaaacgcatagaagagaaagaaattgagcgtgattcatttgaattcgaaatttccactgtggatgttaaacaaactgatgaaagagagaaacaagtggtattgctttcgtccctttatttacttacatgattttggtcttgatgacttttcccttgctatatgtgccttactttttcatcatctgcgtttgcacagcaagttgagcttgagagaaagacaaaacagaattctgaaaggggatttgaatccaaaatagaacagaaacagcatgaaatatacagcttggagcataaaatcaagactctgcatcgagaaagagacgttatggctggtgatgctgaggatagagtgaaattgtctttaaagaagacggaacaggagaatcttaagaagaaacacaaaaagatgtga

SEQ ID NO: 185475 - DNA, 355 bp, Arabidopsis thaliana landsberg
attgctcaaaggaatagcttagacgtggatgttgacttagcccttggttttgcctcgcattatagtaaaatcgaaacgatggattgccttgtagaagaaggtcatgcaattgctttcttgggtcccttgatgagagcagcggagagaggttgcatgcaagttgttcaatggtttgtgaaacgaggctgtcgtgaaatggagctatgcttagctctcacagccgccacttcaagcagccaggttgaggttgctgcttatctccttcctcatgttccaagacccgtccttactgctctcagcattgaaatcctcaaagcagccggtgaaagaagtggtggttcccttcacggagtag

SEQ ID NO: 185476 - DNA, 157 bp, Arabidopsis thaliana landsberg
atgatcgtgttcatgagaataattcatgttgcgcagactcgcagattgatgatccgatgcaatcgcattcgacaatgtgggttttctgtgaaaactgcggcattggatttagaatcgtcggattcgataatcccaggcttagactctcatgcttacg

SEQ ID NO: 185477 - DNA, 222 bp, Arabidopsis thaliana landsberg
atggtggaaagagcttgacttggaatcaaagatccctaattactacagagttagagccgtggagtgcctctactgggcaatggcagtgtatatggagccacaatattcagttgctagaataatactgagcaagtccttggtgttgtggaccattatagatgacctatatgatgcctattgtactcttccagaagctattgctttcactgaaaatatggaaag

SEQ ID NO: 185478 - DNA, 123 bp, Arabidopsis thaliana landsberg
gaactattaggagcgtctatgagtacatgcatgctacactattctacatacaaagacatcttcccaccatgggcacttgcagagtaccggaaagctgcgttcatacatcacgcagatctatag

SEQ ID NO: 185479 - DNA, 226 bp, Arabidopsis thaliana landsberg
atgattgaagatgtctttatatgtgcatcacaacgcaatgatcaagaggtgattactcttgtctagtagcccttttctacatgaaagtgtttgcctctaaaaccatatatgtatattgcttggtcattgcagtggagttcagatgtcgatgagaaaagagagtttgctggtaagaaagctaaacttgcttctgcagaactggcaaaattgtccaggcgtgtcttcc

SEQ ID NO: 185480 - DNA, 247 bp, Arabidopsis thaliana landsberg
ttaaactggaagacgaccgccgtatcctctacaccagggaagccggcagcagctactatacccacgatgcctggggatattgcgatgggaaaaacgtctttattatgagagatggcgtactctattccgcctggcgggaaggcaaggccttctatttctacagggatatcatcagccgcgtcaatccggacgccgcacgggacccgaacgcccaagcgatctcacccgatgactccgctgcagcgga

SEQ ID NO: 185481 - DNA, 605 bp, Arabidopsis thaliana landsberg
atgtgttgtgataataaatctgcaatctacattgcaacaaacccggtgttttacgaacgaacgaaatatgtagaagttgaatgtcagtctatatatcactctattcctgatgaaattgttcaaggtaacattgcacctcgtcacattggtacaacttcatagttagcagatattctaacaaaacctctggtcatagataattttgcagtcttcaagaacaagttaggcatacgaaatttgtctgctccaattgagggagggttttgaagatgaaaactcggtttggttatcaaactggtttactaaaatcggattggtctatattaacttggtcataacgttgtgtgagtaaaagaattggcgttaattgaggaaacgattcacaaatcagtgattttctaatgtttttttccttaatttgtaaagatacgtatcagagagtagcatgacataagatgttgtttacctatatattggctgatataaaataattgtgaatgaaaaagaaaactcttgagcctctcttctttttaggaatttatcgagtttcggtcataggccaaagaaataagcaaaagtcattacggacaataccaaacgtttag

SEQ ID NO: 185482 - DNA, 316 bp, Arabidopsis thaliana landsberg
cctacatcgaggacctggctcgtcacattgagatgttcccgcccgtgctcgcgcatgagccagcgtatgaatttctcgagatcctcgctcggattgaacgagagggcaaggtgtccgcctttcttgtattcctcattccagaatgcctggccgcttcgcttcttttgcatggcatcactatgccatacctccgactcgtgtgcgacctctgtatttttcgtcgcagacgcgatacactcgcttcatgaatgaacggatcatccatatatatggcaaacatgcagtccgggatgcatgcatgctccatacaggagca

SEQ ID NO: 185483 - DNA, 355 bp, Arabidopsis thaliana landsberg
atgtctaaggcggcggtgtgccgcaacttcaatgtcaagcgcactacgttgatcgaaacattcacgcgagcaggttggcgtggtgcgggaaggccggtcgatgagcaacaagaataagctactcaccgtcttttctgacgcagagcaggaagccttgtacggcctaccggacttcgacgatgctcagcggctggaatacctggcgttgaccgaatctgaactggcgttcgccagcagccggcctagcctgcaggcccaagtctattgcgtcttgcagatcggctacttcaacgccaagcatgctttcttccgcttcgattggcataggtcgaggacaaatgcgccttcgtgctga

SEQ ID NO: 185484 - DNA, 456 bp, Arabidopsis thaliana landsberg
atgtggtaccgtatgtcgttgattaaggcattagtgctgatttgcgctttttggaattcttttctgtaagtagaaaggagagcaaagcagtcggtcaagttcctaccggagtatcaagcatgtcggatatgaacatggagaaccttatggaggactctgctgcttctagggttcgggctatacgtgggtgcgcatctcatcctcgcagcattgccgagagggtaaacaacatacaatctttattttcagagttctggaagtgtagtgatcaaggctctcttaactttatacattgaagcttagtgatacaacttatatctgtactttcaatgtacggatgtttaatgatgcactgtatgcttcattgaacagaggattggtctgagcgggtcagagtatatttatctctacctttcattgcagacgtacgaaggacacggatcagcgaccggataa

SEQ ID NO: 185485 - DNA, 104 bp, Arabidopsis thaliana landsberg
atgatatctttgcagaagcagcaaaagattgaggaacttgaagctcaacttggagaagctgaagatatagtaggagagttaaggatggagttacgagaatcgcg

SEQ ID NO: 185486 - DNA, 678 bp, Arabidopsis thaliana landsberg
cccattcgtttccattggtcacttccattgccaccacaacaaccaaaaccatatctcgccgccgccgtcgacgacgacgacacttgcttcaccaccgtatcgctatcaacagaggaaacgagataagaagcgtgttaactctttcttctaattccatggatatttgtggcgttgattccgaagggaaagagtttaatagcgtacaagagatgtggagagaagaaattggagaaggagacgaaactagaaaaacccaatggtatagagatggtgtttcttattgggaagtaagtatttgaatcatctgatcttaaaaactttaccttttctatgttttagttctctttaaagttccttagttttgaatttgtgtgtgtttgtgttgttataaagggtgttgaagcttctgttgatggagtattaggaggatatgggcatgtgaatgatgctgatattataggaagtgaggtttttcttaagactcttttgcaagaaagattagttaacaatgttggagctaatcagcatttagtagctcttggtaagtctcttctctcattggtgttcattggttttttgccatatgtgtgttcttacaaatcactctaattatttgtagattgtggatctggtattggaagaatcactaaaaatcttctgattcgatactttaacgag

SEQ ID NO: 185487 - DNA, 453 bp, Arabidopsis thaliana landsberg
atgggcgctacgcggagcagtgggaacaggggaggacttcaagcaatgtttgcgatcgaagcgccgcacggcggcaccgtcgagattcccaacacgtcggacgacgagcgtatccaatatccaacgctcgagcagccgagcgagctccagcgctactacgacgagcatggttacgtggtggtgcgaggcctgatcccggctgacgcttgcgatcgcatgcggcagaccttcgaggccgaggtgaaaccgttcgatggcttcatctaccgccaagccacggccaatccggaacgtcacacgctgaccaagcacggatacatgctcaattccattctcaacatccacgcagtggacccacgccgctttcccacgttccgtcgtgaaggggcgcagctgatcaccagcgcgcggatgcagcgcgcgatgaagacgctcatgggagaactcgggcag

SEQ ID NO: 185488 - DNA, 143 bp, Arabidopsis thaliana landsberg
ttaatgcgaaatacacgaatacacgcgatgcaaaaaccgcagaagaaaacgtgcgcaagcaatttattaccaaattgatcccaaaacgacgtcgattcgattcacataaaccaaaacgacgtcggattgatgtaatcatataa

SEQ ID NO: 185489 - DNA, 276 bp, Arabidopsis thaliana landsberg
atgcggcatatggacccgcattcgccgtacttgcctcccgctccgtacgagcggattttctacgggcagaacgagaaaaatccggataatgaatcgatggagccggtgttcggcttcaagccgttcggcgatttcatcaagtcgtgggttcccgatggcgtcaccgaccaggaatatgtcagcgcccaatatgacggcgcgatcgcctacatggacgccgcgatccaaagcctgttcgccaagctggaatcgatcggcatcgaggaggagacgctt

SEQ ID NO: 185490 - DNA, 280 bp, Arabidopsis thaliana landsberg
atgacgatgagttacaaagaatatcgaaatcagagagaaataagagaatatggaagtgaaagagatatgcaagagtagaaagagacatgtggctcttgaaatcaatggaggtggaagaaaattgagaattctaaatgactaaaaggattagtgaatttttttgtagagctctattgcaatgtcagaggaaacaaggattatagtggcggtggagttgagggtggtgttgatgatgaaggtgctatggtggaaagatcaagtttgaggtttaataataatg

SEQ ID NO: 185491 - DNA, 168 bp, Arabidopsis thaliana landsberg
acttcacagctacgacttgcttgctgatactgatgaggagcaagaggaccaatccaaacctatagacttcactgctacggctgctttagctctactatgggtcgggagtcctgctgatctgtccttcctcgtcttctccatgtcaagacatactggacttctcaatca

SEQ ID NO: 185492 - DNA, 301 bp, Arabidopsis thaliana landsberg
cgagcggtgccattacagcgagcagttgatcctgctgcccggcagctaccagccgaacgacgaccggcgcgccatcgcggaaaccggccccacccgcgccgcctgcggattaccggacggcgccttcgtgttccgccgcttcaaccagagctacaagatcaccccgcgcgaattcgccatctggatgcgcctgctggaccgggtcgagggcagcgtgctgtggctgatccagtcgaacgactgggccgagcaggcgctgcgggccgaggcgggccggctcggcatcgcgcccgagcgcctg

SEQ ID NO: 185493 - DNA, 107 bp, Arabidopsis thaliana landsberg
gagcaatggcacaacttgtagcgggaaaagaagaagagtttgaagatgtgagagaaacagcagcattcatggtagtcgccattgcagagcaaatgagatcaaactga

SEQ ID NO: 185494 - DNA, 49 bp, Arabidopsis thaliana landsberg
atgcggttactgactaaagaagtactccagtggactgagaaaagagtcg

SEQ ID NO: 185495 - DNA, 855 bp, Arabidopsis thaliana landsberg
aaacttcagcggcagaaccttctgaggtagaggatcctgaagaggctgaactgaaggaaaaggtcttgagagctgcccaagatgcggtgtctaagcagaagcaaataacagatgcatttgacactgaatatatgaagctacgccaaacttctgaaatggaaggtcctttaaatgatatatcagtttctggctcgagcaatatagatttgcataacccgtgagtttgtgttcttgtctccatcccttgtctttgcgattttagtctatcaagccaattaaatctctctacttgcagatctacaatgcctgttacatcaacagttcagactccagagttatttaaaggaacccttaaagaataccaaatgaaaggccttcagtggctagtcaattgttatgagcaggttcactcaatctctgtttacatttgttatttttgttctgtaggacttaatggaggaaattcttcccctcagaaatcatctttcagaatgggtctgtactaagattattgtttgctatactccagggtttgaatggcatacttgctgatgaaatgggcttgggtaagactattcaagctatggcgttcttggcacatttggctgaggtaaatagggttgtttgacctttatatttgttgtgatttggttatgttaacctcatcagttttctcacacaggaaaagaacatttggggtccatttcttgttgttgcccctgcctctgttcttaacaattgggctgatgaaatcagtcgtttctgtcctgacttgaaaactcttccatattggggaggattacaagaacgaacaattttaagaaagaatatcaatcccaagcgtatgtaccgaag

SEQ ID NO: 185496 - DNA, 1209 bp, Arabidopsis thaliana landsberg
atggatgttccatccaacttggaagctcgaaggcgtcttactttcttttcaaattcactattcatggacatgcctcctgcacccaagatccgcaacatgctttccttctcgtaggttccagtcacgatggacatcttctcgtaggcttactatatcttaacatcttccattttgttttttcatagggtccttacaccatacttttcagaggatgttcttttctccatatttggcttagaacagcaaaatgaagatggagtttctatactcttttacttgcagaagatcttcccaggtttcacttttccatctgttttaattttttcatatggtactgttactttgtttgagctatcagctgagtccatggcttacatcagatgaatggacaaactttctggaacgagttaaatgtggcaacgaagaagaactaagagcaagagaggatttggaagaggagcttcgtctttgggcatcttacagaggccaaactctgactaaaactggtagactttagtctcctctcttaatcggttgaattctgcttcatttttctaacctgacgaatttatcttttgataaacttgttgtgcctgatttctgatctgtttcaactagtgcgaggaatgatgtattaccgaaaggctttggaacttcaggccttccttgatatggcaaaggatgaaggtgcttgaagaatcttctctgtgattcttttcgattcttaaaaagtatgaaagcattccttaaactaccttgtttttgttttaagaattattaaaagggtacaaggctctcgagttaactagtgaagacgcatcgaagagtggaacgtcgctctgggctcagtgtcaagcacttgctgacatgaaatttacctttgtggtttcatgccaacaatacagtgttcagaagagatccggtgaccaacgtgcgaaggacatattgaggcttatgactacgtatgtcttctctcatcataattcttcaatagatctgttatgtctttcttatatgcattagttaaccttactatttctctgtgacaggtacccgtctctacgtgttgcttatattgacgaggttgagcaaacacataaagaaagctataaaggggcagacgaaaaaatttactactcagcccttgtcaaagctgctccgcagaccaaatctatggattcttctgaatctgtgcaaacactagaccag

SEQ ID NO: 185497 - DNA, 1509 bp, Arabidopsis thaliana landsberg
atgacaaatgatggtatcattcgtcgtagattgaggttccgaatgcaggccgaacggtatgatgtggtgcggttcgaacagtaacaaaaaaatatatatatatatatatatatatatatatatatatatatataaatatttttattattattagaaccgcactgcattttatccacagttaaaccgcacgttaccattcggagccaagtcataatctttctacgatattatcatttgtaaaaattacatggtttggtagacttctggatatttcaattcctattcctgtatttttgcaacattctctttttggtttataataaaaatgaaaaattatacgattcaacactccatttaagttattcgggctaacgagtttaccattttatgtagtagttcttcttcttctttaaattaacgacttttcaatatgtcaatatgcattgttacaaattggagcaatggcccgtagttgttatcgtgactttttgggtgtttagcaaatgtgtcattttccgtaaaaaaagaataaagtatcaagtatatgagaaaattccatgatcattggtgtatatcacaaagactaaatataaatcattctttaacagaagtatacgaagatatagcgtacattttaacaaatgaatgaatgatcatgataatgggtctatggcaacttgttttacatatttttcatatcaaacaactttatttttccttttaaatagtattacctatcattatcatttcttctatttattgtagatctttgaatatactaatgttaatatttcataactaaagagatagaaccgagattgacaaacagaaaaatgaagcacggaagcatcacgattcacgattatgatacataatatagatttaattattatttttttgtgaaagaatataagtttaacttgatatttatgctataatttataaaatatctgaaattgaggacaccataaaagttttttatgttacttgtaaataccaccataaaaaaatattatcacacctaacaagtatctaagtatatacaaatttgtttatttaattacaaagctgaaaataggactgggcaaaaaatccggaaccgagaacccgaaccgaaatcgatctgaaaaattggattcgaaaccgaaccccaatccaaaatttaccttattggatcctaaattcctctacccaaaaaaccgaatccaaacccgacccgaatccaaaaatacccgaaaatctaaattttacccgaaacccgaaattttacccgaaaatccgggtatttacctgaaaaatctgggtatttatccaaaaattcgggtattggttccaatttaggcccaaaaatctatatccgaaccgactcgaatccgattagatccgaatcgaaaccaaaccgatattttagatttatcttattagattctaaacttttctacccaaaatactcgtacccgatcgggttttacccgaatccaacccgcttacccgaatgcccgcccctag

SEQ ID NO: 185498 - DNA, 540 bp, Arabidopsis thaliana landsberg
aagaatctggattcattgtcttctgcttcgatcgcgaagatggtggtttcgatgtggttaaagagggtaaacaagagaaggaagagacggaatcgtcctcggaaaagtcaccgaggacggtgaatcgtaaggttcgttgtccgaaaatcaaaattgttttaaaaagttttgacctttttagtttgaaacatagcaaactacaaagttcttaatgcttttattttcaagaacagcttatatatggagaccaaggagtaggaggaacagagaagaataactcgccggagactaaagggacagaacaagatcagaacgataacacttcatgtcaaggaactaaagatgtctctagtgatgttacagaagtaatgcttcgtaacatctttcaacttcaaagtatttgagaatttaacattcttatttatatattggtctttgactgtcgcagagaaccaaagaagaagaagacattgatgcctctgataaatctagcgggtctagtcactcagatgaaggaaggggatcttttgcatttcccat

SEQ ID NO: 185499 - DNA, 337 bp, Arabidopsis thaliana landsberg
atggccctaaaggcatacattcagattgcaggatataggtctagaaccagatattgtcacgcaagcctaccttgttgggatatacgggaaaacgggaatggtggaaggtgtaaagagggtacatagccggctgacgtttggggagcttgaaccaaaccaatcgttgtttaaagcagttagagatgcttatgtgagtgcaaacagacaggacttggctgatgtggtgaagaaagagatgagcattgcttttgaagctgaaagggagtgtagttcaagatctggagaagaagaagaagacgatgaagaggaaaattctgaagaagacgaggcattttga

SEQ ID NO: 185500 - DNA, 173 bp, Arabidopsis thaliana landsberg
atgacctcatacagttacgattcatcaatggatgctgattttaacattgacgaggcggagtcatggttaacaagaccagagagagaagcggaggaataccaacgtttccgagaagaaacggagcgagcagctgccaatgacaggagaagagaagagatagctagagggaagag

SEQ ID NO: 185501 - DNA, 667 bp, Arabidopsis thaliana landsberg
atgcttccgtatgatatactgatgaagatcgctgcaccgtttagtcatccgaatcttcaagcggcgtctttggtatgtaaatcgtggagagacgcgctaaagccgttgcgagagtcgatgttgttgattcggtgggggaaaaagtacaagcacggaagaggaggtgtgcgagcgaatctcgacaaagctcttgattcgtttctgaaaggagctatgcgtggatccacgctcgctatggtcgacgctgggcttgtgtattgggaaagaggagagaaggagaaagcggtgaatttgtatcggagagcttcggagcttggtgatgctgttggtcaatgtaatttagggattgcttatcttcaaggtaaaacctaagttctctcattgatgtgattggatttttattcttaacctgattaatgtttttctggattgtgttggtttatagagaaattggatttgacttgatggatgagtttattgctgatgaatttgtggagcctttttctgagcaatttgattgcttctatctgcagttcaaccttcaaatcccaaggaagcgatgaaatggttgaaacaatctgcagagaatggttatgttcgagcacagtatcagttagctctttgtttacaccatggtcgggtcgtgcaaaccaatctgcttgaagct

SEQ ID NO: 185502 - DNA, 178 bp, Arabidopsis thaliana landsberg
atggaaaaccggtcgacagacttggaaatggcggtaacggtggaaatggcagtatcattactgaacggtgcaaaatggaatatgacgattttttcaagcgtggagatcattttcctgcatgttacggatgactcactgaaaaccgaggctgttctccgttgtacgaaacctgaagcag

SEQ ID NO: 185503 - DNA, 489 bp, Arabidopsis thaliana landsberg
atgttggctaagttattggtactcttgaccgttgtcgatgatacgtgcgacagatatggttctgttcctgaggttgcaaagcttcttgattgtgtcgaaaggtaatatgctatacatataatacgtaagcttaattagtgacttatcatcttcgtatgtgttagtctttgagagaacttcaatgaaaagaagaagtagaataaaatctgttatttctctcacaatatatgttgattacctttggaacctatttatgattttatataggagagggttctggtttacttaatgtaattacaataaatttctggttttacttaaaccattcaatagaccaatatccaatagtatgtacgtgcagatggaatccagaccttggggagagtctgccagattatctgaaaaccgtcttcaagtttactttggatgtttttgaagattgtgaacgagcggggaagaatgaagtaggactaagcttcaatgtcgatg

SEQ ID NO: 185504 - DNA, 375 bp, Arabidopsis thaliana landsberg
gtggtattatgtgctaaacgtcagatatggcagattagaggccacatgtcgcccttgtacatcaaacttatctcctcggtcatttacggactccttgtcgggtccatgttttatgaccaaccgcaaaccacggacgggatgtactcacgagggggcgtgattttttactcatctattcttctggcctggctccaaatgtctgaattagaagaagcaatgcagggacgtgacatcctcagtcgccagaagaaatttgcattcgtccggcccagtgctgtgtgcctggcccgagtcgtcgcagatatcttcattgcagctctccttactttcctctacctaggggttgtttattttctgtcagggttgaagtctgat

SEQ ID NO: 185505 - DNA, 227 bp, Arabidopsis thaliana landsberg
gaggttccggtgttgctggttcctgaggacaaaagtcaaaaaccatatgttgcaattattaaggtgctggtgtgctaaattttgtattcatctttttagtttttgttgtgtcgtccgctttgaaataatgacacatgcttctttgacaggatattacccaaactaaagatggaagcatgatgattctgggacagtggttttatcgccccgaagaagcagagatttag

SEQ ID NO: 185506 - DNA, 283 bp, Arabidopsis thaliana landsberg
gcttgattcttagcaatgccttgagggcacaaaagggcgccgaagacgaaagttgtacaatagctctcagcaaccttcgctcagaggaaattgagctgagaaacgaaggtctagagaaagacaaaattttaatttcattggtgagcaaaatgaaagaagacaaagctaagtacaatgctcaggccgaagcccaaaaagccgaggttgaagaccttcggaaacaactggccgaagccaaagaaaattgcgaagtcacgaaggccagccaagaaataagtgaatg

SEQ ID NO: 185507 - DNA, 2088 bp, Arabidopsis thaliana landsberg
atggcggattccaatgaggttggctcggcgagccgacgaatctccgtcatcaccaatcatctcatccctatcggattcagtccagctcgtgttgactcagtggaactctgtagtgcttcgtcgatggatgatagattccataaggttcacggtgaagttccgacccacgaagtcgtttggaaaaaagctgatttctttggtgaaggagataacaaggagtttgttgacattatttatgagaaagcccttgatgaaggcattgcaaaggtttgtgcttgtaaagtgtttgatgatattcctgagagagttatgtatttggtgaagtgggttttgaattgcatagtttttcgtttctggggtttatgtagattactataaaccggccagagagaagaaatgcgttccggcctcagactgtgaaggagcttatgcgtgcgtttaatgatgctagagatgacagctctgtaggagtcatcatactcaccggcaaggtaaagctcttagtatttgaatttatatctgctagttaaattctatgaaggaataaaatgtaatagaagaactatatcagagttgatttgcgtatgtgtatgaacattgaagatggactctagaaagaaaaatatggatttaggttatgttacttaagtcagtgtgttgagtctcgtaagtgccaaggtcaaatcctacttttgagttgatgacaattgacaaagagttcgattgtattcctctggttttttttttttttttttttttgtgaaacgattgttctgatagtgatattgatggtttagggaaccaaagcattttgcagtggtggtgatcaggctttgagaacacaagacggttatgctgatcccaatgacgttggccgccttaatgttcttgatcttcaggtatgtccttgatggacaagacaataaaaagtttgggtttcctcatccttattgggctcatgtattttccacgttccttcttctgttcgtagtcaggttcaaatccgcagattgcccaagccagttattgcaatggtaagtaccttcaaactactgctagtttactctatgcatctttgtactaatcctggattagctagttcttgtggttgatctgtttgattttggattgagtcaggtagctggttatgctgttggaggaggacacattttgcacatggtctgcgatctaacaattgcagctgataatgcgatttttggtcaaacgggtcctaaggttttccctctagcttctgtttcagccttgaatcgactgtgtaagtgaagtaggtaccagagttattactaatccccactgattatgtggattgagttgatgtctgcaggttggaagttttgatgctggttatggaagttccatcatgtctcgtttggtaattgaactcactattactgcaatgcaatatccaaaatctaacaaacataggctgctcaaagtgtatgaatgtatacaggttggtcctaaaaaggcacgagaaatgtggtttatgacgaggttctacacagcttctgaagcagagaaaatgggacttatcaatacagttgtaccggtaaattttaccagtaaaccccatactgttgtcacagatgcacaaaaaaatcagtctatttgttggtaattgttttgttccttcactgcgacccattttctgttccagctagaggatttggagaaagaaactgtgaaatggtgcagagaaatattacggaacagtccaactgcaatccgagtacttaaggcagcacttaatgcagttgatgatggccatgccggccttcaggtacctccttcaatcaacttgcttagtctttttccgttctaaaggaacaaaatcctattagtcaaatttgcaatttaagtcacaaaaatcacaatttggataggttcagttcttatgcaacccactagcacacagttttttaacggatttacaaacttttcttgctgcagggactcggtggtgatgcgacactcttattctatggaaccgaagaagctactgaagggagaactgcttatatgcaccgccgaccaccggacttctctaaatttccccggcgaccttaa

SEQ ID NO: 185508 - DNA, 1716 bp, Arabidopsis thaliana landsberg
tcaatgcaacttaatgaaccagcgtggataggttacatctatgcaatctcaatctttgttggagtggtatgcaacaaattctctttttcttcgctgcctttattattctcttgcatggactgcaaaggatatgaaacaaaaactctactttccttggattcttttctttcttgctaggacttcatggtatttttggtctagagtagatgctacgaattgtaggaccagtttaattttcttaagctgaaagtaatctctgtgcgattcgattgtattagaaatagcctgattctactcttagagttagttttttttgtttgttaatacatttgcatgttgaaaaggttttgtttaatgtaggtcaaggtgacacttgaccaatggactccttgatcgcttgatgttgatgttgacattttcaggtattgggggttttatgtgaagctcagtatttccaaaatgtgatgcgtgttggttaccggcttaggtctgcactggtaagaaaaagtttcacatgaattatcttttgctacttagtttttctttttgctctgcttctcatgttttgatgcaatacctgtactgttatgtctgttgaaagctatagcagatgcttatagattgcttcattctgctgatgaattctcccttaatagattgctgctgtgttccgaaaatctttgaggctaactaatgaggggcggaagaagtttcaaacaggaaaaataacaaacttaatgactactgatgctgagtcgctgcaggtgtatctttgttacctttactctctttagccttgtctgtttcttgatataaatttacactgcatagttgtatatctacctcaaaatatgagtcttagatgcaatttaccaagatagtctttttcctgcaactgacgactgaatctgaagcttattctaagattctagaaatctaagagttgtgattacattttcaacacccttgttcttttgttgccgttgtaggatttgattttcctttattagccaataaacctttaattcgcttgatttgtagaaaaaagttacctttgaacagtgcttttatctaagctcatgcttgaaatcaaagtgtttatctagctgatagctgttctttttcctaacatttctcatgtgtgtgacagcaaatctgccaatcacttcataccatgtggtcggcgccatttcgtataattgtagcactggttctcctctatcaacaattgggtgttgcctcgatcattggtgcattgtttcttgtccttatgttccccatacaggttcgtatatcttaataattccccattctctttgcgctgtcggttttttttttcttttgagtgcttatttctcatttgcttttcacaccaatgaaaatgattcattttcttcgtttattttgttgaaacagactgttattataagcaaaacgcagaagttaacaaaagaagggttgcagcgtactgacaagagaattggcctaatgaatgaggttttagcggcaatggatacagtgaagtacgatactttggaagactgaaacctaatatttattttcttgcatagttggaagtttgtggcagtgtttaactatctcactaaaccaaaatactgtaggtgttacgcttgggaaaacagttttcagtccaaggttcaaactgtacgtgatgatgaattatcttggttccggaaagcacaactcctgtcagcg

SEQ ID NO: 185509 - DNA, 47 bp, Arabidopsis thaliana landsberg
atgaatcctctaaaagtaaattccgatgaatttatacctgcttcaag

SEQ ID NO: 185510 - DNA, 141 bp, Arabidopsis thaliana landsberg
atggtgctggagcgggtgagctttcgctaggatcatgactttatttactccgattcgactgccatgaccgataaagacactgtggtcttccgcctggagctcgtgaagatagtcgtcgaatacacgaagcacgccgaatag

SEQ ID NO: 185511 - DNA, 433 bp, Arabidopsis thaliana landsberg
  unsure (1)..(433): unsure at all n locations
ctgatggtgcgctcggatctgggcgcgtccggcgtgctgttcacgctggataccgagtcgggcttccgcgacgtggtgttcgtgaccggcagctacgggctgggcgaaatggtggtgcaaggcgccgtcaacccggacgagttctacgtgttcaagcctaccctgcgcgacggcaagcccgccgtgctgcgccgccagatcggcgccaagcagcagcgcatggtgtattcggacgcccccggcgagcgcgtgcgcatcgaggagacgccgcgcgaactgcgcaaccagttctnnnnnnnnnnnnnnnnnnnngaaaacctggcccgacaggcgctcaccatcgaggaacattacggccgtccgatggacatccaatggcccaaggacggacgcaccggcaagcatgtacatcgtgcaggcgcgtcccgaaacg

SEQ ID NO: 185512 - DNA, 446 bp, Arabidopsis thaliana landsberg
atggagatcattccattgatgctcatttccgttatcgtactcttgacatcatttccggctccgattaaagtgtccggcaggggtggaggaggcggctttgttggtagtggcaactctcctagtattggaagcggctattttggtggtggtgggaatcctggcaccggctatatgggtgggggtatccctagcggcggcagcattagggatgggagtaatgttggcaccggttataggggtgggtttcaaggaggcaagccttcaggtggtggtgaccccggtgcggcaattgtggtgtttcctaagaagcccgaggaacctgtgaaggtggtgccaacgccaatgccacaagtttgcgaaccgaaagttagacattgcatcaatgtacatgtatacggacgcgccgggcaacctcaccgaggcggagcatgttgtaacaaatttag

SEQ ID NO: 185513 - DNA, 245 bp, Arabidopsis thaliana landsberg
accgagattggtggggggaactcaagaaggtttatagcacgtatcaagcctgccttatggctgtacgacgaactatcaaaattgccaactatgcggctcgctactggacgcatgatgggactggcactccaccagagcgtgctctgcttcgaaaacgggacctgaccttggaacgcacataccccgaatctgaaaagttccaccagtatgggaccagacaggcccagtgcggctctattgggatg

SEQ ID NO: 185514 - DNA, 125 bp, Arabidopsis thaliana landsberg
atcaagtattgagctggatcgcagctgcaataggctacgtacctggtgttgtgtgtggactcaccattggtcacattctcacttcgtataaacgtgactggttcatgaaaagcatgacctcttag

SEQ ID NO: 185515 - DNA, 515 bp, Arabidopsis thaliana landsberg
atggccgccgtagaaggacaaatctcggctctcatcagcaaacgtctccgtactctccgcaagaaatacaaccgtataactgacatggaagagtcgatttctcaggggaaaacactaaacaaggaacaagaagacaccctccgttcaaagccaatcgtctccgcccttatcgatgagctcgtaaagctccgcattcctcctccttctgcagccatttcagaagagaccagcccccctgctaagaacaagaaacagcaaaagttatcccacgtaattttctttagggttttagccgcatgcccgcatcgtattatagtaaaactaaacctaatattttccttcctaggcacgtaaggaggtagctgaggaggaaaacgtgacggccaagacagatatcgaggattgcaagatctctgatgatggtatcaattctgaggtttccaaggacgatacttctcctagtagcgaaagctcacaaggtgttacgccatcgccgcttagcagaaaggcacgac

SEQ ID NO: 185516 - DNA, 595 bp, Arabidopsis thaliana landsberg
atggagagcacagagtgcgttagggttgccgtcaacatccgtccgttaattacaccggagcttttgaacggatgcacagattgcatcaccgtggctcccaaagagccacaggtaattcaattagaagggtttttcgttttttctgcgtttatttcttctgagagtttttcagttttgataagattcgtgggattatatattggttaaattcgggaaatcaaatttatgcgcgaatgagaaataacgtttattcttcatcagttaatagttttgctgtaagattcgaattttgaaacatttgggatttgttttcacatagaactgattcggttcaattcgggaaatcaattgatgcgtgaatgtttttttttttttgctgaaaatatgttttaaagattcgaactttgataaaactcattttgttggaatttcttatgaactgaaacaggtacatattggttcgcatacatttacttatgatttcgtctacggaaatggtggctatccgtgttcggagatttacaatcactgtgttgctccacttgtggatgcattgtttaaaggatacaatgccactgttctagcttatggccag

SEQ ID NO: 185517 - DNA, 197 bp, Arabidopsis thaliana landsberg
atggctgcgtcagacagtgggagtgggaagccggaagcaggcgagggagagagaggccgtagggagcggacccgagatagctcaacgcaatttgataataaattcgagtccgccacgggtcggtgcgacacaggcggaacagccgccgaacgcggagagcgctcggaatcggttcaggttttaagtaacctgactag

SEQ ID NO: 185518 - DNA, 1855 bp, Arabidopsis thaliana landsberg
atggcatcatccctgtcggaacgatcgttactgtcacaaccgttacggccaccacaatcagtcattgtcaccatcagtccatcaccaccgtcgttacaacggtatccattgttcccaccaccctaactgtggtcggctcgccactgttgtttccattaccaccgccgttgccatcattgttacagtcgtaaccaccatcatcacggctgttatcactatgattgtgaccactgcggtcaggtcactagtcgtaatttgtttttgttttttgtttatttatttattccaagttgttctatataatatgttatgtcactaactattcagtagcacaatttttcttactgtgggccacgcactttgggccagaagttatgggttagacctttaacgcacacaaacaaatttgatttatgtttaggatttataacaatgttaacgtcacggtcaaattgatggtttcagaattatgaaggaatttgttattttgaagtttatctatatatttgtttttgtatttttttcttttatatattcaaataaactctaagggaagaaatctagaaaataaaaaagcatctataaagggagtcaacatacactcctattaaaggaaaatatctttctcaagatttaattttccagtattcctatctatttttttttttattaatgaatttattttcataagattagccaatagctatgagtttagagagtgatatcaaagaaagcaaacgagtcgttgaaccatttgatgatgacgattgtgcggtttgtttggagccgttggctaatgatgctgacgaacgaactgttgttaagcttcgatgtagccacaagtttcacttaggtgagcaccaaatattttttttaattagaactttgctttgagaaaaacatagatccatttttttttctcttgattaatatcccttttattcttattatttgttttgttatgaatctattatcttagtttattcttcgatgaaattaatttgcttttttctctgtctctgtctccaccttgcttgatgtgtccattaactcgaacatacattattgggtcttcagattattacatcactccccgagacttcttgctgtctatatatttttatttatatatctacacaaatctacaataactttttcattacaatatttttaattataaaaatcattcgctaataggtttggtttcctacagattgtgttggttcatcctttaacataaagaacaagatggaatgtccatgttgtagacagattgaaaaagggaaatggttgttcgcagaacctgtagatcaactggaagaagatgatatgtcaccactcgacatggtaatagatatagacctaaattttttccaatcgtgtgatatttaatttggtttggaattgatattattggatgagtaattaacatattgatgatttatcgttggttcagctaaccaatatggtgagtccttcttttcttcatattgatgatggaatcttcaccagtatagctagtgtgttatttccaaatgctccgaaccaaatcagtaacaatgccaacgtgagcagtaacccattgggtgagccgcgtaacactttgttggacacaaggatgcaacgtcaagtcgacgaacatgtagcccctactgtcgatagcgaacgtcgtttacccgacatgctgttggaacttcatgacaggaccgggggaagtggaccaagtggttatgggcgtgaaagaagcggtgggggaggcggtgaaaacagccgtggtggggaagcggtggcggaggaagatcaggtgggggaagcagcagaaggggcggaaatgatggattatctgaacttttag

SEQ ID NO: 185519 - DNA, 78 bp, Arabidopsis thaliana landsberg
atgcacatagtcgatgttagggatggcaatttaacgagcaaacccaaaaatgacgcgtatctggcccaacgggtgccg

SEQ ID NO: 185520 - DNA, 441 bp, Arabidopsis thaliana landsberg
ataataaagaacgctgatcttgaagacctgacagaactgggatccgggacatatggaactgtctatcatggaacatggcggggaacggatgttgctataaagagaatacggaacagttgctttgcagggagatcatctgaacaagaacgcttggttagtcctcaaatcttttgtttcttagatctatcttcttgatactgttttggtatgaagtacacaatatgaggtattctccttcgcagcacattctttgttttaactgtattgctttatcagacgaaagatttctggagggaagcacaaatactctcaaatcttcatcacccaaacgttgttgcattctacggtatagtgcctgatggaactggaggaaccttggcaactgttacagagatcatgagtgaatgggtcactcaggcatgctcttctcaaaaaggacag

SEQ ID NO: 185521 - DNA, 754 bp, Arabidopsis thaliana landsberg
aattgctaagggggttcaagaattttttaacctctcccaagaaaaggcctttacttgtgaatacaagtaagtttgtctcaagaacttctattaaactactacttgaaactgataaatttctgattattaacggaatgtctgtttctttcaactcacaacccttgaatcttctttgcattctgtagatgtcattaaatgttatgatagagtcgatattgtttccatgagttgtatttgcactctattgatctccactaatcttctctgtttcctgatataccttaatattatgcctaaatatgactttcagatatgatggccagcgcgcccagatccataagttacttgatggtactgtgtgtatcttttctcggaatggggacgaaacaacgtccagatttccggatctggttgatgtcataaaacagttttcttgccctgccgctgagacattcatgttggacgcagaggtaggagaattttcatataattcactttatgcatctttatctattcaaacccacatctagctatgcacaggaaaacgagggaagggaccctttttccggttttcaaattcaacctgtaattgctcatcataaattctcttggtcatacgtggtgtatggtctttttatggttttaggtggttgccactgatagaataaatggaaacaaactcatgtcattccaagagttatcaacaagagagagagggagcaaagatgctttgataactacagaaagtattaag

SEQ ID NO: 185522 - DNA, 854 bp, Arabidopsis thaliana landsberg
  unsure (1)..(854): unsure at all n locations
cgctctaaacatgttttcagaggacagcccgccgctgccatgggataaaaacaacgaatactcacgtgatgttattgagctttactacgaggtaatcactcctacttcacccacacatcattcatgtattaacaaattcttgttcaggtcttcctgcgctatcttacaaaagtattttcagtcaaaatgtttcagcttagccattctgtttttaatgtccacagcctctcaaattcttacatatggctttcgttttatccactagcaagagaatcatttctttttttataacactgatgatttagtcgaacatcttcaagaaaagtgtgtgttatatgaagcactggtagtaacatcaggatctntcttttctctaggcgagttcaggaactccattgcctaggagtagagttctccagtatcttctagaaggtacaaaaggttctcaagctgaaactaccgaagaagaggacacaagcgcaaccaaaacaccctcctaccgtaaggatcctaaacgtgtgatatgatatgcattntgcattgccaatcattctatataacatatattccttgaatttgggtgaaagtgaaaggttcttcgggtatggttaaagtgaacgagagaagaacattgcatgacgtgttgaaagaacctaagtttgtcatccctgagattccaggtttgtttgtatgatcacattggcgtctgttttctaacagttgctacagacttcgtttgcgtcattaacgcctctcttcttgttttttggttggttacagtcttttacatcgtatcaaagaggtccaaattctacaaggactttaccgctggaaaatggactccaccaaactaa

SEQ ID NO: 185523 - DNA, 963 bp, Arabidopsis thaliana landsberg
atgagctcggagaatcctccttcagagccaaaaaagaaaaagaaaaagaagaaagagcctgattctgaccatccagtgaagagaaaaaatttgtattctggggaagctggggccaagaaattgtcccagcttggttcagcgcatttacaaacctatatggaagccgatgtgccgcagctgttgagccatctgcaagatctctctcttgaccctttccacggtttatccgttgcttcttttggaactgctaggaaattttttctccgtttccgttcacttaattaccagaaaagcttgtctgtatcttcctctgatgctactgtcgaaaatgccagagacacaaaaccctcaaaacctgtcaagacagtgaagagaaccgaagacccatcaaaagctggaaaaaaacggctctcttctgatcgtcaagatgaaatcccatcagctaagaagctgaagaaaactaatcagttgaaatcaatggcttctgaaaagaagatcattcgagaagcaaaggatagtataaaaccaataagagagccaagcagggtggtacaagcaaaaccagccagaggtcaaaccgggaagaaaacagctccatcagttaaggtggttgagccaacaatgctggtcatgatgtttcctcctggcacatctctcccttccattgatctgcttaaggcaaggtttggacgctttggacagttggatcaatcagccatcagagtttcctggaaatcctcgatctgccgtgttggcttcctgtataaactcgatgcgcagactgccttaagatatgtatcaggaagcaaatctctctttggcaatgtgaatgtgacatactttctccgtgacatgaaagcttcttctgcatccggagatcatgaactgaagaaagccaagaggcccaagacagacaaacccatcactaaaccattgaaccagctactagagcaagcaccgccg

SEQ ID NO: 185524 - DNA, 112 bp, Arabidopsis thaliana landsberg
gtttcactttgattgttatcagatatttgtctttgcgctaatatatggtgatgaagttctgctgtttcatgtggatttcgttaatgtgttcatgggattaatacaacaatga

SEQ ID NO: 185525 - DNA, 1153 bp, Arabidopsis thaliana landsberg
atgaagttgggattcgaaattcaacgagccttgcaaggcttgctaaacaaggcggcggtcgacggcggtgcgtacggtcacctcatccagcacttcacccgtcaccgacttcctctccacgtgcttcagcttcacgcgcgtattgtcgtcttctccatcaagccggacaacttcctcgcgtcaaagctcatcagtttttacactaggcaggatcgtttccgccaagcactccatgtgttcgacgaaattaccgttagaaatgccttctctttcaacgcacttctcatcgcttatacttcgcgtgagatgtatttcgatgctttctcgttgttcttgtcctggattggatcctcttgttactcttccgatgctgccagaccggattctattagcatctcttgtgtgttgaaggcactgtcaggctgtgatgatttctggttgggttcattggctcgacaagttcatgggtttgttatacgaggtggatttgattcagatgtcttcgtgggcaatgggatgataacgtactatacaaagtgtgataacatcgagtctgcgaggaaagtgtttgatgaaatgtctgagagagatgttgtttcgtggaattctatgatttcagggtattctcaaagtgggtcttttgaggactgtaagaagatgtataaagcgatgttagcttgctctgattttaagcctaatggagtcactgtgataagcgtcttccaggcgtgcggacagtcaagcgatcttattttcgggttggaagttcacaagaagatgattgaaaatcatattcagatggatttatccttgtgtaatgctgtgattggtttttatgctaaatgtggtagcttggattatgcaagagcattgtttgatgagatgagtgagaaagattcggttacatacggagctataatttctggatatatggctcatggtcttgtcaaggaagcaatggctttgtttagtgaaatggaaagcattggtctgagtacgtggaatgctatgatttcgggtcttatgcagaataaccatcatgaggaggttataaactcatttagggagatgataagatgtggctcgaggccaaacacggtgaccctttcgagccttcttccttcgttgacatatagttcaaatctgaaagggg

SEQ ID NO: 185526 - DNA, 205 bp, Arabidopsis thaliana landsberg
catctaccctcaacatatcaaggatcaaccattgaaattaatcaaaattgaagagaaaacagcaaaaagcaccagacttaagcttaaaatcaataaaattactaaagctaaaatcttaaggagacccattagaaaacccaaatcccagaaattacggagaagaagaaagctcacatatttgctgtcgagagtctttgatttgtga

SEQ ID NO: 185527 - DNA, 432 bp, Arabidopsis thaliana landsberg
atgtccatagcatctaagagatataacattgatagttatatcttactagaccttgataaggtattagatgatgcctactgctcttttcgaccggtttctgctgattacaatactaggaaggaattggtcaaaaacctcaatgctatggctatagatatttttggtaatataagtcttgtagtcttttttatcttattaagctcgaccaatatccatattcagtagaggttttatttattttttgtttattaggtaaatcagaagagagcagcccggtccttgaggcgtatggctcttttgcgatgaatacgttttcctcacaaaaggatttggatgtatctattaactttagtagcggaacatctgaattttatcgtgaaaagaagctagaaattcttacaagatttgcaacgaagctccgctctttggagg

SEQ ID NO: 185528 - DNA, 138 bp, Arabidopsis thaliana landsberg
  unsure (1)..(138): unsure at all n locations
gacngacgctacgaatccagcgcggataacggaagcagtcggcgtaacggtgacgatcaagtcgtctccgaaaaaatcgacaaagtgtttttggtgagtacggaaacttccgattcttttgatcgtcggagccattga

SEQ ID NO: 185529 - DNA, 158 bp, Arabidopsis thaliana landsberg
ggttctcgaccagtggaatcgacattgcttcagagatctcacgtctcgccaaggaagtgcacgtagcagacaggtactccaaggacaggctgggaaagatggcgctgtaccagaatgtctggattcacgcagaggttcacgactctgaactttcatag

SEQ ID NO: 185530 - DNA, 836 bp, Arabidopsis thaliana landsberg
tggcggttagagcacaacgtgaagagaaacatagattcttgtctttggattttcctgttaccgagagaaccacattacttgactctcctaagctcaacacttcttccggtaaggtttcgtaacggttcttatttattgacgaaggatatattttttggtcattgagtgaattacacccttatatgttagtttaggtcccttagttatacttgtcgtaagtcaaattcctaacacatttcaatcaatcgacagatgttaaagatgtcatgacaaatgacatgaacgttctcgaagcaatatgcacaacaaatttctggcttctatttgtagcaatggtatgtggaatgggttcaggacttgcgacaataaacaacatcagacagatgggcgagtcacttcgctacactacggttcaactcaattctctagtgtctctgtggagcatatggaactttctaggccggtttgggtcgggttacatctcagacacctatttacacagtcatggctggccaagaccggtattcatggccataacccttggccttatggctataggtcacattgtcatggcctccggtttactaggaagcctatatatcggatccttgttggtcggtttagcgtacggctcccaatggtcactcatgccaacaataacctctgaaatattcggggttcttcatatgggaactatattctatacaatttcgatagctagtccggttggttcgtactttttctcagtgaaggtaataggctacttgtatgacaaggtagctctgaagatgatcattcttgttatggaaatcactgttttaggacttcgtttttga

SEQ ID NO: 185531 - DNA, 181 bp, Arabidopsis thaliana landsberg
atggagacgtcccagacttggtggaatcccgtggttggtcggattggttatgacgtggctgtggcaggtttcagtggtggtggagggcaaagttgaccagaagaacaaaaaagaggaaacaaacgaaataaaaggtagtgtggaggaggcaactttggaggctcttcgacaccagatatga

SEQ ID NO: 185532 - DNA, 605 bp, Arabidopsis thaliana landsberg
catctactcttacgtttgaggaacctgataagcagaagctctttgaaactatttcgtttgaagaactccatacagaaattattgagctaagggtatttccttctgctctgtaaagaattttgtatgtctgcagtgtgaatatgttcttgatgtcttatgatactccatttctggtgttagaaaatcgtactagtcaagttctgcctaggtgcgaatatggtttaccacataattgtagttgtttttgtgctatgtgctaaaccagacaatacacggaatagtatatttttcatgttggaaattgtagttgcttgtgtgctatgtgctaaaatgtggccatccttgaatgatgtcgaagaattggtcctctggttcttctcccatgcagtaacttgttcaaaaacctgctaatgcttctttcagtaatctaaactatttgtgtttatgattggttgtgcatgttagcaatctattctctgctttggtttgatagtatttgctgattctgatgattgatcaggaattcacaggcttacttaacgcacctgtggtgtttgctcataacgatttactatcaggaaacttcatgctgaatgatgaaaaag

SEQ ID NO: 185533 - DNA, 22 bp, Arabidopsis thaliana landsberg
atgcgcgacacagtactatcag

SEQ ID NO: 185534 - DNA, 135 bp, Arabidopsis thaliana landsberg
caaatggtgggaaaggttcctgaaggattggatatcttctttactgctcgtttcccgaatttgatgatggaaatctacgcattcatctctatgcactgcaagggagaagaagcgttcgagaagtacttcaactag

SEQ ID NO: 185535 - DNA, 125 bp, Arabidopsis thaliana landsberg
gtgtccgttgctcaacggttaattctggtactttgggcggtgattttgatgtattaaaaagaagtcgagaaccaacgacaaaagtttcaattattcttattattattatctttaagattctttag

SEQ ID NO: 185536 - DNA, 178 bp, Arabidopsis thaliana landsberg
gttctaaattctgtatacttaacaatggtagaacgcaagaaacggaaacagattcagagaaacaacagtgagagcaacaggaatcaaaagagacgaatttcacatgataagattaatagagatgagcttgtagtttacagaatcttatgtcctattgccgctgttggaggtgttatag

SEQ ID NO: 185537 - DNA, 320 bp, Arabidopsis thaliana landsberg
gcggcgctgataccttcgtcttcttcaaggccgatacgagttcgacccgctcgaccgccgacacgatctatgatttcagccaggccgaaggcgacaagatcgatttcagccaccgagacgccaactctatcttgaacggggaccaggccttcaccttcatcggatcctcggccttccacaaggttgccggtgagctgcattacgtcaccggcaagtccgacacctggatcgagggcgacaccaacggcaatggcaaggccgattttgtcatccacctcgatgacgtggtggctctcgcccagaacgacttcgcgctctaa

SEQ ID NO: 185538 - DNA, 973 bp, Arabidopsis thaliana landsberg
atggcgatcttcttcttcctagacgcaattaccctagtaagatttgattttccatctctcatgcatgagtcaaaccacactaatcatgtttgttacttaatacttttggcgagcaggcccatcgtttactgtcactattcagcattctatcacatcaaatctccgtcatgttggtctgcaggtatgtatgcctcatctatatatctcttgccttttccatgactgacgaccactgtctcttccttcaggtgtggaaagctcaactggtcttatcagaatttgtgctgcataagatttgcacctcatctgatttccatggcattgtgtgtctggaactcggtgctggaacaggtggtcccttcatcatctctcatacatgagaggattggatactcttccattccatcccatcccatcccatcttgtgttcagtcttatcttgctttcttttcttctccttttttcccagggctactcggtattttgcttgcacgggtcgccaaggctattttccttactggtgcaccttccacttccttccttttattgttctagctgtagctggtgttctcaccaggcttttctgttttccatagatcatggagacgagatccttggcaactgtgctaagaacctggaattgaattcatccttgtttcacccccacaatgtggtaaatgttcgtgagctcaactggatgagcgattggcctattcaagacacccatggtgactgcagagatccccaaaagtattcataaaaaacttccttctcttgatatcttcttggtgtgtgccccgttgacatagctctgtctcctttgtttatgtcaagctactgttggaacaagcaggactttgaactagtcaaatgtgcaagcttcattttcgcggcagatgtgatctacagcgatgatctaacaattgcgttatttagcatgctaaggagagtaatgtcattcggttgtgacaag

SEQ ID NO: 185539 - DNA, 93 bp, Arabidopsis thaliana landsberg
atggatgagcttgagaaatttagtcgagaatttaagaaaagactagatgatgctggggctgaaaaagtaatcccagaggatctagcccttgag

SEQ ID NO: 185540 - DNA, 812 bp, Arabidopsis thaliana landsberg
aaaggccaacgtggtagcagacgccctcagccgaaaacctttcgggatgaagggggtcagctttttaaaagattggaagaaggaatcaactcagctgaatgcatgtctgggaaacaacggcagccttgaagtcaagccaatgctagaagacctcatatgcaaagctcaacgactggactcggagacaacaagacttatggaaaaagctcgcaaagaacaacttccagaccttaggacagatgaacaaggagtcctttggttcaagaaccgtctgtgtgttccaaaaggggaggcatgagaagtcctgctctatgaagctcacaactcagcctactccatccacccatgaaccaccaagatgtacctaaacctcaaaaccagatactgatggagagggatgaagaaagagataacacagtatgtggcccggtgtgacacttgccagcgaacgaaagccgagcatcagaaacctgcaagtctactaaaacccctcccagtgcccaaatggaagtgggaagaaataggcatggatttcgtaatcggactgcctcggacccaaaaagggaacgattctatctgggtaataatcgaccgtcttaccaaggtagctcacttcattccagtaaaaactaccttcggaggagccatccttgcccggatatatcttaaagaaatagtcagtctccatggcattccacggaagatagtatcagataggggaacacagttcacctcaaaattccagataagtcttcagcaagccttgggcacccggctagacttcagcatcgcctatcacccccagtcagatg

SEQ ID NO: 185541 - DNA, 1646 bp, Arabidopsis thaliana landsberg
  unsure (1)..(1646): unsure at all n locations
caagagatccgttccgtagagaagagagtagtgagaggtggtacagttcaaaggctgaggttaatctacgaagcctggagcgcacgctaggtgctcgacgaaatgtcacactgagaggtcatcacgtgccatgcacatgaccatttctttatctccctcttgctcagccaacagttgtatataaacgcatctactctgttttcttctcgtgaacagaacagtactctcccaagaaaagctgatactttttttctcttttctttctcagtctctcatgaaagacaaagaaaccaccaccattttctcgagaaaattctgactcccttggatacgatgatgatgaagagtacagacgaaagtgaaacaaaatggaagatcgacgatgcagccgaacttgctagaacttctgggtcgaacgggacggcatttcggctttgaaattaacagagaaaacgatttctgatcatgggaatcacgaaaagtgctctagtcaccacgaactgcaaggtgatatcttctatgcccaagcgaagaaaacagatgacaccgacctcaaatgcttatacttgtttgcttctgtcgatgcgtattcaatggctactcttctgtctcctaacgctttgactttgaggtcctttcgtggctatgctcgttcgctaatcaagttgggtgatcagcttcggataaacaagttttatgagaaagctgtgnnnnnnnnnnnnnnnnnnnnnnnnntaacgtcacctcaaggaaagtctacggaaggtggctattttaccaagataaagacagaacttcagaattggatagatcttgcaacaacgaagatgcaggcgactgtggctgtttctgatataggtactatggataatcagaaagaacctggggaagaagatacttcttttgatagattgaagaagatttgggttaaattggatgacaagaccaaaataaactttttggtagtagactttgaaaagcttataggctatatacaagataagcatgggacggaagtaaaagagcactttcagaaatgtatacccatcgccaataatcttcgatggagatgttggaagtgccacatttgttctcaggttaactactgttttacggattgcaagatgcacatcttagataatcatgtgcacaactctgaacctgactttagtgctcgtcctaagtgtgtggatgagattttggctgacatgatatgctgtggggattggaagcctgtggatacagcggaggcagaaaatcttatcaaggatagagctaagcgcggggaagagtttgtttatgttaatggatggcgtagtgattggcctgaagcgaaagatcgcgagcgggaaaacgtactcaaacagtttgccgaggttctaaaatcttcttgtgccaaggagaattgtactctttcatgtaccctttgggactggttgagagattacacagaagagaatctggaactacctggagttcctgggatctatcttgatcaatgttgcttctttaagaaccctcaatgcatctgcttcttagatcttaagcaccttgaacacatccctctgtattttagacagctcaccacagatgttcgcgcgagtttagttcccaaagtagtgaatcagtctttggaaaattcccac

SEQ ID NO: 185542 - DNA, 739 bp, Arabidopsis thaliana landsberg
atgtctgttgtcactgagccaaatcacatttggccttctctcactgacgaccaatggatgaaggtaacccttgcgccacctttcaagtagtgttccgttgtattttctgattagaccgcttggtcttttcatctgcagtttctacttatttttgaataaaaatcaagtaactcttttctttgtttagtgaagttgttatcctccttccttactcacatcagatgattcattgttacattcaggtggaggttgctcttagagatctcatcctttccgactacgcgaagaagaacaacgtaaatacatcagctctgacacaatcagagataagagatataatacttggagcggagattactccaccgtctcagcagaggcaacagatagctgagattgagaaacaggtgcttgtaactgtcacttctctcaagggttcttgaaacagggacattcagaaattagatttattttggctactctaaaaagaatatgtttcctcctgcaggcaaaggaagcgagccagcttactgcagtcacaacaagaaccacaaatgttcatggtgatgaattgattagcaccaccattagtccgtacgagcaatctgcattcggatccaaaacagactggcgtgtgcgcgcaatttcagctactaacctctacctcagggtcaaccacatttacgtgaactcagatgacataaaggtaatttgctcagacttgcttattcaaattaataag

SEQ ID NO: 185543 - DNA, 55 bp, Arabidopsis thaliana landsberg
atccactaaaggcaaagaaggcataacgcgttacgcgacaaagcaaggttcatga

SEQ ID NO: 185544 - DNA, 472 bp, Arabidopsis thaliana landsberg
atgaagatcaatcagtggttgtttgcctcgatgttgctggccatgccggtgtttgccgccgaagctgtgccggatgcagccatcagcaatgacggcaccaagccgccgtatggcgccgcgcagcatgaggtctgcaaggcggatcccgggaagtgcagggctgcgatgcaggcgcgccgtgaagcgtgcaaggcggatccggaaaaatgccgccaggaacgcatcgcgcagcacgaaaaaatgtgcgcgcagaatccggaaaagtgccgggagatgaaggcccgcatggaacaacgtcgggccgaatgcaaggccgatccggagaaatgccggcagcagcatcagacgcgcgccgacgggtatttcaggaaaaccgatgccgacggcaatggcaccttgtcacgcgccgaggccgaaaagggcatgccgcgactggtccgtcatttcgatgcaattgacaccaacaaggacg

SEQ ID NO: 185545 - DNA, 157 bp, Arabidopsis thaliana landsberg
atgcataagattatacaaacgaaaaaacaaccattagagacaggcaaaaatttgtatgataaaatacaaaacttggggatagtcaaatcaaactacaaatatgtgaagtttgacactgcagaaaaagctaaagaagaagtgatagagagattaaaga

SEQ ID NO: 185546 - DNA, 67 bp, Arabidopsis thaliana landsberg
cctcctggtagttgacgggcgctgggcccggaatctcgctgccgtctttgtcttccaaggtgtagag

SEQ ID NO: 185547 - DNA, 238 bp, Arabidopsis thaliana landsberg
atgcatttgcatacgtggttcgatttttatttcgatattgatactgaccgggtgttccgcgatggcaaatctaaaatcttttaccacggcatacctgagccgtcggctacgacctcaagtaggctaagagttataactgatcaaacggttcgcttgataccagatagtccctgtattgattggtccatgcctggtgctggaatagttaattcaaggtcattggctgttgcaaatagtc

SEQ ID NO: 185548 - DNA, 456 bp, Arabidopsis thaliana landsberg
tcattgattgtgcgcactaatatcttcctggccaaccgtcatattgtgaaccatctcctggcaaatgctgtcaccaatggtttcgatgggcggatcaatatgaacctgacgtatgaattcagccggaatttcatggcagaaggttttgccaattataatacctccgtaaacaatgtacaaggcaaacaaccgcaattctttgcatacactttcgcaatgcgaaagttctttatgaacaaaaaactgagtgtaggattgacggcggtcaatcctttcagtcattatatccgtcaggaaaccactgtcattaatgccggatatacttcaggtaatatcaggatggtccctttccagtcattcggaatcaatttcagttataaattcgggaaactggaattcaaaaagaataaagaggaggacaatagctttctgaaaagtcctgatatggggaattag

SEQ ID NO: 185549 - DNA, 216 bp, Arabidopsis thaliana landsberg
atgatgaaactcgagggcgcactctacccctggcgcttccgcgtagtcctcggcctgctggcgctgatggtcggtgctatctgctggcgcatcatcgacctgcaggtggtcgatcgcgacttcctgaagggccagggcgatgcgcgcagtttgcggcacattgccattcctgcacaccgtggcttgatcaccgaccgcaatggcgagccgttggcg

SEQ ID NO: 185550 - DNA, 162 bp, Arabidopsis thaliana landsberg
ctacatttcatccacgtgaattttggttcatctgagaatgaggaacacattaattcacacatctcagctagggggattattaaccggaattcgaaatctattttaatcccttgtgtaaatttggatatacaagaaatctggattgtgaagcttgatccataa

SEQ ID NO: 185551 - DNA, 358 bp, Arabidopsis thaliana landsberg
atgtcagggtcagccgccgcccgcatccagcggggttggtcagaacctagcaaccgcaacgatgctcctccgcttatctccctgcatcaggtgactgggcatatctggcccaaattcccattcgcatatgtgggctcgtcagctgcgtaggtcctctacttagtgggcttggtgggcttttgtggggtggcttggtattttcgcaggtggattcctggaggggaatccagctccaacagtaactcttttatccctgcttattttgtggtccttgactatgagaaggaacccaaagatcctcttatccttggaagagcattcctacctacagctggtgctaggtttgatgtgaagagag

SEQ ID NO: 185552 - DNA, 92 bp, Arabidopsis thaliana landsberg
atgtgcatcgactacaccagcctgaacaaggcctgtcccaaggacccatatccacttccacgtatagatcaaatcgtggattctacctccgg

SEQ ID NO: 185553 - DNA, 68 bp, Arabidopsis thaliana landsberg
ccttgggagttcggagtaaaccgaagaaaccgaaccgattaacccgaaaatttcgggtttcggcgtaa

SEQ ID NO: 185554 - DNA, 97 bp, Arabidopsis thaliana landsberg
atgcccaagtcagttaaacccatctctgaatctgacaaactctccgatcatctccgtgattcatcactaacctccgagatcaacaaacctgatttcc

SEQ ID NO: 185555 - DNA, 144 bp, Arabidopsis thaliana landsberg
cttcgtaggcgatgtccgagaaacaaaggtgggatgatatggttcgatcagtgttttgttgagattacttcaatcagtgtcatcgacttcaacatctcgaagatcaattacgagaacaatttccccttacacaacccgaacagg

SEQ ID NO: 185556 - DNA, 417 bp, Arabidopsis thaliana landsberg
  unsure (1)..(417): unsure at all n locations
gacgccggacaggacgatcccacgcggaacgacatctacaatgtcggcaccatcggcaccgtgctgcagctgctgaaactgccggacggcaccgtgaaggtgctggtggaaggcaacagccgtgcgcgcatcaccggctatgccgagaatnnnnnnnnnnnnnnnnnnnnnnnnnnnnnnnnnnnnnnnnnnnnnnnnnncgcgcaggaagtcgaagcgctggcgcgcgccgtcgtctcccagttcgagcagtacatcaagctcaacaagaaaattccgcccgaagtgctggtgtcgatcaaccagatcgacgagttcggtaaactcgcggataccgttgcctcgcatctggcgctgaagatcgccgagaagcagcagctgctggagacccagtcggtcgccgagcggctggagcgc

SEQ ID NO: 185557 - DNA, 491 bp, Arabidopsis thaliana landsberg
atgacgcagcggcccgccagcgggcgggccgctgttctttctccccgtgctttcgatcgggcgatgccatggcggtatgcccaggggaagctttttccaaaaaggtgtgaacaatgctggatgcaaacctcaaaggacaattaggaacctatctcgaacgggtcacgcaacccgtcgagttgcgcgcctccctggatggcagcacccaggcggaggaaatgcgcgtctttctggaagaaatcggcggcctgtccgaccggctgtcggtcgtcgaggccgaggcggccgacggccgggtgccttcgttcgagatcgcccggaccggcaccgagatcggcgtgcgtttcgccggccttccgctgggccacgaattcacctcgctggtgctggcgctgctgcaggtgggcggccacccggccaagctggacgatgccgtgatcgagcagatccgcgccttgcccggcgaatatcatttcgagacctatttctaa

SEQ ID NO: 185558 - DNA, 507 bp, Arabidopsis thaliana landsberg
atgaaacctcttcaatcggaccggataaaaaccctctttctaaaggacccgaaccgggtacaatcggaccggaacttctcggaatcggttgcaaaggaatcgacgaaaacgacgtcgtgctttcgaacgcggcggctctatcgatatgtccgtaaggatcatagagagaagtagagagtggtgtggcggtgttagcactaacggaagcgccggagattgtacggaacgtcgtcgtttcttcttctgagtgaactttcgaagacgaaactcgtgtcgggtctggtctgacgtaacagaaagagtgtcctaacccttcgtctaaaggatctggttcgagaattgataactcgggttttttgttccgaccagcacctccggtcaaacatttacttagcttcccgattccgttacccatctgagaagaagaaaaaaagtttttcttttggagatggagagtttagatacaacgaaagtgtttttaccctacccattgttgatccatggtag

SEQ ID NO: 185559 - DNA, 155 bp, Arabidopsis thaliana landsberg
gaacaaagaaacaacgtggagatggagtaaaaattcaaaacttttactctacagaaggcctggagatcgagtgtatagcccagtggagtgcaaaatttttaaaactttctgttgcacctggagaccatgaattcgagtatatcagtcaagtatat

SEQ ID NO: 185560 - DNA, 77 bp, Arabidopsis thaliana landsberg
taaagctgagacagcagtactatccaccaccaaagaaaagaagaaaagaggaagaaaaacctctaattttcacatga

SEQ ID NO: 185561 - DNA, 980 bp, Arabidopsis thaliana landsberg
gagatcaaatcaaagacctctctgtttccgatatgagtacccgttattcctctcagttgcaatcatcagccattaactccatcactgtctcctcatcttcttccttcgcttccacgcaactggatgataacactcacacggctccggagagctctccatcttcttccttcttcatgagacttgccatgagggtatctagagcaaggtggttcattttcttgagaagagtctttcattaccagaacgcctcaagatccgatcttggcaccaatcctttcaattctatcgcttggatggtatcagagctcatcgctttacttttacagatcactgtgataacatccacactcgctttgaacaacagcgagaggcctgcttgaccgctgaggttacggatcactgaatactacgacgcaggtgagctcaatcttatgttactatacggtcggtatcgtcagcaagatactagccatgaaaatgcatttagcttcggcgatattgagcagcaccaaagaagcagggaagagaccaccaggttactaacaaaaatctagttttttcaagtttgatcataaaatgcaaagatttctaggaaaatgacttatttttgtgtgtgttttaggtgctcgcatttgatgaacaaatgccggacatcgctggagctattctttgcgatatggtttgtgataggtaatgtatgggtttttgattctcggtttggttctttccactatgctccaatccttcatgtcctctgcatctccctactcgcttggaacgctctctgttactccttcccatttcttctcttcctcctgctctgttgtgttgtacctctcgttagtagcttcctcggctacaacatgaacgttggatcttcggaaaaaggagcttcagatgaccagatctccagtctcccaagttggaaatacaaactcattgatgaaacttctgattcttctcaagcaaacaatgatccg

SEQ ID NO: 185562 - DNA, 142 bp, Arabidopsis thaliana landsberg
atgaccgacctgggcgccgagctcaatgctgaaacgatagaccagctgcagtttctgcctacaggatgtggttacctgaaaaatttcctgctcgacaattcagaaggcaagaaggtggacgataataacccggccatgatcg

SEQ ID NO: 185563 - DNA, 82 bp, Arabidopsis thaliana landsberg
gttaggccttgttgttattattgctggtggagatggtcaacagaaaagtcaacaaggagaagaagataatggtttgggctga

SEQ ID NO: 185564 - DNA, 1225 bp, Arabidopsis thaliana landsberg
atagtgtctattggccaatgtttatagtcgcgacaggagctgctattgttgggagccaagctacgatctctgggacttattcgatcgtcaagcaggccgtggctcatggatgttttcctcgagttaaaattgttcatacttccaagaagttcctcggtcagatctattgccctgatattaactggatactcatgctcggctgcatcgcggttactgctagtttcaaaaagcagagccaaataggaaatgcatacggtaagatgttagataatcgttttaagttagttatcataagaatttttagataatctagactaaaagaattttggtttatgataaagataatatttaaccgtgacagttttgttatcttggtcaaattagggactgcggttgttctcgtgatgcttgtgaccacattactaatggtgctgatcatgcttctcgtgtggcattgccactggatccttgtccttatattcacctttctctccttctttgtggaattatcgtacttctcggccgtgatctttaagatcgatgaagggggatgggtgccgctcatcatagcagcgatctctcttctagtaatgtcagtctggcattacgcaacagtcaagaaatatgagtttgaaatgcacagtaaagtgtccatgagctggatactcggccttggtcccagcctcgggcttgtccgtgtcccggggatcgggttagtctacacggaattagcaagtggtgttcctcacattttctctcatttcatcaccaacctccccgccattcattcggttgtagtctttgtctgcgtcaagtaccttccggtttacactgtccctgaagaagagaggtttcttgtgaagagaatcggaccaaaaacattccgaatgttccgctgcgtagccaggtactgtcctttattcttctctgttctttagtagggtttacaaaatcaataaggagttttaagacccttgaaatatctcaaactttttttaatagatatggttacaaagatctacacaagaaagacgatgatttcgagaacaaactgctgactaaactctcctcattcattcgaatcgaaactatgatggagccaacttcaaactcaagcacctacagcagcacgtattccgtcaaccatacacaagattccaccgtagacttgatccacaacaacaaccacaaccacaacaacaacatggatatgttctcatcgatg

SEQ ID NO: 185565 - DNA, 172 bp, Arabidopsis thaliana landsberg
atttcccttccttgcgcgtcacggcatcaatcacatttataagaagtgtgcatatgtaactcgcaatcgacgagctcaagaagaagatcgctccagcaaccgctctcatatgctcaggcatcctaaccgtcagaaactccatcagagccaccgcggaaaacgcttcggttaa

SEQ ID NO: 185566 - DNA, 595 bp, Arabidopsis thaliana landsberg
atgatcaagcaacgattaactgtgattaagggctttaagttcaatcctaagcttgaatttctacaaggtaattaaatcattatcccctatgcaaatgcaaatgcacactagatgcttctagactcaatcctaaaagagaaaattaatatgcaaacttacatgattttttttggatttttcaaaattttcagatttttttttatttttctcaaaacatagatattgaaaatgcaagactcaaagaaataaaatcaaaacaaaacataacgttagatggttagtctctcccccaaacttatttcaccttctcgatgtgagagaaaaatatgaggaaaagactaacgaaaataaagaaatagaactaaaagaaataaagtcgtatatacaagtgataccgtggagtggctaaggcatggtggagtggtctctcgaggcgttcttcctcctagacgagtgtgatgaagtggcgggcgtttcattattctcatcactctccaaaatattgtctctatcttcctcttcatttgaaggacaacaagctcatcctcggaagagacataatccggtggttggagcatcttcacttcttaagtag

SEQ ID NO: 185567 - DNA, 150 bp, Arabidopsis thaliana landsberg
atgagattagaggatagattcgaggcggtgaatcagtaccggaaaaagatgttccggaggatgaaggctgcggtgaagaagacgaagaagaagaagcaaactatgtttcagtatgatcctgggagttatgctttaaacttcgacgacaga

SEQ ID NO: 185568 - DNA, 1826 bp, Arabidopsis thaliana landsberg
atgagtgcgaagattttcttctgcttcttgctcttcttcttattgtgcttggaaagcagcagaggacagaacaacggcaaaacccaagtcaacatcggtgttgtaacagatgtcggtacttcatacccggatgttgccatgctctgcatcaatatgtctcttgtcgatttctactcttctcgtccccaatttcagacaaggcttgtcgtcaacgttggtgactccaaaaatgatgttctaggtgcagcaactgcaggtaccttattttctcctttcgctttctctctctccaaatatatatatagatgtatgttaatttttctatatgtaaactttattcacgtttgacatactcaacccgaattttcttggttttaacattgtcacagctattgagctgataaagaacaagcaagtgaaagcgattttggggccatggacatctatgcaagctcgcttcctgattgagattggccaaaagtccatatttgagactctttcttggacaatattgcaacacttataaaatggttgaagaaccattcaacgttgatggattcggctttgtaagtttccataacaaaataaaatttctatgacagttacattataaggtgagaatatatataattcacatttttgtaggtttttccaattggatcacctttggtcgctgatgtagtgatgtttcaagggccatcttaaaagtagcaaagtcaccaaaagcaatggagcttgaaagttcatggttcaagcagaaagaagaaagttgtccaaactccctcccaattcccatccaaatccgtctacttcatctaggcagctctgcgtatatagtttttggcttctttttcttgttgcttttgttatatgtgttctaacccttggcaaatccacattctttttcctaaaaaaacctaatcctgttgatggctattggaaagagtatatgaaaccagacaatgattcgtacatcaaaaatgtcgagaaatgtccatgttctacatgccaactcatgcctgagaacaccactcaagaaacaaatcaaacagctgacggttgaggcacaagtaaccaaccattatgtttgaatctctcaagattatcattaagtgttttttatcaaaaaaaaactagaattttaaattttcttttcatgccggaacgggtttggcttgaccattaagatgtcatacttattttctttcaatacacgtaaactatgtgatcatgcacgacgtttgtttcgttgttacattttaatcaagtagtgcacagaatattaatatatttgacttcaacattaaatttaattctttgtcgaatatatacagaaatttattttaacacaatatcgaaagcttagttgtctcttaccaaacaagacgtacaatataggaataatttgattataaagaaatggccacaaactttgaatttgtatttgatgctattttcgagtatggtctaaagatgacgaatatgaatttaaaaaaactcagcatctgatcaaaacttaaccatatagatccaaaatcatctggaaacacattttgcacttaagagaaaccccaaaatgagaaacaagaaagttttcttcttcatcttactctttttattcttctcctttaagatcgaattcggcagaggacagcacaacgaaagaaccaaagtcaatgtgggtgttgtaacagatgttggaacctcatactcggacgctaccatgctctgcatcaacatgtctctagccgatttctactcttctcgtccccaattccggacaaggcttgtcgtcaacgttggcgactccaaagacgacgtcattg

SEQ ID NO: 185569 - DNA, 914 bp, Arabidopsis thaliana landsberg
aaaaaccgggacattcggttcaagaaatctcctcgtcttcctcctccaaaacaaaatgtcaaaatccctcctttatcggtttttacactaaccagacccacctgcgacaattttctgtggttttcgaccgtcgcagcaagaacgagccggagtgaatctccgtcaacgactccgccagaagtaaaagaggtaactttgtagtttttgatctttcttggaattggaacttcgtcatcatacatatataacatgtaaattcatgaattagtgcttaagttatatgtttatgtatgtaatagcccaaaggctctgtctttaaccaagagtcattgcatattcaatttgagttccatggttgcaggaactgtgttgtcgtctatcattgtacttagatttgatgttttcatataatgtaacaatgtgaacatgatgatattttgattctgtagtgaagatggagtcatggatttgagatatggataaaccaatttaccgcttatagattctggtcttcttctcattggtaagcacctgtagctcctctgcaatttccatttgtttacttttgttcacaacaatgatcttttaactccacaattcagaaaaagagtgcatggcttgtaagcaagatgggaagacttaccgtaggagtgtagtatgagccggtatgtgaattagtacattgtttaatttacattagttagatcttactctaaacattagtggttgggagaaagtgagcatcaaaaatgaccatttgaaattttctgttacagcaaagatactgtaaagtacagagatttttcgagaggagattcctcactatcttctgcaatggcatggcaaagttctggcaagttgtgattcggggaagatggttgatttggcaacagatttcaaagcatattaaagaa

SEQ ID NO: 185570 - DNA, 338 bp, Arabidopsis thaliana landsberg
gcattggccaagcttgtagctgtgtgcggcccatatcatagaatgaccgctggagcgtatagtcttctcgctgttgtgctgtaccatactggggattttaaccaggtattctctttgaaagaaatttggaccgtctccaagacattgttcaatttcacctactccgtttccagcagacagcactaaccagtattgttttttcaggctaccatttatcagcagaaagcactcgacataaatgaaagggaacttggacttgatcacccagacacaatgaaaagctacggcgacctggctgtcttctattatcgtcttcagcacacagagttagccttgaa

SEQ ID NO: 185571 - DNA, 638 bp, Arabidopsis thaliana landsberg
atgggtaaggagcattgcaatggatcaagtccacgggtaaaggaatgactctccatcagacggactaagcttagctacgatgcgattatcggtaaaccccgaaaccattaggctagcccttagacctaggatagcttaagaaaaccttagttttaggaaaccttagaaggactagaaaaccttagaaggactaggagaccataggggaatccatttgggcagtgggatatgagtatgggtcgttaatggtcgagggattgaacggaaaatgcggataagtgacgttagcgagcttagtcggttaattctggcatgaaacgtgttagtcctaaagaagccttgatttgtgtcatggaccctcatgagacatcagagatggagtgtgccctatcaatgttcttgcggtccagtgacagatcatgggtttcgccggaatgaagaaacggacggccaggattgaactatggttcatgtttatccgttaaggctcaagcttatccacaattccggtcatccttatcctttagggtcgagcttatgcattttggatgatgtttatccataaaaaatggaggaaaccaatcggagaccgattagtgtcccggagcgcccgtggagtgacatttatcgagttttga

SEQ ID NO: 185572 - DNA, 501 bp, Arabidopsis thaliana landsberg
atgattcaaagttgtgtaaatgaagacaccattatcgtcccaagctccacttttcacacgtatcgtctcatgaagcgtgcactggagaacaagttttttgctcgcgataatgatagtatgtttgctgagcaaagcaacactctccatatcactggaccaaacaacgtacctaacaaatggtgtctgaagctcaccaagaacaagcctttgctggaggtcaaagataactactttatcctcagatctacaaagcaaattcccagtcccagcataaaagatagcatctgtgggaataggcagaggactctttttaaccacctcattctttagattcttgactagcacttggctggtgcttttctcgagaacagcaaatcggttacgggcaatgaatactgcagagccacctgtccctctctttgcatcttgcacaacgtcactcctgccaacactatctttcggtatgatgtacaactcatacgaaccaccatccagatataa

SEQ ID NO: 185573 - DNA, 168 bp, Arabidopsis thaliana landsberg
atgaaggcgctcaccatctggcaaccctgggcctcgctgatcatcgcaggcgccaagccctatgaattccgaggctggcgcgcgccgcgctcgctgatcggccagcgcgtcgtcatccatgccgccgggcgcaagatcgaccgcgatgaactcaccaacctgctgatg

SEQ ID NO: 185574 - DNA, 866 bp, Arabidopsis thaliana landsberg
agaaaagtggagaatccatggcaaaggctttgaatgacgacgatcctgtttatgttgcagtaagcgaagacgttgatcaaagtagattgactttgttatgggctttgaagactcttcgagcgaaaaagcttcaccttctccatgttcatcagctcatttccatgaccccttcatgtaaaaccatctcttccctaagttcacttctcctttttgggtgctaagaaacttgttcgggaatgtattaatcaaaaatgttacaatttgttagttttctctgctttggtaatacttatctaaatgatgcaaatggttgcagctctgtgtcttgtatttgtgtttatgtgtggttattatcaagctattaatgattcctgattatttaggaagatcatgctttacgttcttgaatgacttttctcctaacgtttggtcttatgtttgtgaattttagcaagtgggctggaacaaagcgagatcgatgcaatccaggagttggaacagactagtagaaatgatacccttctcaagtatcatgatatctgcatagatgaaggagtgagtgctcttccaactagttgatacaataaggaagctagtggaatcttataacatattcttgtggtttatttgttttacaacaacaatttcgattataagctataacattttactaaatcttaatattgcaggttattgaacaagatgtggatatgtcatgtttttcagcaaatagtgtgggggaatggattgtggaacttatctatcaaaacaatatcaagaagcttatcatgggagcaactgctgattcacactactccgagtacgtatatcttcagtatcattctctgtctccagaacaacgctga

SEQ ID NO: 185575 - DNA, 125 bp, Arabidopsis thaliana landsberg
atgataataaacactaaaccacgatttcgagcagaacctaaagaaatcggaaatctaccgacagcgatccacacgaagaatcgaaaaggaactgaacctaataagagagtgaggaagaagaagaa

SEQ ID NO: 185576 - DNA, 434 bp, Arabidopsis thaliana landsberg
gtcacgccgattgccagtgatccggccacggacagcgagaccgaggcgatgcggcgcacgatgatccagcagttcgatcagtacgtgaaactgaacaagaagattccgccggaaatcctgacttcgctggcaggcatcgatgaggccggccgcctgggtgacaccattgccgcgcatctgccgctcaagcttgagcaaaagcaggaagtgctggaaatgatcagcgtcaagcagcgcctggagcacctgttgaaggtggtcgagggcgaactcgacatcctgcaggtggaaaaacgcatccgtggccgcgtcaagcgccagatggagaaaagccagcgcgagtattacctgaacgagcaggtcaaggcgatccagaaggaactcggcgagaccgaggacggtgcggacatcgacgagatcgaaaagcgcaacaa

SEQ ID NO: 185577 - DNA, 579 bp, Arabidopsis thaliana landsberg
atatgggccttgcatgggcttcttttgaccattgaagctgctggtttatcattcgtatctcatgttcaggtaaacaatttcgtggttcattaagatctttgaatgcacagttttcatattttgctttttcgttttaaaggatcttattttggtgttcgggttgccagttcggcaaactaaaatgaaattctgcgtatctttaaaattggctaaatgagttacttggttatcacctgaatctgttaatgcttgacagagaaagaaattctctggtgcagttcaatagctgcaacttttttaatgtttaagaaagtttatctgccttacaataggtgcatggttataactgctaacttcattttcccagcttgatttgatatctccatccattgtgtcatgttatcattcccattctgtattcattattaggcagcattaggacttgccttggacattttgttgactgaagaaagtggatggatcgatctttctcaaggcattggacgccttattaatgctattgttgctgtccttggccctgagctttctcctggcagcattctgttttcacgctgcaag

SEQ ID NO: 185578 - DNA, 256 bp, Arabidopsis thaliana landsberg
atgcagttccttcaacaggtcgtcaacctccgcggcggtaaagttgcagaaccacctgtcggcacggcgctctatgctgggcagacctttgccgcgtacggtatcggcaatcactacatttaccttgcccttttcaaaagggaaagccgaaaaagcaatatgcaattcatcaaaatcatgaccgactatccgccttaccgatgcaccgaaggatgcgaacttgtcatgcaatggttccagcgggataagctcctcg

SEQ ID NO: 185579 - DNA, 821 bp, Arabidopsis thaliana landsberg
atggagggtttggagaagttttacagcaagatggtgaaagaagcgaaatcggcagcttcttcttcttcgtcttctctatctgattttgcggataatctgatgcaagacaaacgagccgccggcggcaacttgactactacatacgacgcaggatccggcactctggtaaccagacctcccaggtaagctgcttctattcaatatttgttcgaaaagagatcattttgccagtaaagctaagaacttttaagaattttgggtgagtgagtgagggcatgtctccaatttttcagattctctctaattatgggaaggatgataataataatcactatttctgtggatgtattatgaattggtctgcctgcttgagagaaattttaaaaagatggaacaaaaatgaaaaagagggcagattttgtgttatagctcaaaacctagagaccatgatgatttcccagttccacatcacagagcttgtaaatttgtaatggcttgttcaaatgatctaagatcttagatacccgaggaacaaaactgtgcaggtcgattatagactatctagtaggagctttgggttgtttctgattgattcgactaatatgtaatggctttacgtgttttgtgtactattagttctaatttaagaaaattatctgacctatcttgggactgtgtttggtggcagcggagtttcggtctggacgtgttcaaagttgtgcgctgttttcttcgtcgctggagtgtttgtgggttatacacttaagagacgggttcgacgctgggcttctaaattactgagaagaataaaggatgattaa

SEQ ID NO: 185580 - DNA, 698 bp, Arabidopsis thaliana landsberg
agttactgatgagtctcttttgaagttaacacgccgtgctctaggcggtgttcgatgtttgaatcttggaggatgtgttggtatcactgattatggcttgaagcaagttcttgctagcaatccacatcttactaaggttagtttgatcgaatgatggaaccaatcttgttatatgattctgtgttgtttgttcatgtgtgtctgtttttttgcagctgagtgtatctggttgtcttagactaagcacagcaggactagtgtcaactttaagggacttaaaatcttcaaaccgtcttggagtcaaaagcctaatcactggtggggcgttgtatttcacaaaggagcagtttaaagagctcaacttattgctaggaggagatgctaaagtgggtttacaagagaggaagaagagattctatacgtcttgtagatcagaattctatttagaggatgatcgagttactgacctcgagatatgcccctggtgtgagaaaccaagtctggtatttgattgtccagcagatacatgtccattgaagggtcaatatccttattctaagtcatcttgcagagcttgcgttgtctgcatagaacgttgccatgagtgtgggagttgcttaaatgactgtgaaaacaagccgttctgttttgcattcagctgtgtggtatgcattgagaagaggtctaaccgcttataa

SEQ ID NO: 185581 - DNA, 132 bp, Arabidopsis thaliana landsberg
gttcattcaaatcaagttgtagcttactcgactgcttacccgaatccagagacatcctttgcagagattgctcttccaaaaagttttgagcttcatggacttcttcaagcatatcactatactcaaaaaccg

SEQ ID NO: 185582 - DNA, 278 bp, Arabidopsis thaliana landsberg
atgatgacttacagtgattcttcctccaatcctcaaatctttctacttgaacagccaaatctggatccagagaccagcgaacacatcaaaagacgaactaataaactaaaacgtcagagagaagttgaggaactcaaaggtttgtagattcaaccttttgattcggatgattatttacccttagatgtatagtaatcaacggttgatatgaataattaggtgatcggcaccttaatcaattagccaatgagataattgttcgtaccaatactctgtga

SEQ ID NO: 185583 - DNA, 118 bp, Arabidopsis thaliana landsberg
atggcaaggccacgactgcttgtagtgtcgatgtcgcttccggtcactgcaaagaggtctggagaagagtcttggtctttcacaatgagtcctggtggtctagttagtgctcttctag

SEQ ID NO: 185584 - DNA, 253 bp, Arabidopsis thaliana landsberg
ccaatactcaggtcccttctttgaagacttctataccaatctcaacaaacaccaaaatcataaatcaaggaagtcgaaggaaaacatcatttcagaggaagagaaattacatcgagaaatccataaacaaaatcagcacagctattcccacaagctcttcgaaccctctcgttcatccaaatctccaccgcaccatactcagtcgccttcttcaatacatactcaccctcctatcaacaaagaccatgataag

SEQ ID NO: 185585 - DNA, 114 bp, Arabidopsis thaliana landsberg
gctggagaaacaacagacagcttcctgaaccgcgctgaccaggcgctttacctgtcgaaagccaagggtcgcaaccgtgtcaccacgctgaccgaagaactggcagcggcatag

SEQ ID NO: 185586 - DNA, 166 bp, Arabidopsis thaliana landsberg
aggtaatgaaaacgcaagctttcacagtgcaaaacaagctgttgtgtatggttttatctatgcgtcaccagaagccccggttcatgttgttaagaacaaaattctgtgtaaggactgccatgagttcgtgtccatcttgactcggttagtcgataagaaaataact

SEQ ID NO: 185587 - DNA, 75 bp, Arabidopsis thaliana landsberg
atccaattactgcgtcaatttttaatcgagaagctcagatccaataacgacaattgctacacgatcggcttgtga

SEQ ID NO: 185588 - DNA, 232 bp, Arabidopsis thaliana landsberg
gtcgtgtctgtgttcctattgacccgaataactgtgatgagtttgatccattggcagttccaactctttcacaggtaaattaataatagataatgtgatacgctagagtgtggatctgaattatttcatcagagagatatgtttccttaagcttatacttcatcttctaatgattttcagctaatagaagaaatcaattccggtggcctcagaatggacgtggatgatgatg

SEQ ID NO: 185589 - DNA, 43 bp, Arabidopsis thaliana landsberg
atggtacaaggtggatacaggcttggtttggagctgattgttg

SEQ ID NO: 185590 - DNA, 68 bp, Arabidopsis thaliana landsberg
acgaaagggtaaatggtcgatattttatatcaagtttggatctggatcggttggatcaagtcttatag

SEQ ID NO: 185591 - DNA, 2648 bp, Arabidopsis thaliana landsberg
atggagttagaggacaaaaatcattacatctctgaagttgattggcaatacgaggaagatataaaccaaaccttaaccggagaagatgatggctatgaagaacgatcatggtgtgaggaggattctagctcagaatttgggtatgaaccagatggggaagaacgtgaacccgaaccgccagatccatcccgaggcaccacgagccaccaaggttggtacggaggagaaactgaccaagagagcaatcccgacgaattctatggagaaaaatcatggtgtgagtccgaacaagaggagctacaccaagaaaaaatgccatggtgtgagatacctgactccgaccatgaggaagagcaccaagaagatggcagaccatggtgagagatacccgacaaagattatgacgatgcatcatatgatggagttacaccgtggtgtgaagaaattgattcccaaatcagtttagatgagtctcaagcaagcaatggtgatgaactagaatctaaagaagagtttgatgaggagaatatagtcgaaagtgagacaggaagagatgattccggagaagattacaccgaagcgaatgaagacgtaagtgtgactaatagagatgaattttgttatataaactttgcaggccatcaccaaggatcagatgcctatttgcgttgggagcatgagatggaagattggttatcatctaaccaaattccggaggaagaaaagacgatttatgcggaggataccctaaccgaggctgcccttaggcattgggaacaagatgcatatattcgtcttgaatatgatgaaccagacgcttcttggaaagagatgaaacaacttatgtatgaagagttcgtggaagatgctagcagtatgcgtcaatacaatctaagaatctacactaatcccgagccaagaagatggattctagcaaaaccgaaggctacaccaaagagcgcttttagccctaagccaaagaaagagcctacacctgctctaaaggagaagtctaagtctaagtcaacatctcatgtaaagaaaaagaagttgagtacaactacgttgcttgaaccacactctgaaccacacgctgaactacacgttgaaccacactccgaactacatgctgaagcacagactgaattaaagcaaggtaagtcttctaacctatctaaatctaaagaaatgatatgttataggtgtcatagaagaggacattttgctgcaaattgctcaattaggcaaatagaaaagtcaaccacaaaggagtttaaaccgaatgctagtgtaatttcaacaagtttagaaagttccaattcttgtatgatacacttgctcttgccaaagaatgttggtttaggtcacactatggagcataaggctaatgaggttcaaaagagtataaacattgagaggcaaccattggaaatactacctagtggaacctatgttcttattcggtattggaataatttcatacttcattgttgctttaagtactctgtttttaatgattcaacttcaagtataatgcacttgttctttgccaaaagagtcaacaatatggtaggtacaagggaggatcataaagcagatttactagagatgaagaacctcatgaaccaaagtccaaaccacagtgaaccagcaccattagtgttaacaccacatatcatggagacaagaagaatctccaactcttgcttattcaaagaggaaccaccagatttcaaagctcaaaaccgagaaggagttaagcaagcaataccacgagtcaaagtaccggatcaaaacagaggagtgatcctatctttcttgctcaatggagagccaccagatgcactatacatcatcaaatcgcaaccctatcaaggtaagaccttagcctcccaaaatcgcatgaaagctaacttgctttctcttggtgcagattgtatagtttcgaggtcgaaactttttcaagggagaggctatgatgcagacatccaaattaaaccaaaccgggagcataacaaaccagcctgtacatttatcaaaccgattgatcagaagcattttggaggactcttgcccaattggagtctcaatcaagcacaaggcctaggattaattattcaccagcaaattaatcctaagaagactaatgatgattcaagaagggtcaaagaccagcgagccgaatcagcatattgtgggatatgaccgtcgcactctttttcccttatctagggtttgtcccaatgggtttacctagaaaggtctttaacgaggcaacatcaagtcatcaaggaatcatttaccaagcaaatgattcgaagatatcacaagtacatatatttgatgtacttgctaacagaccggctgaactacttgctgaactacctgctgaactaccttctgaagtaccgcacgaaatgaagccaaacaaggaaatcttccttattctacacttggacgcacctcaaagctacatatggaaaccaggagaacatctagaccacacaacacttgtaccacacgaactttggtacatcttaccacacaagaacccgctgagttactacttgccatatatggagccaaaggagatcgattaccaacaactctttccttctttgtttgtgcgcttatgtgagaatctttag

SEQ ID NO: 185592 - DNA, 93 bp, Arabidopsis thaliana landsberg
aaaattgacaggatgtatgcagctttcactggacaacctctggagaaagtgcagcaatacactgaaagagatcgtttcttatcagcatctgag

SEQ ID NO: 185593 - DNA, 60 bp, Arabidopsis thaliana landsberg
atgcgcggcgccagatggcgcaggcgcgtgcgatccaggccggcgatgcggtcgcggatg

SEQ ID NO: 185594 - DNA, 213 bp, Arabidopsis thaliana landsberg
atggctttgggggactgtttgtttgacactcagcaaatacagactgaattaggtattgatatttgggatttctctgagtggaagacatctaaaacaccggcagaggaaatgttgacctacatgcagagagcaaactcgatggttttactctcaacttcgcagctctctgttttgcatgcattgatttccgtcttgatactttatgaggataat

SEQ ID NO: 185595 - DNA, 319 bp, Arabidopsis thaliana landsberg
aggacattagcgacgatcgtctggtggcattgcgaaagcgggcagaattagattctaagtacgtgctcttcttcaattccagcatagactctgaactcacgctctctctctccaggtatgtttctctcctcttttactttgcacctagaacaagaggcttttccttcaatgcatctcaacacggtatgtttgcagactcgcttctgcttttgcagagttggcactttcttattacagagaagaaggacggagaatcaaaagccgaattgagaaaaggagttccaattctcttgatttgaatgttcgctactgttttaaa

SEQ ID NO: 185596 - DNA, 210 bp, Arabidopsis thaliana landsberg
attcctgattatctcttattcatcactaacacaatgagacttcaaaattcgaaacagctgtgtgaacttgcatcttacaagtacaagtatgtgtctgaacatcatcaaaacttcaccaatcacatgtttgaagcaagtcttcgagttttattaagagacgccggggatcagacaataatggatacacctaatcaacagcaaccatgttga

SEQ ID NO: 185597 - DNA, 1650 bp, Arabidopsis thaliana landsberg
atgctcattgctctgtggtttcggatatattgttgtcaaaggttcagaaagcaaaacatcgccccaataacctcgatatcctgtctgctgctcgatcagcttgctgtagggtgagcgttgagacctctttggaggctaaattcggtgatttgcctgaccggatatatctcaaggcagcaaaactttgcggtgagcaaggtgtacaagtgcaatggcatcaggaaggatacatatgctctaacggatgtaagcctgttaaagacccaaatcttctacatcccttgatcccgcgacaagagaatgatcgattcgggatagctgtggacgctggacaacattctaatattgagttggaagttgatgagtgccattgtatcatggaggctcatcattttagtaagagaccgtttggaaacactgcggttttgtgcaaggacatcagctttggtaaggaatcagttccaatttgtgtcgtcgatgatgatctttggaattctgaaaaaccgtatgagatgccttgggaatgctttacttatgttacaaactcaattcttcatccgtcaatggatcttgtaaaggaggtatcttacttgttctagcttgtcatacccttgaaacagagatgtgactccatgttgtaaccttgttttttgtccgctgtttgcagaatctgcaactcaggtgtagctgtcgcagttcagtgtgctcgcctgtaacttgtgatcacgtataccttttcggtaacgattttgaggacgctagagacatatatggaaaatccatgaggtgtagattcccatatgatggcaaacaacgtatcatcttggaggtaaattttagttttgtctctgttgaagtgactttgtggtatttttaaagcttgttacttacttgacaacatatttgtggatcctcattttctgattaaccgtgattgttgtcgtcgattctgaaaatgtaacaggagggttatcctgtttatgaatgcaataagttctgtggatgctctagaacatgtcagaatcgggttttgcagaatggaattcgcgcgaaactagaagtttttagaactgaaagcaaggtgtgatcctttttgagttattgtctttaacccatttgtcttgcttcaattccaatatccaactgattgatcaacagggatggggattgcgagcttgtgaacatatactgcgtggcacatttgtttgcgaatacatcggggaggttcttgatcagcaagaagcaaacaagaggcgaaaccagtacatatcttttcgcctttttgtcctccagcttagaagatctggagctgaacttgaacttaaatcctgctattgatttcataggtatggaaatggagattgcagctacatactggacattgacgctaatatcaacgacataggtagattgatggaagaagagctcgattatgctattgatgctactactcatggcaacatctctcgattcatcaatcacaggtgagtttataatacaaatgtaccaaaacctttacaattactacaatactgatgatttcaatcttttttaatctctagctgctcaccaaatctcgttaatcaccaagttattgtggaaagcatggagtccccgctcgctcatatcggtctatacgccagtatggat

SEQ ID NO: 185598 - DNA, 67 bp, Arabidopsis thaliana landsberg
taattgttctaacaccattagtcatgactggaatcgaaactcgacccgacaggagatggagatttaa

SEQ ID NO: 185599 - DNA, 315 bp, Arabidopsis thaliana landsberg
cttgccgaccgcaatgtgaccatcgaactgacgccggaggccaatcactggctggcctcgcgtggctatgatgaccagatgggcgcgcggccccttgcccgtgtcattcaggaatcgatcaagaagccgctggccgatgaggtgctgttcgggcgtctcatcaagggcggtcacgtcaaggtcaaggttggcgacaaggacgatcttgtctttgaaatcgaggaagcgcctccgcgctcgttcccgcccgcgaagaaaaaaggcggcggtggcggtgtcggcggcggcatgtggtggtggctcaaccacacctaa

SEQ ID NO: 185600 - DNA, 192 bp, Arabidopsis thaliana landsberg
atgaacactccgaacggcgcagctgctgatcaggcattgaaagctgctcgtcgatcgcagcgccaatcgactccaataaacgggcttgatcctcgtaaattcacactcaatcgccaagcagcaaaggagatccgagatgcccaagcccccccggccatggctgaatggatctctcaaaaaataagtcaacgt

SEQ ID NO: 185601 - DNA, 658 bp, Arabidopsis thaliana landsberg
attcatctggggattgagaatagcattgaactacaggttggttcaggacccaataagaaattaagctcctttcaagtttttaatagagttcttcgattctctggctattcaggttcgcaaactactcttttagattccaatcattttctgattctgcatcaggcataatgacatgttcttcaaatgcaggtctgtacagtggtcttggatcgttaactttaggaagaatttctggttttggtgcaaggtttggtgtctatgagattctaacagctttctacaaaggtattacacaggtccatgtctcctttgttgtgtctgatttcgatgattcaagattaggtttctttgtgtctagctcctctgtcaattagctcaataacatcagttaattagtcaatacagcaatcatttgttcatggattatgttagaatatgcaacagtgttcacatacattcatgtcatttatacgcaaatttggttcctttttgggcaatacctttgtcttgaagaatctgaatatgaattcattttgctccagatggtcgacatgataactatgtgagtgttggtgaagcttttctggctggtctggtgggaggtgcagcagaaacagtgatgacttctccatttgagctaatcaaagtccgaaaacaa

SEQ ID NO: 185602 - DNA, 132 bp, Arabidopsis thaliana landsberg
atgaaccgcggagtaagaatgcgggatcggacccattttaccgatgatgtctttaaacgtgtattcctcgggaatcatatcgaacaaatccgctccgctgcatataactctttgaacccttttcgggttcaa

SEQ ID NO: 185603 - DNA, 99 bp, Arabidopsis thaliana landsberg
atgatatatgtcagagaaggatgtataattcatctaagttcttttgatatgtgtgatgcagcggaagcgtttgttgggaagggactctttgggaagaag

SEQ ID NO: 185604 - DNA, 206 bp, Arabidopsis thaliana landsberg
atgaaaggccatcaagaagttttcagccgcaacggtccattagaaagggtgagaagcccattgatgctcttcgaaaggtctgtgggaatgacaaatgtgcggattgtggagctccagaaccagactgggcttctttaaatctgggggttcttgtctgtatcgaatgttctggtgttcaccgtaatcttggtgtgcatatatctaag

SEQ ID NO: 185605 - DNA, 472 bp, Arabidopsis thaliana landsberg
atggatattggaacagatgggctttgtaggcccatagtgggccagcccaagatagaaaaaagaaaagccgtggattcgaaagaggaaatggaaggtgtagggtatctctctgttaccaaactgatcaaagtcataaccactactcatcgtaatattgacaatgcctattcttttgtacaatttgtgccacgtgtcctatccatagtactgccaggtaggcgacatgtgtaattgttttgttttgtagcattacgacaaaagttacaaaggaaaagctgtggacctctctgcgaaattgatagtgaatgattttattctaacgttgtgattgagtcatatatagccactgcctcatatgctcttagaatatacatatttttgcaatttgttaatgcaaatactaaatacagacgatgacgcaaacaaacgaagccgtagtcggcaactaaaagccaaaggtggaaaatgttag

SEQ ID NO: 185606 - DNA, 442 bp, Arabidopsis thaliana landsberg
atggagaaaagaatacttctagtcctacctgttttgactaaaaggtctgctcgagtagtaaagcttcgaggaagaaatctaatagtaaacgaaggaaaaataataatgagagaccgaaaagaggccatttccgaagcaaaggttggccattcttcttggttgttgagaagagatatcaaatcagagcaatcagatgcaaatgctccagatgtcttgctaattgatatcatacactccatagcccaaagtaaggagtcaacttccgcatgaagcgatgataggcttcttctcgtacttttgaggccaagatgaagagaaatatactgataaactaaaacccatccatgtccactcaggttatcatccaaatgccaagaagcatcaatttgacactcaggggttcaaggaggagggagatgagccagattcggaagtgcgatag

SEQ ID NO: 185607 - DNA, 15 bp, Arabidopsis thaliana landsberg
atggttactttcttg

SEQ ID NO: 185608 - DNA, 991 bp, Arabidopsis thaliana landsberg
atggcttgtgccttaaggtacgctagcaacttcttcctcctaccaataccattctaatcattttcattgtgtgggtctaacattgattttcctctatgaatcaaggttagagcacatagacctggtcaggaaacatggtgtggccaaagtattgggaactcttgtgagcatcggtggagccaccgtgatcacattgtacagaggatttccgatatttgaccagggccttaacatgcaaaaggaagaggtggtcggatctgacaactcgcacagcttgacactcggatggttataccttatgggacattgtctgtcatgggctggttggatggttcttcaagctcctgttctaaagcaatacccggcgaagctcactttaacatccttcacatgtttctttggtctgattcagtttctggtcattgctctctttgtggaaactgatctaaataattggatcatcgtctcttgggaagagctcttcaccatcctatacgccgtaagctccctccctctgtctctctctcttccttttccttgatctgaatcaatggaaattagctaaatgaatgttcctttggccgtgtttacagggaataatagcgtcagggttggtggtttatcttcaaacatggtgtatctacaaaagcggtccagtttttgtcgctgttttccagcctctccagacacttcttgttgctgcgatggcgtttcttattcttggtgatcagttatactcgggagggtaagcgcattgaaaacgggatgtatcgggttttgtttctctcgattactcgatctaatagaatctttttggctttgcaggattgttggtgcagtgtttataatgctagggctctacttagttctttggggcaaaaacgaagaaagaaaactggctcttgaagagagtcaacaagatccagagtcactgaccaaaaatctacttgaggcacaacacaagaagagtaattctgaatctgaagtgtaa

SEQ ID NO: 185609 - DNA, 728 bp, Arabidopsis thaliana landsberg
acaccaaggcgagaatttctcctacgtgtttcctactttgaaatttataacgaggtgctactcactgcctgcttttcttccctcccgtcaactttaccagtggtgttgattgatagtcagattctggttttgatttttcttaatatccctagggttcattttgcttcaggttgtcaatgatttgttgaatccagcaggacaaaatttgaggatcagagaagatgagcaggtacttgtttcagcatttgatcctcttatttactttctgttggtaacatgcttagcgcggatttcactgtctcataatatctttgttgggactatattcattatagaatcctaaatcctagcacaccatttttgtttaattagaggatacatcttttctcggctagatgcatgaaagtacttgttccattttaatataaatgaaattctctgagatcctgcaaataatgtgcaaagtggcatgattatctatctatatttgaatgttctggatcacattttttattcaagtatactagatttgtacctgttgactattggttgggctaagaattttagaataaacatgactacctctattgcattaagtgtctttccctcttaaattctgcactgattctctctttattgctgattatagggaccctatattgaagggattaaagaagaggttgttctgtctcctgctcatgcgctttctctcatagcagctggagaag

SEQ ID NO: 185610 - DNA, 145 bp, Arabidopsis thaliana landsberg
cgataagattttggacaaactagctaatgttggactcatcgaagttttcttagattctcttatcgaaaaggctctcaacgatactaggttgctccaagatttgattacattaccacttcggttatatgaaccattgattctagaa

SEQ ID NO: 185611 - DNA, 199 bp, Arabidopsis thaliana landsberg
ctttgtatcttcttcaatcgtctagcttcatctgctaaactctgttgtgttgatgtgcagggatgtgaaagagaggttcgagaggccacagattctggcactgaagatcttaagaaagagtgcttgatgcgattgtcatgggcccttgttcattcccgtcaaacggaagatgttcaacgtggaatagccatgcttgaag

SEQ ID NO: 185612 - DNA, 626 bp, Arabidopsis thaliana landsberg
atgaagataggacctgtagggaagcatgatgctagaagcactacaattgtaaactgggacgaaggatctcacgatggcttcatctctcagatttttctatctcatggcgtcgctggaattatgtctatccaattccagttcgtgatggacggaaaactcgttttatccgatcgtcacggtccattttccggcaacatgtttgacgttgtaagtctgatttttgactcttcttttttctccgtcacaatttctacttccaactaaaatgctaagaacatggttataactttttttttataacttaatatgtgatttggacccagcagatagagctcaactatccgcatgagtacataactggaatcagtggagagtattacaagtatgaagccaacaatcctcacatgaggtctctcaaattcaataccaacactagcgagtacggtccttttggcacctccggttcgagcaacgacaaatttgcttttaaactcgggaaatctcctcagttcggcggtttccatgggacttatgatgcctcgggactacagtacattggtgtttatctccgcccaaaaacagttctacccaaaatagatacgggcaatgcagaggaaacagagtaa

SEQ ID NO: 185613 - DNA, 650 bp, Arabidopsis thaliana landsberg
atgttcagagaaatcgaaagttgcatgaagaattctgttgacagatctaagattagtgagattgaggactcagattatcctggtattcagagttatggtatatctgtcacgacacttgaagaggtgtttctgagagttgctggctgtaacttagatatcgaggataagcaggaagatatatttgtttctcctgataccaagtcttctctggtatgcattggatctaatcagaaaagtagtatgcaacccaagttgctagcaagttgtaatgatggcgctggagttataattacctcagttgcaaaagctttcagattaattgttgctgcagtttggactctcattggatttattagcattcaatgttgtggttgttccattatctcaaggtcaatgttttggcggcattgcaaagcattgttcataaaaagagcgagatctgcttgcagagaccgcaaaacagtggcaatccgattaatcatcccagcagttttcttgctttttggccttctttttcttcagctcaagccacattctgatcaaaaatccataactttgacaactgcatattttaattctttgctgagccgaaagggtggtggtggccccattccttttgatctgtctgggccaattgccaaagaagtctg

SEQ ID NO: 185614 - DNA, 55 bp, Arabidopsis thaliana landsberg
atgcccggcaatcaacggagtacaaagcttcgacccacgcgtgataacgtgcata

SEQ ID NO: 185615 - DNA, 244 bp, Arabidopsis thaliana landsberg
ctgcgatcgggggccggggcgaccgcaacaaacgcccacggccacaaaggggtaacggcgactcatgccctatacatcccaacggtcgccacagtgccgcggagtgtcgcgagatcattgatctcgcaaaacgcgtcagcgagcgatgtgagcagtcttccagagacggctccccacctcgccgccgtcctggcaaagaaaaggtcgacgacggcgaggtggttgcggctgaacaggacctcgg

SEQ ID NO: 185616 - DNA, 203 bp, Arabidopsis thaliana landsberg
caatcttgctcacattcgtcaactgtggaatgtggaacgttcgatctgaaaactccgagagacgctacttaggacagcagctttacgcgagtgttttgtcaccagagaaatcactgagagatgaatacaacatgcctgagacaagcctccaatgtggtctagtgaagggtacacctaagcctaacccttacgctgtagcctaa

SEQ ID NO: 185617 - DNA, 132 bp, Arabidopsis thaliana landsberg
caggggaaacagttgggacagttgctagatgagaacccggcattgatggaaaggagaatgcaatgtgcaaagaggctcgagctatacaagaaggctagagatgagattgatgcagcggtttgggttcgatga

SEQ ID NO: 185618 - DNA, 527 bp, Arabidopsis thaliana landsberg
atgtcaagcggtctttaggaaagtgtgatgacaagttctcatctcacttatattcaatgcctcaaacccaagataacaaaaggcaaaaactcgaaaccggcttcttgcgcaaggtgctgctctcaaacatcatctaaactcactgctctcaacacattttgttttggagctaatcttaaaaagctttttgaagtaggtttcacggctggaccaaactccttttttacataaagttccaaagaaggtaatgcaatttaagattaaacattcactgtatcatcatttttgtgtatcttacatttgtaatttttgtgtttgcaggggtccaaagtcactgttccaagagagcctaacctcaagactgcccaaagagctgcaagaaaccggtaaggactctctttgaatatattgttggttcctttaatggcttgtttataacaacttctttcttatgaatctctttcaggtttaaggctaactcagcacccgagcagattgcaaaattcatctctaatatgaataaaaca

SEQ ID NO: 185619 - DNA, 297 bp, Arabidopsis thaliana landsberg
atgccaaaacgcatcgacttggcattcagagaacaaggtgtccggagccggagtcggacccagaacaggggtagaaaatagggtttctttttcttttaaggtagcctgtttccaaaccgctgcttcgtggagagtcaatgtcaaagtttcagggggaggttcactgaagttttcaaaaacaaagcggtttctgcttttccatatgtaccaaagtatccaaggaaagagttccaagatatcttctcctattccgaattctcgtccacgcaagaagagaaaatcaaaattatagaatag

SEQ ID NO: 185620 - DNA, 198 bp, Arabidopsis thaliana landsberg
cgctggtgtctgaagtcaaggacttgaaagagaagtctcagaaagaagacgatgttgttctgtctatttctgctggttacaggcaaccgataattcctcacctcgagtatgactatctcgacagagctattcatgaagacctgttcaaactagtccaattttgttgcgaggagatatgttctacaaaagagcagactg

SEQ ID NO: 185621 - DNA, 826 bp, Arabidopsis thaliana landsberg
atgggtcgatatcggctgtggaggacgactagctacggtttcgagcctggtcacatgcgtagagtgtgaaaggtaattaggaggtgacagaagagagtgagcacacatggtggtttcttgcatgcttttttgattagggtttcatgcttgaagctatgtgtgcttactctctctctgtcaccccttctctctctctctcttttcaattacaaggttaattataactagtaaaaggtctctgatttggtatgatatagttaaggttttaattagttatattatcatcaaacggatcaaagtaggtcgaagggatgagtagtacatatgcaacttttgttataatactatgtttttatatatatcaaatattttgttctgaattgtaaacgtcaactcggtaatatccacataaagtactctaacattttaattatgcaagggtttaatcagcaatataattttgggaaaaagtagatctataacgtacgatgaagcaaaaaaaataaaaaataaaaatcattttgtcattgttttcaaacataattagatatagctactatgtgtcttctagccataagcatatctattagtatttatttaaaattaatgactatttacctcctaaaaacaaacatgtacatgtttttgtttcaagatgtttggagtgcttatgttaatctctatgcagttagacgtatatgcctatcatattatatttgttataagaatttggctaccaatgtactttggtgtactttgtgtgataaatattttgtcatcggaaatttgattgaaatcctaaactttgatacgtttgttgtaacat

SEQ ID NO: 185622 - DNA, 425 bp, Arabidopsis thaliana landsberg
atatgtgaagactgtaccacttgctgcccagacgcttgatgtgagacgaaatcagaagctagaaatggttaaggaacttaatagagaaaaagctaggtaccgtcttgaagttgagattggcaaatctccgccgctttctgacgatgatttatggtgggagatgcggggtaaagcgtaagactcgactccacatttttagtttcttttgatgtcaaaggtcgtaaacccatcttgatcgtgtaccagatagtttcttttgatagcctcactgtgtttctttttgtgttcctcccattggtttcttcaacagtttgaaactgcgtgatgagtggagactagagaaccggaaagcatttgccaacatatggtctgatatggtgtttgggatctccttgtttgttcttttgtacgccaatcagggtaga

SEQ ID NO: 185623 - DNA, 104 bp, Arabidopsis thaliana landsberg
ctaaattgattgatatcaaatcaagattacgtacaaatcagtatacgtacgtaacatgtaaattgtttttctttgataaagaagataagccttctttttttcct

SEQ ID NO: 185624 - DNA, 94 bp, Arabidopsis thaliana landsberg
gatcaggcgaagacgctccccgcccaaatagagatcagctcggactccgcccaacatggctaccatcatctgtggaacggcaatctctcgtcag

SEQ ID NO: 185625 - DNA, 451 bp, Arabidopsis thaliana landsberg
atgatgaagacgatgatgaagacgatgatgaagacgacgacatggctgcccatctcagtctcagcccggattgaggctgggccaggggcgtgcgagcttgcccccgagcggactggcgccgtcggtatccggggccgggacgtcggggtcccggtctgaagaacgggggcaggccgagggggtacttgaccccttggccgaggtagttgaggtgaccccagggagtcaggccgagccacctgttccctaaggaccgttgcccgtgccgactgcgcaagagggtgacctcgggtcgtcgtggctgcgcatgggcagtccgcccctctggtgcctcgggcgcccaaggcaacgatggtgccgaagccggcagcgaggctgacctcggtggtaccttcggggatcgaggctcgagagacctcccacaggcacggttgatcgtggcccggagtgg

SEQ ID NO: 185626 - DNA, 43 bp, Arabidopsis thaliana landsberg
atgattaatcggtcggatgaggattctgatgtgaagcgagcag

SEQ ID NO: 185627 - DNA, 1083 bp, Arabidopsis thaliana landsberg
atggtgtcgatccatttccactcacgctctcgtgcaaggagaaagtgtcgtcacactggttacggtaagtccgaatgaaaatgagtatccaataatctttgataggtctcttcattttggtactttaataaacagtttgtcttcggtactactttagttttttggactgctacgtactctggtttggtggtactgtaatattatttatgatcgatgaaaattatttagaaagtttttctggttttcaggtaaggatacaatggaggctttgcgccgaataatgaaacgtttgacgagaaggctgaaaatgttaaaacgcttgctaaaaaagttctgttggaacaagaagatcgacaagcttgtgtactaccatgacatgttcatgaaggtgaaaggaaaagtttacaagaacaagtgtgttcttatggaaagcatgcacaagtctagcagggagagaaagttttccggaagcgagatgcgtttgggctctggtaacaataaaatcatgttttattaaaatctgttctgtatttatttttgtattctttgttagtttgggtgattatattttggtcatctcacaggagcctgaaggagagaagactgcatcagcacctcaataagaagagtaagaaacccatcttcgcatggtgcatgttcttggtctgcggttaagcaaagaagatgagctttcctaaaaaatgttaaagatctcgatatcttagtgttgacggggtccttcatccttggtactcattgtgaacccaaaagaaaccacaatgtgttcctctacttgattcatccgatcattttcaccagctttctttcttcataaggcgttgaagagagaaatatatatccgattcattggtcttctttctttttcggctctaacgaaaccaagaagatttgttgtttaaaggatgaagattctggagttcttaggtaaagcgttgtggcttcaattgacgacgacttttcggcctactggtttgaagctctgtgacatcggagaacgatgccggcgatctaccgcttccggcaatctaccgcttctcttacgcgtgtttttgctttctttag

SEQ ID NO: 185628 - DNA, 121 bp, Arabidopsis thaliana landsberg
atgagcggtggtgggaacacaatcactgccgtgggaggcggaggtggtggttgtggtggaggaggcagcagtgggggaggaggaagtagtggcggtggtggtggtgggccatgtggtgctt

SEQ ID NO: 185629 - DNA, 1612 bp, Arabidopsis thaliana landsberg
atgaacaaaatgtatcttatctttcttctattcttcgctgcatcgtactcaatgtcattgagttctgcagattccgtaactatctacgaagattttgtccaatgtttcaaaaacgtgacaactatcaccgacaatgatctctccgacgtcgttttaccacgtactagcgtttccttcactcctaccttacgcgcctacatcagaaacgcccgtttcaacacctcctcaacgccaaaaccgtctatcatcatcgtgccccgtgtcgattcacacgttcaagccgccgtgatctgcaccaaaacgcttaatctccagctgaagattcgtagcggcggtcacgactacgacggtctttcttacgtctccgccgtgacgttcctcgtccttgatctctctaacttccgaaacatcaccgtcgatttaaacgacggaggaggatccgcttgggtacaaaccggcgcgacgctcggcgagctttattataggatctgggagaagagcgaggtccatgctttccctgccggagtttgtcctaccgtcggcgttggaggacacgttagcggtggtggatacggacacatgattcgaaaattcggactcactatagatcacgtcgtcgacgctacaatcgttgacgctaacggtcagattcacgatcggaaatcgatgggagaagatctcttctgggcgattcgcggcggaggcggcggaagcttcggcgtcgttttagctttcaaagtgaaactcgtgaccgttccaaaaaccgtaaccgttttcagagttgataagtctgtagacgaaaatgccctcgacatggtttataaatggcaattcgtagctccaagaaccgacccgggtttattcatgtagagtgttgttatcatctccgacgcagaacaaaacaagtacggtgaacactaaactcagggcgttgtatcttggaaaagcagacgacgtcgtttcaaagatgaatgaggagtttccggagttgggtttgaagaaagaagattgtaaggagatgacgtggatccaatcactcttatggtggatgaatcatgtagacgtggacaaagtcaaaccggagatattactcgagagagaaccggattcggctaaatttctcaagagaaaatcagattacgtagagaaagagatgactaaaccagaattaaaccggttgtttcagaaattggcgacgttagatagaaccggtttggttttgaatccgtatggagggagtttaaacgtgaccgcagtgaatgcaacggcgtttccgcatcggcacaaactatataagatccagcattcggtgacttggcccgatgctggaccggaagcggaaagactttacattggtaatttaagaacgacttataatattatgactccgtttgtgtcgaaaaatcctaggagttcgtatttgaactatagggatattgatatcggggttaatgatcatggagcggatagttatcgaaagggagaaatatatgggaggaagtattttggcgagaattttgatcgattggttcgtgttaaaacggctgttgatccggataatttctttagaaatgagcagagtataccaactttacctcttaatagaagatag

SEQ ID NO: 185630 - DNA, 1201 bp, Arabidopsis thaliana landsberg
ctcgagaagttacgggatgatcctatacgtgaagaggggcctcttatttatcaccttgatgtcgcggcgatgtatccaaatattatcttaacaaacaggcttcaagtacatcaaatatcacttaaatgattgtgttccatgtacaaaagaatcacaatcattacttttaagattacaaagcccgcagatatattatgttaagtggtaggtttcttcttaattgtcagccaccatcaatagttacggatgaggtttgcacagcatgtgatttcaacggcccggaaaagacctgtcttagaaaacttgaatgggtttggcgtggggtgacgttcaagggaaataaaaggtttagcttatattatattccagctaagtatggatttaaaccttgttgatatagtcttaagatcttaaatttgttttcaaatggtttgacagtgaatattaccatctgaagaagcagattgagtctgaatctgttgatgctggagcaaatatgcagtcttcaaaaccttttcttgatctgccaaaggtggaacaacaatccaaattaaaagaacgactgaaaaaatactgtcaaaaggtactcttctctctccctttcataataatattttccgtacagtgtcaacgtataacggtaaatcattctgcttttggcaggcatatagccgagtacttgacaagccattcactgaagttcgcgaggctgggatatgcatgagagaaaatccgttctatgtggacactgtgcgcaggtgtgtggcttttgttattacttattaccaatcttattcttgattgacactacgtttcgtctcttttgagggagtatacaagtaataatggtggaaactttagccaagtcgtaattacatttttcatattgctgttttatttttttcaaaatttttattggtgtatatgcatgtaattatagctttcgagataggaggtatgaatacaaaacatttaacaaggtctggaaaggaaagttgtcagaggccaaggcaagtggcaattcaatcaagatccaggaagcacatgtaagttatatcttataaccttggaacctatttttgactgatggttatctgacatcaaacttgtgcaacaggacatggtagtggtttacgattccttgcagctagctcataagtgtatacttaattccttttatggatatgtcatgcgaaagtga

SEQ ID NO: 185631 - DNA, 689 bp, Arabidopsis thaliana landsberg
gtggtcctgaggatgtggtttaccatggggatgcaatacccgatgggacggtaaacttcaacaacgtagagtatatagctcgtgttggttgggtgtttgggttacttatgctgagaaagtgcctctctggaatcctaaaactggtaagcctacagattttagtaccagtttctcctttaagattgatacccgtaacctttagaattacggtcatgggatctgcttctttcttgctcctttgcggattcaacttcctgtgaactcagctggtgatttcttgggtctttttttctcgaatcgagagctacgcatcttcgtttccgctggttcatatcgagtttgactcattcaataaccaagaatgggatcctaccactgttggatctcatgtgggaatcaataataactctcttgtttcgtctaactacacttcttggaatgcaagctcacatatccaagatgttggtcatgcacatatctcctatgactctgttactaagaatttgagtgcgtcttgggcttatgaattaacctctgatcctcaggagagtttaggcatttcctatatcattgatcttgcaaaggttttgccaccacatgttacggtcgggttttcagccgctactggatcggtcacagagggacataagcttttatcatgggagttcatctcaagtttggatattgag

SEQ ID NO: 185632 - DNA, 51 bp, Arabidopsis thaliana landsberg
aaatctggtgctcgacgattaaaacccgctctttgtgaatttggcacttag

SEQ ID NO: 185633 - DNA, 68 bp, Arabidopsis thaliana landsberg
atggggaaaaaggagcgcgtcaacaatggaacatcttcatgaacattcagaagtacatcgatcggtag

SEQ ID NO: 185634 - DNA, 399 bp, Arabidopsis thaliana landsberg
atggcaatgcaaggggattcagtagaatcagacgttactgagcaaaacagtgaagggtatctcaaaatcctagacaagattcaggcaaaatcttcatcaatttttgagttttcgcttcagtttgatgacgtggtcgcctcgctggagaagaaggaagaacgactgagagtggttgaaatgaagcagaagcccattggtttgcttgaagagtcaatatctcgaaggttaagtgttttagaggagaaagagattgaaactgatttgagattggtcattgaagcaagtatcatgagattggtgcttgagaagcactgtgaacatttagtgacacaacttaaaacagaggagaataagcttggtttgattctccgttcgacgacgaagaaacttgaggagctg

SEQ ID NO: 185635 - DNA, 2061 bp, Arabidopsis thaliana landsberg
gtaagagggttatctgacctgttgaaaacaaacttggagaagggtatacacggggatgatgatgacatattgaaaaggaaatctgcttttggatcaaacacataccctcagaagaaagggaggagtttctgggtattaatactttagaatttttgctttgtagcagcttccattaactgtgagatttttcagctaattactattttgttccttcctttttttttcctcatgtccgatagaggtttgtatgggaagcttctcaagatcttactttgatcatactgattgtagcagcagttgcttctttggcattgggaataaagaccgaggtatgcaatttaagaactaatacagtatatttggctcagcgcctaccttgaaaattttaagtcctttttctatgtggcatagctttagaacaatcgacaaataattatagaaacaagacttccagagtttctgtacctcagtatttgaatgagttatgtctttctcgtgtccatatcgttgacgctcgataccacgtctattgactatcctttactttgtcattgtactcattctaagctttcctgctctaagagggcagaaagttgttctctctccattgtccaaagtttcacagttttctttgttcttcctgagcttttggtacctctttggctgccttcttagggtatcgaaaagggatggtacgatggtatcagcattgcttttgccgttcttcttgtcattgtggtgacaggtattgatattccttgctgatttcactcatacaagtgactgctgcgtgtattgtactaatttgtatacctcttcccttggcagctaccagtgattatcggcaatctcttcaattccagaacttaaatgaagagaaaagaaatatacgtctagaggtgagagcttggttgatcatgcagctcatagataattccatttttgttggtttaatttttaaaaatgcatcgtgtatatgtgcaggtaacccgtgatgggagaagagtggagatttcaatttatgacattgtagtaggcgatgtcatacccctcaatattggtgatcaggcaagttgcatgattttgtcaatgcagtatttcttagctcttttccgaatttcagtatagctataatttatgtttgatctgccaataatttccataggtacctgcggatggagttttagttgctggacattcccttgcagttgatgagtccagcatgactggagagagcaaaattgtatactttattctcttccttagcatttgcaacaaataccatctttgcatttcatgtgttctgaaaaagctgtttctcgcaggttcaaaaaaactctactaagcatccattcctaatgtctggctgtaaagttgcagatggcaatgggacaatgttggtaagacttaacgaacattaacttatactatctgtgacatagtggctcaaacaaactgtaaactgtagtttctgtagaaaaaattatgagatgtttaattggtgaacaatgatatccgtagttggttcccaccaaaaagaaagatatccatggttggtgaattgtgcagtttttcgtgtttttatttatggcgttcaaaacttctgatttggctagtttcttcccacatttcttatgtgtgtaattttttttttgaaaatcaggttactggggtaggggtcaacactgaatggggcttactaatggctagcgtctcagaggacaatggtggagaaacaccattgcaggtgagtatcaacttttctctgttcatatattcgtggtttttgttgctcaatagtcatccgtactatgctttcttcaggtgcgcttgaatggtgtagcaacatttatcgggattgtcgggctcacagttgctggcgttgtattatttgtcctagttgtccggtgcgtttcatgttctttatatcacctccgcccggagttgaaagtgggccagcgattcctaaaaagagataaacctcagtcaactacagcatcaatcagaaaaattatgaaaaaaaaatccttacaaggaaaagtaataacccaagcaactaat

SEQ ID NO: 185636 - DNA, 713 bp, Arabidopsis thaliana landsberg
gttccaattttatcaaacgatcgatcacttctactgcttctgtaagctttcgagatttgatctttacctccatcaatgaacgaagagcgtcgacatcagaagggtgagtaatcaaatgctcatcaagcgctctctcttcttcttccaaggtaacgttttctttgctttcaactgacggcggaggcgcgatgggagctgcaatcgccggcgatttgagatggagattcgccaaaagcagagccgcggcggttgttagagtgatgcatgtggatttgaagagacggaaaggtgtggactttgggagaggggtgatagagttttgaaatttggaggacgaagctttaattgaagcggatttgagagatgaaattggttgaattgaggatttgaagaggtttttggggaatgttgaagaagaggtgttagtgaaggaaaggtgaaatggctggtgatgtacctgttagctttcccaaagacttccatgattgcggaaatgggataaaaaaacccctcaaaagttaaacccctgagcttgtattaaaaagataggtgaagaagaagaagatgaagcctttcgattccgaatattctctcctcgctgcagatacgacgacagcgttttggtcattgatgggcctcacctcacgctgcgttttgacctatccaaaaaacccaataaatggtttaacatttcactttgtggtgtaaagtaa

SEQ ID NO: 185637 - DNA, 363 bp, Arabidopsis thaliana landsberg
atgatacacgatgacgcagcactctacagcgcgttctccgcgcgcgatgcccgtttcgacggggtcttcttcgtgggggttacgtcgacgggcatctactgccggccggtgtgtacggcgaggacgccgaaggcggagaactgccgcttcttcgggagcgcggcggcggccgagcgtgcgacgttccggccgtgcctccgctgccggccggagctggcgccgggcttcgcgccggtggatggggggcggcgggtggcgacccggatcgcgcatcggatcggcgaggggatgctcgacgacggcgcgggcctggaggagatcgccgccgaattccacatgagctcgcggcagatccggcgggtg

SEQ ID NO: 185638 - DNA, 188 bp, Arabidopsis thaliana landsberg
atgccggagccgaaccaggccaccagggcaattgcaaacaacagcaagctcagcggcagcagcaagatggcccagccgccgacggcgagaaatccgccgcccgggaacagtaggccgaggcccgcggcctgcagcggcggcgtgacgccgacgaggctgggcaatacgccgagcgcacagagcgcgag

SEQ ID NO: 185639 - DNA, 345 bp, Arabidopsis thaliana landsberg
gtggtcaatcgttgaaagagaatgatgggcatcatcagccatgtgatacagaatctaatgcagatgattcgactgattctcatgatactcaaggggatgaatatgttgacatggggcatgatggggatgaaaatgaagaatctcacaaagataatcataagcacaatgaggatggtgcttttaactcacacaaagatagtcataggctcaatgaggatggtgctgaagaatctcacaaagagactgcatctgtgtttcttcattccacgaccaagcatcagaaaattgaaaagggacatggagctacttctaaaaggtcacgtgggaagtcttctcttcttagtg

SEQ ID NO: 185640 - DNA, 208 bp, Arabidopsis thaliana landsberg
atgtcaaaggagaaagggatagaggaagggtcgttttatgagttcctccatgatgatgaaaagatcggcaaactcattctgatggaagagtatttttcgtacacgttggatgataaagaaattgagaagatgatgtattatgatgtcattgagaggaaaatggagatattgaaggatgatgctgaagcaaagataaagcttaacatat

SEQ ID NO: 185641 - DNA, 257 bp, Arabidopsis thaliana landsberg
tatattccccaccaccaccagtatattctccacctccgccgccagtaaagtcaccaccaccaccaccagtctactctcctccacatttaccgccaaagatgagttcaccaccaacacaaacaccggtcaactctcctccaccacgaacaccctcacagacagtagaagcaccaccgccaagtgaggaattcatcattccaccattcatcggccaccaatatgcttcaccaccacctccaatgttccaaggctactaa

SEQ ID NO: 185642 - DNA, 258 bp, Arabidopsis thaliana landsberg
ccatcccgatgatagaactacctcttccgttggagaaatccctagcaagtggagcaccatcgaatagagaaaactgtgaaccaataattgaagagccggcctcgcccgggcaagagtgcactgaaataaccgagagtgatattgaagatgcttactacaatgaggaccctgacgagatcccaacaataaaactcaacattgaacagtttggaatgactctacgggaacacatggaaagaaacatggagctccaagaag

SEQ ID NO: 185643 - DNA, 1158 bp, Arabidopsis thaliana landsberg
atgactttttcattaggtgcactggaaaggatacagaagcgacgaagatacatgggaactagcagaggaattgaggtatatgcttcaaaacaatgttaaaaagagattctgttgttatctggaactaattaattttgtttggaattttagtaactgtcaagatgccattcgggagtttgtaactagtggatttaagtccaagatcttgccacttcctgtaagaacttgcttctgaattgaattcttgatctttgaaagtcgtatgattgtaccatcaacatctatttgccatgaacatctatttgcactgaaaataaaaaaatcttgtaaatgattgtaactagggtcgtgttggtgtgatatgtgggggacctccatgccaaggaattagtggctataatcggcacaggaatgttgattctccattgaatgatgaaaggaatcagcaaattatagttttcatggacatagtggagtatctgaaaccctcatatgtgttgatggaaaatgttgtggatattctgcgtatggacaaaggctctcttgggcgatacgctttgagccgtcttgtgaacatgcgataccaagcaaggttaggtatcatgacagctggttgctatggtctttcccaatttcgatccagagttttcatgtggggagctgttccaaacaaggtgaatttataggcgtattaacttcctcgaggtgacggtttcatacttacactatttggtatttcatttcagaacctacctccgtttccgcttccaacacatgatgttattgtcagatatgggcttccacttgagttcgaggtaataaaattgtaaattggtacttatcttatactcttttcattaagcctgtcgttcttccaacttaagccaccttggctttcatgtttcagaggaatgtagttgcttatgctgaaggccaacccagaaaaacttgaaaaagctcttgttctgaaagatgcaatatcagatcttcctcatgtttgtttcatttccactagatccatctgcaattcagggttaatatatatttataatttcttttcacatatctaggtatcggccgatgaagtccgggaggatttgccttatgaaagtctccctaaaacagattttcagagatgcattagatcaaccaagcgtg

SEQ ID NO: 185644 - DNA, 428 bp, Arabidopsis thaliana landsberg
  unsure (1)..(428): unsure at all n locations
atggccgtgctgccggcctggcgtgggcacggcgtcggtgccngccaacgtgcgccggctcatcgaacgggccggccaacacggctggccgcaagtgacgttgcatgcccaggtcgacgccatcggcttttattcgcgcttcggtttcgtcgctttcggcgacgaattcatggaggccggcattcgccacagaagcatgtccctggacctgccggcgtcggcaaacgcataagccgcgcgcgggtgcgtcaaaacgttcgccaatgaaacaaccggtgactgaacacgggcttccggctttcgttaaaagattgtccgaaagcccccgcgagtggctataatcctcatgatttcggtggtcggcgttgcgttttcgcagggtccctgcttggtgttgaccctggcgaacggcaagcgcgccctttcgt

SEQ ID NO: 185645 - DNA, 1237 bp, Arabidopsis thaliana landsberg
tttatggaagtcattaagcttgagagcttggggcactaccaagaagacatgatgatgcctgctgatatcttccttctgcaagtaagacctaattttcatttgtgccaacatgtgaaaaataaatagaacatttttttgacatctgttttgaaatgtgtttaaaatcgcaaagattgtgtggtctcatttgaaaaacacacacacatttctaaaggcaaacaccaattcaagattatatctattttgataatttttgctcattgatagactctatagcgagacgttattagtcttgttgcaactactcaattttatgattctaatatatataattttgtattgtttgatgatatagatgtgcagtggggtggatgagaacgcagttgaatcatgcgcagagcttatatttgcaccaatcgacgcatctttctctgatgatgcaccaatcattccttccggtttccgcatcattcctctagattccaaatcagtacgttcaattcatataacaatcaaaatcattacctttagttgaatcaaatactaatttataaatcgaattatgtataggaggggttgagtcctaaccgaacgctagacctagcgtcggctctagacgtagggagcagaacagccggagattcatgtggaagcagaggaaactcaaagtccgttatgactatagcgtttcagctagcttttgagatgcatatgcaagagaatgtagcctcaatggctagacagtatgtaagaagtgtgatcgcgtcggttcaacgggtcgcacttgctctctctccttcttctcatcagctaagtggcttgcgtcctccacccgcgtcacccgaagctcacactctcgctcgctggatctctcactcttatagatgttaccttggcgttgatcttctcaaacctcatggaactgatcaactcaagtaactttggcaccatcctgacgctgtcatgtgttgctcactcaaggtaattttcttacttctactcactcaagaacatcgattatgctcttacattatctataacaaggaaagtgaactggtttttatcatttcaggccttatctccggtattcacatttgcgaaccaagctggtttagacatgctggagacgacgttggtggcacttcaagatatcactctcgacaagatcttcgacaacaacaacgggaagaagactttatcctccgaattccctcagatcatgcaacaggtacgttaa

SEQ ID NO: 185646 - DNA, 597 bp, Arabidopsis thaliana landsberg
atggaagacatattcaatacaagctccagacgaaccaaatctgtcaacgaagacgaagaagctctcaaatgggcttccatcgagaaactccctacctacaaccgtctccgcacaagtctcatgcccgaattaggcgaagatgacgtctacggtaatcaaatcctcaacaaagcagttgacgtcacaaagctcgacggtgaagaacgtcagaagttcatcgacatggtcttcaaagtcgcagagcaggacaacgaacggatcttgacaaagctaagaaacagaatcgacagagttgggatccaacttccgacagtagaagtgaggtacgaccacttgactgtgaaagctgactgttacaccggtgatagatctcttccttcgcttcttaacgcggtgagaaacatgggagaagctgctctaggcatgatcggaattaggcttgccaagaaagcacaacttactattctcaaagatgtttctggtatcgtcaaaccttcaaggatgacacttttgttgggtcctccgtcttccgggaagaccacgcttttgttggctcttgccggtaaactcgacaagtctcttgacgtctctggggag

SEQ ID NO: 185647 - DNA, 122 bp, Arabidopsis thaliana landsberg
atacgtcgtcgtgttatggatcgttggatctaccatatcccttcttcttcgtctttttacgttctcgttacaaaacaaacttgcgtgtgggaatatatggttatcggatcatcattagttaa

SEQ ID NO: 185648 - DNA, 100 bp, Arabidopsis thaliana landsberg
aaatactggtaacagaaacaatgggaataggaatttatgggagttgaatcctttggatgatgacatctatttgtggaagccggaccatcatcccccgtga

SEQ ID NO: 185649 - DNA, 2322 bp, Arabidopsis thaliana landsberg
  unsure (1)..(2322): unsure at all n locations
gaaaggagaccaaagcgagcagcagcttgcacaaacttcaaggagaaatctctccgtatctctgacaaatctgaaactgttgaagctaagaaagagcagatcttggcggaggagatcgtggccatacagttaacttcttctttggagagcaatgatgatcctcgtccaaaccggaggctgactgatttcgttttacatgattcagaaggagttccacagcctgtggagatgttggaacttggtgacatatttattgaaggtgttgtcttacctttaggtgatgagaaaaaggaagaaaagggtgtcaggtttcaatcttttggtcgagtagagaactggaatatatctggttatgaagatggttccccggtgatatggatttcaacggcgttagcggattacgattgccgtaaaccttctaagaaatacaagaaattatatgattatttctttgagaaagcttgtgcttgtgtggaggtgtttaagagtttgtccaagaatccggatacaagtcttgatgagcttcttgcggcggtttctaggtcgatgagcggaagcaagatattttctagcggtggagccatccaagagtttgttatatcccaaggagaattcatatataaccaactcgctggattggatgagacagccaagaatcatgaaacatgctttgttgaaaattctgttcttgtttctctaagagatcatgaaagtagtaaaatccacaaggctttgtctaatgtggctctgaggattgatgagagccagctcgtgaaatctgatcatttagtggatggtgctgaggccgaggatgtaagatatgctaagttaatccaagaagaagagtatcggatatctatggagcggtcgagaaataagagaagttcaacaacttctgcttcgaataagttttacattaagatcaatgattacgagattgccaatgattatccactcccatcttactacaagaacaccaaagaagaaacagatgagcttttactctttgaacctggctatgaggtagatacaagggacctaccttgtagaacacttcacaattgggctctttacaactctgattcacggatgatatcattagaggttcttcccatgaggccgtgtgctgaaatcgatgtcaccgtatttgggtcaggtgtggtggctgaagatgatggaagtgggttttgtctcgatgattcagagagctctacctctacgcagtcaaatgttcatgatgggatgaacatattccttagtcaaataaaggaatggatgattgagtttggagcagaaatgatctttgtcacattacgaactgacatggcctggtaagcttactatattcactgcatgtttctaccttatttattacttctgttgcttgcgaatcaggctagtgcctacgtggagattgaccaactttgctaaattttatattgaaagaaaattggttttactaactttgaaaaattggttagtgattttgcaaacataatgcaaaataaattatgtattcaatattttgattttttttttttttagcaaagggtttaacatttttttttttttactagttctttatttactttttgggacgatgattgttattataattattcatttttaattgccttatatgaactaaagtttttttttataattgtctctatgcaggtaccgacttgggaaaccgtcaaagcaatatgctccttggtttggaactgttatgaaaacagtaagggttgccataagcatttgacactatgctcatgagagaaagtagggttgctaagctttcatatgcaaatgtcataaaaagactttgtgagttagaggagaacgataaagcttacatttcttctaagctctcggatgttaagagatatgtggtcgtccatggacaaattatcttgcagcttttcggagagtatcctgacaaagatatcaaaaggtgtccatttgttactggtcttgcaagtaaaatgcaggatatacaccacacaaaatggatcatcaagaagaagaagaaaattctgcaaaagggaaagaatttgaatccgagggcggggattgctcctgtggtatccagaatgaaacctatgcaagcaacaacaactcgcctcgttaatagaatttggggagagttttactccatttactctcctgaggttccatcggaggccattaatgctgaaaatgtggaggaagaggagcttgaagaggtagaagaggaggacgagaatgaggaagatgatccagaggagaatgaactagcagctgttgagattcaaaattctccacntcctaagaaaattaaag

SEQ ID NO: 185650 - DNA, 141 bp, Arabidopsis thaliana landsberg
gtacaccagctcatcatggaggaggacaacgaccagcttagtatgcaccataggggactccacacactcttcaggctgcccccactggcaccccggcgagacctgcaggacacagtacagtcaccacttgcttcaagtgtg

SEQ ID NO: 185651 - DNA, 1450 bp, Arabidopsis thaliana landsberg
atgtcaaagccaatgttccatgcagaaaggtttggctccatcacaaacgttaaggctgtggactgtaacgtgcccatgaaacacaccatcgtcgataatgaaaggtgagatgagtatctcttcaacgtagccgcctaaagaaatgatgaaacataattgtcctaattcgttagaagactcccttatttagatatagtactatcggatcactactattagatatgtatatattaatccgtagataaagatacttttagaaggggcttcacgagttaaagagatcagtcgatgtaaaatttaaatgatgtacctgaagaacgaaaaaggaagcccaagaaaatgaggcgatgaggaggaagacggtggctttgaggtagtcctcacctgccggcgacaaagcatggccggtgaggtgagatcggagaaaggtgattagaggaattttgaataaaatcatcaacatggctccaaccactatcactaatgtccccaccacttttgcttggaatcttacttttctcatctccaccttctccatcctttatttttttcaccaaaatataaaccacgcatcatcatcaacgtaccatattgtatgaattaacctattgtatttggctaccgcaatggataactaataataaagctatgcgttaaatttaggtacctgcaaattatggaaatgataaaggtcaaagctggaacgatatttgtgactgcgccggcaaaagttggtgaagtaagtttgagaccggcgtaatataagttttgatcgatcaaaggcctgtggtaaataattcataaagtattcatatactcatcaagtgcatgtttttgaaaaataattcaaattttaagaagactaacccgagaagagctagaacaaaaatctgcatgaatattggaaatgtcatcttcggcctcactttcctacaacaccgttatcaagttatcaaatgtttgtatttgatgagaatcaatcgaacttttttaatatatatttctataaaatatgatacctctcggagagtagagcaaaaggtgcgatagcagccgtggcaaaggcattacggtaagccacaaggacgtaatggctcatgccgcggtctagcacaaccttcgtcacgaggttcatgccggcgtatccgaattgaagacaaaccattgcaaagtaaggcttggctgattctgacatctttaaccccatatcaaaagtttctctctttgttgtatgtatggaggatacacaatttatataagagaaaggagttaggaacagagaggcaacaccacttgtggaggcttgtgctcttcctacgaacaaattggtgagagaggttctttctatttatatagagcatcatattccggatcatgagttcgaatgagcttttgtttttttttcctgaaaataattaattactccatttatttctttcctttttagtga

SEQ ID NO: 185652 - DNA, 84 bp, Arabidopsis thaliana landsberg
atggcagaaatttcgacttctccaaggttaatggcagccgcgaaggagtataacatcggtaaagacacccttgtggactttttg

SEQ ID NO: 185653 - DNA, 361 bp, Arabidopsis thaliana landsberg
atggctactgctgggaagaagggaaaatcaatcagggtccttggtaccagtgaagcagagaaaaaggatgagatggagttggaggaggagttccagtttagtagcggcaagtataaagattcgggtcctggctcggacatgtggttaggagatgcttcctctacgtctccaagaagtcttaggaagactagaacctttgaccgacataatccctatctcgtatcttcttatgctactcctcagccgccaacaacaactacatgctctgtctcttttcccttttacctccctccagcgattcaaaatcaacaacgatgtttacacccgaatgacccttcaggacaaagacagcaacaaatga

SEQ ID NO: 185654 - DNA, 329 bp, Arabidopsis thaliana landsberg
ctcgcatcaatcgagtgaaggcccatctcgatgacaagctgaagatcaatcccaaattcctcgattacaaccaagtctgtgggaacgtcgctcttttggctgagctggttgaggctggggagatcgagatcaagtctgccgagctgatgccacgtttgattgcggatcgggatgccctcaaggccgaggtggagggctttgagatcaccgagatcgagaaggatgacttcgacgtctggacccttttcgagaaggttccagaggaggaacatttcgaaccatcggctagcggaggtgtttatcgatcagttgcagggccaaggcaatga

SEQ ID NO: 185655 - DNA, 309 bp, Arabidopsis thaliana landsberg
atgatggagttcttcgagaatcttggagtaaagatggaggtttcagacatgtctttcgcagtgagccttgacaatgggaaaggttgtgaatggggaagccgcaacggtgtctcgggcttatttgctcagaagaagaacgttttaaatccgtatttctggcaaatgatcagagaaattgttagatttaaagaagacgtcttaaagtacattgaggagcttgagggtaaccccgatattgatcgaaaggaaacattaggagaatttctcaattcacgtggatactctgagttgtttcagcaagcttacttg

SEQ ID NO: 185656 - DNA, 395 bp, Arabidopsis thaliana landsberg
atgaatctttcattcatgaatgagctcaacagtctcatcagatcttcgatccagaaccgatttgatcatcgatctccgcttcggatgcttagcaatctttcgatcggaggtaatgacgccgacgaagtggagaatcagaaccgtacggttaatcgcgatgacgtcaatgataagagtccgacgagtgttatggagaatgaggatctgaatcgctcttcgcttccaaagagcatctctgtgagatctaatggctactctaaggcaagtcagggaggtggtggtgcggctgctcaaagtggaaaacctcgtggaaccgtcactaagcctgggacttgtggtcaagtcagtactacggtatatttcttctttgttatcttgattactgtggaaacttg

SEQ ID NO: 185657 - DNA, 164 bp, Arabidopsis thaliana landsberg
atgaattccgaaattttaagacctgaatccccctctttcgacgacgccggctctagtaacgacctctacacccggccaaatgacatcgccgaccccactatcaatccacatgcactctccaatctcttaatcgattgggagagctttgtcggattccggccgaa

SEQ ID NO: 185658 - DNA, 199 bp, Arabidopsis thaliana landsberg
atggagattcataagctcctccgaacatcttatcagagcacatcgcagcagctttcacgtttcatggttaaaaaagaaagaagcacttacgaagtgtacgtgatataaattctgaacttgggtttaaagggttggatctcatgaagccatgaaggcaataaagagagtaaaagccttcgtgaaaaggaatcaatacaag

SEQ ID NO: 185659 - DNA, 495 bp, Arabidopsis thaliana landsberg
atggccatgatggattcaacatcgaaaaagatgtacctctgccaggtaccaagttttgggttaaaaagattaagctgagaccgggcgggtgacttgcacgagaagagagtctcggtgtagtgtctccgtctgagtcgattaaggaccttgtcgatgtaggcttgatgatcgaggaccctttaactggtcacatgcctcgtcatgggtaagccttgcctcgggtagactaaggccagaataagataacacgaaatgggcgtggagcggtggcgagagtagagtgtaccctccgtggcaagaggttggacggtggtgtatctgtgctctcggtttgcgtgaacctgatctggtcttaagaaccccggtggcgggttgacatatgcaagggttaagtgctacatatgtcgtgtgatcggagatcctcaactgagtataatcgattcggatcgccgtacctccgcggttatggagacttggccactgacttacacgtag

SEQ ID NO: 185660 - DNA, 1323 bp, Arabidopsis thaliana landsberg
atgaggactagacctgttatagaagtcgcgtttaaggatctaactcttacattgaagggtaaacataagcatatattgagatctgtcaccggaaagatcatgccaggtcgtgtttctgcggtcatgggtccatcaggagctggaaaaactacatttctttctgccttggcaggaaaagcaactggatgtacgaggacgggtctaatccttataaatggtagaaatgactctataaactcgtataagaagatcactggatttgtgccacaagatgatgttgtgcatggcaatcttaccgtcgaagagaaccttcgatttagcgcaagatgcaggtaaatttattctcatatcatagaggagattgagagtccaattcttaaaaaaatacatttttattacatagtgtttatgcttcaaaaaaatgttgcatatcatttatttatatatgtttctttacatgcagattaagtgcttatatgtcaaaagcagacaaagttttgatcattgaaagagtgattgaaagcttaggattacaacatgtaagagactcgttggttggtacgatagaaaaaagaggaatctctggaggacaaagaaaacgtgtgaacgttggtgttgaaatggtcatggaaccttctctattgatattagatgaacccactacaggtttagatagtgcatcttcacaattacttcttagagcacttcgacgtgaagcacttgaaggtgttaacatttgtatggtcgtccatcaacccaggtatgttatctcctccatgaattatgttacaattttatgttaagaaatactttttgcttaataattggttttttcctcttattagttatacaatgtacaaaatgttcgatgacatgataatactagcaaaaggtggtcttaccgtgtaccatggatcagtcaaaaaaatcgaagaatattttgctgatatcggaatcacggttcccgatcgtgttaatcctcctgatcattatatagatatacttgaaggcattgtgaaaccagatggtaatataactatagaacaacttcctgtgagatggatgttgcacaatggttaccctgtgcctcacgatatgttgaaattttgtgatggacttccttcctcgtcaactggatcagctcaagaggattccactcataattcttttagtaatgatctatggcaagatgtgaaaactaatgtggagattacaaaagatcagttacaacacaattactcgaattctcatgacaattctaatcgagtaactcctaccgtaggtcgacaatatagatattctgttggagggatgattttttag

SEQ ID NO: 185661 - DNA, 503 bp, Arabidopsis thaliana landsberg
atgatactcctgaaagaagttcttcaaagcgaaggagacgttccaatttgttgtttaattcaaccccaccttctggttcttcaagaaggtaaaccaaaaatcgattcttttttctttagggttcttcagatttagcgaaattgtcaaatgatttttttgaaattagtatcctttttggattccaggaagcagcgtgttaagcaaagtcttgttccgttacctgttattgatcttgataaagtaatcagacatgaaggtacttcatgaaattagtttgttggaaacattaggatcaatgaaattagtgacagagataagtttttgttgaagttttggaatctgttttggttgtagaagaaaaatctgcagagaagaagaaaaagaagagagagatggaaacagaaacaaaagaagagaagaaaatagataaagatgagaagagtttgtcagatcatgttgtgcttccttgcatagataagcttcgagatgaattgtcttgcgcg

SEQ ID NO: 185662 - DNA, 263 bp, Arabidopsis thaliana landsberg
aggatgatattgaagaatccaagaaagatgagatatacttgtggcaagtcttcttttcgaatccatacgattggtgggacaacaggagaaataagaagaacccaaagcaacccgactttaagcataaagatacaggtgaagctctctggctttgctcagatttaccggactggattactagacgacttgaattgttcgaccagaaaaaccgcttttacgatgaagaaaaaacacgtcgtgaccgtctttcagactatatttag

SEQ ID NO: 185663 - DNA, 3131 bp, Arabidopsis thaliana landsberg
aatatgctcgttgagactgatgagttagaccagatccgacctaattatgaagcaacgttagagatacgtgcaatggacaatcctttttctgtctcggttccttgtaaaggtaagctttaattcttgtattggtctttataagtctatatgctaaagcccttgttaagtttcacaaataactcatcagagatgtacttacacccgaaaagaaatcagagccggagtgtatcgttcagttatgttactttaacttagggagctttctgtaatttctgctctctttatagaactgagaaagttgaagatttctgatagttatgtaataagggagtgtagtctgtatctatttgtcaaagtgacatcgtaaggacatgcaaaatgaacaattaatgtttatattatgtagaaattgttttccctaacgaaattttcttgtttcagttaatcccgggcctctgaaacgagttgctgtgaataatcccaaggctctggaaaatttgcttccagattctactgtcgaagattttatcctggaggtatatcatatcggcctatgcacgctgtcaaacaggaatcagcttttcctccgaattaagttgaccataatttttatgcagttgttcgatggatataataaccatgttgccgaggggaccgatgttctgatacatattgatggttatcgtattgaagactggatgggcatcaaccgtaaggtgtgagaagcttattttagtcaagaataggaatctctgtttgacttactgagtatatagtatatcgtattctcgccattgtaccactatctggatgacgcagtttgtttcttaaatgataggttgatagtcgtggctgcattaatctatctggcattcttaaggtcacagaaggctatgggaaatctggtaatgtgatcctttcaatttctatatttttccggtgacattcctttttgatgatttgctgattgtctagcgtctttgtttctctacagtatcactctctgtaatgtctggtaatgaagttatcttctgtaaagagtcacaaattgatgaacgacagctaagacttgtaaccgaggtaaagattattttggtgcagtttggttttgtttcttgccaccaagcttttgtcaggaacttgtctctctactgacttctgatcctgaaatcgtttgttttgatcagctgcccgactgctgtgttgctggtacaaatctcatgaacctcatttttaaagtgacggagttagatggtgttatggatactagtatccatcatgatgaaaaatctggatgtttccatacaatgagcattgaaactgattcaagcagcgatgagagtgaaatcagatatgcctttgtccatggttcctgcaaagttcctactctttctctacctgagagcgagggtgtcttttctttcaaggttttccattctcgatttcccgagcttcatctgagcttaaaggtagtaatgttgtggactgagttatcttacaagttgcaatatgtttttacaatgagtagaaaatgccggttgttgataacatgtcctcttgatttacagaaacagcttacacctgctcaaatacttcaaagagatgagacatcttattcaaggatgggtttaacacctaaatcaaagatggcttcaaccacatattcaccggctctcagtagccaaactggcccgagcctgagggatgtggcacagttcactgaggtatatggccatcaccatttaagccacagatattgatgtctacatttcatttatgcctaggaaaagcagaacgatttctcgaatgatctaacttttgtttaccgagttaacttttgaattttcctgcagagctctaaagaaaatcttattggatacagtgaacacagagtggaaatagatgagcgcctacattgtttggaagctgaacaaaaccaggctaaggaagagttgcgtaccttgcaaggtaactattatcatttgaagaagttttgataactacgatggggattgaatttgcattgatgcttacctgctcatgttgcctaaacctttatctcagcttctctagaacctctcggtgctatgttcccagaatgcctatccaccaaagaatcaatgatgaaacagattgaagagaagcatcatgacactgcagcatcggttttctgttgtttgtacagaaagtcaccgcctccacagtctctgtttctgtcaaagaaaggagtatttggcctcgtagcacttcttggttcagttgcctccacctcccttagcaggtgacataaatttatagccacagtgttactactgatcatagtggccaaaacttttgtatctgaagtcatttggtatgcagggtgttatctgaatatttgggagaagacatgatgctcgctttggtatgcaaatcggcacaaattggaccgaatagtgctgagtatctcaggcttcaatctaatcatcggtttcatgttctatgtcttgatgcaatcaggtatttttcaacttttagatagctgaaccttagaatcgtttctgacagaataataaaagatttttggtggtttttccaaacacgcagaccttggaaggatggacttttggagaacgatcctcagaagaaattagccatggatgacccaaagctgcccgatggagatcccataccgggtttcaagggctatgccgtgaacatgattgatttggctccagaggagctcactgttcaaacttactcaggatacgggcttagagagactttgttctataatctctttgggaatttacaggtatatgagacccaaaagcaagttaaagcagctcttccacacatcaatggttgtggtgcagtttctttagatggttttatcgcaaaggaaaacggatttgtatattctggctgcaggtacctgaatttttcttgatccttgtatccatttatagtgcctgcatttaaaatcttccaagtctatcttcatgtcgtcttcttgtccaagttagctttcgagttttattcctttgcatctgtaagtaactgctgatgatatgatcttctatttttggattagcaaaccggaaattcatttcccgataacagtaaaggaggatgataagaagagaagctga

SEQ ID NO: 185664 - DNA, 313 bp, Arabidopsis thaliana landsberg
atcaaattatggatcttaatttagatgaaaatgagaatctaaaggctcggatcaaacaacttgaacatggtacgttttctctacaagtctctatgtggtagttatttagaccctggacatgtttataagcttatagaaatgggtttctaaagtcttacatttgcttctctgaagccttcttgaagtgtattctgctccattagtttgtcatctagtccaatctatttcatacgatagctatttcttattctcatgaccacttagcttttcccatttccctgccttctcagatgcaaaagatgattccttttag

SEQ ID NO: 185665 - DNA, 89 bp, Arabidopsis thaliana landsberg
atcaggaacttgctctccaacgcaaattcggaaacgtaggaatcctaagtctaacttaggtaaacgccaatgtatgcggcatggaattg

SEQ ID NO: 185666 - DNA, 267 bp, Arabidopsis thaliana landsberg
atggccgctgctttgaacgaaaaggactatctggatcaggttcacgcgctctggcgcaaggcgtgcccgaaaggcgcggcgcgcgagccgcagtatctccatggcgaggtggcgctgaccgaatacctgcgagcttgggcgaagaagcagccggagcatccggcggtgatcttctacggtcatgtcatgagctatgccgatctggataagcagagcgaccgtttcgcgtcgctgctgatgtccaagggcgtcaagaagggcgaccgc

SEQ ID NO: 185667 - DNA, 424 bp, Arabidopsis thaliana landsberg
agcttcggccaccgtggacagcccactccagccatcctctgggcaagccagtgcttcggctagctccgccagtagcccgtgaagcttgccaagccctcggacccggccggacttcaccggaggcccgagatcgacctcaccggacttcggtcttccgccgcagcgcgtggaccgagctatccagtgagtccccgcccaattccttgcgctcttatcttctctggcatcccgtggacctccctgacccatttgattgaactatctcgccgtgaccaggccggtctcctcgccgccgacgagcatccccgcctgcgcgcgtggaccgaccgactccggccatctccgacggcgttccgcacaccgttgtgatctccgagacctccccttcaccctcgaccacttcaccggaacagtctcgccgccg

SEQ ID NO: 185668 - DNA, 1033 bp, Arabidopsis thaliana landsberg
atgtcaagcgtgatccaatttttagacggtgtagccactcttcctcataacctgctagaccttgtgaattctcggataatcaatgaaggatttgataccttaggtgtaacgactgagtctatggaagcgagtagtaacgtttgcttggtcatgacggaatcgtttctctctagtggacgctaactaatgatcatttatattgtagggttgagattgtatgaaatggttgtttctctgtttccattaattaatagtaataagtgagaattacatagattgactctaattttaaagaaagagtaaaatcaaatctttgcaaaataactaatcaaaaattaaaacagctagggttgtctccaaatttagacgccttggtctcagaacctggctcgaaccgcaacatggtttcatcgcacgcatagctcataactcctgtggtcccttttctacaatccgttagaaacaactgcgatccgaacttcacttctctcttttctttgatatctttgataatccttttcctaatcaaaccgtcaatatcttcttctactaaaaccctaatttgttgagctgtgccagatttgagatcgatatacctattttatatgcaagcagttttttgtcagaattataaacagttttaaataaaatactataagattgatttataatcgaataaattatatataacctttgtgcagatgaggtaacaagattaatagtcttgtaaaacaatgaagcttgaatgtctccttggagacatatataggcattaggaaggttactggggacccttatcaataaatcccaatttgcactgagacgagtttgtgtaatattacgcacagtgaaatccatagaagctatttctatattcggcgcgacaggagtttcttggttcgctagcaaaccacaagctagcaatattgcccaggccaaaattagtaaacctagtaaccggagctcgccggaggtgtctcctgatgttcttcgtgtgtcactcattgtgtcacgattgaaggaagatgattga

SEQ ID NO: 185669 - DNA, 216 bp, Arabidopsis thaliana landsberg
gtacctcggacacacgacaatcttggagaatgcttgttagaagatgaagtaaaagaacatgatgatcatcaagatatcaagagtttgtctctttcgttatcatcttcaggttcatcaaaactcgaccgaaccattaggaaagaagatcaagctgatctcaaaaagagaaagatttcggtcttggcaagtccccttgatctcactctgcccatatga

SEQ ID NO: 185670 - DNA, 78 bp, Arabidopsis thaliana landsberg
aaacaacgcaaaccaagaaatcgatcgattgcatcgcaacaacttgaaatggtagctcataatcatgtgttgcattaa

SEQ ID NO: 185671 - DNA, 473 bp, Arabidopsis thaliana landsberg
atggagtccaatgggaaaattcgtactaataatagtaatgttttatggtaggtttaagcagttcacagtcaaatctggccgcgcatggatactttacccctcgtcttcctaacatatcgatcatatatatataaatgttatataaaaattagtctcgtatgtcacttttagcattccttttctgtgtgtgatgtacaataagtttgtatgtagtttgcatcatcgttaattaatcctcgttaatattatgacaatgtatgaagatataatataaggcgtataatgacatcgtgtgtttcctgttgtaattcgaaaaattaaagtttatgatcttcactcatctccactctctgtctgacacacatgtcttcttttatacatgttcagatccagatgtcatgtttcgatgatgaaactgcaaatctccttccatatgtttcatccacaactctctctctcttttttttaggtaa

SEQ ID NO: 185672 - DNA, 1127 bp, Arabidopsis thaliana landsberg
atgatgggagattccccaataatcatcgctaaggtaatgttatctttatcttttcttcagaggttattcttgaggtggaaattggatctgatggggtttgtcatctttgatgttagttccaaacgcaagaaatctactgcgttcgtgacgagaatggagaaatccaagaaggtgggcaggtaaaaaggaaactgtgaatcaaaatcataaatcaaaccccaaaacatatgtgcaatgccagagtccttaaagaatttgttgttgttgttggattcaggacacgatacacacggtgtaccatgaatgggcaatgcaacaagtggagacaacagaattaggggaagatgctatttatcccatttggaggctcagagagatgcgtagaaatggtgttcaagctctcatttaaatcttttaaccttataataaaagctaagcctctctaatcttctctgcaatgtactatttatatatatgaaaacataaaaaatttcttaaagcataatcattataaaataaagagagatttggatttaggaagcaccgtagagattaagcaagaagtggaatattattggccgcttctgtcttgtcttgcgtccgaattaagctgaaacaaacttctatataatcctctgcttatctgcctttgctttatccaccaattttttttctcatctctcttcactctctcaatctcaacaatcttaagagtcatgtcttgccttagaattaggcttttacctgccaaaagagcttggaaaagcttcaccgccagcttccataaactccggggatccaaaaccaaacaccacaccaagtacaaagcatcaacttcggacaaacatttccttcgttcaagccaccgatccagagagaatgttcgagacagagattcccgtgtttttttcatccgcctgaagagaggttgtttgttcaagaagaaacgcaaagatgttgtatatgtggataagctcttcagggagcctgtagctgtgtccaattggattccagcaaagcaatggaaaccgaaggaagaattgtttccggagaagggaatagacgaaagagctgaagagttcatcactagagtcaaagcagagattctcgcttcacgcaacttgtag

SEQ ID NO: 185673 - DNA, 479 bp, Arabidopsis thaliana landsberg
gtgatttggagctgtttgcgagcaaattggaagaaacgagccagaactagaagacatactcgaccaccaggtcgtgtgcatccagcaccatactcgacccccaagtcgagtaactttggagccattcttcccacctacttgaccccctggtcgagtatcctcagctcaggccactcgatgacattactcgaccccctggtcgagtatcacttcgccacaccaccttaccacactcgaccattcactctaccccgttactcgaccccctggtcgagtatcatcactcactaccatcaccatcactcgaccagacactcgatcacgtcttcacagtctactcaattcggcactcaaccagacaagctgagcaaaaggaagagaagaggaggagaagacaaagtgtttggaagcggcatggacctccatcggatcacgaagcccatgtcggcccattatctctctatgggccgagcgattag

SEQ ID NO: 185674 - DNA, 171 bp, Arabidopsis thaliana landsberg
ttattaattattagtattaagaaatataccaaccggcaaaaaggcaataacacaactcgtatgaagaaaaaagcgacgtccaaaatcttagtcgaagatagttcagaccaaaagagattggaagatggacgtgagacaaaagagagttacaaatatcagttacgtcgataa

SEQ ID NO: 185675 - DNA, 516 bp, Arabidopsis thaliana landsberg
  unsure (1)..(516): unsure at all n locations
atgatcattgtgatcctgatcatctctgtaagcctgatgggtattatcctttttctgatctacaaacaattcaatgaaaaacgcaagaccaaccagatcctggaaaaacgcaacagcgagatcgaggaacaacgccaactggtacacatcaagaatatagagctgttggaaaaaaacaaagaaattaccgacagtatccggtatgccagccggatccaaannnnnnnnnnnnnnnnnnnnnnnnagatcaaacgtatggtgccgcaggcctttatttttttcaagccaaaagacattgtcagcggtgatttttatttcctggaagatgatgggccttacctgtacattgccgttgccgattgcacgggccacggtgtgccgggtgcattcatgagtattgtgggatataacctgatcaaacacgccatatacgagcacaagaaatcggaccctgcctccattattgagcaggtgaacaaagacctggcgctgaccctttcgcaacacgacatgtaa

SEQ ID NO: 185676 - DNA, 427 bp, Arabidopsis thaliana landsberg
atgcagacgaggaatacttccttcgtcaactccttggcctgcaaaatcagaaaagacacggacactgcttactctaatgaccagagtataaagtgtatatgcgactacaccatgagcatcatttctgatattaggtatgccaattgtgaatgcaacctaggttacaaaggtaacccatatgattcggacggatgtagaggtcagtattatgttctttccttatgccctcctctttttttgtgtgtggaagcaagcatcctttctagagaagtttctttcatcgtttgactatcgtattttcatctttcaattatagatattgatgaatgtaaagagaatcccaaatattgtaaagaaacagacacttgtgtgaatttcgagggaggctatcgctgtgtgggcgataagactaaagcaataatgatag

SEQ ID NO: 185677 - DNA, 75 bp, Arabidopsis thaliana landsberg
gccggttcggcatcgtgcaggacgaactgaatctccagctcctgggcctgctcatcgaatgcccgcggcgtgtag

SEQ ID NO: 185678 - DNA, 925 bp, Arabidopsis thaliana landsberg
atgcaggatcaattaggagatgtgttacattggattcgacaagtggtgggattgatctctggattgttatggggctctattccacttgttggaggcatttggatcattctgtaagttttcattaactttggccactaatgtttctttccacatttgtgttttcatgttataatggttgatgaaaacgcaaaggaacagtctttagttttggatcatgttccagcttcgtttctatcagtttcttcgtgttttagtttcattttgcatcgacccaaagccgtagattcatggatcacagttctttgaaacctcttaagtttggcaaaactttgtgatgtaatgaactaatgatgggattttgcaggtttttggcgatatcctctgggatagtttatggttactacgcaatgattctcaaagttgatgaagaagatttcggaggccacgcagctttactccaagagggtctctttgcgtcacttactctctttttggtaagtttgttttcatctcaacagtacagactctttctttaacagtaattataaggtctaacagaatctgtttaatgttctgtcttcagctcgcatggattcttgtctatagcttggcacacttctgaaaaaaaagctgagcaacattcttttcactcagcagcaaaggcattggaactttggaacgaatctttttgttcttttgtttgtttttgtaaactgtctgaagataaggctacaagagacaaaacgttatagtaacaatttttatgaatcttttgaatgttacaaaagctttctatagtatcatttttacaatacacaattgagtagaaaccatcccaaaaaaatctttcttcttttgttagaattatgtaaactttgaacgccgatctctccttggccgtgaaacaaggtatatcctaccgtaa

SEQ ID NO: 185679 - DNA, 78 bp, Arabidopsis thaliana landsberg
gataatgcacggatggactcagctgcacaggcactacgcaagaaattcaagaaagatgtgttcgtagaaatcaagtag

SEQ ID NO: 185680 - DNA, 136 bp, Arabidopsis thaliana landsberg
atgacgaaggaagcggtatactcgtttggtcttcaaacaacgcaacttcaccaatcaaatgaagaaaccgtaactttaattaaatatgaaccatacaataatccaacctctcaaaattttgtccagagaccacaaa
